United States Patent Application Publication US 2024/0327476 A1 - sequence listing, part 108

SEQ ID NO: 206688 - DNA, 7359 bp, synthetic construct
  misc_feature 1..7359: note = Description of Artificial Sequence: Synthetic coding sequence
  source 1..7359: mol_type = other DNA
atggaccccagcggcgtgaaggtgctggagaccgccgaggacatccaggaaagacgccaacaggtactggatagatatcacagattcaaggaactctcaacactgcgacggcagaaactggaggactcctatagattccagttcttccaaagagacgcagaagagttggaaaagtggatccaagagaaactccagatcgcaagcgacgaaaactataaggatccaacgaatctgcagggcaagctgcagaaacaccaagcgtttgaggcagaggtgcaggctaattcaggagccattgtgaaactggatgagacagggaatttgatgatctcagaggggcatttcgctagcgagaccatccgaactcgcttgatggagctgcaccgtcagtgggagctcctgttagaaaagatgcgcgagaagggcatcaagctgctacaggcccagaagctggtgcagtacctccgagagtgtgaggatgtgatggactggatcaatgacaaagaagctatcgttactagcgaggagctcgggcaggatctcgaacacgtggaagtcctgcaaaaaaagttcgaggagttccagaccgatatggccgctcatgaggagcgagtgaatgaggtgaatcagtttgcggccaaacttattcaagagcagcaccccgaggaggagctgattaagacaaaacaggacgaggtgaacgccgcctggcagcgcttgaagggattggccctgcagagacaaggaaaactgttcggagctgcagaagtccagagattcaaccgggacgttgacgaaaccatctcgtggatcaaggagaaggagcagttaatggccagtgatgactttggtagggatctcgcttctgtgcaggcgctcctccggaagcacgagggtctcgaacgggacctggccgcgctggaagacaaggtgaaagccttgtgcgccgaagctgaccgcctgcagcagtcccacccactgagcgcgactcagattcaagtgaaaagggaggagctgattaccaactgggagcagattcgcactctcgcagctgaacgtcacgcccgtctcaacgattcctaccgactacagcggttcctggccgactttcgtgatttgacgtcctgggtcaccgaaatgaaagccctgatcaatgcggacgagttagcctctgatgttgccggcgctgaggccctgctcgaccgacaccaggagcacaagggcgaaatcgacgctcacgaggattcattcaagtccgcagacgaaagtggtcaggctttattagccgcaggtcattatgcgtccgacgaggtaagagagaagctgactgtgttatcggaagagcgtgccgcactgctggaactgtgggagctgaggaggcaacagtatgagcagtgcatggaccttcagctcttctaccgtgatactgaacaagttgataactggatgtccaagcaggaagccttccttcttaacgaggatcttggcgactcactggattccgtggaagccctgttgaagaaacacgaggatttcgagaagtccttatctgctcaggaggagaaaattacagctttggacgaattcgccacaaagctaattcagaataaccactacgccatggaggacgttgccacacgtagggatgcactgctctcgagaaggaatgccctgcacgagcgagcaatgaggcgccgggcccagctcgctgatagctttcacctgcaacagttcttccgcgacagcgacgagttaaaatcctgggtgaacgaaaagatgaagactgctaccgatgaggcctacaaggacccaagcaatctccaagggaaggtgcagaaacatcaggccttcgaagcagaactgtcagcgaaccagagccgcatcgatgcgctggagaaggctggacagaaattgatcgacgtgaatcattacgccaaagacgaagttgctgcaaggatgaatgaagtcatatcactctggaaaaaacttctggaagctacggaactaaagggaatcaagcttcgtgaggctaatcagcagcaacagttcaacaggaacgtcgaagatatagagctatggctatacgaggtagagggtcacttggccagcgatgattatggtaaagaccttaccaatgtccaaaatctgcaaaaaaaacacgccttattggaggctgatgtcgctgcccatcaggatagaatcgatggtataactatccaggcacggcagtttcaagacgccggccactttgatgcagaaaacattaagaagaagcaggaagccctggtcgctaggtatgaggcactcaaggaaccgatggtggcccgtaagcagaaactggctgacagcctgagacttcagcagctgtttcgtgatgtggaagatgaggaaacatggatcagggaaaaagagcctatcgccgcttcaacaaaccgagggaaggacctgattggcgtgcagaatctgttaaagaagcatcaagctcttcaagccgagattgctggacacgaacccagaattaaggctgtaactcagaagggcaatgcaatggtggaagagggccactttgcagccgaagatgtaaaagctaaactgcatgaacttaaccaaaagtgggaggccctcaaggcaaaggccagccagcgaaggcaggacctcgaggattctttacaggctcagcagtatttcgctgacgcaaacgaggccgaaagctggatgcgggaaaaggagcccatcgttgggtccacagactacggcaaagatgaggacagtgcagaagccctgttgaagaagcatgaggcccttatgagtgatctaagcgcctacggatcgtcaatccaggccctgcgcgagcaggcccagtcttgtcggcagcaggtggcgcccaccgatgacgaaactggcaaagaactggttcttgctttatacgactaccaggagaagtctcctcgcgaagtgactatgaaaaaaggcgatatcctcacactgcttaattccaccaacaaagattggtggaaggtcgaggtgaacgacagacagggatttgtgcccgctgcctacgtgaagaaactggaccctgcacagtccgcctcacgggagaacctgctggaggagcagggtagcattgcactcaggcaggaacagattgataatcagtaccattctctgttggaactcggagagaagcgcaaagggatgctcgaaaagtcttgcaaaaaatttatgctctttagggaggcgaacgagctgcagcagtggataaatgagaaagaagcagcactgacatcagaggaagtgggcgcagacttggagcaggttgaagtcctgcagaagaaattcgacgacttccaaaaagatcttaaggcaaatgagagtcgactgaaggacatcaataaggtagctgaggaccttgaatcagaaggcttgatggcggaggaagtccaagctgtgcagcagcaggaggtttatgggatgatgccgagagacgagacagatagcaaaaccgcctcaccatggaagtccgcgcgcttgatggtccacaccgtggcgacttttaatagcatcaaggagcttaacgaaaggtggcggtccctgcagcagcttgctgaggagaggagccagctattggggagcgcgcatgaagttcagcggtttcaccgcgacgccgatgagaccaaggagtggattgaagaaaagaatcaggccctaaatacggacaactatggacatgacctggcttccgtgcaggcgctgcagcgtaaacatgagggatttgagcgtgatctcgccgctcttggagataaagtgaattccctgggggaaaccgctgaaagactcattcaatcccaccccgagtccgccgaggacctgcaggagaagtgtacagagctaaaccaggcttggagtagcctagggaagagagctgaccagcgcaaggccaagttgggtgactctcacgatctacaacggttcctgagcgatttccgggatctgatgtcttggatcaacggaatcagaggcttggtttcatctgatgagttggccaaggatgtaaccggggcagaggcactgcttgaacgccatcaagaacatagaaccgagatcgacgcccgcgctggcactttccaagcttttgaacagttcgggcagcaactcttagctcacggacactacgcatcaccggagatcaagcagaaactggacatcttggaccaagagagagcggacctcgagaaggcctgggtccagagacgtatgatgctggatcagtgccttgaactccaactgtttcatcgtgattgcgagcaggctgaaaactggatggccgctcgggaggccttcctgaacaccgaggacaagggcgacagcttggattcagtggaggccctaattaagaagcacgaagatttcgataaggcaatcaacgtgcaggaagagaaaatcgctgctctgcaggcatttgctgaccagcttattgcagcaggacattacgccaagggggatatcagctctcgtcggaatgaggttcttgaccggtggagaagactaaaagctcagatgatcgaaaagcgctccaagctcggagagtcacagacgctgcaacaattctctcgcgatgtcgacgaaattgaagcatggattagcgagaagctgcaaaccgcatcggacgaaagctataaagatcctactaatattcagagcaagcaccagaagcaccaggcgttcgaggcggagctgcacgctaatgccgataggatccggggcgtcatcgacatgggtaacagccttattgaacggggtgcctgcgcaggatccgaggacgccgtgaaagctcgcctggcggctttggctgaccagtggcagtttctggtgcagaaaagcgcagaaaagagccaaaagttaaaagaagctaataagcagcagaattttaacactggaataaaggatttcgacttctggctgtctgaagtggaagccttgctcgcctcggaggactacgggaaggacctggcctcagttaacaaccttctaaagaaacatcagctgctagaagcagacattagcgcccacgaggataggttgaaagatctaaatagccaagcagatagcttgatgacgagctcggcgttcgacacatctcaagtcaaggacaagcgagacacaataaacggaagattccagaagataaaaagtatggcagccagccgccgcgccaaattgaacgagtctcacagattgcatcagttcttcagagatatggatgatgaggaaagctggataaaagagaagaagttactggtaggatccgaagattacggacgtgatttgactggggtccagaatctgaggaagaagcacaaaagactggaagcggaactcgccgcccacgaacccgcaatacagggcgtgctcgataccggaaagaagctctctgatgataacactattggaaaggaggagatccagcagcgcttggcacagttcgtggaacactggaaggagcttaagcagctggccgctgctcggggccagagactggaggagagcctcgagtaccagcagttcgtggcaaatgttgaggaggaggaggcttggatcaatgagaagatgacattggttgcctctgaagactatggtgacaccctcgccgccatccagggattgctcaaaaagcatgaggctttcgaaacggactttacagtccataaagatagagtgaacgatgtgtgcactaatggtcaggatctcatcaagaagaataaccatcacgaggaaaatataagttcaaaaatgaagggtctcaatgggaaggttagcgacctcgagaaagctgctgcccaaaggaaggccaaactggacgagaacagcgctttcttacagttcaattggaaagctgatgtcgtggaaagttggatcggcgagaaggagaactccctgaagacggacgattatggacgggatctaagcagcgtgcaaacccttcttactaagcaggagactttcgatgcaggcctgcaagcgttccagcaagaggggattgctaacattacagccctgaaggaccagctcctagctgcgaagcacgtgcagagtaaggctatcgaagcccgacacgctagtctgatgaaaagatggtcccagctgctggctaattctgctgcaagaaagaagaagctcctggaggctcagtcacacttccggaaggtggaagacttgttcctaacttttgccaaaaaggcttctgcctttaacagttggtttgagaatgccgaagaggatctgactgatccggtacggtgtaattctctggaagaaatcaaggccttgcgagaggcgcacgatgcctttcgcagtagcctcagttctgcacaagctgacttcaatcagctggcagagctcgatagacagatcaaaagttttagggtggcatctaacccttatacctggtttaccatggaggcgcttgaagaaacctggcgcaatttacagaaaattatcaaggagcgggaactcgaactgcagaaggagcaacggcggcaggaggagaacgataagctgcgtcaggagtttgctcagcatgcaaacgccttccaccagtggatccaggaaaccagatgccagcccgccggtgcgtcctgcatggttgaggaatcagggacccttgaaagtcagctggaagctactaaacggaagcaccaggagattcgggccatgcgttcccagcttaaaaaaatcgaagacttgggggccgctatggaagaggccctgatcctggacaacaagtataccgaacacagtaccgttggtctagcgcagcagtgggaccagctcgatcagttgggaatgcggatgcagcacaaccttgagcagcagatccaggccagaaatacaactggggtcacagaggaggctctaaaggagttctccatgatgtttaaacattttgacaaagacaaatcgggaagactgaaccaccaggaattcaagtcctgcctccgctcactcgggtacgatctgcccatggtggaagaaggagagcccgatcccgagttcgaagccatccttgatacagttgatccgaaccgtgacggtcatgttagcctgcaagagtatatggcgtttatgatttcacgcgagacagagaatgtaaaatcatccgaggagatcgaatccgccttccgggcactttcttcagaaggcaagccatacgtgaccaaggaggagttataccaaaatttaacgcgagaacaggccgactactgcgtctcacacatgaagccttacgtggatggcaaaggccgcgagcttccaacagcatttgattacgtggagtttactaggtctctatttgtgaactag

SEQ ID NO: 206689 - DNA, 1485 bp, synthetic construct
  misc_feature 1..1485: note = Description of Artificial Sequence: Synthetic coding sequence
  source 1..1485: mol_type = other DNA
atggccgccagccggcgggccaagctgaacgagagccaccggctgcaccagttttttcgggatatggatgacgaggagagttggatcaaagagaaaaagctgctggtgggcagcgaggattatggtagggacttgaccggggtgcagaatctacggaaaaaacacaagcggctggaagccgagttagcagcccatgaacctgctatccaaggggttttggataccgggaagaagcttagcgacgataacacgattggcaaggaggagatccagcagcggctagctcagtttgtagagcactggaaggagctgaaacagcttgccgcagctcgcggccagcggctggaggagtctctggaatatcaacagttcgtggctaacgtcgaggaggaggaggcgtggataaacgaaaagatgactttggtggcgtctgaggattatggtgacactttggcggcaattcagggcctgctgaagaagcacgaagcatttgaaacagacttcacagtgcacaaggacagagtgaacgatgtgtgcacaaacggccaggatctcatcaagaaaaacaaccaccacgaagagaatattagctccaagatgaaaggactgaatgggaaggtgagcgaccttgagaaagctgccgcccagcgcaaggctaaactagatgagaattctgcgttcctgcagttcaattggaaggctgacgttgtggagagttggataggggagaaggagaatagtctgaaaaccgatgactacgggagagatttgtcttccgtccagacactgcttactaagcaggaaacatttgacgcaggcctgcaggcgtttcagcaggaaggcatcgccaatataaccgccctgaaggatcaactgctggcagcaaaacatgtccagtcgaaggcaatcgaagcgaggcacgcaagccttatgaaacgctggtcacaactgcttgctaacagtgccgccaggaaaaaaaaactgcttgaagcacagtctcacttccggaaagtggaagatctgttcctgaccttcgctaagaaagctagcgcctttaattcatggttcgaaaacgccgaagaggatctcacggaccctgtccggtgtaacagtctggaagagatcaaagctctgagggaagcccacgatgcctttcgtagcagcttgagttccgcccaagccgactttaaccagctggctgagctggatcggcagattaaatcttttcgagtggccagcaacccgtatacttggtttaccatggaggctttggaagagacgtggaggaacctacagaaaattataaaggaaagggagctggagctgcaaaaggagcagcggcgccaggaagagaatgacaagctgcgccaggagtttgctcagcacgcaaatgcttttcaccagtggattcaggagactcgctgccaacgaaaggatggtcagctgcaaggaggcagagttggagatccccgcattcccgcctag

SEQ ID NO: 206690 - DNA, 7419 bp, synthetic construct
  misc_feature 1..7419: note = Description of Artificial Sequence: Synthetic coding sequence
  source 1..7419: mol_type = other DNA
atggaccccagcggcgtgaaggtgctggagaccgccgaggacatccaggaacgccgtcagcaggtactggataggtaccaccgctttaaggaactgagtaccctgaggagacagaagctggaagattcatatcgcttccagttttttcagcgagatgctgaggagctcgaaaaatggatacaggagaagctgcagatcgcgtccgatgagaattacaaagatcctaccaacctgcaaggcaaacttcaaaaacaccaggcattcgaggccgaagtgcaggccaattccggcgccatcgttaagctggatgagacgggcaaccttatgataagtgaaggccatttcgcttccgagacgatcagaacgagacttatggagctacaccggcagtgggaactgctgcttgagaagatgagggagaaaggcatcaaactactgcaggcacagaagctagtgcagtatttgagagagtgtgaggacgtgatggactggattaatgataaagaagcgattgttacaagtgaagagttggggcaggacctggaacatgtcgaagtcctgcaaaagaaattcgaggagttccagacagatatggccgctcacgaggagcgggtgaacgaggtgaatcagttcgcggccaagcttattcaagaacaacaccccgaagaagagctaatcaagactaaacaggacgaagtgaatgccgcttggcaacgcttgaaaggactggctctccaacgccaagggaagctgttcggagccgccgaagtccagcgttttaatcgagacgtggacgagactatttcttggatcaaagaaaaggagcagctaatggccagtgacgatttcggccgcgatttggcttctgttcaggcactcctccgcaagcacgagggcctcgagcgtgatctggccgccttggaggataaggtgaaggctctttgtgcagaggcagatagacttcagcaatcccacccgttatccgcgacccagatccaggtgaaaagagaggaactgataaccaactgggagcagataagaactctggctgccgagaggcatgccagactaaacgatagctaccggctgcaaaggtttctggctgacttcagagacttgacaagttgggtgaccgaaatgaaagcgctgattaatgcagacgaactggccagcgacgtcgctggtgctgaggcgcttctggaccgccatcaagagcacaaaggcgaaatcgatgctcacgaagacagtttcaaatccgcggacgaaagtggccaagcgctgcttgctgctggccactacgcatccgacgaggttcgggagaaactcacagttctcagcgaagagagggccgctctcctggaactttgggagctgagaagacagcagtacgaacagtgcatggatctgcagcttttttaccgggacaccgagcaggtcgataattggatgagcaaacaggaggcatttctgctgaacgaggatttaggcgacagtctggatagcgtggaagctctcctgaaaaaacacgaagactttgagaaatccctatccgcgcaggaagagaaaattacggctctcgatgaatttgctactaagcttattcagaataaccattatgccatggaggatgtcgccacaagaagagatgccctgttgtcacgcagaaacgccctccacgagcgtgccatgcggcggcgagcccaattggccgactcatttcacctccagcaattcttcagagactccgatgagttgaaaagctgggtaaacgaaaaaatgaagaccgcaactgacgaagcatacaaagatccctctaacctgcagggaaaagttcagaaacaccaggctttcgaggccgaactctccgcaaatcaatctagaatcgacgctctggaaaaggccggtcaaaagttaatcgatgtgaaccactatgccaaagatgaggttgctgctagaatgaacgaagtaatttctctgtggaaaaagctgctcgaagcgaccgaactgaagggtattaaactcagagaggccaaccaacagcaacagttcaaccgcaatgtggaggacatcgagctctggttatatgaggtcgaaggtcacctggcttctgatgattacggcaaagatctgacaaacgttcaaaacttacagaagaagcacgccctgctcgaagctgacgtcgccgcacatcaggaccggatcgatggcataaccattcaggcacgccaatttcaggacgcagggcattttgacgctgaaaatatcaaaaaaaagcaggaagccttagtcgcccgctatgaggctctgaaggaacccatggtagccagaaagcagaaactcgcggacagtctgcgtctccaacaactatttcgagacgtggaggatgaggaaacttggatccgtgaaaaggaaccgattgccgcaagtactaataggggtaaggatctaatcggcgtacagaaccttcttaagaaacatcaggcactccaggctgaaatagccggacacgagcctcggataaaagctgtaacgcaaaaggggaatgccatggtagaagaagggcacttcgccgccgaggacgtgaaggccaagctacacgagttgaaccagaagtgggaggcattgaaagctaaggccagtcagaggcgtcaggatcttgaagattccctacaggcccagcagtattttgccgatgcgaatgaggccgagagctggatgagagaaaaagagcccatcgtcggcagcaccgactacgggaaagacgaggacagcgcggaagccctgctgaagaagcacgaggcgctcatgagcgacctgtccgcttatggttcatccatccaggctctgagggaacaagctcaaagctgtcggcagcaggtggccccaactgatgacgagacagggaaagagctggttctagctttatacgactaccaggagaagagcccacgggaagtcactatgaaaaagggcgatatccttaccctactcaatagcaccaataaggattggtggaaagttgaggtaaatgaccggcagggattcgtgcctgccgcatacgttaaaaagctcgacccagcacagtctgcatccagggagaacctactggaagaacagggatctattgctctgcgccaggagcagatcgataaccaaactcggattacgaaagaagccggttcagtgagtcttagaatgaagcaagtcgaggagctgtatcactctctgcttgagctcggagaaaagcgaaagggcatgcttgagaagagctgtaaaaagttcatgctttttagagaggccaacgaactgcaacaatggattaacgagaaggaggcggccctgaccagcgaagaagtcggagctgatttggaacaggtcgaggtgctgcagaaaaagtttgacgactttcaaaaggacctaaaagctaatgagtcaagacttaaggacattaacaaagtcgctgaggacctggagtcagaagggctgatggctgaagaggtgcaagctgtgcagcaacaggaagtgtacggcatgatgcccagagacgaaactgactctaagacggcatctccatggaaatccgctcgcctcatggtccatacagtagctaccttcaacagcatcaaggaactcaacgagcgatggcgcagcttgcagcagttggctgaagaaaggtctcagctcctcggcagtgctcacgaagtacagcgcttccaccgagacgccgacgagaccaaggagtggatcgaggaaaagaatcaagccctgaacaccgataattacggacatgacctagcttccgtgcaggctctgcagcgcaagcatgagggctttgaacgagacctggccgccttgggcgataaggtcaattcactgggcgagaccgccgagcgacttatccagagtcatcccgagtcggccgaagacctgcaggagaagtgcacagagctgaatcaagcctggtccagcctaggcaagcgcgcagatcaaagaaaagctaagctcggggattctcacgacttacaaagatttctgtcggatttcagggacctgatgagttggatcaatgggatacggggactcgtgtctagcgatgagttggccaaggacgtaaccggcgctgaagcgctgctcgagaggcatcaagagcataggaccgagatcgatgccagggcgggcacctttcaggcttttgagcaattcggacagcagttgctcgcccacgggcactacgcgagtcctgagatcaagcaaaagttagacatactggaccaggagcgcgcagatctagagaaggcttgggtccagaggcgcatgatgctggaccagtgcctcgagctgcagttatttcaccgcgattgtgagcaggctgagaactggatggctgccagagaggcattcctaaacaccgaggacaagggtgattccctggacagtgtagaggccctgattaagaaacatgaggatttcgacaaggcaattaacgtccaggaggagaaaatcgcagccttgcaggcgtttgccgatcagcttatagccgccgggcattatgcgaagggcgatattagcagcaggcgcaatgaggtgcttgatcggtggcgacgactcaaggcccagatgattgagaaacgctctaagttaggtgagagccaaacactccagcagtttagtagggatgtggatgagatcgaggcttggatctctgagaaactgcagaccgcgtctgacgaaagttacaaggatcccaccaacatccagtctaaacatcagaaacaccaagccttcgaagcagaactgcatgccaatgctgatagaattcgcggagtcattgatatggggaactccttgatcgaacgaggggcatgcgctgggagtgaagatgccgtgaaggccaggctggccgcactcgctgaccagtggcagtttctcgtgcagaagagcgcagagaagagtcagaagttaaaggaagccaacaaacagcagaatttcaatacaggcataaaagactttgacttctggctgtctgaggtcgaggccctcctggcaagtgaggattatggaaaagacctggccagtgtgaataatttgctgaagaaacatcagttgctggaagcagacatctcggcccatgaggaccggcttaaagacctgaatagccaggcggacagcttgatgacttcttcagctttcgacacgtcgcaggtcaaggacaagcgggacacaattaacgggagattccaaaagattaagagcatggcagcgtcccgccgcgcgaagctcaacgagtcacaccgattacatcagttcttcagggacatggacgatgaggaaagctggatcaaggaaaagaaacttctggtgggatcagaagactatggccgcgaccttacgggagtccagaacctccgcaaaaagcataagcggctggaagccgagctcgctgcccatgaacctgccatccagggtgtgttggacaccgggaaaaagctcagtgatgataatactatcggtaaagaggagatccagcagcggcttgctcaattcgtagagcactggaaagaactgaagcaacttgcagccgctagaggccagcggctggaggagtctctggagtaccagcagtttgtggcaaacgtggaggaggaggaggcttggattaacgagaagatgacgttagtggccagcgaggactatggcgatactctggcagccatccagggcctgttgaagaagcacgaggccttcgagaccgattttaccgttcacaaggatcgagtgaatgatgtgtgcaccaatggacaggacttgatcaagaagaacaatcaccacgaggagaatatttcctctaagatgaagggcctcaacggcaaggtgtctgacttagagaaggcagcagcccagcgtaaagcaaaactggacgagaactctgcatttcttcagttcaactggaaggcggatgtagtggagagttggattggcgaaaaagagaatagtctcaagacagatgattacggcagagatctgagtagcgtgcagacactgttgacaaagcaggaaaccttcgacgccggtttgcaggcttttcagcaagagggcattgctaacatcactgcgttgaaagaccagctgttggcagcaaagcacgtccagtcaaaggccatcgaggctcgtcacgcgtccttgatgaaacgatggtcccagttactagccaattccgctgccagaaagaagaagctactcgaggcgcagagccactttcggaaagtagaagacctttttcttaccttcgccaaaaaggcgtccgcttttaatagttggtttgaaaacgcagaagaagacctgaccgatcccgtcagatgtaattcattagaagaaatcaaggccttgcgtgaggctcatgacgcatttaggtcgagcctgagcagcgcccaggccgattttaatcagctcgcagagctggatcgccagatcaagtccttccgggtcgctagtaacccttacacttggttcactatggaggcccttgaggagacctggcgtaacttgcagaagatcattaaggagagggaactggaattgcagaaggaacagcgcaggcaagaagagaatgacaagctccgtcaagagttcgcacagcatgctaacgcgtttcaccaatggatacaggagaccagaacctacctgcttgacggcagctgtatggtggaagaaagcggcacgctggaaagtcagttggaggctaccaaaagaaagcaccaggagatccgggccatgaggtcacagctgaaaaagatagaagacctgggtgcagccatggaggaagcgttgattctggataataaatatacggaacactcaacagtcggactggcacagcagtgggaccagctcgaccagctcgggatgcgaatgcagcacaacttggagcagcaaattcaggcaaggaatacaacaggggtaacagaggaagcactcaaggagttctctatgatgtttaaacactttgataaagataagtctggccgcctcaatcatcaggagttcaagtcctgtctacgctcattgggctatgatctgccaatggtggaggagggtgaacccgacccagagtttgaagccattttagataccgtggatccaaacagggacggtcatgtgtccctgcaggaatatatggcttttatgatctccagagaaacagagaatgttaagtcaagtgaggagattgaaagcgcttttagagctttgagtagcgaggggaagccatatgtgaccaaagaagagctttaccaaaatctcacccgcgaacaggccgattattgtgtgtcccatatgaaaccttacgttgatgggaaggggagggaactacccactgctttcgattacgtggaattcacgcgttcactctttgttaattag

SEQ ID NO: 206691 - DNA, 7434 bp, synthetic construct
  misc_feature 1..7434: note = Description of Artificial Sequence: Synthetic coding sequence
  source 1..7434: mol_type = other DNA
atggaccccagcggcgtgaaggtgctggagaccgccgaggacatccaggagcggcggcagcaggtgctagatagataccataggttcaaggaactctccactctaaggagacagaaactcgaggacagctatcgtttccaattctttcaacgcgatgctgaagagctggagaaatggatccaggagaaactgcaaatcgccagtgatgagaactacaaggaccccacgaatttacagggcaagctccagaagcatcaagcattcgaggctgaggtgcaagctaattcgggagccattgttaaactcgacgagacagggaatctcatgatatccgagggtcatttcgcctccgagaccatccgaactcgactcatggagctgcatcggcagtgggagctcttgctggaaaaaatgcgcgagaagggaatcaaactcctgcaggcacagaaattggtgcagtacctgagagagtgcgaagacgtgatggactggatcaacgacaaagaggcaatagtgacttcggaggaactcggccaggatctggagcatgtcgaagtactgcagaagaagttcgaagagtttcaaactgatatggcagcccatgaagagcgcgtgaatgaagtgaaccaattcgctgccaagctgattcaggagcagcacccagaggaagagctgatcaagactaaacaggacgaggttaatgcagcttggcaacgcctaaagggactggcactgcagaggcaagggaaactgttcggcgcagcggaggtgcagcgcttcaaccgtgatgtagatgaaacaatcagctggattaaagagaaagagcagctcatggcctctgatgattttggcagagatctggctagcgtgcaagccctgctgagaaaacacgaaggacttgaacgggaccttgctgcgcttgaggacaaggtaaaagctctctgcgcagaagctgaccgcttgcagcagagtcacccactgagtgcgacacagatccaagtaaagagggaagagctcatcactaattgggagcagatccgcaccctggccgccgagagacacgctagactgaacgattcatacaggttacagaggttcttggctgattttagagatcttacttcatgggtaacggaaatgaaagctctcattaacgctgacgagttggcctcagatgtagctggcgccgaggccctgctggacaggcaccaggagcacaagggagagattgatgctcacgaagacagcttcaaaagcgccgacgagtccgggcaggctctcctggccgccggccattacgccagcgacgaggtacgtgaaaagctgactgtgctttctgaggaacgcgccgcactcttggaactgtgggagctgcgccggcagcagtatgagcagtgcatggacctgcagttattctatagagataccgagcaagttgacaactggatgtctaaacaggaggccttcttgctgaacgaggatctaggagatagtcttgattcagtcgaggcactccttaagaagcacgaagactttgaaaagtcactatccgcacaggaggagaagataaccgccctcgacgagtttgccacaaagctgatccagaataatcactatgctatggaggatgtggctacacgccgcgacgccttactttccaggcgcaatgctctccacgagagggctatgcgaaggagggctcagcttgctgactcttttcacctgcagcagttttttagggacagcgatgagctgaagagctgggtgaacgaaaagatgaagacagctaccgacgaggcatataaagacccctccaacctccagggaaaggtgcaaaagcaccaggcgttcgaagctgagctgtctgcaaatcagtctcggattgacgctttggaaaaagccggtcaaaaactcatcgacgtgaaccactacgcaaaggacgaagttgcagcaagaatgaacgaggtgatctcactgtggaaaaagctcctggaggcaaccgagttgaaaggcatcaaactccgtgaagcgaaccagcagcaacagtttaaccgcaacgtggaggacattgaactctggttgtacgaagtggaaggtcatttagcaagcgacgattatggaaaggatctgacaaacgtgcagaatctccaaaagaaacacgctctactcgaagctgacgtcgctgcacaccaggatcgcatagatgggataactatacaggcccgacagtttcaagacgcaggccactttgatgccgagaacatcaaaaagaaacaggaagccctggtggccagatacgaggccttgaaggagcccatggtggctagaaaacagaagctggccgactctctgaggctacagcagctgttccgcgatgtggaagacgaggagacgtggatcagagaaaaggagcccatagccgcatcaaccaaccgtggtaaggatttgatcggagtccagaacctgctgaaaaagcaccaggcacttcaggccgaaatagccggtcacgagcctcgaataaaagccgtcacacagaaaggaaacgcgatggttgaagaagggcatttcgcagctgaagacgtgaaagccaagttacacgagctcaatcagaaatgggaggccctgaaggccaaagcctcacaacgacggcaggaccttgaggatagcctgcaagcacagcagtacttcgcggacgctaatgaagccgagagctggatgcgagagaaggagccaatcgtgggaagtactgactatgggaaggatgaggacagcgccgaggcccttctgaaaaagcatgaggcgctaatgagtgacctatctgcttacggcagcagtatccaggcccttcgggagcaggcccaatcatgtcgccagcaggtggcccccacagacgatgaaaccggtaaggagctcgtgctggccctgtacgattatcaggaaaagagccctagagaggtgacaatgaagaagggagatatactgactcttctgaatagcactaataaggattggtggaaggtggaagtcaacgaccggcaaggttttgtgccggccgcatatgtgaagaagttggaccccgctcagagcgccagccgggaaaacctcttggaggagcaggggagcattgcgctgcgacaggaacagattgataatcagactcgaattacaaaagaggcggggagcgtctcccttcgcatgaaacaggttgaagagttgtatcattcgttgctggaactgggcgagaagaggaagggcatgcttgaaaagtcttgtaaaaagtttatgctcttccgcgaagcaaacgagctccagcaatggatcaacgagaaggaggccgcacttacgagcgaagaggtgggagccgatctggagcaggtggaggtgctgcagaagaaatttgatgacttccagaaggatttaaaagccaacgagtcgcgcctaaaggacatcaacaaggtggctgaagacctcgagtccgaaggtttgatggccgaggaagttcaggctgttcagcagcaagaggtgtatggaatgatgccacgggatgaaaccgactctaagactgcatctccctggaagtcagcccgtctaatggtgcacaccgtcgccacattcaatagtattaaggagcttaacgagcgctggcggagcttacaacagctcgccgaggagagatcccagcttttaggaagcgcccacgaggtgcagcgcttccacagggacgccgacgagactaaagagtggattgaggaaaagaaccaagctctcaacacagacaactatggacacgatttagcctccgttcaggcattacagaggaaacacgaggggttcgaacgtgatcttgctgccctcggtgataaagtgaactcattgggggaaacagcagaacggctaatccagtctcacccagaatccgctgaagatctccaggagaagtgtacagaacttaatcaggcctggagttccttgggaaagcgtgctgaccagcgtaaggctaagctgggcgacagccacgacctccagcgcttcctctccgatttccgcgacctcatgtcgtggatcaacggcatccgcgggttggtatcaagcgacgaattggcaaaggatgtgacgggggcggaagctttgctagaacggcaccaagaacatcgcactgagattgatgcacgcgccgggacgtttcaggcgtttgagcagttcggacagcagcttctggctcacggccattatgcgagccctgagatcaagcagaagctggacattttggaccaggagcgggcagatctggagaaagcttgggtgcagagacgcatgatgttagatcagtgtttagagctgcagctcttccacagagactgtgagcaggctgagaattggatggcggcccgcgaggcctttctaaatactgaagacaaaggcgacagtttggacagtgtggaagcactaattaaaaaacacgaggacttcgataaagccatcaacgtccaggaggagaagattgcagctttgcaggccttcgccgatcagcttatcgctgccggtcactatgccaaaggggatatttctagccgtcgtaatgaagtgctagatagatggagaagactcaaggcacaaatgattgagaagcgctcgaagctaggagagtctcagactctgcagcaattttctcgggacgtggatgagatcgaggcttggatcagtgagaaactccagacagcaagcgatgagtcatataaagaccccactaacatccaacttagtaagctactgagtaagcatcagaaacaccaagcatttgaggcagagcttcacgccaacgctgatcgcattcgaggtgttatcgatatggggaatagcttaatagagcggggggcatgtgccggctctgaggatgctgtgaaagcccggttggcagcactggctgaccagtggcaatttctggtccaaaaatcagccgaaaagtcccaaaaactaaaagaagccaacaaacagcaaaatttcaatacagggatcaaggacttcgacttttggctcagtgaagtggaggctctgttggctagcgaggactatggcaaagatctggcctcagtgaacaatctgcttaagaaacaccagctcctcgaggcagacatctcggcccatgaggaccgcctgaaagacttgaacagtcaggctgactcactgatgacttcaagtgcttttgacacgtcacaggttaaagacaaaagagacacgattaatgggcgatttcaaaagattaagtctatggctgcttctagacgagccaagctgaacgagtctcataggctgcatcagtttttccgagatatggacgacgaggagtcttggattaaggaaaagaagctgctcgtcgggtcagaagattatggcagggatctgacgggtgtgcaaaacctacggaagaaacacaaaaggcttgaggcagaactggcagcacacgagccagccatccaaggtgttctggataccggcaaaaagctatcagatgacaatacaattggtaaagaggagatccagcagcgacttgcacagtttgtggaacattggaaagagcttaagcagctggccgcggcccgaggccagagactcgaggagagcttggagtaccagcagtttgtggcaaatgtggaagaagaggaggcgtggatcaatgagaagatgaccctggtggcctccgaagactacggagataccctcgccgccatacagggattgctaaagaagcacgaggccttcgagacagactttacggtgcacaaggatcgagttaatgatgtgtgcacaaatggtcaagatctgattaagaagaacaaccaccacgaagagaacattagtagcaaaatgaaaggcctgaatggaaaagtgagtgatctcgaaaaagcagccgcccagaggaaagccaagttagatgaaaattccgctttcctgcaatttaattggaaagcagacgtggtagagtcttggatcggtgaaaaggaaaattcccttaaaactgatgactatggcagagatctgagctcagtacaaactctgttgacaaaacaggagacgtttgacgcgggcctccaagcgtttcagcaagagggaatcgccaatataacagccctcaaggaccaactccttgctgcaaaacatgtgcagtctaaggccattgaagctagacatgcaagtctcatgaagagatggagccaacttctagcgaacagcgcagcaaggaaaaagaaactgctagaggcacagagccatttccgaaaagtagaggatctttttctgacttttgctaagaaggcatctgcattcaactcatggtttgaaaatgccgaggaggatctgacagatcctgtccgctgtaattctcttgaagaaattaaggcattgcgcgaagcacatgacgcgttccgttctagcctctcttcagcccaggccgactttaaccagctcgctgagctggaccgtcagattaagtcatttcgggtagctagcaatccttatacctggttcaccatggaggctttagaggaaacatggcgaaacctccagaagattatcaaggagcgggagctagagctacaaaaagagcagcgcaggcaagaggaaaatgataaacttagacaagaatttgctcagcatgccaacgcttttcaccagtggatccaggagacccgaacttaccttctcgacggatcttgcatggtcgaggaatccgggaccctagagagtcagctggaagcgacaaagcgaaaacatcaagaaatccgagcaatgcggagccaacttaagaagatcgaggatctcggcgctgccatggaagaggcgcttatcctggacaacaagtacacggagcacagcacggtaggactcgctcagcagtgggaccagctcgaccagttaggtatgaggatgcagcataatctggagcagcagatccaggcacggaatactacaggcgtgaccgaggaggcactgaaagagttttcgatgatgtttaagcacttcgataaagataagagcggcagactgaaccaccaggaattcaagagttgccttcgctccctgggttatgatctgcccatggtggaagaaggggagcccgatccagagttcgaggccattttggacaccgtcgaccctaaccgcgacggacacgtcagtttgcaggagtacatggcatttatgatttctcgagagaccgagaacgtaaagagttccgaggagatcgaatccgccttcagagccctgtctagtgaagggaaaccatatgtgacaaaagaagagctctaccagaatctcacgcgcgagcaggcggactactgcgtttctcatatgaagccctacgtggacgggaagggccgcgagttgcccacagcgttcgattacgttgagttcactaggtctctcttcgtaaattag

SEQ ID NO: 206692 - DNA, 3444 bp, synthetic construct
  misc_feature 1..3444: note = Description of Artificial Sequence: Synthetic coding sequence
  source 1..3444: mol_type = other DNA
atggagaacaaccgggacaaggtgctgagccccgtggacagcggcaacaaattagtcgcagagggcaacctatactctgataagattaaggagaaggtacagctcatagaggatcgccacagaaaaaataatgagaaggctcaggaggcgtcagtgctgctgcgggataacctcgaactccagaactttctgcagaattgtcaagagcttactttgtggatcaacgacaaattgcttacttctcaggatgttagttacgacgaggctcggaacctgcacaacaagtggctgaaacatcaagcttttgttgccgagctggcctcccacgaaggttggctcgagaatattgatgccgaaggaaaacaacttatggatgagaagcctcagttcaccgctctagtttctcaaaaactggaggctttgcaccgactgtgggacgagctccaggccaccactaaagagaagacccaacacctgtccgcagcaagatcctcagaccttcggctgcagacccacgccgaccttaataaatggatttcggccatggaagaccagcttagaagcgacgacccgggaaaagacctcaccagcgtgaaccgcatgctcgctaagctcaagcgcgtggaagaccaagttaatgttcgtaaagaggaattgggggagctgttcgctcaggtgccatcgatgggcgaagagggtggcgatgcagaccttagtatcgagaagaggtttcttgatctgttagaacctttagggcgccgtaagaagcagttggaatcatcccgtgctaaactgcaaatatcaagagacttagaggatgaaacgttatgggtagaggagcggttacccctggctcaatccgccgactatggaactaatctccaaaccgtgcaactatttatgaagaagaatcagacactgcagaacgagattttgggccacacgcccagggtggaggacgttttgcagcggggtcaacagctcgtggaagcggccgaaatcgattgccaggacctggaagagagactggggcacctgcagtcttcgtgggaccgcctaagggaagccgcggcagggaggctccaacgactgcgtgatgccaacgaagcccagcagtattatttagatgctgacgaagcagaagcctggatcggcgaacaggagctttacgtgatcagtgacgaaattcctaaggacgaggaaggcgcaattgtgatgttaaagaggcacttacgacagcagagggcagtggaagattatggaaggaacattaaacaacttgccagtcgggcccagggcctgctgtccgccgggcacccagaaggggagcaaatcattcggctacagggacaagttgataagcactacgccggactgaaagatgtagcggaggaacgtaagcgcaaattggaaaatatgtaccacctcttccagctcaagcgcgagacagacgatctggagcaatggatatctgagaaggaactcgttgccagcagccctgaaatgggccaagattttgatcatgtcacccttttgagagataaatttagagattttgcaagggaaaccggcgccatcgggcaagagagagtggataacgtgaacgcatttattgaaagacttattgatgcaggacatagcgaggccgcaacaattgccgaatggaaggatggcttgaatgaaatgtgggcagacctcctggaactgatagatacccggatgcagttactcgcagcgagctatgacctgcaccggtatttttatacaggcgccgaaatcctgggccttattgacgagaagcacagggaactgcctgaggacgtgggacttgatgccagcacagctgagtctttccatagggtgcatacagcatttgagcgggaattgcacctgcttggagtccaggttcagcagtttcaagatgtggccacccgcctgcagaccgcttacgcaggggagaaggccgaggctatacagaacaaagagcaagaggtgagcgctgcttggcaggctcttctcgacgcctgtgccggtcggcgcacacagctggttgacaccgccgacaaatttcgtttcttctcaatggccagagacttgctcagctggatggaaagtattatccggcaaattgagactcaggaacggccccgggacgtctcctcagtcgagctgcttatgaagtaccaccagggcataaacgccgagatcgagacaaggagtaaaaacttcagtgcttgtttggaactcggtgaatctctgctgcagagacagcatcaggcttccgaggaaattcgcgagaaactgcaacaggtaatgtccaggcggaaagagatgaacgagaaatgggaagcccgttgggaacgcttaagaatgcttcttgaagtctgccaattcagcagagacgcaagtgttgctgaggcatggttgatcgcacaggaaccttatctcgcaagcggagattttggacacacggttgactccgttgagaagctgattaaacgacacgaggcctttgagaagagcaccgcctcgtgggcggaacgtttcgccgctctggagaagcccaccacccttgagttgaaagaaaggcagatcgcagaacgtccagccgaagagaccgggccgcaggaagaagagggtgagactgccggggaagcaccggtctcacatcacgcagcgacagaaaggacatcgcctggagaggaggaaggcacctggccgcaaaacctgcagcaaccgccaccacccggccagcacaaagatggacaaaaatcaactggcgacgaaagacccactacagaacctttgtttaaggtcctagacacacccttgtctgagggtgatgagcccgctactttgccggcgccccgggatcacggtcaatctgttcagatggaaggctacctgggacgtaagcatgacctggaggggcctaacaaaaaggcttccaactccaaaggagaggaaggtgaggagcgtcgtgagaccgaagaagaggacgaagaagaagaggagacagagtcagtcgccgtggaaatgcaacagcacgcaagccacgtgtcctggaataatctgtactgtgttctgcgcaattccgagcttaccttttacaaggatgcaaagaacctcgcactgggcatgccatatcacggggaagagccgctggctctccgacacgcaatttgcgaaatcgctgcaaattataagaagaagaagcacgtgttcaagttacggctctccaatggatccgagtggctattccatgggaaagatgaggaagaaatgctgtcctggctccaaggagtaagcacagccattaacgaaagccaatccatcagggtcaaggctcagagcctccctctcccttctctctctggcccagacgcatctttaggcaagaaagataaggaaaaacgcttcagctttttcccaaaaaagaagtag

SEQ ID NO: 206693 - DNA, 6321 bp, synthetic construct
  misc_feature 1..6321: note = Description of Artificial Sequence: Synthetic coding sequence
  source 1..6321: mol_type = other DNA
atgaccagcgccaccgagttcgagaacgtgggcaaccagcccccctattctaggatcaatgccagatgggatgccccggacgacgaactggacaacgacaactcttctgcccggctgtttgaacgaagtaggataaaagctctggccgacgagagagaagtggtgcagaaaaagacgttcactaagtgggttaattcccacctcgcacgtgtctcatgtcggattaccgatctttacaaagacttgcgagacgggcggatgctaatcaaattacttgaggtgctttctggagaaatgctgcctaagccaaccaaaggcaaaatgagaatccactgcttggaaaatgtcgacaaggctcttcaattcctgaaagagcaacgcgtacacttggagaacatgggctcccacgacatcgtggacggcaaccaccgccttgtattgggactcatttggactatcatcttgcgtttccagatccaggacatcgtcgtgcaaacccaagaggggagggagacccgatctgctaaggacgcactgctgctgtggtgccagatgaaaacggccggttatccgcacgtaaacgtgaccaattttacgtcttcctggaaagatggcttggccttcaatgcgttgatccacaaacaccgccctgatctgatcgactttgacaagctcaaggatagcaatgctagacataacctcgaacacgccttcaatgtagccgaacggcagcttgggatcatcccgttgctggatcccgaagacgtctttacagagaatcctgacgaaaagagcataatcacgtatgtggtcgcattttatcactatttcagcaagatgaaggtactggccgtggaaggaaagcgtgtcggcaaagtgatcgaccatgcaatcgagaccgagaagatgatcgagaagtactccggtttggccagcgatctgttgacctggattgaacagaccattacagtgctgaacagcaggaagtttgccaattctctgacaggcgtacagcagcagcttcaggcattcagtacctatcggaccgttgaaaagcctcctaagttccaggagaagggaaatttggaggttctcctttttaccattcaatcacgcatgagggcgaataatcagaaagtgtatacgccacacgacggcaaacttgtgtcagatatcaatagggcatgggaatccctcgaggaggccgagtaccggcgagaactggctttgagaaatgaactgattaggcaggaaaaactcgagcagttggctaggaggttcgaccgtaaggcggccatgcgggaaacttggctctccgaaaatcagcgactcgtggcccaggataattttggctacgacctagccgctgttgaggcagccaagaagaaacacgaggctatagaaaccgacactgccgcatacgaggagagagttagagcccttgaggacctcgcccaggaattggaaaaagaaaactaccacgaccagaagcgtatcaccgctcgtaaggacaacattctgcgtttgtggagctaccttcaggaactcctgcaatcccggcgccaaagactggaaacgacactagctttgcagaaactcttccaagacatgcttcattctatagattggatggatgagataaaggctcatctgctgtcagccgagttcggcaagcacttactggaggttgaagacctgctccagaagcacaagctgatggaggccgacatcgctattcagggagacaaggtcaaagccattacggcggccacactcaagtttaccgaggggaagggataccagccctgtgatccccaggtgattcaagatcggattagccacctggagcagtgctttgaggaactgagcaacatggctgcgggccgcaaggcacagctggagcagagcaaacgactgtggaaattcttctgggaaatggatgaggctgaatcctggattaaggaaaaggaacagatctacagtagccttgattacgggaaggacctcacctctgtgctaatccttcagagaaaacataaagcatttgaggatgaactcaggggtctcgatgcccatttggagcagatctttcaggaggcacacgggatggtggcaagaaaacagttcgggcatccccagattgaagcccggattaaggaagtttccgcacagtgggaccaactcaaagacctggctgccttctgcaagaagaacctccaggacgccgaaaacttctttcagtttcagggtgatgcagacgacttaaaggcctggctacaggacgctcacaggctcctctctggtgaagatgtcggccaggacgaaggtgccactagagcattaggcaaaaagcacaaggactttctcgaggaactagaagaatctaggggtgtgatggaacatctggagcagcaggcacaaggatttcccgaagaatttcgcgattcccctgatgtcacccacaggcttcaagcactgcgcgaactgtatcagcaggtagtggcgcaggccgacctccgccagcagagattgcaggaagccttggatctttatactgtgtttggggaaacggacgcctgcgaactgtggatgggagagaaagaaaaatggctggctgagatggaaatgcctgacactcttgaggacctggaggtagtccagcaccggttcgacatactggaccaagaaatgaagacactgatgactcaaattgacggagtgaacttggcagccaacagtcttgtcgagagcggccaccctcgctctagagaggtgaaacagtaccaggaccatctgaatacacggtggcaggctttccagacactcgtgtcagagaggcgagaagctgtcgacagcgccctgcgcgtgcacaactattgcgtggactgcgaggagacctctaagtggatcactgataaaaccaaagtggtcgaaagcacaaaagatctaggtcgcgacctggctggaattattgccatccagagaaagctgtccggcctggaacgggatgtagcagcaatacaagcaagagtggacgccctcgaaagagagtcccagcaattaatggattcccacccggaacagaaggaagacattggtcagcgacagaagcatctagaggagctatggcagggcctgcagcagagcctgcaaggacaggaagatctcctcggtgaggtttcacagctgcaggcctttttacaggatctggatgatttccaggcatggctttctataacccagaaggcggttgctagtgaagacatgcccgagtccctgcccgaggctgaacaacttctgcagcagcatgccgggattaaggatgagatcgatggccaccaggactcttaccagcgagtcaaggagtccggtgagaaagtaatccaaggccagactgacccagagtatctgcttttgggccagaggctggagggactcgatactggctggaatgctttggggcgtatgtgggagagccgctcccatacattagcccagtgtcttgggtttcaggagttccagaaagacgccaagcaagctgaagctatcctgtcgaaccaggagtacacattggcacacctcgaacctcccgattcattagaagcagccgaggccggaatccgtaagtttgaggactttctcgggtcaatggaaaataacagggacaaggtcctgagccctgtggacagcggcaataaactcgtggccgagggtaacctgtattcagataagatcaaggagaaggtccagctgattgaagataggcatcggaaaaacaatgaaaaagcacaggaggcaagtgtccttttacgcgataacctggagctgcagaacttcttgcagaattgccaagaactaacactctggataaacgataagctactgacctcccaagacgtgtcctatgatgaggcccgtaatctacacaataagtggcttaaacaccaggcttttgtggccgaactggcttcacatgagggctggttagaaaatattgatgccgagggaaaacagctgatggacgaaaagcctcagtttactgccttagtgtcgcagaaacttgaagccctgcaccgcctctgggacgaattgcaggctacaaccaaagaaaagacccagcatctttccgccgctcgctcttccgacctccggttgcagactcatgcagacttaaacaaatggatttctgcaatggaagatcagctgcgatctgacgacccaggtaaagacctaacttccgtcaaccgtatgctggccaagctcaagcgggtagaggaccaggtgaacgtcaggaaagaagagttaggggagctcttcgctcaggtcccctctatgggagaggaggggggcgatgccgacctgtccattgagaaaagattcctggatcttctcgaacccttgggcaggcggaagaagcaactggaatcgagccgcgccaagctccagatttccagagatctggaagacgaaaccttgtgggttgaggagaggcttcccctcgcacagtcagccgattatggaactaacctccagacggttcagctgttcatgaagaagaatcagactctacagaatgagatactgggtcatacccctcgggtggaagacgtgctgcagcggggccaacagctggtagaggcggcagagatcgactgccaggacctggaggaacgcctggggcatctgcagagctcgtgggacagattaagggaggccgccgcggggcggttgcagcgactgcgcgatgctaatgaggctcaacagtattatttggacgcggacgaagcagaggcatggattggtgagcaggagctttatgtgattagcgatgagatacccaaagatgaggagggggccatcgtaatgttaaaacggcatctaagacagcaacgggccgtcgaggattatggcagaaatattaagcagctcgcctcccgagcacagggtcttttgtccgccggccaccctgaaggtgagcagattatcagacttcagggccaggtggataagcattatgctgggctgaaagacgttgccgaggagcggaaaagaaaattagagaatatgtaccatctgttccaattaaagcgcgagaccgatgacttagagcagtggatcagcgagaaggaactagtggcaagcagccctgagatggggcaggacttcgaccatgtgaccctgttgcgggacaagtttagggacttcgctcgagaaactggggcaattggccaggagagggtcgataacgttaatgcttttatcgaaaggctgatcgatgccggccattcggaggcggccaccatcgccgaatggaaggatggattaaacgaaatgtgggcagacctgttggagttgatcgacacacgaatgcagttactggctgcgagttacgaccttcacaggtacttctacacaggtgccgagattttagggctgatcgacgaaaaacatagagagctgcctgaagatgtcggtttggacgctagcacagcggagtcctttcaccgggttcacacagctttcgagagggagcttcaccttcttggcgttcaggttcagcaattccaagatgtggctactaggctgcagaccgcttacgctggggaaaaggccgaggccatccagaataaggagcaggaagtgagcgcggcttggcaagctctactcgacgcctgtgccggccgtcggacgcagttagtcgataccgctgacaagtttaggttcttctcgatggcacgggatctcctcagctggatggagtccattatacgtcagattgagactcaggagaggccgagagacgtttcatccgtggagcttctgatgaaataccaccaaggcataaacgccgagatcgaaaccagatctaagaatttctctgcctgcttggaactgggggaatccttgctgcaaaggcagcaccaagcgtccgaggagattagagagaaattacagcaggtgatgagtcgcagaaaagagatgaacgagaagtgggaggcccggtgggagcgactccggatgctgctggaagtgtgtcagttcagccgcgacgcctctgttgcagaggcgtggctgatcgcccaggagccctacttggcatccggtgattttggtcataccgttgattcagtggaaaagttgattaagcgtcacgaggccttcgaaaagtccacagccagctgggccgagcgcttcgccgccctcgagaagccaactaccgcttctagaggagggcgccgcgattcccgggggggatccagctttcccccctgcggccatcgcgagaacgtgcctggtcagtccttagtgtcctttgtgtag

SEQ ID NO: 206694 - DNA, 6414 bp, synthetic construct
  misc_feature 1..6414: note = Description of Artificial Sequence: Synthetic coding sequence
  source 1..6414: mol_type = other DNA
atgaccagcgccaccgagttcgagaacgtgggcaaccagcccccctacagccgtattaatgcacgatgggacgcacccgatgatgagcttgacaatgataactcttctgcccgcctgtttgagcggtcacgcattaaagcacttgctgacgaaagagaggtggttcagaagaaaacgttcactaaatgggtcaactctcaccttgcgcgggtatcatgtaggatcaccgatctgtataaagatttacgggatggcagaatgcttattaaacttctggaagtgctgagcggggagatgctgccgaagccaacaaaggggaaaatgcggatacactgcctggagaatgtcgacaaagccctgcagttccttaaggaacagagagtgcacctggagaatatgggtagtcacgacattgtggacgggaaccacaggttggttctgggcctgatttggaccattattctgagatttcagattcaggatatagtggtacagacccaggagggacgggagaccagaagtgctaaagatgcactcctgctgtggtgccaaatgaagaccgcaggctatccccacgtaaatgtcacaaatttcacctcctcctggaaggacggtctggcttttaacgccctgatccacaagcatcgacccgatctgatcgattttgataaactgaaagacagcaatgctaggcataacctggagcatgcgtttaacgtggcggagaggcagcttggaatcattcctctgctggatcccgaggatgtctttaccgagaatcctgatgagaaaagcattattacttacgtcgtggcattttaccactacttttccaagatgaaggtgctcgccgttgagggcaagagagtcgggaaagtcatcgatcacgcgatagaaacggagaagatgatagaaaagtattcagggttggcctccgatttactcacctggatagagcaaactattaccgttcttaatagccgaaaatttgctaattctctaacgggggtgcagcagcaattgcaggcattttccacataccggacagtggaaaagcctccaaaattccaggagaagggcaaccttgaagtgttactgtttaccattcaatctcgaatgagagcgaataatcagaaggtttacaccccccacgacggcaagctcgtgtcagatatcaacagagcttgggagagtctggaagaagccgaataccgaagggagctggctctccgaaatgaactgattagacaggagaagctagaacagctggccagacgattcgaccggaaagccgccatgagagagacatggctgagcgagaaccagcgactggtggctcaagacaactttggatatgatctggcagcagtcgaggcggccaaaaagaaacacgaggccatcgaaactgacactgccgcctacgaagagagagttcgcgctctggaggacctggcccaggaactggagaaagaaaactatcacgaccagaaacgcattaccgccaggaaggacaatatcctcaggctgtggagctacctgcaggaactcctgcagagtcgacgacaacgtctggaaactacacttgccctgcaaaagttattccaggatatgctccactcgattgactggatggacgaaataaaagctcaccttctctctgcagagtttgggaaacaccttcttgaggtcgaagatctactgcagaagcacaaacttatggaggccgatatcgccatacagggtgataaggtgaaggcaattacagcagcgaccctcaaattcactgagggcaaaggataccagccatgcgaccctcaagtcatccaggaccgcataagccatctcgagcagtgttttgaggaattgagcaatatggccgccggcaggaaggctcagctggagcagtcaaagagactatggaagttcttttgggagatggatgaagccgaaagctggataaaagagaaagagcagatctattcgtccctagactatgggaaagatctgacgagtgtgctgatattgcagagaaaacataaagcttttgaggacgagcttagaggattggacgcacacctggagcaaatcttccaagaggcccatggcatggtcgcgcggaaacagttcggccatcctcaaattgaggccagaattaaagaagtgtccgcccagtgggatcagctcaaagatttagctgctttttgtaagaaaaatctgcaggacgccgagaattttttccagtttcagggcgacgccgatgatttgaaagcttggctgcaggatgcgcaccgattgctaagtggagaggacgtaggccaagacgagggggccactagagcattaggcaagaagcacaaggatttcctcgaagaacttgaagaatctcggggggttatggagcacctggagcagcaggcccagggctttccggaagagtttagagactccccggacgtaacacaccggcttcaggccttgagagaactctatcagcaggttgtggcacaagcagatctgcgccagcagcggcttcaagaagccctggatttgtatacagtgttcggggaaaccgacgcctgtgagctgtggatgggggagaaagagaagtggcttgccgagatggaaatgcctgataccttggaggacctagaggtggtccagcaccggttcgatatcctggatcaggagatgaagaccctgatgactcaaatcgacggagtgaatctcgctgcaaactcactggtcgagagtggccatccaaggtctagggaagtaaagcagtaccaagaccatcttaatacgagatggcaggccttccaaactctggtgtctgagcgtagggaagccgtcgatagcgctctgagagtccataattactgtgtggattgtgaggagacctctaaatggatcaccgacaagaccaaggtcgtcgaaagcaccaaagacctgggtcgcgacctcgcaggcataatcgcaatccagcgtaagttgtcaggcttagagagagacgttgcagccatacaggctcgagtggatgctcttgagagggaaagccagcagttaatggatagccaccctgaacagaaggaggatatcggacagaggcagaagcaccttgaggagctgtggcaagggcttcagcagagcctgcagggtcaggaggacctcttgggggaggtctctcagctccaggctttcctccaggacctagacgattttcaggcttggctgagtattacacagaaggctgtagcctccgaggatatgccggaatctttgcctgaggccgaacagctgctacaacagcacgccgggattaaagacgagatcgatggccaccaagatagttatcagcgggtaaaagagtcgggcgagaaggtgattcaaggtcagactgatcccgagtatttactcttgggacagcggctggaggggctggacactggctggaacgccctgggaaggatgtgggaatcacggtctcatacgctggcccagtgtctcggattccaggagttccaaaaggatgctaaacaggccgaggcaatcctgagcaatcaagaatacacattggcgcacctagaacccccagatagcctggaggccgcagaggcaggaatccggaaatttgaagattttctgggtagcatggagaataatagggataaagtcttgagtccagtggactctggcaacaaacttgtggcagagggaaatctctattctgacaagatcaaggagaaagtgcagctaatcgaggaccgccaccgcaagaataacgaaaaggcacaggaggcctccgtcctgctccgagataatctggagctgcagaacttcctgcagaactgtcaagagctgaccctgtggataaatgataaactcttgacctcgcaggatgtttcttacgacgaggcccggaacctgcacaataagtggctgaaacatcaggcctttgtcgccgaactagcttcccatgaaggatggctggagaacatcgatgccgaaggcaagcagctgatggatgagaagcctcagttcactgccttagtgtctcagaagctagaggcactgcacagattgtgggatgaactgcaggcaactactaaagagaaaacccaacatctgagcgctgcgcgcagttccgatcttcgacttcagacccatgccgacctgaacaagtggatctcggccatggaggaccagctccgctctgatgaccctggcaaagaccttacatccgtgaacaggatgctggcgaagctcaaacgcgtggaggaccaggttaatgttagaaaggaggagctcggcgagctttttgctcaggttccctcaatgggtgaagagggaggtgacgcggatctttccatcgagaagagattcttggacctcttggagcctctcggaaggcggaaaaagcagctagaaagctcgagggccaaactgcagatttccagagacctggaagatgagactctgtgggtcgaggaacgcttgccattggctcagagcgccgactacgggaccaatttgcaaacagtgcagttgtttatgaagaaaaaccaaaccttgcagaacgagatcttgggccatacacctcgtgtagaagatgtgttacaaagaggtcaacagctagtggaagccgctgagattgattgtcaggacctcgaagaacggttaggccatctgcaaagcagttgggatagacttcgagaggctgcagctggaaggttgcaacgcttacgagacgccaatgaggcccagcagtactatctggatgcggacgaggctgaagcttggattggggagcaggagttatatgtgatatctgacgagatacccaaagatgaggagggggcgattgtgatgctgaaaaggcatctaaggcagcagcgcgccgtggaggattatggcagaaatattaagcaattggccagccgtgctcaaggtctgttatctgcagggcatcccgaaggcgagcagatcataaggctgcaaggacaggtggacaaacactatgcaggtctaaaagatgtcgctgaggaaagaaaaagaaagctcgagaacatgtaccacctctttcagctcaaaagagagaccgacgatctggagcaatggataagcgaaaaggaactggtggccagttcacctgaaatgggccaggattttgaccacgttacactcctacgcgacaaatttcgggacttcgcaagggaaaccggtgcaatcgggcaggagagagtcgataacgtaaacgctttcatagagcggctcatcgatgcagggcacagcgaagcagcaacaatcgcagagtggaaagacggactcaacgagatgtgggcagatctgctggaactgattgacacgaggatgcagctcttggccgcaagttacgacctgcatcgctatttttacaccggtgcagaaatcttggggcttattgatgagaagcacagagagttacccgaagatgtgggtctggacgcttccaccgcagagagttttcatagggtacacacggctttcgaacgcgagttacacctgctgggtgttcaggtccaacaattccaagatgtggccacacgcttgcagaccgcctatgccggagagaaggctgaggctatccagaacaaggagcaggaggtgagtgcggcctggcaggccttgctcgacgcctgcgccgggagacgcacgcagctggtagatacggccgacaagttccgcttcttctcaatggccagagacctgctgtcgtggatggagtctattattcggcagatagagacccaggagcgcccccgagatgtctcatccgtggagctgctcatgaagtaccatcaaggtataaacgcagagatagaaaccagaagcaaaaatttttctgcttgtcttgagctgggcgaatctctccttcagcgccagcaccaggctagcgaagagatcagagaaaagctgcaacaggtgatgtcccggcggaaagaaatgaatgaaaaatgggaggctcgatgggagaggctccgcatgctgctggaggtttgtcagttcagccgcgatgcctccgtcgctgaagcgtggctgattgcccaagaaccttatctggcctctggcgactttgggcacactgtggacagcgtggagaaactgattaagaggcacgaggctttcgaaaagagcacagcttcctgggccgaacggttcgccgcattggagaaacccacaactctggagctgaaagagcgccagattgctgagcggccagccgaagaaacgggacctcaagaagaggaaggcgagacagcaggcgaggcccccgtgagtcatcatgcagccacggagcgaacgtctcccgtgagtctgtggagtcggctgtcctcctcctgggagtctctccagcccgagccatctcacccatactag

SEQ ID NO: 206695 - DNA, 6987 bp, synthetic construct
  misc_feature 1..6987: note = Description of Artificial Sequence: Synthetic coding sequence
  source 1..6987: mol_type = other DNA
atgaccagcgccaccgagttcgagaacgtgggcaaccagcccccctacagtcgcattaacgcccgctgggacgcaccagatgatgagcttgataatgacaattcctctgcaaggctctttgagaggtcccgaatcaaggcgctggccgatgagcgggaagtcgtgcagaagaagacgttcacaaaatgggtaaactctcacctggcccgggtttcatgtcggatcactgacttgtacaaagatcttcgtgacggacgcatgctcatcaaactcctggaggtgctttcaggggaaatgttacctaagccaactaagggcaaaatgcgaattcactgtctggaaaatgtcgataaggcactgcaatttcttaaagaacagagggtgcatctggaaaatatgggaagccacgacatcgtggacggtaaccaccgtctggtgctcggactcatttggactatcatcctgcgtttccaaatccaggacattgtcgtgcaaacccaggagggtagggaaaccaggtcggccaaggatgccctgctcctttggtgtcagatgaaaactgctggctacccccacgttaacgtgaccaacttcacgagttcttggaaagacgggctcgccttcaatgctctcattcacaagcatcgtccggacctgattgatttcgataaactgaaagattctaacgcaaggcataaccttgagcacgccttcaatgtggcagaacgccagctaggcatcatccccttactggacccagaggacgtcttcacggaaaatcctgacgagaaatccattataacctacgttgtggccttttaccattatttttccaagatgaaggtgctagccgtcgagggcaagcgcgtaggaaaagttatagaccatgctatcgagactgagaaaatgatagaaaaatactctggactggcatctgatcttctgacatggattgagcagacaattaccgtgctgaactcccgcaaatttgccaactccttgacaggcgtccaacagcagctgcaggcctttagcacgtaccgtacggtggaaaaaccacccaagttccaggaaaagggaaatctggaggtgctcttgtttaccatccagagcagaatgcgcgccaacaatcagaaggtgtataccccccacgacgggaagctagtttctgatataaatagagcttgggagagcttagaagaagccgagtaccggcgagagcttgcccttcggaacgagctgatccggcaggaaaaacttgagcagctagcccgcaggtttgacagaaaagcggccatgagagaaacctggctgtcggagaatcagcgattggtcgcccaggacaacttcgggtatgatctcgctgcagtggaagctgcaaagaagaaacacgaggctatcgagacagatacagccgcatatgaggagcgtgtgcgtgcactagaggacctcgcccaggagttggaaaaggaaaattatcatgatcaaaaaaggatcaccgcgcggaaggataacatcctgagactctggagctacctccaagagctgctgcagagccgacggcagcggctcgagactacactcgccctgcagaaactctttcaggacatgctccattccatcgattggatggacgagatcaaagctcatcttttatccgccgagttcgggaagcacctgctggaagtcgaggatctcctacagaagcataaattaatggaggccgacattgccatacagggggataaagttaaggcaattacagccgcaaccctgaaatttactgagggtaagggctatcaaccttgcgatccacaggtcatccaggaccgcatctctcacctagaacagtgcttcgaggagctgtcaaatatggccgctgggcgaaaggcccagctggagcagtcgaagagactctggaagttcttctgggagatggacgaagccgagtcttggattaaagagaaggagcaaatctattcgtctcttgattatggaaaagacctaacttccgtacttatactgcagcggaaacacaaagcatttgaagacgagctgcgcggtcttgacgcacacttggagcagatcttccaggaggcccatgggatggtggccagaaagcaattcggccacccacagatcgaggccagaattaaagaggtgtctgcccagtgggatcagttaaaggatctggcagccttttgtaaaaagaatctccaggacgccgagaatttttttcagttccagggtgatgctgatgatcttaaggcatggctccaagacgcacacagattgctttctggggaggatgtcggccaagacgaaggggcgacccgggcactggggaagaagcacaaggactttctcgaggagctggaagagtccagaggggttatggaacaccttgagcaacaagctcagggattcccggaagagtttagggactcccccgatgtgacacacagactgcaggccctacgggagctgtaccagcaggtggtggcacaagcagatctgaggcagcagcggttgcaagaggccctcgacttgtacaccgtgttcggggagaccgatgcctgcgagctgtggatgggtgagaaggaaaagtggctggctgagatggagatgccagacactctggaagatctggaggtcgttcagcacaggttcgacattctagaccaggagatgaaaaccttgatgacacagatcgatggcgtgaatcttgctgctaactcattggtagaatccggccacccgagaagtcgcgaggttaaacaatatcaggaccatcttaatacccgatggcaggcgttccagacactggtgagtgagaggagggaggctgtggactcagccctgcgagtgcacaattactgtgtggactgcgaagaaacaagcaagtggattactgacaaaacaaaggtggtggaatcgaccaaggatctcgggagggatctggctggcataattgccatccagcggaaactgtcagggcttgagagggatgtagccgcaatccaggcccgcgtcgacgctcttgagcgcgagtctcagcagctgatggactctcatcctgagcaaaaggaggatatcggacagaggcagaagcacctggaagagctctggcagggcctgcaacagtcactgcagggtcaggaggacctccttggtgaagtgagtcagcttcaagcttttctccaggaccttgatgatttccaggcctggctgtcaatcacacagaaggctgtcgcaagcgaggacatgccagaatcactccccgaggccgagcagctccttcaacagcatgccgggatcaaggacgagatcgacggacatcaggactcataccagcgcgtgaaagaaagcggtgagaaggtcatccagggacagaccgatcccgaatacctgctcttagggcagcggctagagggccttgacacaggctggaacgccctcggacgtatgtgggagagtaggtcacatacactagctcagtgtcttggtttccaagagttccaaaaagatgccaaacaggccgaggccatattatccaatcaggagtatactcttgctcatcttgagcctcccgattcactggaagccgccgaggctgggatacgaaagtttgaggatttcttgggttccatggagaacaaccgggataaggtacttagccctgtcgattcagggaataagctggtggcagaaggtaacctgtactctgataagatcaaggagaaggtgcagctcattgaggacaggcatcgcaaaaacaatgaaaaggcacaagaagctagcgttctcctacgggataacctggagcttcagaactttcttcaaaattgccaagagctgaccttgtggattaacgacaagttgttaacatcgcaggacgtttcctatgacgaagccagaaacctgcacaacaagtggcttaagcaccaggccttcgtggctgaacttgcttctcacgaggggtggttggagaatatagacgccgaagggaaacagctaatggacgaaaaaccacagtttaccgcactggtgtcccagaagttagaggctctgcataggctgtgggatgaattgcaggctactactaaagaaaaaactcagcacttgtctgccgccagaagctcagaccttagactgcaaacccatgcagaccttaacaagtggattagtgcaatggaagaccagctccggtccgacgatcccgggaaagacttgacctcggtgaaccggatgttggcgaagctgaagagagtcgaagatcaggtgaacgtccgcaaagaagagctgggggagcttttcgcccaggtgccgtcaatgggagaggagggcggcgacgcagacttatcaattgagaaaaggttcctggacctgcttgagcccttgggccgaagaaagaaacagttggagtcctcacgggcaaagctacagatctccagggatctggaggacgagaccctgtgggtggaggagcgactgccactcgcccagagcgccgactatggaacgaacctgcagaccgttcagctgttcatgaagaaaaaccagactcttcaaaacgagatcctgggacatacaccccgggtggaggacgtcctgcagcgaggtcagcaactggtggaggccgccgagattgactgccaggatctggaagagcgccttggacatctgcagtcctcttgggatcgcctccgggaagccgccgccggccgactgcagcgtctgcgggatgcgaacgaggcccagcagtattacctggacgccgacgaggcagaggcctggatcggagaacaggaattatacgtgatatcagacgagattcctaaggacgaagagggcgctattgtcatgctgaagcggcacctgaggcagcagagggctgtggaagactatgggcggaatatcaagcagcttgcatctagagctcaagggttgctttccgccggtcacccagagggagagcagatcattaggcttcagggacaggtagataagcattacgcagggctgaaagatgtagccgaagagagaaagagaaagttagagaatatgtaccatctgtttcaactcaagagagaaactgacgatttggagcagtggatttccgaaaaggagctagtggctagctcgcccgagatggggcaggacttcgaccacgtcacactgctgcgcgataagtttcgggactttgccagagagaccggggcgatagggcaggaacgcgtagataacgtgaatgccttcatcgagcggctcattgatgcgggccattctgaggccgcgactattgccgagtggaaagacggtttgaacgagatgtgggccgatctgctggaacttattgacactcgcatgcaactgttggctgctagctacgacctgcatagatacttctatactggtgctgaaattctgggactgatcgacgagaagcaccgcgagctgcctgaggacgttgggttagacgcttcaaccgctgaatcattccatcgcgttcacaccgctttcgaacgcgagctgcaccttttgggggtccaagtccagcaatttcaggacgtggcgacccgattgcagactgcctacgccggagagaaagcagaggctattcagaataaggagcaagaggtctcagccgcctggcaggccttattggacgcgtgcgccggcaggcgcacacaactcgtggatacggcagacaagttcaggttttttagcatggcacgcgatctgctcagctggatggaatccatcataagacagattgagacccaggagcgcccaagggatgttagttccgtggagctgctgatgaagtaccatcagggaatcaacgcagaaattgaaaccagatcaaagaatttcagcgcctgcctcgagctaggagaatccctgcttcagcggcagcaccaggcatcagaagagatccgtgaaaagctgcagcaggtcatgtctcgtagaaaggagatgaatgaaaaatgggaggccaggtgggagaggctcagaatgctgctggaggtgtgccagttctcgcgcgacgcgagcgtcgctgaggcttggttaatcgctcaagaaccgtacttagccagtggcgatttcggccacacagttgacagtgtggaaaagcttatcaagcgccacgaggctttcgaaaaaagcacagcttcatgggcagagcgcttcgcagctctcgaaaagccgactaccctcgagctcaaggagaggcagattgccgagcgtcccgcggaagaaacaggccctcaggaggaagagggagaaaccgctggggaggcccctgtatctcaccacgcagctacagaacgaactagccctggtgaagaggagggcacatggcctcagaatctccagcaaccaccacctcccggccaacataaggatggtcaaaaatcaaccggggacgagcgaccaacaacagaaccgctattcaaggtcctggacacacccctgtcagaaggcgatgagccagccacgctgcctgcgccaagagaccacggtcagtctgtacagatggagggttacctgggtcgcaagcacgatctggaaggccccaataaaaaagccagtaacagaagttggaacaatctttattgtgttttgcggaacagcgagcttacattctataaggacgctaaaaatcttgccttaggtatgccataccatggcgaagaaccactggcactgcgccacgcaatttgtgagatagcagctaactataagaagaagaaacatgtgttcaagttgaggctgtccaatggatctgaatggctctttcatggtaaagacgaggaggaaatgctctcgtggttgcagggtgtaagcacagcaatcaatgaatcccagtcaattcgggttaaggcccagagcctgcctctccccagtctctctggaccggacgctagtctcggcaagaaggacaaagaaaagagattctcattttttccaaaaaagaaatag

SEQ ID NO: 206696 - DNA, 6999 bp, synthetic construct
  misc_feature 1..6999: note = Description of Artificial Sequence: Synthetic coding sequence
  source 1..6999: mol_type = other DNA
gagcccgccgacatgaccagcgccaccgagttcgagaacgtgggcaaccagcccccttattcacggatcaatgccagatgggatgctcccgacgacgagctcgacaatgacaacagctcagctcggcttttcgagcggtcacgaatcaaggcacttgctgacgaaagggaggtggtccagaaaaagactttcactaaatgggtgaactcacacttggccagagtctcctgccggattactgatctttacaaggacctgcgggatggtcgaatgttgattaagcttctggaagtgctgagcggtgaaatgctgcccaaaccaaccaaagggaaaatgcgcatccattgcctggaaaatgtggataaggcactccagtttctgaaagaacaacgcgtgcacctggaaaatatgggatcccacgatatagtggatggaaaccaccgtcttgtgctaggactcatctggaccatcattctgcgcttccagatacaggatatcgttgttcaaacacaggagggtcgtgagacacgcagtgccaaggacgcccttctgctgtggtgccagatgaagaccgcgggttaccctcatgttaacgtgacaaatttcacttctagttggaaagatggtctggcgttcaacgccttgattcataaacaccgccctgacctcatcgatttcgataaactcaaagactctaacgcacgccacaacctggagcatgcctttaacgtggccgaaaggcagctggggatcatccctctgttggacccagaagacgtatttacggagaatcctgatgagaagagtatcataacctacgtcgtggccttttaccactacttcagcaagatgaaggtactggctgttgagggcaagagagtgggaaaggtcatagatcatgctatcgaaactgagaagatgatcgaaaagtattccggactcgcttcagatttgctgacttggattgagcaaacgatcacagtgcttaacagcagaaagttcgccaactctctcaccggagtgcagcagcagctgcaggcattctccacctatcgaacggtggagaagccacccaaatttcaagaaaagggaaacttggaagtactgctgttcaccatccagtctagaatgagagcaaacaatcagaaagtgtacacaccacacgacgggaagctcgtgtctgatattaacagggcctgggagagcttggaagaagcggaatacaggcgggagctggcattaagaaacgagctcataagacaagaaaaactggagcagctggcacggaggttcgacaggaaagccgccatgcgagagacatggctgtcagagaaccagcgactcgtggcccaggataacttcggctatgacttagctgctgtggaggctgcgaaaaaaaaacatgaggccattgagacagatacagcggcatacgaggagcgggtccgagcactagaagacctagcccaggagctggagaaggagaactaccacgaccaaaagaggatcactgcccgcaaggataacattctgagactctggagctacttacaggagctgctgcaaagtcggcgccagagacttgagacgactctagcactccagaagctgtttcaagacatgctgcattctatcgattggatggatgagattaaagctcacctcctgtccgccgagttcggaaagcatctgcttgaagtggaggaccttttgcagaagcacaagctgatggaggcggatattgcaatacaaggggacaaagtaaaggcgattactgcggcaaccctgaagtttactgagggtaaggggtaccaaccctgtgacccacaggtcatacaggatcggatctctcatctcgaacagtgtttcgaggaactgagtaatatggcagccggccgcaaggctcaattggagcagagcaaacgcttatggaagtttttctgggaaatggacgaggccgaaagttggattaaagaaaaagaacagatatattcatcgctcgactatggcaaagacctgacctccgtgttgattcttcagcggaaacacaaggcctttgaggatgagcttcgcgggcttgacgcacatttagaacaaatctttcaggaagctcacggcatggtcgcgagaaagcagttcggacacccacaaatcgaggctaggatcaaagaagtatccgcccaatgggaccagcttaaggacctggccgctttctgcaagaagaacctccaggacgcggagaatttctttcagttccagggggacgccgatgatttaaaggcgtggctgcaggatgcccatagattactttcaggcgaggacgtggggcaagacgagggcgctactagagcgttgggcaagaaacacaaggacttcctggaagagctggaggaatctcgaggggtcatggaacacctggagcagcaagcccagggcttccccgaggaatttcgtgatagccccgacgtgactcatcggttgcaggctctccgtgaactgtaccaacaagtggtggcgcaggcggacctgcgtcagcagcgtttgcaggaggccttagatctttacactgtgttcggggaaacagatgcctgtgagttatggatgggcgaaaaggagaagtggctggccgaaatggagatgccagacactctggaagacctggaagtggttcagcaccgattcgacatccttgaccaggaaatgaagactttaatgacacagatcgacggcgtgaacctggcagcaaattccctggtggagtctggccacccgcgcagccgagaggtgaaacaataccaagaccacctcaatacccggtggcaagccttccagacattagtaagtgaaagacgggaggcggtcgacagtgccctgcgggtgcataattattgcgtcgactgcgaggagacctcaaaatggattacggataaaactaaggtggttgaatccaccaaggacctcggtagagacctggctgggatcatcgctatacagagaaaactgtccggcctggaacgcgatgttgcagcaattcaggcaagagttgatgctctggagcgagagtctcaacaactcatggatagccacccagaacaaaaggaggatattgggcagagacagaagcatcttgaggaattatggcagggcctgcaacagagtctccaagggcaggaagacttattaggagaggtgtcccagctgcaggcattcctccaggatttggatgacttccaggcctggctcagtatcactcaaaaggccgtggcctctgaagatatgcccgaaagcttgcccgaagcagagcaactcctccaacagcatgctggaatcaaagacgagatcgacggacatcaggattcttaccagcgcgttaaggagagcggagagaaggtcattcagggccagaccgatcctgaatatctcttactcggccagagactggaggggctcgacacggggtggaacgccctcggccgaatgtgggagtcgcggtctcacactctggcacagtgcctaggctttcaggagtttcagaaggacgccaagcaggccgaagccatcttgagcaatcaggaatacaccctggcacatctggaacctcccgatagtctggaggcggcagaggcagggatccggaagttcgaggatttcctcgggtcaatggagaacaaccgggataaggttctgtctcccgtggactccggcaacaagttggtcgccgaggggaacctgtactcagataagattaaagaaaaggtgcaactgattgaagaccgacacagaaaaaacaacgagaaggctcaggaagcgtcagttctgctgcgagacaacctcgagctacagaattttctgcagaattgtcaagagctcacattgtggataaacgacaaactgcttactagtcaggatgtctcgtacgatgaggccagaaacctccacaataagtggctgaagcatcaagcatttgtcgcagagctcgcttcacacgagggatggctggagaacatcgatgcggaggggaagcagctgatggatgaaaagcctcagttcactgccttggtcagccagaaactggaagccttgcataggctgtgggacgaactccaggccacaactaaagaaaagacccagcacctcagcgcagctagatcaagtgatctgaggttgcagacccatgccgatttgaataaatggatcagcgccatggaagatcaacttcgaagcgacgatccagggaaggatctcaccagcgtcaaccgcatgctcgctaagcttaagcgagtggaggatcaagtcaacgtacggaaggaggaactcggggaactcttcgcgcaggttccatccatgggcgaggaagggggagacgctgatcttagcattgaaaaacgtttcctggacttgctggaacccttgggtcggcgaaaaaagcagctggagagctcaagggccaagctgcaaatcagcagagaccttgaggatgaaacgctctgggtggaggaacgcctcccgctggcacagagtgccgactatggcacgaatctccagaccgtacagctcttcatgaaaaagaaccagaccctccagaatgagattcttggacacacacctagagtggaggatgtcctgcagaggggccagcagctggtggaggccgccgaaattgactgtcaggacttagaggagcggctgggtcatttgcagtcttcatgggatcgtctcagggaggccgccgccggccggcttcagcgcctccgcgacgcaaacgaagcacagcagtactatctcgacgccgacgaagctgaagcttggattggtgagcaggaattgtacgtgattagtgacgaaatccccaaggatgaggagggcgccatagtgatgctgaagcggcacctgcggcagcaaagagcggtggaggattacggaaggaacatcaaacagctggcatcgcgtgcacagggacttctctcggccgggcaccctgaaggagagcagatcataagactgcagggacaagtcgataagcattacgcaggcctgaaagatgtggctgaggaaagaaagcggaagctagaaaatatgtaccacctcttccagctcaaaagggagactgacgacttagagcagtggatttctgaaaaagaactggtggcctctagtcccgaaatgggccaggacttcgatcacgttacattgttaagggataagttccgggacttcgcgcgagaaactggggcaatcggccaagagcgagttgataacgtcaacgcctttatcgagaggttgatcgacgctgggcacagcgaagccgccacaattgccgagtggaaggacggcttgaatgagatgtgggcagatctgttggagttgatcgacacgcggatgcagctcctggcagccagttatgacttgcatcgctacttctacacgggcgcagagatcctaggcctaattgatgagaagcaccgtgagctccccgaagacgtgggcctcgacgcctcaaccgccgagagctttcaccgcgtgcacaccgcatttgagcgtgagctgcacctgcttggcgtacaggtacaacagttccaggacgtggctacacgacttcagaccgcatacgctggtgaaaaggcagaagcgattcagaataaggagcaggaggtttccgctgcttggcaagctttgctagatgcctgtgccggccgccgaacacagctggtcgacactgccgacaaattcaggtttttttcgatggcgagggacctcctctcttggatggagagcatcatccgccaaattgaaacccaggaacggccaagggacgtttcaagtgtcgagctgctgatgaaatatcatcagggcatcaatgccgagatcgagactaggtcaaagaacttcagcgcctgcctggagctcggcgaatctctgctccagagacagcaccaggccagcgaggaaatccgagaaaagctacagcaggtcatgtctaggagaaaagaaatgaacgaaaagtgggaagctagatgggagcgcttaaggatgcttctcgaggtgtgccagttttcccgcgatgcatcagtcgccgaagcctggctcatcgctcaagagccatacctggcctcaggagatttcggccacacagttgattccgtggaaaaattgatcaagaggcacgaagcctttgagaaaagcactgcatcctgggcggagcgatttgctgcactggagaaaccaaccaccctggaactgaaagagcggcagattgcagagcggccagccgaagagacaggtcctcaggaggaagaaggggagacagctggagaagccccggtgtcacaccatgctgccactgagcggaccagccctggcgaagaggagggaacatggccacaaaacctgcagcagcctccgccccccgggcagcacaaagacgggcagaaatcaaccggcgacgagagacccaccacagagcccctatttaaggttttggataccccattgtcggagggagatgaaccggctacactccctgcgccacgagaccatggtcagtccgtgcaaatggagggctatttgggcagaaagcacgacctcgagggccctaacaaaaaggccagcaatcgctcctggaataatctctactgcgtgctgcgcaacagcgaactgacattttataaggatgcaaaaaatctggcactgggcatgccctaccatggagaagaaccattagctcttagacatgccatttgcgagatcgccgctaactataaaaagaaaaagcatgttttcaaactgcgcctctctaacgggagcgagtggttgtttcatggcaaggacgaggaggagatgctgagttggctgcagggcgtttccaccgctattaacgagagccagtcgatacgggtgaaagcgcagtctctccctctgccctcattgagtgggccagacgcaagtctgggtaagaaggacaaggagaaacggttttcatttttccccaagaaaaagtag

SEQ ID NO: 206697 - DNA, 6414 bp, synthetic construct
  misc_feature 1..6414: note = Description of Artificial Sequence: Synthetic coding sequence
  source 1..6414: mol_type = other DNA
atgaccagcgccaccgagttcgagaacgtgggcaaccagcccccctacagccgtatcaatgcaaggtgggacgcccctgacgacgaacttgacaacgacaactcgagcgctaggctattcgagcgcagcaggataaaagccttagccgacgaacgggaggtcgttcagaagaagacatttaccaagtgggtgaattcacatctcgccagagttagttgcaggatcacggacctttataaggatctaagagacggtcgcatgttgattaaactgcttgaagtgttgtctggcgagatgctgccgaagcccacaaagggaaaaatgagaattcattgtttggagaacgtcgacaaggcccttcagttcctcaaggaacaacgtgttcatctggagaatatgggctcgcatgatattgtggatgggaaccatcgcctcgtgctaggcctgatttggacaatcatcctgcgatttcagattcaggacattgttgtgcagacccaggaagggcgtgagaccagatctgcaaaggacgcgctgctgctgtggtgccagatgaagaccgccgggtacccccatgtcaacgttactaacttcacctcatcatggaaagatggcctagcgttcaacgccctgattcacaagcaccgccccgatctgatcgattttgataagttgaaagactctaatgcacgccataacttggagcacgcgtttaatgttgcagaacgacagcttggaatcatcccactgctggatccagaggatgtgtttaccgagaatccagatgaaaagagtattattacctatgtagtggcattctaccattacttctcaaagatgaaagtattggccgtagagggcaaacgtgtgggtaaagtaattgaccatgctatcgaaaccgagaagatgattgagaaatatagcggtctggcaagcgatctgctgacctggattgagcagaccatcactgttttgaactctcgcaaatttgctaactccctgaccggggtgcagcagcagcttcaggcattctctacctatcgaacagtggaaaaaccaccgaagtttcaggagaaagggaacctggaggtccttctcttcacaatccaatcccgtatgagggcaaataaccagaaagtttacactcctcatgatggcaaactggtgtccgatataaatagggcctgggagagcctggaggaagcagaatatcgccgagagctggccctccgaaatgagctgatccgccaggaaaagctggagcagctagcacggaggtttgacaggaaggccgccatgcgggaaacctggctttcggagaatcagaggcttgtcgcccaggacaactttgggtatgacttggcagccgtggaggccgcaaagaaaaagcacgaagcaattgagaccgacaccgctgcatacgaggagagagtgcgggctctggaagacttggcccaagagttggaaaaggagaactaccatgatcagaaaaggatcacagctcgaaaggacaacatcctacgtctttggagttacctccaagagctgcttcagtcccggcggcagagactcgaaactacccttgcccttcaaaaactgttccaagacatgctgcacagcattgactggatggacgaaattaaagcccacctgctctctgcagagtttggaaaacacttactcgaggttgaagatctgctgcagaagcacaagcttatggaagcagacatagcaattcagggggacaaagtgaaagccatcacggcagccaccctgaaattcacggaagggaaagggtatcagccttgcgaccctcaggtgatccaggacaggatctcccatctggaacaatgctttgaagaactaagtaatatggcagcaggccgtaaagcacagcttgagcagtctaagcgactttggaaattcttctgggagatggacgaggccgaaagctggataaaggaaaaagaacaaatctattcgtctctcgattatggtaaggatctaacctcggtgctgatcctgcagcgaaagcacaaagcctttgaagacgaactgagagggctcgacgcccatttggaacagatttttcaggaagctcacggcatggtggctcgcaagcagtttgggcacccccaaatcgaggcacgtatcaaagaggttagcgcccagtgggatcagctcaaggatttggccgcgttttgtaaaaagaatctgcaggacgcagagaacttcttccagttccagggcgatgccgacgacctcaaggcttggttgcaagatgcacaccggctactgagtggggaagacgtcggtcaggacgagggagcaacccgggccctaggaaaaaagcacaaagacttcctagaagagcttgaggaatcccgcggggtgatggaacacctcgagcagcaagcacagggtttccctgaggaattcagggacagccccgatgtaacccatcgattgcaagcattgagagagttataccaacaggtcgttgcgcaagctgacctgcggcaacagagattacaagaagcattggacttatacaccgtgtttggcgagaccgacgcctgtgagctctggatgggagaaaaggagaagtggctggccgaaatggaaatgcccgacacgctcgaggacctcgaagtggtccagcaccggttcgatattttagatcaggaaatgaaaaccctgatgactcaaatcgacggagttaatttggcagctaactcacttgtcgagtcgggtcaccctagatcacgcgaggtgaaacagtaccaagatcacctgaacacaagatggcaggcatttcaaaccttagtcagcgagaggcgtgaagctgtcgactcagcactccgggtccataactactgtgtagattgcgaagaaacatccaagtggatcactgacaagacgaaagtggtcgagagcacgaaggatctcggacgggatctggctggaatcattgctatacagcgaaaattgagcggactcgagcgagatgttgctgcgatccaggcacgggtcgacgcactggaaagggagtcccaacagttaatggacagtcacccagaacagaaagaggatatcgggcaacgacaaaaacacctcgaggaactgtggcaaggacttcagcagtccctgcagggacaggaagatctgctcggagaagtgagccaactgcaggcctttctccaggatctggatgattttcaggcgtggctgtctatcacacagaaggctgtcgctagtgaggacatgcctgaaagcctgcctgaagctgaacagctgcttcagcagcatgccggaattaaggatgagatcgatggccaccaggactcataccaacgtgtgaaggaaagcggggaaaaggtgatccaaggacagaccgatccagagtacctattgttgggtcagaggctggagggtctagataccggttggaacgccctagggcggatgtgggaatcccgctcccacacccttgcacaatgtctcggattccaggagttccaaaaagatgcaaaacaggcagaggccatattatcaaatcaagagtacactctagctcatctggagccccctgattccctggaggccgcagaagccggaatccggaaatttgaagatttcctaggaagcatggagaacaaccgcgataaggttttgtcacccgtcgatagcggtaacaagttggtcgccgaaggcaacttgtactcagataagattaaagagaaagtccagttgatcgaggaccgacatagaaagaacaatgaaaaagcccaggaagccagtgtgcttcttcgggataacttagagctgcagaattttctgcagaactgccaggaactaaccctgtggattaacgataaactattgacttcccaggatgtcagctacgacgaggcaaggaacctccacaataaatggcttaaacaccaagccttcgtcgctgagctggcatcacacgaaggctggctcgagaacatcgacgcagagggaaaacaacttatggatgaaaaaccacaatttactgctctcgtgagccagaagcttgaagcgttacatcgcctgtgggacgagcttcaggccacgactaaggagaaaacacaacacctgagtgcggcaaggtcatcagacctgagactgcaaacacatgctgatttgaacaaatggatctccgccatggaagaccagctgcgcagcgacgacccggggaaagatctcacatccgtgaacagaatgctcgccaagctgaaacgtgtggaagaccaggtgaacgtgaggaaggaggaactcggggaattattcgctcaggtgccatcaatgggggaggaagggggcgacgcggacctgtccattgaaaagaggttcttagaccttcttgaacctcttgggcggcgtaaaaagcaattagagtccagcagagccaaactccagatttccagagacctggaagacgaaaccctgtgggtggaagagcggctgcctctggcgcagtctgcagactatggcaccaatctacagactgtacagctctttatgaagaagaatcagaccctccagaacgagatcttggggcacacccccagggtggaagatgtccttcagaggggccagcaacttgtcgaggcagctgagatagactgtcaggacctggaggagagactgggtcacctccaatccagctgggatagactgagggaggcggccgctggaaggctccagaggcttcgcgacgctaacgaagcccagcaatattacctggatgctgacgaagccgaagcttggataggtgagcaggagctttatgtcatctctgacgagatcccaaaagatgaggaaggcgcgattgtgatgcttaagcggcacttgcggcagcagcgcgcggtggaggactatggccgaaacattaagcagctggcctctagggcacagggattgctgagtgctggccacccagagggcgaacaaattattcgactgcaaggccaggtagataaacactacgccggactgaaagacgtggctgaggaacgtaagaggaagctggagaatatgtatcatctttttcagcttaagagggaaaccgacgacctcgagcagtggatctctgaaaaagagctagtggcctcatctccagaaatgggccaggattttgatcacgtgaccctcctgagagacaaattccgcgattttgccagagaaaccggggccattggccaggaaagagtcgacaatgtgaacgcattcatcgaaagattaatcgacgctggtcactcagaggccgcaactatagctgaatggaaggatggcttgaacgaaatgtgggcggatctgttggaactaatcgacaccaggatgcagctgttggctgcctcctacgatcttcacagatacttttacaccggggcggagattcttggtcttatcgatgagaagcatcgggaattacccgaagatgtaggcctcgacgctagcaccgcagagagcttccaccgcgtacataccgcattcgagcgggagttgcatctgttgggcgttcaagtgcagcagttccaagatgtggcaacaaggcttcagactgcctacgctggggaaaaagcagaagcaattcagaataaggagcaggaggtgagcgccgcctggcaggccctgctcgacgcatgcgccggccgccggacacagttggtagacactgcagataaatttagatttttttccatggcccgggacctcttgtcatggatggagtcaattattcggcaaattgagactcaggagcggccacgtgatgtgtcctccgtggaattgctcatgaaatatcaccaaggcatcaacgcggagatcgagacacggtccaaaaacttcagcgcctgtctggaactcggcgaatcactgctccagaggcagcaccaggcctccgaggaaattcgtgagaagctccagcaggtgatgtcacggcggaaagaaatgaatgagaagtgggaggcacgctgggaaaggttgcgcatgcttctggaggtttgtcagttctcacgtgacgctagcgtggcggaagcatggttaatcgcacaagagccctacctggcttccggtgatttcgggcacacagtggacagcgtggagaaacttataaagcggcatgaggcttttgagaaaagtaccgctagctgggcagagcgattcgctgcactcgaaaagccaacaacactcgagttgaaggaacgccagatcgccgagaggccggcagaggagaccggaccacaggaagaggaaggcgaaacggcgggggaggcccctgtctctcatcacgcagcgaccgaacggaccagtcccgtcagcctttggtcccggctgagctccagctgggaaagtctgcagcccgagccatcgcacccctactag

SEQ ID NO: 206698 - DNA, 6987 bp, synthetic construct
  misc_feature 1..6987: note = Description of Artificial Sequence: Synthetic coding sequence
  source 1..6987: mol_type = other DNA
atgaccagcgccaccgagttcgagaacgtgggcaaccagcccccctatagtagaatcaacgcccgctgggatgccccggatgacgagctggacaatgacaattcctccgcccgtctttttgaacgttctcgaatcaaagccctggctgatgagcgggaggtggtgcagaagaaaacttttacaaagtgggtaaatagccatttggctagggtttcttgcagaatcactgacctgtacaaagacctgcgagacgggcgaatgcttatcaagcttctagaggtcctgagcggcgaaatgttgcccaaacccacaaaaggcaaaatgagaatccattgtctggagaatgttgataaagcgttacagttccttaaagagcagcgggtgcacttggagaatatggggagtcacgatattgtcgatggcaatcacagactggttctgggactgatctggactataatcctgcgcttccagatccaggatattgtggttcaaacccaggaggggcgagaaaccagaagtgctaaggatgcactcctgctgtggtgccagatgaagactgccggctatccccacgtcaacgtgacgaacttcacaagctcctggaaggatggactggcttttaacgccttgatccacaaacacagacccgatctcatcgacttcgataaactgaaggactctaatgcacgacacaatctggagcatgctttcaacgtggctgagcgccagctcggcatcatccccctgcttgatccggaagacgtgtttacagagaatcctgatgaaaaatctatcatcacatatgtggttgcattctatcattacttttctaaaatgaaagtgcttgcagttgaaggcaagagggtgggaaaagtgatcgaccatgccattgaaaccgaaaagatgatcgaaaagtattccggcctcgccagtgatttgcttacatggattgaacaaaccatcactgttctaaattcccgcaagttcgccaacagcctgacaggggtccagcagcagctccaggcattcagcacctatcgaacagtggagaaaccccctaagttccaggagaagggcaacctggaagttctcctgtttacaatccagtctcggatgagggccaataaccagaaagtatacaccccacatgacggtaagctggtgtccgatatcaaccgcgcttgggaatctctggaggaggctgagtacagacgtgagttggcactgcggaacgagttaatcaggcaggaaaagctggaacagctcgcacggaggttcgatcggaaggccgctatgagggagacatggctttccgagaaccagaggttagtggcccaagataacttcgggtatgacttagcagccgtggaggcagcaaagaagaaacatgaagcaatcgagactgataccgccgcttacgaggagagggtgagggctctggaggacctggcccaggagctggagaaagagaattaccatgatcagaaacgcattaccgcccgaaaggacaatatcctgcgactgtggtcatatctgcaagagctcctgcagagtcgccgccaacgccttgaaacaacattggctctacaaaaactgtttcaggacatgctgcatagcattgattggatggacgaaatcaaagcccatctcctctccgcagaatttggaaagcacctcctcgaggtggaggatttactgcagaagcacaagctaatggaagcagatatagccatacagggagacaaagtcaaggccatcacagcagcgactcttaaatttacagaaggaaaaggttaccagccctgcgatccacaggtgatacaagatcggatctcccatctcgagcagtgcttcgaggagctcagtaacatggctgctgggaggaaagctcaactagaacagagtaaacggctgtggaagtttttttgggaaatggacgaggccgaatcctggatcaaggagaaggagcagatctattcctcccttgactacgggaaggacctcacctccgtgctcattctgcagcgcaaacataaggcgttcgaggacgaactacgcggcctggacgcccacttagaacagatcttccaagaggcacacggcatggtggccagaaagcaattcgggcacccccagattgaggcacgtatcaaggaagtgagcgcacagtgggaccagttaaaggatctcgccgccttttgcaagaaaaatttgcaggatgccgaaaatttctttcagttccagggcgatgccgatgatttgaaggcttggctacaggatgcgcatagactgttgagcggtgaggatgtgggacaggatgaaggcgccactcgggctctgggtaaaaaacacaaggatttccttgaagagctggaagaatcccggggtgtgatggaacatctggagcagcaggcacaagggttccccgaagaattcagggattcccctgatgttacacatagattacaggccctgcgcgagctttatcagcaggtcgtcgcgcaggccgaccttcgacagcagcgcctccaggaagccctggatctctataccgtcttcggtgagacagacgcgtgcgaactgtggatgggtgagaaagagaagtggctcgccgagatggaaatgccggatactctggaagatcttgaggttgtgcagcatagattcgatattctagatcaggagatgaaaacattaatgactcagatcgacggcgtgaacctggccgccaacagcctggtggagagcggccatccccgttctagggaggttaagcaatatcaggaccacctcaacaccagatggcaggctttccagacactcgtgtccgagagaagagaggccgtggacagtgccctacgggtgcacaactattgtgttgactgcgaggaaacgtccaaatggataacagataaaaccaaagttgtcgaatctacaaaggatcttgggcgggacctagccggcataatcgccatacaacgtaagctgtccggattggaacgggatgtcgcggccatccaagcgcgggtggacgcactggaacgggagtcccagcagctgatggactctcacccggaacagaaggaggacatcggacaaaggcaaaagcaccttgaggagttgtggcaaggcctgcagcagtctcttcagggacaggaagatctgctcggagaagtgagccagcttcaggctttcttgcaggacctagatgatttccaggcttggctctctataactcagaaagccgtcgcctccgaggacatgcccgagagcctgcccgaggcggagcagctgctgcagcaacacgcaggaattaaagatgagatagatggacaccaggactcctaccaaagagtgaaggaaagcggtgagaaggtcatccagggccaaactgatccagagtacttactcctcggccagaggttagagggcttggatacagggtggaacgccttagggcgtatgtgggaatcccggtcacacacccttgctcagtgcctgggattccaagaatttcagaaggatgccaaacaggccgaggccatattaagcaatcaggaatacacactggcgcacctggaacctcccgacagcttagaagcagcagaagccgggatacggaaattcgaagatttcctggggagcatggaaaacaacagggataaagtactgtctccggtggactcgggcaacaagctggttgccgagggaaatctctattctgacaaaataaaggaaaaggtgcagcttatcgaagaccggcatagaaagaacaatgaaaaagctcaggaagcaagtgtccttctccgtgataacctcgaactgcaaaactttctgcaaaactgccaagagctgaccttgtggattaatgataagctcttgacctcacaggacgtgtcttatgatgaggccagaaatctgcataataagtggctgaagcatcaggcttttgttgccgagctggcgtctcacgaaggatggctggaaaacatagatgccgagggaaagcagctcatggacgagaaaccccagttcacagctctagtttctcagaaattagaagctctgcataggctgtgggacgaattgcaggcgacaacgaaggagaaaacccagcatctgagtgctgctaggagcagcgatctccgtttgcagacgcatgccgacctgaacaagtggatttccgctatggaggatcagctgcgatctgatgacccggggaaagacctgacctctgtcaacagaatgctggcaaagctcaaacgtgtcgaagatcaggttaacgtcaggaaggaggagctgggcgaactgtttgctcaggttccaagcatgggtgaggaaggaggtgatgctgacctgagcatagagaagcggttcttggatctgctggagcccttgggaagaagaaaaaagcagctcgagtcttcccgcgctaagctgcagatctccagagaccttgaggacgaaacactatgggtggaggagaggctgccactggctcaaagcgccgactacggcaccaatctccagacagtgcagctcttcatgaagaagaaccaaactcttcagaacgagattcttgggcacactccacgagtggaagacgtattacagcgcgggcagcagctggtagaggctgctgaaattgattgtcaggatctggaggagagattaggacatcttcagtccagttgggacagactgcgggaggctgctgccgggaggttgcagcggttacgcgatgctaatgaagcacagcagtactacttagatgcggacgaagcggaagcctggattggcgaacaggaactgtacgtgatcagcgacgaaatcccgaaggacgaagaaggtgcaatcgtcatgctcaagcgccacctacggcagcagcgtgcagtggaggactacgggcgcaacattaagcaattggcctctagggcacagggtcttctgagcgccggccatccagaaggagaacagatcatcagattacagggccaagttgataaacactacgccggacttaaggacgtcgcagaagagcggaaacgtaagcttgaaaatatgtaccatttattccagttaaagagggagacggacgacctcgagcagtggatatcggagaaggaacttgtggcatccagtcccgaaatgggccaagacttcgaccatgttacactgctgagagacaagtttcgggattttgcacgcgagacaggggcaattggccaggaaagggtagacaatgttaacgcctttattgagcgcctaattgacgctgggcactcagaagcggccacaattgctgaatggaaggacggcctcaacgagatgtgggcagacctattggagctgatcgacaccagaatgcagttgcttgccgctagctatgaccttcataggtacttttatactggtgccgagatcctcgggcttattgacgagaagcatcgggagttgccagaagatgttgggctggacgctagcacagcagaaagtttccatagagtgcatactgctttcgaacgggaattgcatctgttaggagtgcaggtgcaacagttccaggatgtcgccactagattgcaaaccgcatacgctggcgagaaggcagaggctatccagaataaggagcaagaggtttcagcagcctggcaggccctgttagacgcgtgtgccggtagacgaacccagctggtggacactgcggacaagtttcgctttttctccatggccagagacctgctgagctggatggaaagcatcatcaggcagattgagacgcaggaacgccctcgcgatgtttccagtgtggaactgttaatgaagtatcaccaaggcatcaatgctgaaatagagacaagatcaaagaatttcagtgcctgcctggaactgggggagtctcttctgcagcgccaacaccaggcctcagaagagatccgggaaaagctgcagcaagtcatgagccgtaggaaggagatgaatgagaagtgggaggcacgatgggaaaggctgcggatgttgttagaggtatgccagttctctcgagacgccagcgtggccgaggcctggcttattgcccaggaaccgtacctggcgtcgggagactttgggcacacagtcgactccgtcgaaaagctgattaagcgacacgaagcattcgagaagagcaccgctagttgggccgagagatttgctgcgttggaaaagcccaccaccctcgagctcaaagaaaggcaaatcgctgagaggcctgcagaggaaacaggccctcaagaggaggagggcgaaacggcgggagaagctcctgtctcacatcacgcggccacagagcggaccagtcccggcgaggaagagggaacttggccccagaatctacaacagcctcctccccccggtcagcataaggacgggcagaagtctactggggacgagaggccaactaccgagccattgttcaaggttctggacacaccactgtccgagggggatgaacctgccactctgccggccccccgggaccacggtcagtccgtccagatggaggggtatttagggagaaagcacgatttagaagggcctaataaaaaggcatcaaacaggtcgtggaacaacctgtattgtgtcttaagaaattccgagctaactttctacaaagacgcaaaaaacctggctctgggtatgccctaccacggggaagagcctttagcactgcggcatgccatctgtgagatcgccgctaattacaagaagaagaagcatgtgttcaaactcagacttagcaacggctcagagtggctgttccacgggaaagacgaagaggagatgctctcttggttgcagggcgtgagcaccgccattaacgaatctcaatctatccgcgttaaggcccagtcactccctctcccctcactgtccggaccagatgcctctctcggaaagaaggataaagagaagagattttcttttttccctaaaaagaaatag

SEQ ID NO: 206699 - DNA, 6468 bp, synthetic construct
  misc_feature 1..6468: note = Description of Artificial Sequence: Synthetic coding sequence
  source 1..6468: mol_type = other DNA
atggagctgcagcggaccagcagcatcagcggccccctgagccccgcctatactggccaggtgccttataattataaccagctggagggtcggttcaaacagctgcaggacgaacgcgaggccgtccaaaaaaaaacttttacaaagtgggtgaactcacatttggcccgtgtctcttgccgcatcaccgacctgtacaccgacctacgcgatgggaggatgcttattaagcttctggaagtgctaagcggtgaaaggctgcccaagccaacaaaaggccgcatgaggattcactgtctcgagaatgtggacaaggcccttcagttcctcaaagagcagagggtgcacctcgagaacatgggttcccacgacattgtggacggcaaccaccgtctcaccttggggctcatctggactattatcctgagatttcagatacaggatatatctgtggaaactgaggacaacaaggaaaaaaagagcgccaaggatgctcttcttctatggtgtcagatgaagacagcaggttaccccaatgtgaacatccataatttcaccacgagctggcgcgatggaatggcgtttaacgccctgattcataagcaccgccctgaccttatcgactttgacaagctaaagaagtcgaatgcacattataacttacaaaatgccttcaatttagccgagcagcacttaggactgacgaagctgctggaccccgaagacatctcagtagaccacccagacgaaaagagtatcatcacgtatgtagtaacgtactaccattatttcagcaagatgaaagcactggctgttgaggggaagcgcatcggcaaggtactggacaacgctattgagaccgagaagatgatcgagaaatatgagtcccttgctagcgatcttctcgaatggatagaacagactattatcattctgaataaccggaagttcgctaacagtctggtcggggtccagcagcagctgcaagcttttaatacataccgcacagtggagaaacccccaaagtttaccgagaaaggaaacctggaagtacttctcttcacgattcagtcaaagatgagggctaataaccagaaggtctatatgcctagagagggcaaacttattagcgatatcaacaaagcctgggagcggttggagaaggcggagcacgagcgagaattagccttgaggaacgaactcattcggcaggagaaactggagcagctggcacgacggttcgacagaaaagctgctatgagagagacctggctgtcagaaaaccaacgcctagtgtcccaggataacttcggatttgacctcccagcggtggaggctgcaaccaagaagcacgaggcaattgagacagacattgccgcatacgaggagcgcgtccaggctgtcgtggcggtagcccgggagctggaggcagagaattaccacgatattaagcgcataaccgctcggaaggacaatgtgattcgtctgtgggagtacttgctggaactgctgagagctaggaggcagcgcctggagatgaacttagggttgcagaagatctttcaagagatgctctatattatggactggatggacgagatgaaagtacttgtcctgtctcaggactacggtaagcatcttttaggcgttgaagatctgctgcaaaagcatactttagtagaggccgacatagggatacaggcagagagggtgcggggcgttaatgcatcagcacaaaagttcgcaacggacggggaaggttataagccctgtgaccctcaggtgatccgcgaccgagtcgcgcatatggagttctgctaccaagaactctgtcagctggccgccgagaggcgcgctcgtttagaggagagtcgtaggctctggaagttcttttgggaaatggctgaagaagagggctggattcgggagaaagaaaaaatcctgtcgtcagacgactatggcaaggatctgactagtgtgatgcggctcctgtcaaaacatagagctttcgaggacgagatgtctggaagatccgggcactttgagcaagctatcaaagagggcgaagatatgatcgcagaggagcactttggctccgaaaaaatccgtgagagaattatctacattcgcgaacagtgggcaaacctggaacagctgtcagcaatacgcaagaagcgactggaagaggcaagtctcctgcatcagttccaggccgacgccgacgacatcgatgcctggatgttggatatcttgaagatagtgagctcatccgatgtaggacacgatgaatacagtacccagagtctggtgaagaagcacaaagatgtggctgaggagattgcaaattatcgtcctacactggatactctgcatgaacaggcaagcgctctgcctcaggaacacgccgaatcacctgacgtaagaggccgcttgtctgggattgaagagaggtataaggaagttgcagagcttacacggctacgtaagcaggctctccaagatactctcgccctctataaaatgttctctgaggctgacgcgtgcgagctgtggattgatgaaaaggaacagtggctgaacaatatgcagattcctgaaaagctcgaagacttggaggtaattcagcacaggttcgaaagcctggagcccgagatgaacaaccaggcatctagagtcgctgtggtcaaccagattgcccgtcagctcatgcattctggacatccgagtgaaaaggaaattaaagcacagcaggataaattgaacacaaggtggagtcagttccgggaactggtggaccggaagaaggacgctctactgtccgccctgagcattcaaaactatcaccttgaatgcaatgagactaaatcgtggatacgagaaaagaccaaagtgatcgagagcactcaagacctggggaacgacctggcaggggttatggccctgcagcgcaaactgacaggcatggagcgagacctggtggccatagaagctaagctgagtgatctgcagaaagaagcagagaagctcgaatcagagcatcctgaccaggcccaggccatcttgtccaggctggctgaaatctccgatgtgtgggaggagatgaagacaactctcaagaatcgcgaggcttccctgggcgaagctagcaagttacaacagtttctgagggacttagacgattttcagtcatggctcagtcggacccagactgcaatcgctagcgaggacatgcctaatacactcaccgaagccgaaaagttgcttacacagcatgaaaatatcaagaacgagatcgataattacgaagaggactaccagaaaatgagggatatgggcgagatggtcactcaaggtcagactgacgcccagtacatgttcttgagacagcggctccaggcattagacacagggtggaacgaactgcataaaatgtgggagaatcgccaaaacctgctctcccagtcccacgcataccagcaattcttacgggacacgaagcaggcggaggcgtttctcaacaaccaggagtatgtgcttgcgcacaccgaaatgcctacaaccctcgagggcgctgaagctgcaataaagaagcaggaggacttcatgaccactatggatgccaatgaagaaaaaattaacgcagttgttgaaactggcaggcgcttggtcagtgacggtaatatcaatagcgacaggattcaggaaaaggtggactctatcgatgacagacataggaagaaccgtgagactgcaagtgagttactcatgcgtctgaaggataaccgcgaccttcagaaattcctgcaggactgccaggagctctccctttggattaacgagaagatgttgacagcccaagatatgtcatacgacgaagctcgcaacctccacagtaaatggcttaaacatcaagccttcatggctgagcttgcttcaaacaaggagtggctagacaaaattgagaaggaaggtatgcagctgatcagcgaaaagcccgaaactgaagctgtggtgaaggagaaactcacgggtctccacaagatgtgggaagtgctggaatccaccacccagactaaagctcaaaggttatttgacgcaaacaaagcagaactatttacacaatcatgtgctgatttggataaatggctccatggcctcgagtcacaaattcagtctgatgactatggtaaagatcttaccagtgtgaatatcctcttgaaaaaacagcagatgctagagaatcaaatggaggtccgaaagaaggaaatcgaggaactccagagtcaggctcaagcgttatctcaggaaggaaaaagcacagatgaagttgattcgaaacggctgaccgtgcagaccaaattcatggagctcctcgaaccgctcaacgagagaaagcacaatttactggccagtaaggaaatccatcagtttaaccgggacgtggaggatgagattctttgggtgggcgagcggatgcccctggctacgtctaccgatcatggtcataatttacagacagtacaactgctcatcaaaaaaaatcaaacactgcagaaagaaatccaagggcaccaaccgagaatcgatgacatcttcgaaagaagccaaaacatcgttaccgactccagttccctttctgctgaggctattcgccagcgacttgccgatctgaagcagctatggggacttctgatagaggagactgagaaaaggcataggcgcctggaagaagcacatagggcccagcagtattactttgacgctgccgaggcagaggcctggatgtcagaacaggaactgtacatgatgagcgaagaaaaggcaaaagacgaacagtctgcagtgtctatgctgaaaaaacatcagatactggaacaggccgtcgaagattatgccgagacagttcatcagttatctaaaactagcagggctctggttgctgactcgcatcccgagtcggagcgcatttccatgcgtcagtccaaagtggacaagctttatgccggcctcaaggatctggcagaggagcgtcgtggcaaactggacgagaggcatcgcctgttccagctgaacagagaggtggacgacttggagcagtggatcgccgagcgggaggtggttgctggtagtcacgagcttggccaggactacgaacatgtcactatgctacaagagcgcttcagggagtttgccagggataccggaaacattggccaagagcgcgtcgataccgtgaatcatctagcagatgagcttatcaattctggccacagcgatgccgccacaatcgcggagtggaaagacgggttaaacgaggcctgggcagatctgctcgagcttatcgatactcggacgcagatattggcagcaagttatgaacttcacaagttttaccacgatgccaaagaaatttttgggcgcatccaggacaaacataagaaactgcccgaagagctcgggcgcgatcaaaatactgtggagactctacaaagaatgcatactaccttcgagcacgatatccaggccctggggactcaggtgcggcaacttcaggaggatgcggcccgactacaggctgcgtatgcaggtgataaggccgatgacatacagaagagggaaaacgaggtcctagaggcctggaaatctttgctcgacgcatgtgagagtagacgcgtgcgccttgtggacaccggagataaattccggttctttagcatggtgcgcgacctaatgctgtggatggaggacgtgatacgacagatcgaggcccaagaaaagcctcgagacgtgtcttctgtagagttgctgatgaacaaccaccagggtataaaagcggaaattgacgcccgcaacgacagctttaccacctgtatcgagttaggcaagtccctgctcgctcgaaaacactacgcctcggaggaaattaaagagaagcttctgcagctcacggagaaacgaaaagaaatgattgacaagtgggaggatcgctgggagtggttgaggcttattttggaagtgcatcaattcagtcgcgacgcatctgtcgccgaagcttggttgttaggccaagagccctatctgtcatccagagagattggacaatctgtcgacgaagtggagaagctcattaagaggcacgaagccttcgagaaatctgccgcaacctgggatgagcggttctccgcgttggagcgccttaccactctggagttgcttgaagtgcggcgacaacaagaagaagaggagagaaagcgacggcctcccagtcccgaacctagcactaaagtcagcgaggaagccgaaagccagcagcagtgggataccagcaagggcgaacaggtgagccagaacggcctgcctgccgaacagggcagtccaagagtctcctataggtcccagacgtaccagaactataaaaatttcaacagccgtcgcactgcgtcagaccagccctggtctggcctctag

SEQ ID NO: 206700 - DNA, 7095 bp, synthetic construct
  misc_feature 1..7095: note = Description of Artificial Sequence: Synthetic coding sequence
  source 1..7095: mol_type = other DNA
atgaccaccaccgtggccaccgactacgacaacatcgagatccagcagcagtactctgatgttaacaaccgctgggacgtcgatgactgggataacgagaactctagtgcaagactttttgagcgcagccgaatcaaggctctggccgatgaacgggaagccgtgcagaagaaaacattcacgaagtgggtaaacagtcatctggcaagggtctcatgtaggatcacagatttatataccgatttgcgagatggaaggatgttaattaagctcctagaggtgctttccggcgaacgacttcctaaaccaactaaaggccgtatgcgaatccactgtctggaaaatgtggacaaggcactccagttcctgaaggagcaacgagtgcatcttgagaatatgggatctcacgatatcgtggatggcaaccaccgactcacactgggcctgatttggaccataatcttaagatttcagatacaggacataagcgtggagaccgaggacaacaaggaaaagaagagcgccaaggacgccttactgttatggtgccagatgaaaacggcggggtatcctaatgtgaatatccacaatttcacaacctcttggcgcgacggcatggccttcaacgccctgatccacaagcatagaccggatttaatagattttgataagcttaagaagtctaatgctcactataacttacagaacgcgtttaacctggccgaacagcacttgggactcacaaagctgctggaccctgaagacatcagcgtagatcatccagacgagaaatcaatcatcacatatgtcgtgacctactatcactattttagcaagatgaaggctctcgccgttgaggggaaaaggattggtaaggtgctggacaacgccatcgagaccgaaaagatgatcgagaaatacgagagcctggcctccgacctattggagtggatcgagcaaaccatcatcatcctcaacaatagaaagttcgccaactccctggtaggggttcagcaacagctacaggcgtttaatacatatcgcacagtcgagaagccacctaaatttactgagaagggcaaccttgaagtgctcttgttcactatccagtccaaaatgagagccaataatcaaaaagtctatatgccacgggagggaaaactgattagcgacatcaacaaggcttgggagaggttggagaaggcagagcacgagcgcgagctcgccctgcggaacgagttgatcagacaggaaaagcttgagcagctggctagacggtttgaccgcaaggctgctatgcgcgaaacatggctgtccgagaatcagagactagttagtcaggataattttggcttcgacttgcccgcggtggaggccgccacgaagaaacatgaggcaatagagacggacatcgcagcctatgaagaacgggtacaagctgtggtggccgtggccagagaacttgaggctgagaattatcatgacatcaaaagaattacagcgcgcaaagacaatgtcatcaggctgtgggagtacctgcttgagctgctccgggctagacgacagcgcctggaaatgaatctgggcctacagaaaattttccaggagatgctgtatatcatggactggatggatgagatgaaagttctcgtcctttctcaggactatgggaaacacctactgggcgtcgaggatctactccagaaacataccctggtggaggccgacatcggaattcaggcagagcgcgtcaggggcgtgaacgcttccgctcagaaatttgccaccgatggtgagggctataaaccctgtgacccccaggtcatcagagatcgcgtcgcccacatggaattctgctaccaggagctttgtcagcttgcagctgagcggcgcgccaggctggaagaatcccggaggttatggaagttcttctgggagatggccgaagaagaaggctggataagagagaaagaaaaaattctaagctccgacgattacggcaaagacctaacatctgtgatgcggctattgtcaaaacaccgcgcctttgaggacgagatgtcaggccgatctggacatttcgagcaagcaattaaggagggggaagacatgattgctgaggaacacttcggcagtgagaaaatccgggaaagaattatttacatccgggagcagtgggcgaatctggagcagctctctgccatccgtaagaagcgcctggaagaggcctctctgctgcaccagtttcaggcggacgctgatgacatcgacgcttggatgctggatatcttgaaaatagtgtcatcttcagacgtcggtcatgacgaatactccacccaatcgctggttaagaaacataaagatgttgcggaagagattgccaactacaggcctactctagataccctgcatgaacaggcaagcgctttgccccaggagcacgccgagtcccctgacgtcaggggtcggctgtcaggcattgaggagcgatataaggaagtggccgaacttacgcggctgcggaagcaagccttacaggataccttggcactgtacaaaatgttttccgaggcggacgcatgtgagctgtggatagatgagaaggagcaatggctgaataacatgcaaattccagaaaagctggaggacctggaggtgattcagcatcggtttgaaagcctcgaaccggaaatgaataaccaagcatcacgagtagccgtagtgaatcaaatcgcccggcagctgatgcattccggacacccttccgagaaggagatcaaggcgcagcaagataagctgaacacccggtggtcacagttccgcgaactggtggaccgtaaaaaggacgccctgctgagcgccttaagtattcagaattaccacctcgaatgcaatgagaccaagtcttggatccgcgaaaaaaccaaggtcattgagtccacccaggacttgggtaatgacctggctggggtgatggccttacagcggaaactgacaggaatggagcgagacctggtagcaatcgaggcaaaattgagtgaccttcagaaggaagccgagaagcttgagtcagagcatcctgatcaagctcaagccattctcagcaggctcgctgagatttctgatgtctgggaggaaatgaagaccaccctcaaaaatcgcgaggcctcactgggagaagcatccaagcttcaacagtttctgcgcgatctcgacgactttcaatcctggctgagtaggacacaaacagccatcgcctcagaggatatgcctaacactctgactgaggccgagaagctgcttacacagcatgagaatattaagaatgagattgataattatgaagaggattatcagaagatgcgagacatgggggagatggtgacgcagggccagactgacgcccagtacatgttcctgagacagagactccaagctttagacacaggctggaatgaactccacaagatgtgggaaaaccggcagaaccttctgagtcaatctcatgcatatcaacagttcttgagggatactaaacaggccgaagccttcctgaataaccaggagtacgtgctggctcacacggagatgccaacaactcttgaaggagcagaggccgcaattaagaagcaggaagatttcatgaccacgatggacgcaaacgaggagaaaataaatgctgttgtcgagacagggaggcggctggtctcagacggaaatatcaattctgataggatccaggaaaaggtagattccattgatgacaggcacaggaaaaatagggaaaccgctagtgagctgttgatgcggctgaaggataatcgcgacttacagaaattcctgcaggattgtcaggaactgagcctgtggatcaacgaaaagatgctcaccgcccaggatatgtcttacgatgaggctcggaatttacacagcaagtggctaaagcaccaggcattcatggccgaactcgctagtaataaggaatggcttgataagatcgaaaaggaaggaatgcagctgatctctgaaaagcccgagaccgaggccgtggtcaaggaaaagctgaccggcttacacaagatgtgggaagttcttgagtctacaacgcaaactaaagcccagagactgtttgacgctaataaggcagaattattcacgcagagttgcgctgatctagataagtggctgcatgggctggagagccaaattcagtccgatgactatgggaaagatctaacaagtgtgaacattctcttaaagaaacagcaaatgctggagaaccagatggaggtccgcaaaaaagagattgaagagctgcaaagccaggcacaggcactatcacaagaaggcaagtccacagacgaagtggactccaagcgtctgacagtgcaaactaagttcatggagttgctggagcctctcaatgaacggaagcataatctccttgccagcaaggagatccaccagtttaacagggacgtggaggacgagatcttgtgggtaggagaaagaatgcccttggccacaagcactgaccacggacacaacctgcagaccgtgcagctgttaataaagaaaaaccagacactgcagaaagagattcaagggcatcagcctaggatagatgacatctttgagagatctcagaatattgtgacagacagttcttcactgtccgctgaggcgatccgtcagcgcctcgcagacctgaagcagctgtggggactcttaattgaggagaccgaaaaaagacatcggagactggaggaagcacacagagctcagcaatattactttgatgctgctgaggcagaggcgtggatgagcgagcaggagctgtacatgatgtccgaggagaaggcaaaagatgaacagtctgctgttagcatgctgaagaaacatcaaattctggagcaagctgtcgaagactatgcggaaacggtacatcagctgagcaagacttctcgagcgcttgtggccgattctcaccccgagagcgagcgaatcagtatgaggcaaagcaaagtggataaactgtatgccggcctgaaggatctggctgaggagcggcggggcaaactcgatgagcggcaccgtctgtttcaacttaaccgcgaggttgatgatctggaacagtggattgccgagagagaagtggtcgcaggcagccacgaactggggcaagactatgaacatgtcacaatgctgcaagagcgctttagggagtttgcccgtgacaccggcaacatcggccaggaaagagttgacacggtgaaccacttggcagacgagttgattaattctggacactccgatgccgctaccatagccgagtggaaggacgggctaaatgaagcctgggctgacttacttgagcttatcgatacaaggactcagatcctagccgcatcctacgaattgcacaaattttaccacgatgctaaggaaatctttggccgcatacaggacaaacacaagaagctccccgaagaactcggaagagaccagaacacagtagagaccttgcagcggatgcatacaacctttgaacacgatatccaggcactcggaacccaggtgaggcaactgcaggaggacgctgctaggctgcaagccgcatacgcaggcgacaaagcagatgatattcagaagcgcgaaaatgaggtattagaggcttggaaatctctactagacgcatgcgaatccagaagggtgagacttgtcgacacaggggacaagtttcggttcttctctatggttagagatctcatgttgtggatggaagacgtcattcggcagatcgaggcccaagagaagcctcgagatgtgtcctccgtcgagctccttatgaacaatcatcagggaattaaggcggagattgatgctcgaaatgactccttcacaacctgtatagagctcggtaaatcacttctcgccagaaagcattatgctagtgaggaaattaaagagaaactgctgcagcttaccgagaaaagaaaagagatgattgataagtgggaggatagatgggagtggctgcgtctgattttggaagtgcatcagtttagcagggatgcttctgtggctgaagcctggctgctgggccaggaaccatacctgagctcacgcgagataggtcagagtgtggatgaagtggaaaaacttatcaagcggcatgaggctttcgaaaaatccgctgccacctgggacgagcggttcagcgccttggagaggctgactacgctcgaacttctcgaggtgcgcagacaacaggaagaagaggagaggaagcggcgtccgccaagccctgaaccctcaaccaaagtttcagaagaagccgagtctcagcagcagtgggacactagcaagggcgaacaagtgtcccaaaatggactgcctgcggaacagggctctccccgtatggcagagacagttgacactagcgaaatggtgaacggcgcgaccgagcagcgcacttcttctaaggagagctctccaattccaagcccgacctcggacaggaaggccaaaacagctttacctgcacaaagtgccgccacccttccagccagaacgcaggaaacgcctagcgcccagatggaaggttttttgaaccgtaagcacgaatgggaggctcacaacaagaaagcttcatccagaagctggcacaatgtgtactgcgtgattaacaatcaagagatgggcttctacaaagatgctaaaactgccgcttccggcatcccatatcactccgaggtgcccgtctcgttgaaagaggctgtgtgcgaggtggccctggactataagaaaaagaaacacgttttcaagctccggcttaacgacgggaatgaatacttgttccaggccaaggatgacgaggaaatgaatacgtggattcaggctatttctagtgccatctcaagtgacaagcatgaagtttcggcatccacgcaatctactcccgcttcctcaagagcacagacgttgccgacctcagtggtgaccattacctcagagagttcacccggcaagcgcgaaaaagataaagagaaggacaaggagaagcgcttctccctctttgggaagaagaagtag

SEQ ID NO: 206701 - DNA, 2073 bp, synthetic construct
  misc_feature 1..2073: note = Description of Artificial Sequence: Synthetic coding sequence
  source 1..2073: mol_type = other DNA
atgaccaccaccgtggccaccgactacgacaacatcgagatccagcaacagtatagcgatgtgaacaacagatgggacgtggatgattgggataatgaaaattctagcgccagactgtttgagcgtagtcggattaaagcactcgcagatgagcgagaggcggttcaaaagaaaaccttcactaagtgggtgaactcacacttggctcgtgtgagttgtcgaattactgatctgtataccgatctcagagacggacgaatgttgattaagctcctcgaagttttaagcggcgaaagactgcccaagcccactaaaggtaggatgcggatccactgtctggaaaatgttgacaaagcattgcagttcctcaaagagcagcgggtccatctcgagaacatgggctctcatgacattgtcgatggcaatcaccggctcaccctgggactcatctggacaatcatcttacggtttcagatccaggacattagcgtcgagacagaagataacaaggaaaagaaaagtgccaaggacgccttactattatggtgtcagatgaaaaccgcgggctaccctaacgtgaatattcataattttaccacctcatggagagatggaatggcctttaacgcactcatccacaagcatcggccggacctcattgattttgacaagctgaagaagagtaatgcccactataaccttcagaatgcgtttaacctggccgagcagcacctgggcctgacgaaactactggatcctgaggacataagtgtagaccacccggacgaaaagtctatcattacctatgtggtgacctactatcattacttctctaagatgaaagctctggctgtggaaggtaagcgcataggtaaggtacttgataatgcaattgaaacagagaaaatgatcgaaaaatacgagtccctggcgagcgatctgttagaatggatcgaacaaaccatcatcatcctgaataatcgtaagtttgctaattctctagtcggggtgcagcaacagctccaagctttcaatacctacaggactgtcgagaaaccaccaaagtttacagaaaagggaaacctagaggtgctgttgtttacaattcagagcaaaatgcgtgccaacaatcagaaggtgtacatgccacgggaggggaaactgatttccgacatcaacaaggcttgggaaaggctggaaaaggctgagcatgagcgcgagctggcactgcgaaacgagctaatacggcaggaaaaactcgaacaactggctaggagatttgacaggaaggcagctatgcgcgaaacttggctatcggagaaccaacggcttgtgagtcaggataattttggcttcgatctgcccgcggtagaggctgcaaccaagaaacatgaagccatcgaaactgacatagctgcatacgaggaacgtgtgcaggctgtcgtggccgtggcaagagagctcgaagccgagaactaccacgacatcaaacggattaccgccaggaaagataatgtgattcggttgtgggaatacttgctcgagctattaagagctagacgtcagaggctcgaaatgaatctggggctccagaagatcttccaagaaatgctgtacattatggactggatggatgagatgaaggtgttggtgctgtcacaggattatggtaaacatctcctgggcgtggaagacttgttacagaaacacacactggtcgaggcagacatcggcattcaggcagagagggttcggggagtcaacgcatctgcgcagaagtttgcaaccgacggcgagggatataagccctgcgatccgcaggtgatccgggatcgggtcgcacacatggagttctgttatcaggaactttgccagctggcggccgagagacgcgcccgactcgaggaaagcaggagactgtggaagttcttctgggagatggctgaagaggagggatggatccgggagaaggaaaaaattctgtccagcgatgactacggcaaggatcttactagtgtgatgcggttgctttcgaaacatagagctttcgaggacgagatgtccggcagatag

SEQ ID NO: 206702 - DNA, 7173 bp, synthetic construct
  misc_feature 1..7173: note = Description of Artificial Sequence: Synthetic coding sequence
  source 1..7173: mol_type = other DNA
atgagcagcaccctgagccccaccgacttcgacagcctggagatccagggccagtactccgatataaacaataggtgggatcttcctgacagcgactgggataatgattcctcatcggcccgactttttgaaaggtcaagaataaaggctctcgccgacgagcgcgaggccgtacagaaaaaaacgttcaccaagtgggttaacagccatcttgccagagttacctgcagggtgggcgatctgtattccgacttgcgggacggcagaaacctgctcaggctgctggaagtcctgagcggggagattctgcctaaacccacgaaagggcggatgagaattcactgtctggagaacgttgacaaggccctgcagtttttgaaagagcagaaggtccacttggaaaacatgggaagccacgacatcgtggacggcaatcaccgccttaccctcggtctggtgtggactattatcctgcggttccagatccaagacatatctgtcgagaccgaggacaataaggagaaaaagtccgccaaagacgctctactgttatggtgccagatgaagacagcaggctacccaaacgttaatgttcacaatttcactacctcgtggcgcgacgggttggcattcaacgctatcgtccacaaacatcgccctgatctccttgatttcgagagcttgaagaaatgtaatgcccattacaatcttcagaatgcctttaatttggccgaaaaggaactgggcctcaccaagctgctcgatcccgaagacgtcaatgtggatcagcccgacgagaaatctatcattacatatgtcgccacatattaccactacttttccaagatgaaggctttggcagtagagggcaaacggattggtaaagtccttgaccacgccatggaagcagagagacttgtagagaagtatgaatcactagcctccgaacttctgcagtggatagaacagaccatagtcaccttgaatgatcgccagctggctaacagtctgtctggtgtgcagaatcagttgcagtctttcaacagttatcgcaccgtggagaaaccccctaagttcacagaaaaaggaaatctggaagtcctgctatttaccattcagagtaaattgagggccaataatcagaaggtctataccccacgagaggggcggctgatatccgatattaataaggcgtgggagagactggaaaaggcggagcacgagagagaactcgccctacgaaccgaactgattcgacaagagaaactggagcagctggctgcccggttcgatcgaaaggctgctatgcgcgagacgtggctgtccgaaaatcagagactcgtctcacaggataattttggtctggagctggctgctgtggaagccgccgtcagaaaacacgaggctatcgagacagatatcgtagcctactctggccgcgtgcaggctgttgatgctgtcgctgctgaactcgcggctgaacgctatcatgatataaagcgtatcgccgccagacaacacaacgtcgctagactgtgggatttcctccgccagatggttgcagcacgcagagaacgcctcctacttaacttggagctgcagaaagtgttccaggacctgctgtacctcatggattggatggaggagatgaagggtcgccttcaatcccaggacctggggcgccacttagctggcgtggaggacctcttgcaactccacgaactggtcgaagccgacattgcagtccaggccgagagagtaagggccgtgtcagcatcagccttaaggttctgtaacccaggcaaagaatatcgaccatgtgatccgcaattagtctcagaaagggtggctaaactggagcagtcttatgaagcgctgtgcgaactcgccgctgcccggagagctcgcctggaagagtctagaagattgtggagattcctctgggaggtgggggaagccgaagcatgggtgcgggagcagcagcacctcttggcatccgccgacacgggccgcgacctgactggcgccctgagactgctgaacaagcatacggcactgcgcggagaaatgtcaggaaggctcggaccgctcaagttaaccctcgagcaaggacagcaactggttgctgagggccaccccggggcgtcccaggcaagtgccagagccgctgagttgcaggcgcagtgggagcggctggaagccttagcagaggaacgggcccagagattggcccaagccgccagcctgtaccagttccaggccgacgcaaatgacatggaagcttggctggtggacgctctgcgtctggtttccagccccgagctgggtcacgatgaattcagtactcaggcgctggctcggcagcacagagccctcgaggaagaaatcaggagccatcgcccaactctcgatgccctgcgtgagcaggcagccgctctgccccctactctgtcgcgtacaccagaagtccaatctcgggttcccactctggagcggcactacgaggagcttcaggcaagagctggcgagagagctagagctctggaggctgcccttgctctctacacgatgttgtccgaggctggagcctgtggcctttgggtcgaggaaaaggagcagtggttgaacgggttagctttgcccgagcggctagaggatctagaagtggtgcaacagcgcttcgagactttagagcctgagatgaacacgctcgccgcgcagataaccgccgtgaatgatattgccgaacagctcttgaaggccaatcctccaggaaaggatcggatagtaaatactcaagaacagcttaatcataggtggcagcaattcaggaggctggctgatggcaaaaaagctgccttgactagcgcactgtcaatacagaactaccatctggagtgtactgaaactcaggcctggatgcgcgagaaaaccaaagtgattgagtccactcagggcttaggcaacgacctggcaggtgtactggccctgcaacggaaactagccggcaccgagagagacctggaggccatcgccgccagagttggagagttaactagagaagccaacgctttggcagctgggcacccagctcaggccgtcgccataaacgctaggttgcgggaggtccagacaggctgggaagatcttcgagctaccatgaggcgtcgtgaggagagcttgggtgaggcacgaaggctccaggactttcttcggtccctggacgacttccaggcctggctcggacgtacacagactgctgtcgcatctgaggagggtcccgcgacattgcccgaggccgaagccctgctggcccagcacgctgcgctccgcggcgaagtggaacgcgcccagtctgagtatagtagactcagggctctgggagaggaagttacccgggatcaagccgaccctcagtgcctgtttctgaggcaacggttggaggcacttggcacaggctgggaagaattgggtagaatgtgggagtcgaggcagggcagactggcgcaggctcacggcttccagggtttcttacgtgacgcaagacaagccgagggcgttctctcaagccaagagtacgtgctgtcacacactgagatgccaggcactttgcaggcagccgacgcggcaatcaagaagttggaagacttcatgtcgacaatggacgccaacggggagaggatccatggtctgctggaggcagggagacaacttgtgagcgagggcaatatacacgccgacaaaattcgagagaaagccgacagtatcgagaggagacataaaaagaaccaggacgctgcccaacagtttctgggaaggcttcgcgataatcgcgaacaacagcacttcttacaggactgtcatgaactaaagttatggattgatgaaaagatgcttacagcgcaggatgtatcgtacgacgaagcccggaatctgcataccaagtggcagaagcaccaggctttcatggcggaacttgccgctaacaaagattggctggataaggtcgataaagaaggacgtgagctcaccctggagaagccggaattaaaagcactggtgagtgagaagctccgtgacctgcaccgccggtgggacgaactcgaaaccactacacaggctaaagcgcggagcctgttcgatgctaacagagctgaactttttgcccagagttgttgcgcgctggaatcttggctagaatctttacaggcccagctgcattccgatgattacgggaaggatttaacctccgttaatatcctactcaaaaaacagcagatgctggagtgggagatggccgtcagagagaaagaagtggaggcaatacaggcccaggcaaaggctttagcccaggaagatcaaggtgctggcgaagtggagcgcacctctcgcgcagtcgaggagaagtttagagctttgtgccagcctatgcgggagcgatgccggaggttgcaggcctccagagaacagcaccagttccaccgggatgttgaagacgaaatcttgtgggtgactgagaggctcccaatggcgtccagtatggaacatggtaaggatttaccaagcgtacagctacttatgaaaaagaatcagaccctacagaaggagatccagggccatgagccccgaatcgccgacctaagggagcgacagcgggccctgggtgcagccgctgccggaccagagcttgctgagttgcaggagatgtggaaacgacttggacacgaattagagttgcgggggaagaggctggaagatgcacttagagcccagcaattctatagagacgctgcagaagctgaggcctggatgggggagcaggagctccatatgatggggcaggaaaaggcaaaggatgaactgagcgctcaagcagaggtcaagaaacaccaggtgctcgaacaggcacttgccgattacgcacaaaccatccatcagctggcggcctcttctcaggacatgattgatcatgagcacccggagtcaaccaggatcagcatcaggcaggctcaggtggataaattgtacgccggccttaaagagctcgccggagaaaggagagagagactacaggagcacctcaggctctgccaattgcgccgcgagttagatgacttggaacagtggatccaggagagggaagttgtggccgctagccacgagcttggccaggattacgaacacgttactatgcttagggacaagtttcgggaattctcaagggacacaagcaccattggccaggagcgtgtggatagcgccaacgctttagctaacgggctaatcgcaggggggcacgctgcccgggccactgttgcagaatggaaagactccctcaatgaggcctgggccgatctgttagagttgcttgatacccgcggacaggtgcttgcagctgcttacgagctacaaaggtttcttcacggggccagacaagccctggccagggtgcagcataagcagcagcagttacctgatggaaccgggagagacctgaatgctgcggaggctctccagagacgacattgcgcgtatgaacacgacatccaggccctcagcccgcaggtgcaacaggtacaggatgacggtcacaggcttcagaaggcttacgcaggggacaaggcagaggagatcggacgtcatatgcaggcagttgccgaggcttgggctcagctgcagggtagctctgccgcacgacgtcaactcttgctggataccacagacaagtttaggtttttcaaggccgtgagggaactaatgctgtggatggatgaggttaatctccaaatggacgcccaggagcgcccacgggacgtgtcatccgccgatctcgtgatcaaaaatcagcaaggcatcaaagccgagatcgaggcccgcgccgatcgcttcagcagctgtatagatatgggcaaggagctactggctcgctcgcattatgccgcggaggaaattagcgagaaactttcacagctgcaagctcggagacaggaaaccgccgagaaatggcaggaaaaaatggattggctccaacttgtgctggaggttctggtctttggcagagatgccggcatggcagaagcgtggctctgcagccaggaacccctcgtcagaagtgcagagctggggtgtacagtggatgaggttgagagtttgattaaacggcatgaggcattccagaaaagcgcagtggcatgggaagaaaggttctgtgccctagaaaagctgaccgcactggaagagcgggaaaaggaaaggaagcggaaacgggaggaggaggagagacgtaaacagcctcctgctcccgagccaacagccagcgtgccgcctggcgacctggtgggcggccaaacagccagcgacacaacctgggacggcacccaaccaagacccccaccctctacgcaggcacccagcgtcaacggtgtatgtaccgatggcgaacccagtcagccactcttgggccagcagaggctggagcacagcagcttccccgagggtcccggaccaggatcaggagacgaggcaaacgggccaaggggagaacgccagactcggactagagggcctgcaccttcagccatgccacagagcagatctaccgaatcagcccatgcggcgactctgccgccacgggggcccgaaccaagcgcccaggagcagatggaagggatgttatgcaggaagcaggagatggaggcgttcgggaagaaggccgccaatagatcctggcagaacgtgtactgcgttctcaggaggggctctctaggcttttacaaagatgcgaaggccgccagcgccggggtcccctaccacggcgaagttccggtcagcctggcccgggcccagggctctgttgctttcgactatcgcaagaggaaacatgtattcaagttgggacttcaggatggcaaggagtatctgttccaggcaaaggacgaggcagagatgtcctcctggctgcgcgtcgtgaacgccgccatcgcgacagccagtagtgcttccggcgagccagaggagcccgtggtaccctccaccacccgcgggatgacaagggccatgaccatgccccccgtgtctcccgtgggagccgaagggccggtggtactgcgctcaaaggacggacgagaaagagagagagaaaagcggtttagtttttttaagaagaataagtag

SEQ ID NO: 206703 - DNA, 2805 bp, synthetic construct
  misc_feature 1..2805: note = Description of Artificial Sequence: Synthetic coding sequence
  source 1..2805: mol_type = other DNA
atgagcagcaccctgagccccaccgacttcgacagcctggagatccagggccagtactctgatattaataatcgttgggacttgcctgatagtgattgggataatgacagcagctccgccagattgttcgaaagatccagaattaaggcacttgccgatgaacgcgaggccgtacagaaaaagactttcaccaagtgggtgaactcacaccttgcgcgagttacttgcagagtgggagacctctattcagatctgagagacggacgaaacctgctccgtctcttggaagtgctgagtggcgaaattctccctaagcccacaaaggggcggatgagaatccactgcctagagaacgtggacaaggccctgcagttcctcaaggaacagaaggtgcatttggaaaacatgggttcccacgatatcgtggatgggaaccaccggctcaccctgggcttggtttggacaatcatcttgcggttccagattcaggatatctctgtagagacggaggacaacaaggagaaaaagtccgctaaggatgctcttctgttatggtgccaaatgaagaccgccggataccccaacgtgaacgtacacaattttacaacctcctggagagacgggttagctttcaacgcaattgttcataaacaccgcccagaccttcttgacttcgaaagtctgaagaagtgcaacgcccactacaatctccagaacgcgttcaacctggcggagaaggaactggggctgactaaacttctggaccccgaggatgttaatgtggatcagcccgatgagaagtctattatcacttatgtcgcaacatattaccactattttagtaaaatgaaggctctcgccgttgagggcaaacgcatagggaaagtgctggaccacgccatggaggccgagcgcctcgtcgagaaatatgaatcactcgctagtgagctgctccagtggatcgagcaaacaatagtaacactgaacgataggcaattggctaactcactgagtggagtgcaaaaccagttacagagcttcaactcttaccgcaccgttgagaagccccccaagttcaccgagaaaggtaacctggaggttctgctcttcaccattcagagcaaactgagggccaataatcagaaagtgtatacgccaagggaggggagactgatttctgacattaacaaggcctgggagcgtctggagaaagctgaacacgaacgcgaattagccctcaggactgagctgattaggcaggagaagctggaacaactggccgcccgctttgaccgaaaggccgcaatgcgtgaaacttggctgtccgagaatcagcggctcgtcagccaggacaactttggactcgaattggcagctgtagaagctgccgttaggaagcatgaggctatcgaaacagatatcgtggcctactcaggcagggtgcaggctgtcgatgcggtggccgcagaactcgccgcagaaaggtaccacgatattaagcgcatcgcagcccgccaacataatgtggctcgactgtgggatttcctgcggcagatggtagctgcacgcagggagaggttgctcctgaacctcgagcttcaaaaggtgttccaagatctactgtatctcatggactggatggaggagatgaagggaagattgcagtctcaggacctggggcgccacttagccggggtggaagacctgctgcagctccacgagctggtagaagccgatatcgcagtacaggcggagcgggtgcgtgccgtgagcgcatccgcccttcggttctgtaacccaggtaaggagtatcggccatgcgatcctcaacttgtgtcagagcgcgttgctaaattgacagcgttggaagaaagggaaaaggaaagaaagcgcaaaagggaggaggaggagagaagaaaacagccccctgccccggagccaacggccagcgtgccccctggtgatctggtgggcggccagactgcctcggacaccacatgggatggaacccagccgcgccccccaccttccacccaggccccttccgttaacggggtgtgcacagatggtgagccgagccagccactgctgggccagcagcggctggagcactccagctttcccgaggggcctggacctggttccggggacgaggccaacggcccgagaggcgaaagacaaactcgcacacggggaccggcacccagcgcgatgcctcaatcgaggtcaacagaatctgcccatgcagctacattaccgccccgtggacctgagccctccgctcaggagcaaatggaaggtatgctttgtcggaagcaagagatggaggcattcggcaagaaagctgccaaccggagttggcaaaacgtctattgcgtgctgcggagaggctctctgggtttctacaaagacgctaaggccgcaagcgctggagtgccttatcacggagaggtgccggtatcccttgccagagcccaagggtctgtcgcattcgactataggaaaagaaagcatgtattcaagttgggcctgcaggatggaaaagagtatttgtttcaagccaaagatgaggccgagatgagtagttggctccgggtggttaacgcagctatcgcaacagcctcttccgcttcaggtgagccggaggagcctgtagtgcccagcactaccagagggatgactagggctatgacgatgcccccagtgtcccccgtcggcgctgaaggtcccgtggtgctgcgctccaaggatggccgtgaaagggagagggaaaaacggtttagttttttcaaaaaaaacaaatag

SEQ ID NO: 206704 - DNA, 354 bp, synthetic construct
  misc_feature 1..354: note = Description of Artificial Sequence: Synthetic coding sequence
  source 1..354: mol_type = other DNA
atgagcagcaccctgagccccaccgacttcgacagcctggagatccaggggcagtacagcgacatcaacaataggtgggacttaccagactctgattgggacaatgactccagttctgctcgtctttttgagcgctcacgaattaaagcactcgccgatgaacgcgaagccgtacaaaaaaagaccttcactaaatgggtgaattcacatttagctcgtgtgacctgcagggttggggacctgtactcagacctgagggatggaaggaacctgctgcgtcttctggaggtgttatccggtgagatcctgccaaaaccaacaaagggtaggatgcggattcactgcttggaatag

SEQ ID NO: 206705 - DNA, 7098 bp, synthetic construct
  misc_feature 1..7098: note = Description of Artificial Sequence: Synthetic coding sequence
  source 1..7098: mol_type = other DNA
atgagcagcaccctgagccccaccgacttcgacagcctggagatccaaggtcagtatagcgacatcaataacaggtgggatctgcccgacagcgattgggataatgatagctcttctgcacgcctgttcgagcgcagtcgcatcaaggccttagctgatgagcgcgaagccgtgcagaaaaaaacgtttacaaaatgggtgaattctcatctggctcgggtgacctgccgggtaggtgatctgtattccgatctgcgggatggcaggaaccttctgaggctgctggaggtcctgtcaggcgaaatcctgccgaagcctacaaaaggtagaatgcgaatacattgcttggagaatgtggacaaggccctgcaattcctgaaagaacagaaggtccacttggagaatatgggaagccacgacatcgtagatggaaaccacaggctcacgctcggtctggtgtggacgattatcctccgttttcaaatccaggatatttctgtcgaaactgaagacaataaggaaaaaaagtcagcaaaggacgcgctcctcctgtggtgtcaaatgaagactgcaggctacccgaatgtcaacgttcacaatttcacaacatcatggagagatggtctcgccttcaacgcaatcgtacataaacaccggcctgacctcttggatttcgagagcctgaagaagtgcaatgcccactacaatctgcagaacgcatttaatcttgcggaaaaagagctggggcttactaagctgctagatccggaagatgttaatgtggatcagcccgacgagaagtccattatcacctacgtcgccacctactaccattacttctcgaagatgaaagccttggcggtggaggggaagcgtatcggtaaagtacttgatcatgcaatggaagccgaacgactcgttgagaagtatgaatctctggcaagcgagttgctgcaatggatcgaacagacgatagtcaccctcaacgaccggcagttggctaacagcctttccggcgtgcagaaccagctgcagtcatttaacagctacagaaccgtcgagaagccacctaaattcacagagaagggcaatctggaagtcttgctttttacaatccagagtaaactcagagctaacaaccagaaagtctataccccccgggaaggtagactaatctcggatatcaataaagcctgggaacgtcttgagaaagcagagcatgagagagagttggcgctgcgcacagaactaatccgccaagagaaactggaacagttggcagccagattcgatcgaaaagcagctatgcgcgagacctggttaagcgagaatcagcgtttggtctcccaggacaactttggcctggagctggccgcagtggaggcagcagttagaaagcacgaggccatagagaccgacatagtagcctattccggtcgggtccaagcagtagatgccgtggctgcagaactggctgcagaaaggtaccacgacattaagaggatagctgcgcgacagcacaacgtggctcgactgtgggacttcttaaggcagatggtggccgctagacgtgaaaggcttctcctgaacctcgagctgcaaaaggtgtttcaggacctcctgtatctgatggactggatggaggagatgaaaggcaggcttcagagtcaggatttaggccgacacttggctggcgtagaagacttactccagcttcatgagctggtggaggcagatattgcagtgcaggccgaacgggtcagagcggtctccgcgagcgcactccgattttgcaaccccggtaaggagtatcggccctgtgacccgcaattggtgtctgaaagagtggcaaagttagagcagtcatacgaagccctctgtgagctggccgctgcccggcgagctaggctcgaggaaagccggagactgtggcggttcctctgggaagtgggtgaggctgaggcttgggtcagagagcagcaacaccttctcgccagcgctgacaccgggagggacctcaccggcgctctgcggctattgaataagcacacggccctccggggcgagatgagcgggaggcttgggcccttgaagctcacactagagcaaggacagcagctggtcgccgaaggacaccctggcgcctcccaggctagcgcgcgggccgccgagcttcaggcccagtgggaaaggctcgaggcactggcggaggagcgggcccagagactcgcccaagcagcatcactttaccagtttcaggccgatgcaaatgatatggaggcttggctagtagacgccctacgcctggtcagcagccctgaattaggtcacgacgaattttctacacaagcgctcgcaagacagcaccgcgctctggaggaggagatccggtcccatcggcccacactcgacgccctaagagaacaggctgccgctctccccccaacattgtcccggacccctgaagtgcagagccgcgtacctacactggagaggcattacgaggaattacaagcgagagcgggcgagagagctagggcgcttgaggccgcccttgccctgtacacaatgctgtccgaggcaggtgcatgtggcctgtgggttgaggaaaaggagcagtggctgaacggcctggctctcccagagaggctagaagatttagaagtggtgcagcagcggtttgagaccctcgagcccgagatgaataccctggccgcccagatcacagctgtcaacgatattgctgagcaattactgaaagctaacccgccaggaaaggaccggattgtgaacacccaggaacagcttaaccatagatggcaacaattccgaaggttagctgatggtaagaaagcggccctgaccagtgcactttctatacagaactaccacctcgagtgtaccgagactcaggcttggatgagagagaagactaaagtgatagagtcaacacagggtcttgggaacgacttggctggggtcctcgctctccagcgaaagctcgctggtactgagcgcgatctggaagccattgccgcacgagtcggtgagctgaccagggaagctaatgctctggccgcaggacaccctgctcaagcagttgccattaacgccaggctgcgggaggttcaaactggctgggaggacctgcgagccacaatgcgacgacgggaagaaagtctcggagaagctagacgcctccaggatttccttagatcactggacgacttccaagcttggctaggaagaacccagaccgccgtggcaagtgaggaagggccggcaacgttaccggaagccgaggccttactagcccaacacgccgccctcagaggcgaagtggagcgagcgcagagcgaatactcccggctgagggcactgggtgaagaagtcaccagggaccaggctgaccctcagtgcctcttcctccggcaaagattggaggccctcggtacgggctgggaggagctgggaagaatgtgggaatcacggcagggacggctggcccaagcccatggctttcaggggtttctacgggacgcaagacaagcagaaggggtgctctcttcccaggagtatgtgctgagtcatacagagatgcccggaacgctccaggccgccgatgccgctataaaaaaactggaagatttcatgtctacaatggacgctaacggcgagagaattcatggcctgttggaagctggcaggcagctcgtgtcagaggggaacatacacgctgataaaattcgggagaaggctgacagtatcgaaagaagacacaaaaagaatcaggacgcagcccaacagtttctcggcaggctgagagacaaccgtgagcagcagcacttccttcaggattgccacgaactgaagctttggatcgatgagaagatgctaacggcgcaggacgtgtcgtacgacgaagcacgcaacctccataccaagtggcagaagcaccaggccttcatggctgagctagctgcgaacaaggattggctcgataaggtagataaagaaggccgcgaacttacgctggaaaagcctgagctgaaagccctggtctctgagaaactcagggatctccaccgcaggtgggatgaactcgagaccaccacacaagccaaggctagatcattgttcgacgctaacagggccgaactattcgcccagtcctgctgtgcactggaatcttggttggaaagcctccaggctcaactccactcagacgattacggtaaggatcttacttccgtcaatatattactgaaaaagcaacagatgcttgagtgggaaatggctgtaagagagaaagaagtggaggccatccaggctcaagctaaggcactggcacaggaggaccaaggagccggagaggttgaacggacaagtcgagccgtcgaagaaaaattccgagcactctgtcaaccaatgcgagaaaggtgcaggcggttgcaggcatcccgcgagcaacatcaattccaccgggacgtggaggacgaaatcctctgggttactgagagactgcctatggcttcctcgatggaacatgggaaagacctcccgagcgttcagctactgatgaagaaaaaccaaacgctgcagaaggagattcagggccacgagccaaggatcgcagatctgagagaaaggcaacgcgccctcggcgcagctgctgcaggccctgagctagctgaactgcaggagatgtggaagaggctgggccacgagctggagctgaggggtaagcgcctcgaagatgcgctaagggcgcagcagttctacagggatgctgccgaggccgaagcctggatgggcgagcaggagctacatatgatgggccaagaaaaggctaaggatgagctgtcagcccaggccgaagttaagaagcaccaggttttggaacaggccttggctgactacgcccagacaatacaccaactcgcggctagctcacaagatatgatagatcacgagcatccagagtccacaaggatatcgattcggcaggctcaagtggataaactgtacgccggactgaaagaactggccggcgaacgaagggaaagactccaggaacacttacgtctgtgtcaactacggcgcgaacttgacgatttggagcaatggatccaggagcgggaggtcgttgcggccagccacgagttgggccaagactatgaacacgtgacaatgctgcgcgacaagttccgagagttttcccgggacacttcgactattggacaggagcgggtagacagcgctaacgcgttggctaatgggttgatagctggcggtcatgctgcccgggccactgtcgcagagtggaaggactctctgaatgaagcatgggcggatctgctggaattactggacacacgcggacaggtccttgcagcagcctacgaactgcagcgctttctacatggcgctcggcaagcgttggcaagggtgcagcacaagcagcagcaactccctgatgggaccggtcgggacctgaacgccgctgaggcgctgcagcgaagacattgcgcttacgagcatgatatccaagccttatcaccacaggtgcaacaggtccaagacgacggacatcggctccagaaggcctacgccggcgataaagccgaggagattggccgccatatgcaggccgttgctgaagcttgggcccagctgcagggttctagtgccgcgcgccgacagcttttgcttgatacaacagataaattccgcttctttaaagccgttagagaactgatgctgtggatggatgaggtcaacctccaaatggatgcccaggaacgacctcgcgacgtctcctccgccgatttggtgatcaagaaccagcaggggatcaaagccgagatcgaggcccgagccgataggttctcttcttgtatagatatgggcaaggaactcctggctaggtcccactacgccgcagaagaaatcagcgagaaattgtcccagctgcaggcgaggagacaggaaacggctgaaaagtggcaggagaagatggattggctgcagctcgttctcgaggtcctggtcttcgggagggacgctggaatggcagaggcctggctgtgcagccaggaacccctcgtgcgctctgccgagctgggctgcacggttgatgaggtcgagtccttgatcaagcggcacgaggcctttcagaaatcagcggtggcctgggaagaaaggttctgtgcacttgagaagcttacagccctggaagaacgagagaaggaacgaaagagaaagcgcgaggaggaggagcgccggaagcagcctccagcccctgagcccaccgcatcggttccccctggtgatcttgtgggagggcagactgccagcgacacgacttgggacggcacccagccaaggccacctccctccacccaagcaccttccgttaacggtgtgtgcactgatggcgagcctagtcagccattgcttggacaacaaaggcttgagcacagcagtttcccagaagggcccggaccgggaagtggcgacgaggccaacggccctaggggagagaggcagaccagaacgcgtgggcccgccccttccgctatgccgcaatctcggtcaacagagagtgcccatgccgctaccttgccacctagaggccccgaaccctccgcccaggaacaaatggaaggcatgctgtgtaggaaacaggagatggaggccttcggcaaaaaggccgctaataggagttggcagaatgtttattgtgtcctgcgccggggatcacttgggttctataaggatgcaaaggctgcttctgctggcgtcccgtatcatggcgaagtgcccgtttccctggccagggcccagggctcagtcgcgtttgactaccggaagaggaagcatgttttcaagctcggcctgcaagatggaaaagaatacttgtttcaggcaaaggacgaggtgagttgccctagttgcagttccctctcagtgccctttcaaaaactaccggcagctgacagccccagttttccggtgctgcctttgtttccaggcctcgttctgtgtggaaaaaccggatgcgtccgaaggccgcaccaagctgcacttcctgtttag

SEQ ID NO: 206706 - DNA, 7173 bp, synthetic construct
  misc_feature 1..7173: note = Description of Artificial Sequence: Synthetic coding sequence
  source 1..7173: mol_type = other DNA
atgagcagcaccctgagccccaccgacttcgacagcctggagatccagggacagtatagtgatatcaataaccgatgggacctgcccgattctgattgggataacgactcaagttcggcccgactgtttgagcggagtcgcattaaagctttggcagatgaacgggaggctgttcagaagaagacattcaccaaatgggttaattctcatctggctagagtaacatgccgcgtgggggatctatatagcgacctgagggacggcagaaatctactgagactgctggaggtgctgagtggggagatcctgccgaaaccaaccaagggccgcatgcgcatccattgccttgagaatgtagataaagcgctgcagttcttgaaggaacagaaagtccacctcgagaatatgggcagccacgatattgtagatggaaatcaccgcctgaccctggggctcgtgtggaccataattctccgattccagatacaggacatttccgttgaaaccgaagataacaaggagaagaaatccgctaaggacgccctgctgttgtggtgccaaatgaaaacagccggatatccgaacgttaatgttcataattttacgaccagttggagagacggcctggcgttcaatgccatcgtgcacaaacacagacctgacctcctggattttgagagcctgaagaagtgcaacgcgcactataacttgcagaatgctttcaatttggcggagaaggaacttggcctgaccaagttgctcgaccctgaggatgtgaatgtcgaccagcctgacgagaagtcgataatcacttacgtggccacttactaccactatttttccaagatgaaggcccttgccgtagagggcaagcgcatcggtaaagtgctagaccacgctatggaggccgagaggctcgtggaaaagtatgagtctttagccagcgagctcctgcagtggatcgaacaaaccatcgtcacactgaatgatcggcagctagccaactctctgtcaggcgtccagaaccagctgcaaagtttcaattcctacaggacggtggaaaagccccctaagttcacagagaaagggaacttagaggtcctgctgtttacaatccagagtaagctaagagccaacaatcagaaggtgtacactcctcgagaagggaggctgatcagtgatatcaataaggcatgggagcgcttagaaaaggccgagcacgagagagaactcgcactgcgaaccgagttgatcaggcaggagaagctcgagcagctggctgctcgcttcgatcgcaaggctgcgatgcgcgaaacttggctgtctgaaaaccagaggctggtctctcaagataacttcggtttggagctggccgcagtggaagctgcagttcggaagcacgaagctatcgaaaccgacatcgtggcctatagcggcagggtgcaggccgtcgatgccgtggccgcagaactggcagcagagaggtatcacgacattaagcgtatcgccgcgcgacagcacaacgttgcgaggctgtgggactttcttagacaaatggttgccgctaggagggagcggttactgcttaacctcgaactgcagaaagtgttccaggatctattgtaccttatggattggatggaggaaatgaaggggcggcttcagagtcaggatttaggcagacatctggctggcgttgaggaccttttgcagctgcacgagctcgtcgaggccgatatcgcagttcaggcagagagggtacgggcagtgtccgccagcgctctccggttctgcaatccaggcaaagagtaccgcccctgtgacccacaacttgtgagcgagcgcgtggcaaagctggagcagtcatatgaagctctttgcgagcttgcagcagccaggagagccagactggaagagtctcggcgactgtggaggtttctgtgggaagttggtgaagccgaggcctgggtcagagagcaacagcatttactcgcctcagccgacactggtcgggatctcaccggcgcactcagattgctaaataagcacaccgctctgcggggagagatgagcgggagactcgggcccctgaagctgactctcgaacaaggtcagcagttggtcgctgaaggtcacccaggtgcgtcacaggcttctgctagggccgccgaactgcaggcacagtgggagcgccttgaagccctcgctgaggagcgcgctcagaggctcgcacaggccgcctccttgtaccaattccaggcggacgctaacgatatggaggcctggctggtggacgctcttcgactggtctcctcccctgagctgggccacgacgaattctcgacacaggcccttgctaggcagcatagagccctcgaagaagagatccgcagccatagacctacactcgatgccctccgggaacaagcagctgcattgccccctacactttcgaggactcctgaggtacagtccagagtgcccacgcttgagcgacactatgaggagctacaggcacgcgctggagaaagagccagagcattagaagcggccctggcgctttataccatgctgagtgaggccggggcttgtggtctgtgggtggaggaaaaagaacaatggttgaatggcctggcactgccagaacggctggaagacctggaggtggttcagcaacggttcgaaacacttgaaccagagatgaacaccctggctgcccagattaccgccgtaaacgacatcgcagagcaactgctgaaggccaaccctcccggtaaagatcggatcgtcaatacacaggaacaactgaaccacaggtggcagcaattcaggcgactggccgacggaaaaaaggccgctctcacatccgccttgtctattcaaaactatcatctcgagtgcaccgagacccaggcctggatgagagagaaaactaaggtgatcgagagcacccagggactgggtaacgacctcgccggcgtgcttgcgctacagaggaagctggccgggactgagcgggatctggaagcgatcgctgcgcgagtgggagagctcacaagagaggcaaatgctctggcagccggtcaccctgcccaagctgttgccatcaatgcacgcttacgggaagtgcagactggctgggaagatctgcgagcaacaatgcggcgtcgggaggagtccctcggggaggccaggcgattgcaggatttcttacgctctctggacgattttcaggcctggctgggaagaactcagacagcagtcgcatcagaagaaggaccagctactttgcctgaggccgaagccctgctcgcgcaacatgcagctttaagaggagaggtggaacgtgcacagagcgaatatagcagactgcgggctcttggcgaggaagtaactcgagatcaagccgatccacagtgtctttttctgaggcagcggctagaggccctcggcaccggctgggaagagttaggccggatgtgggagtccaggcaaggacgccttgctcaagcccacggcttccaggggtttcttcgcgatgctcggcaggctgaaggcgtgcttagcagccaggaatatgtactgtcccatacagagatgcccggaactctccaagctgccgacgccgccattaaaaagttagaagatttcatgagcaccatggatgccaatggcgaacgtatccacggtctgctggaggctggccgccagctggtgtctgaggggaacatccacgctgacaagataagggaaaaagctgactctatcgagcgccggcataagaaaaaccaggacgccgcccagcagtttttggggcggctgcgggacaatagagaacaacagcattttctccaggactgtcacgaactgaaactgtggatcgacgagaagatgcttactgcccaggacgtgtcatatgatgaagcgagaaacctacatacaaagtggcagaaacaccaggcttttatggccgagctggccgccaataaggactggctggataaagtggacaaggaggggcgggagttgacattggagaaacccgagctcaaggcccttgtttccgaaaagctccgcgatttacacagacgttgggatgagctggaaacaaccacgcaagccaaagcccggagtctgttcgacgccaaccgagctgaattgtttgcacagtcttgttgtgcattggagagttggttagagagccttcaggcccagcttcactctgatgattatggcaaagatctgactagcgtgaacattttgctgaagaaacagcagatgcttgagtgggagatggcagtcagagagaaggaagtggaagcgattcaggctcaggccaaggctctggcccaagaggatcagggtgctggcgaagtcgaacggacatcccgtgcggttgaagagaaatttagagccctgtgtcaacccatgagggagcgctgtcgccggctgcaagcctccagagagcaacatcagttccaccgggatgtggaagacgaaattttgtgggtgactgaaagactgcccatggcctctagtatggaacatggcaaggatctgccgtctgtacagctgctgatgaagaagaaccagactctgcaaaaggaaatacagggccacgaaccccgcatcgctgatctgcgagaacgccagcgagccctgggggccgctgccgctgggcctgagctggcagagttgcaggaaatgtggaagaggttaggccatgaactcgaactacgcggcaagcgcctcgaagacgccctgcgggctcagcagttttatcgagacgctgcggaagccgaagcatggatgggggaacaagagctgcacatgatgggccaggaaaaggccaaagacgaactgtctgcgcaggccgaagttaagaagcatcaggtgctggagcaagcacttgctgattatgcgcagactatccaccaactagcggccagttcacaggatatgatcgaccacgagcatcccgagagtacccgcatcagtattcggcaagctcaggttgacaagctgtatgccggcttaaaggaattagctggggaacggcgtgaacggctgcaagaacatcttcgactttgtcaattaagacgggagctcgacgatctggagcaatggattcaggagagggaagttgtagctgccagtcacgagctgggccaggattacgagcacgtgacaatgctgagggacaagttccgggaattttctagagatacgagcacaatcggccaggagagggtcgatagcgcaaacgctttggcaaacgggctgattgctggcggacacgccgctagggccacggtcgcagagtggaaagacagcctgaacgaggcctgggcagatctcctcgagttgctggatacccggggccaggtactggccgccgcatacgagctccaaaggttcctgcatggggcgagacaggccctagcacgtgttcagcataaacagcagcagctcccggacggaacaggccgggacctgaacgccgccgaggccctgcagaggcggcactgtgcatatgagcatgatattcaggccctgagcccacaggttcagcaagtacaggatgatggccatcggttacagaaagcgtacgcgggagataaagccgaggagatcggaaggcatatgcaggcggtggccgaagcctgggcccagctgcagggtagtagcgctgccagaagacagctgctattggacactaccgataagtttcgattctttaaggctgttcgcgagcttatgctttggatggatgaagtgaatctccagatggacgctcaggagcggcctcgcgacgtgtcatctgccgatttagtgataaagaatcagcaggggataaaagcggaaattgaggcccgggcggataggtttagctcctgtatcgacatgggcaaggaactgctcgccagatcacactacgctgcagaggaaatttctgaaaagctctcccagttgcaggccagaagacaggagacggctgaaaagtggcaggaaaagatggactggcttcaactggtgctcgaggtgctcgttttcgggcgcgacgccggcatggccgaggcttggctgtgcagccaggagccattggtacggagcgccgagcttgggtgcactgtcgacgaagtggagtccctgattaagcggcatgaggcctttcaaaagagcgccgtggcctgggaggagagattttgcgccctggagaaactgaccgccttggaggaaagggagaaggaaagaaaacgcaaacgagaagaagaggagagaaggaaacaaccacccgcacccgaacccaccgccagtgtgccccccggggacctcgtcggagggcagactgcctctgataccacctgggacggaacgcagccacggccgcctccctccacacaggccccgagtgtaaacggagtatgcactgatggtgagccttcacaaccgttactggggcaacagcgattggagcatagctcctttcccgagggcccgggacctggtagtggggacgaagccaacggaccacgcggggaaagacaaactcgcactcgcggcccagctccctcagcaatgcctcagagccgttccacagaaagcgcccacgccgctactctcccaccccgcggacccgagccctccgcccaggagcagatggaagggatgctctgtaggaaacaggaaatggaggctttcggtaaaaaagcagcaaataggagttggcagaacgtgtattgtgtgctgcggcggggttcactcggattctacaaggacgccaaggcggcttctgcaggggtgccataccacggcgaagtgcctgtgagtttggctagggcacaaggtagtgttgcgttcgattacaggaagagaaaacatgtattcaagcttggcctgcaggatgggaaggaataccttttccaagccaaggacgaggccgagatgagcagttggcttagagtggttaatgccgctatagcaaccgcatcttctgcctcaggtgagcctgaggagccagtcgtacctagtaccaccagaggaatgacacgggccatgacgatgcctccggtgtcccctgtaggagccgagggtccggttgttctgcgttctaaggacggccgcgaacgcgaaagagaaaaacggttttcctttttcaaaaagaataaatag

SEQ ID NO: 206707 - DNA, 6465 bp, synthetic construct
  misc_feature 1..6465: note = Description of Artificial Sequence: Synthetic coding sequence
  source 1..6465: mol_type = other DNA
atggcccaggtgcccggcgaggtggacaacatggagggcctgcccgcccctaacaacaatcccgcagcacgttgggagagtcccgaccgaggttgggagagggagcagcctgccgcctcaactgccgccgcttctcttttcgaatgttcccggattaaggcgctggccgatgaaagggaggcggtacagaagaagaccttcacgaaatgggtgaattctcatctggcaagggtcggttgccacattggcgacctttacgtcgatttaagggatggatttgtgctcacacgactgcttgaagttctgagcggcgagcagcttcctagacccacgagaggtaggatgaggattcactcattggagaatgtggacaaagccctgcaatttctgaaagagcagagagtacacctcgagaacgtggggtctcacgacatcgtggacggcaatcaccgattaacattagggttggtgtggacaatcattctccgattccagatccaggtgatcaagatagaaacagaagacaaccgggagactcgtagcgctaaggacgccctgctcctctggtgtcagatgaagacagcaggctatccggaagtcaatatacagaattttaccacttcctggcgcgacgggctcgcatttaacgctttgatccataggcatcggcccgatctggtggacttttctaagctgactaaatcgaatgcgaattacaatttgcaaagggccttccgaaccgccgagcagcatttggggctggccagacttcttgaccctgaagatgtcaatatggaggctcctgacgagaaatccattatcacctacgtcgttagcttctatcattacttctctaaaatgaaggctttggccgttgagggaaaacgtatcgggaaagtcctggatcaggttttggaagttggaaagataatcgagagatacgaggagctggcagcagaactgctagcatggatccaccgcacagtcggtttaatttctaatcagaagtttgcaaatagcctgtctggtgttcagcaacaactgcaggcctttacagcgtactgcacccttgaaaagcccgtgaaatttcaagagaagggcaacctggaggtgttgttgtttagcatacagagtaaactgagagcctgcaatcgcagactcttcgtgcctagggagggatgtgggatttgggatattgacaaggcctggggcgagctggagaaggccgaacatgaaagagaagccgccctcagggctgaactgatccgacaagagaagttagaactgctggcccagagatttgaccataaggtcgccatgcgtgagagctggttgaacgaaaatcagcgtctggtgtctcaggacaatttcgggtatgagttgccggcggtggaggccgccatgaaaaaacatgaagcgatagaggcagatattgctgcctacgaagagcgggtccagggtgtggcagagctggcccaggcactagccgccgaagggtactacgatatcagacgcgtggcggcacagagggacagcgtccttcgccagtgggcactgctgaccggattggtcggggccaggcgaacgcgcctggagcagaatctagctttgcagaaagttttccaggaaatggtttacatggtcgattggatggaagagatgcaggcacaattgctgagtagagagtgtggccagcacttggtggaagccgatgacttacttcagaaacacgggctgcttgagggtgacatcgccgcacagagcgaacgggtcgaggccctgaatgccgccgccctcagattttcacaactgcagggataccagccctgcgatccacaggtcatttgtaaccgagtgaatcacgtgcatggttgccttgccgagctacaagaacaagcagctcgcagacgagccgaactggaggccagcagatccctctgggctctgttacaggaactggaagaagccgaatcgtgggcaagagacaaggagaggcttctggaagcggcaggaggaggcggggccgccggcgcagccggtgcagccgggaccgcagggggagcccatgatcttagctctaccgctagactcttagcgcagcacaagattctacagggagaattgggtgggagaagagcactacttcagcaggcgctgcgttgcggagaagagctggtcgcagccggaggtgcagtcggccccggagccgacacggtgcatctggtcggactcgccgagcgggctgcgtccgcccggcgccgatggcagaggttggaggaagcagctgccagacgagaacgtcggctgcaggaagcccgtgccctacatcaatttggcgctgatttggacggcctgctcgattggctgagggatgcttatcggcttgccgcagccggcgattttggccatgacgaggcctcttcaagacgcctcgccagacaacatcgggctctcactggggaggtggaggctcaccggggaccagtaagcgggctgcgccggcaactcgcaacgctgggcggcgcaagcggcgcgggcccgctcgtggtagctcttcaggtaagagttgtcgaagccgaacagctgtttgcggaagtaacggaggttgccgctttgcggcgtcaatggctgcgggatgccctggccgtgtacaggatgtttggggaagtccatgcatgcgaactctggatcggggaaaaggaacagtggctgctgtccatgcgagtaccagactctctggatgatgtcgaggtcgttcaacatcggtttgaaagcctggatcaagagatgaacagcttgatggggcgcgttctagatgtgaatcataccgtccaagaactcgtcgaaggcggccacccttcgagcgatgaagtacgctcatgtcaggaccatctgaattctagatggaaccgtatcgttgagttggttgaacagaggaaggaggagatgtctgccgtgctactagtggagaaccacgtccttgaggttgccgaggtgcgggcccaggtccgggaaaaacgacgcgctgttgaaagcgcacccagggctggcggtgcattgcaatggcgccttagcggcctggaagccgccctgcaggcgctcgagccacgccaggccgctctcttagaagaggccgcgctgctcgccgagcgctttcctgctcaggcggccagactccaccagggagccgaagagctcggggctgagtggggggcgctcgcctctgctgctcaagcctgcggtgaagcggtcgcagcggccggacgattacagaggttcctgcacgacctggatgcattcctggactggcttgttcgcgcccaagaagccgccggaggatctgagggccccctgccaaatagtctagaagaagctgacgcattgctggccaggcatgctgccctaaaagaagaagtggaccagcgggaagaagactatgcccgcatcgtagccgccagcgaggctctattggcggccgatggggctgagttgggtcccggcctcgccctggacgaatggctgccacatcttgaactgggctggcacaaactgctcgggctgtgggaggctcgcagggaagctctggttcaggctcatatctaccagttgtttctgagagatctgcgccaggcgttagttgtgctgcgaaaccaggagatggccctatcaggggctgagctgccaggaaccgtcgaatccgtggaggaggccttaaagcagcaccgcgattttctgaccactatggaactctctcagcagaagatgcaggttgccgtccaggcagctgagggtctgctgcgccagggcaacatctatggtgaacaggcacaagaagccgtgactcgattgctcgaaaaaaatcaggagaatcaactgcgcgcgcagcagtggatgcaaaagctgcacgatcagcttgagttacagcactttttacgcgattgccacgaactggacggttggatccatgaaaaaatgctgatggcccgcgacggcacccgagaagacaaccacaagttacataagcgatggctgcgtcaccaagctttcatggctgagctcgcccagaacaaggaatggctggagaagattgagcgagaggggcaacaacttatgcaagaaaaacccgagctggccgcctcagtacggaagaagctgggcgaaatccggcagtgttgggccgaacttgagagtactactcaggcaaaagctaggcagctctttgaggctagcaaggccgatcagctggtccagagcttcgccgaactggacaagaaactgcttcatatggagtcacagttgcaggacgtggaccctggcggtgatctcgcaactgtaaactcccaactgaagaaactacagagtatggagtctcaggtggaagaatggtaccgggaggtcggagagcttcaggcccagacagccgccctgccactggaacccgcatcaaaagaactggtaggcgaaaggcagaacgccgtgggtgagaggttagtccgattactagaacctctccaggagcgcaggcggctgcttctggcctccaaggagctgcaccaggtcgcgcatgatctggatgacgagctggcgtgggtacaggagcgcctgcccctggctatgcagacagaacgcgggaatgggctgcaggcagtacagcagcacataaaaaaaaatcagggactgcgaagagagattcaggcacacggcccaaggctagaagaagttttggagagggcaggcgccctcgcctcattgcggtccccggaggctgaggccgtcaggaggggccttgagcagttgcagagtgcctgggctggactgcgcgaagccgcagagcgccgtcagcaggtgttagatgccgcgttccaggtggaacaatattacttcgatgtcgcagaagtcgaagcctggctcggggaacaggagctgctgatgatgtcagaagataaggggaaggacgaacaatcaacacttcagctcctgaagaagcaccttcagctggagcaaggggtcgagaattacgaagagtcaatcgctcagctgtccaggcaatgccgagcgctgcttgagatgggacatcctgactcagaacagattagccggagacaaagccaggtggataggctctatgtcgcgttaaaagaactcggagaggagcgccgggtggctctggaacaacagtactggctgtaccagctcagccgccaggtcagcgagcttgagcactggattgccgagaaggaggtcgtcgccggctctccggagctggggcaagacttcgagcacgtgagtgtcttacaggaaaagttcagtgagttcgcctccgagactggcatggccggccgggagcgtctcgccgcagtgaatcagatggttgacgaactaatcgagtgcggtcacacagccgccgccaccatggcggagtggaaggacgggctgaatgaagcatgggcagagttactggagttaatgggcacgcgtgctcagctgctcgcagcctcccgagagctgcataagttttttagcgatgccagggagctgcaaggccagatcgaggaaaaaagaaggaggctcccgagactcacaacacccccggagcccaggccttcagcatcctccatgcaacgtacactacgcgccttcgaacatgatttacaactgctcgttagccaggtgagacagttacaagagggggcagctcagctgaggaccgtttatgccggtgagcatgctgaggctatagcttcacgggagcaagaggtgctgcaaggctggaaggaactgctaagtgcctgcgaggatgccagacttcatgtgagttctacggcagacgccctgaggttccattcacaagtacgtgacctgctgtcctggatggacggcatcgcttctcaaatcggggcagccgataagccgcgggatgtgagtagcgtggaggttttgatgaattatcaccaggggcttaagactgagttagaggctagagtgcctgagttgactacgtgtcaggagttgggccggtctctactgcttaacaagagtgctatggccgacgagatacaggctcagcttgacaaactgggtactagaaaagaggaagtgtcagagaaatgggacaggcactgggagtggctccagcagatgctagaagtccatcagtttgctcaagaggccgtggtggccgatgcttggttaaccgcacaagaacccctgttacagtctcgtgagctggggtcatccgtggacgaggtggaacaactcatccggcgacacgaggcgttccgaaaagcagcagctgcatgggaagagcggttttcatctctgcggaggctgaccaccccccgtagggaggaccatctcaatcccggtgtccaggaccaaccatggcagcacacagagaagccgtcactgccaaaacctaaagctaataaagagaaaaccgcccgcagagatggaacatgcctgtag

SEQ ID NO: 206708 - DNA, 3930 bp, synthetic construct
  misc_feature 1..3930: note = Description of Artificial Sequence: Synthetic coding sequence
  source 1..3930: mol_type = other DNA
atggcccaggtgcccggcgaggtggacaacatggagggcctgcccgccccaaataacaatcccgctgctcgctgggagtctcccgatcgggggtgggagcgggagcaacctgccgcctcaactgccgccgcctcactcttcgagtgctccaggattaaggcccttgcagatgaaagagaagccgtacagaagaagacctttactaagtgggtgaactcccaccttgccagagtcggatgccacatcggagacttatacgttgatcttagagatggctttgttttaacaagactgttagaagtcctgtctggcgaacagctgccccggcccactcggggccgtatgcggattcattccctggagaacgttgacaaggcgctgcaatttttaaaagagcagcgtgtgcacctggaaaacgtagggtcacatgatatcgtcgacggaaatcacaggctcaccttgggcttagtgtggaccatcattctccgattccagattcaggtcatcaagattgaaaccgaggacaacagggaaaccagatcagcgaaggatgccctgttgctgtggtgtcagatgaagacagcaggctatccagaagttaatattcagaatttcaccactagctggcgagatggactcgcctttaatgctctgattcatagacatagaccagatctggtcgatttttccaaacttacaaagagtaacgccaactataatctgcagcgggccttcaggacggcagagcagcatctgggactggcacgattgctggacccagaggatgtgaacatggaggcccccgacgaaaagtctatcattacctatgtcgtttccttttaccactacttctccaagatgaaagctctggccgtggaaggcaaacgcatcggcaaagtgctcgatcaggtgttagaggtgggcaaaattattgagcgttacgaagagttggctgcagagctgctggcctggattcaccgaaccgtcgggttgatcagtaaccagaagttcgccaactcgctgtccggcgttcaacagcagcttcaggcctttacagcttattgcaccttggaaaagccggtgaaatttcaggagaagggaaatctggaggtgctgctatttagcatccagagcaaacttcgcgcttgcaatcgccggctgttcgtgccacgggaagggtgcgggatttgggatatagataaggcttggggggaactggagaaggcagagcacgagagagaggcagcgctccgcgctgagctgattagacaggagaagctagagctgctagcccagcggtttgatcacaaggtagcaatgcgggagagctggctgaatgagaaccaacgtctggtgagccaagataacttcggatacgaactacccgctgtggaggcagcgatgaagaagcacgaggcaatagaagccgacattgctgcctacgaagaacgggttcaaggagtagcggaactcgcccaggcgctagcagccgagggctactacgatattcggagggtagcagcacaacgggactccgtccttcgtcaatgggctttgttaacgggtcttgtgggtgccagacgcacaagactagaacaaaatctcgctcttcagaaggtgttccaagagatggtctacatggttgactggatggaagagatgcaggcgcagttgctctcaagggagtgtggtcagcatctggtcgaagctgatgacctgctccagaaacacgggcttttggagggagatattgccgcccaatctgagagagtagaggctttgaatgctgcggccctgaggttctcccagttgcaaggttatcagccttgtgatccccaggtgatctgtaatcgcgtcaatcacgttcatggatgcctcgcagagctgcaagaacaagcggctaggcgcagggccgagctagaagcgtcacggtcactatgggcccttctgcaggaattagaggaagcggaaagttgggccagagacaaggagcgactgttggaagctgctggaggaggcggtgctgcgggcgcagccggggccgccggcaccgccgggggcgcgcacgatttatcttcaacagcccgcctgttagcccagcataaaatattgcagggtgagctgggcggaaggcgggcactactgcagcaagctctcagatgcggggaagaacttgtggcagctggcggcgccgttggccctggcgccgatacggtgcacctggttgggctcgcggaacgtgccgcaagcgcaaggcggcgctggcagagactggaggaagccgcggcaaggagagaacgcagattacaagaggcaagagcactgcatcaattcggtgcagacctggatgggcttctcgactggctgcgcgacgcgtacaggcttgccgcagccggtgatttcgggcatgatgaggctagcagccggagactcgcaaggcaacacagagcactcactggggaagttgaagcccaccggggacctgtgtcaggtcttagaagacagctcgcgaccctggggggagcttccggcgccggtccattagtcgtcgccttgcaggtgcgggttgtcgaagcggagcagttgttcgccgaagtgactgaagtcgcggccttacggagacaatggctcagagacgccctggcagtgtaccgcatgttcggtgaggtccacgcttgtgaactgtggattggtgagaaggagcagtggctcctgtccatgagagtgcctgacagcctggacgatgtagaagttgttcagcaccgctttgaatccctggatcaggaaatgaacagcctgatgggcagggtgctggacgtgaaccacactgtgcaggagctcgtggaaggaggccaccctagttctgatgaggtgcgctcttgtcaggaccacctcaattcacgatggaataggatcgtggaattggttgagcaacggaaggaagagatgtctgccgtgctccttgtggagaaccacgttctggaggtcgcggaagtgcgtgcccaggtcagggaaaagcgccgcgccgtggaaagcgcacctcgcgccgggggcgcacttcagtggcgcttatcagggctggaggcagcgctgcaggcactggagccccgtcaagctgcattactggaggaggcagccctgctcgccgaaaggttcccagctcaggctgcacggctccatcagggggcggaggagctgggtgctgaatggggcgcccttgccagcgctgcccaggcctgtggcgaggctgtggcagccgctgggaggctgcaacgatttctgcacgacctggatgcttttttggattggttggtccgggcacaggaggccgccggaggtagtgaggggcccttgccgaacagccttgaagaggccgacgctttactcgccagacatgctgctcttaaggaggaggtggatcaacgtgaagaggactacgccagaatcgtggctgcatctgaagcgctgcttgctgccgatggggccgagctggggccaggtcttgctctcgacgagtggttgccccacctcgaacttggctggcacaaactgcttggcctttgggaagcgagacgcgaggcactagtacaggcccatatttaccagctgttccttcgcgatctacgccaagcactcgtggttctgcggaaccaggagatggctctttcgggcgcggagttgcccgggacagtcgagtccgtagaagaggcactaaagcagcacagagactttctgacaaccatggaactgagtcaacaaaagatgcaggttgccgtccaggccgccgagggcctcctccggcaagggaacatttacggtgagcaagcgcaagaagccgtaaccagattgctggagaaatgtctgattatacatccagccctccttcatccaccctgggagcctcccgatcttcctaggagtagttcctag

SEQ ID NO: 206709 - DNA, 7695 bp, synthetic construct
  misc_feature 1..7695: note = Description of Artificial Sequence: Synthetic coding sequence
  source 1..7695: mol_type = other DNA
atggcccaggtgcccggcgaggtggacaacatggagggcctgcccgcccctaacaataatccagcagcacggtgggaaagccccgatagaggatgggagcgggaacagcctgccgcttccacagccgccgcttcacttttcgaatgttctagaataaaagccctggccgacgagagagaggccgtgcagaagaaaactttcacaaaatgggtgaacagccacctcgcaagggtgggatgtcatatcggagacctctacgttgatttgcgtgatgggtttgtactaacacgtctgttggaggtactctcaggggaacaattacccaggccgacccggggaagaatgcgcatccactcgcttgagaatgttgacaaggcactgcagtttctaaaggagcagagggtacacctggagaacgttgggagccacgatatcgtggatggtaaccaccgcctcacattggggctcgtctggactatcatcctaagatttcagatacaggtgataaagattgagacagaggacaaccgggaaaccaggtcagctaaggacgccttgctcctgtggtgtcagatgaagacggccggatatccagaagtcaatattcagaacttcacaacgagttggcgggatggcttggcgttcaatgctttaatccatcgtcacagacccgaccttgttgatttttccaagctcaccaagagcaatgcaaactataatcttcagagggcattccggaccgctgagcagcacctggggctggcaaggctcctggatcccgaagatgttaacatggaagccccagacgaaaagagtattattacttacgtggtgagcttttatcattatttctccaagatgaaggcgttggctgtggaaggaaaacgaatcggcaaagtattagatcaggtgttagaagttggcaaaatcattgagagatacgaggaacttgccgctgaattgcttgcatggattcatagaaccgtaggactaataagcaatcagaaatttgccaatagtctcagcggagtacagcaacagctgcaagcctttactgcatattgtactttagaaaagcctgtgaagttccaggagaaagggaatctggaagtgctgctgttcagcatccagagcaaactgcgggcgtgtaatcgccgactgttcgtgccccgagaaggctgcggaatttgggacatcgacaaagcgtggggagagctcgagaaagctgaacacgagcgcgaggccgcattgcgggctgaactgattcggcaggagaaactggaactcctggcccagagattcgatcacaaagtggccatgcgagagtcttggcttaatgagaatcagcgactcgttagccaggataactttggttacgagctgcccgcggtggaagccgccatgaaaaagcacgaagccatagaggccgatattgccgcgtacgaagaaagagtgcaaggcgtggccgagctcgcccaggccctggccgccgaaggctattatgacattagacgggtggcagcccaacgtgattcggtcctgaggcagtgggcgctcttgacgggcttagtgggagcaagaagaacccgtctggagcaaaatctggcacttcagaaagtgtttcaggagatggtctatatggtagactggatggaagaaatgcaggcccagctgttgtctagagagtgtggccagcatttagtggaagctgatgacctgctgcaaaaacatgggctgctggaaggagatatcgcggcccagagcgagagggtggaggctctcaacgctgccgccctccgtttttcgcagctccagggctatcagccatgcgatccccaggtgatctgtaacagggttaaccacgtgcacgggtgcctagcagaactccaagaacaggcagcaaggcgccgagcagaactggaggcaagtaggagcctatgggccctacttcaggagcttgaggaggcagagtcgtgggcacgggacaaagagcgtctgctggaagctgcaggggggggcggcgcagcaggcgcagcgggtgctgccggaaccgcgggcggagctcacgacctctccagtacagcgagattacttgcccaacataagatacttcaaggggagctgggtggacgacgggccctgctccagcaggcattgcgatgcggagaggaacttgttgcagcgggcggggctgttggaccaggagccgacaccgtgcacttagtgggacttgcggagcgcgccgccagcgcacgccgccgatggcaacgcctcgaagaggctgctgcccgccgtgaacggagactgcaggaagctcgcgcactccatcagtttggagctgatttggacggactgctcgattggctgcgcgatgcctatcgtcttgcagctgcaggcgatttcgggcatgatgaggcaagcagtcgtcggctggctagacagcacagagcccttaccggagaggtagaggctcatcggggtccagtgagcggcctcagacggcaactcgcaacgctaggcggagccagtggggctgggccattggtggtcgctctgcaggtgcgggttgtcgaagccgagcagctgtttgctgaagtgaccgaagtagccgctctcaggcgacagtggttgagggacgccctggctgtgtatagaatgttcggagaggtgcacgcatgcgaactgtggattggcgagaaagagcagtggctgctaagtatgcgcgtgcctgattcgttggatgatgtcgaagtggtccagcaccggttcgagtccctggaccaggagatgaattctctgatgggtagggtgttggatgtaaaccatacggttcaggagctagttgagggtggtcatccctccagtgacgaagttagatcttgccaagatcacctcaacagcaggtggaacagaattgtagagctcgtggaacagagaaaagaagaaatgagcgccgttctcctggtagagaaccatgtcctggaggttgctgaagtgcgagcacaagttcgagaaaagcgacgggccgtggagagtgccccgcgcgccggcggcgccctacagtggaggctgtcaggacttgaggccgccctccaagctttggaaccacgtcaagccgcactgctagaggaggcggcgctgttagctgagaggttccctgctcaagccgcccggctgcatcagggggccgaggaactgggagctgaatggggcgccctggcctctgcagcccaggcctgtggcgaggctgttgctgctgccgggcgactgcagagattcctgcatgacttggacgcattcttggactggctagtgagagcccaggaggcagccgggggatccgaagggcctctaccaaattcgctggaagaggcagacgcacttctcgcacggcacgccgcactgaaagaggaagttgatcagcgggaggaagactatgctagaattgtcgccgcctctgaggctcttttggcggcggatggcgctgagctagggccaggcctggcactggatgagtggctcccccatctggaactggggtggcacaaactactgggtctgtgggaggcacgaagggaagctctggttcaggcgcacatttaccagctcttccttcgcgacctccgccaggccctcgttgtccttaggaaccaggagatggccctgtccggtgctgagctccctgggacagtggagtccgtggaggaagcactaaaacagcacagggactttctgactactatggaactcagccagcagaagatgcaggtggcggtacaggcggcagagggcctcctccgccaggggaacatatatggggaacaggctcaagaggccgtcactcgcctgctcgaaaagaaccaggagaatcagttacgggcacagcagtggatgcaaaaattgcatgaccagctcgaactccagcacttcctgcgagattgccatgaactcgacgggtggatacatgagaaaatgcttatggccagggatgggacacgggaggacaatcataaattgcacaaacgctggttacggcatcaggcttttatggccgagcttgctcagaataaagaatggctcgaaaagattgagagagaggggcagcagctgatgcaagaaaagccagaactggctgcctcagtgcggaaaaaattgggggagatcaggcagtgctgggctgaattggagagtacaacccaggccaaggcgaggcagctcttcgaggccagcaaagcagatcagctggtgcagagtttcgccgaattggacaagaagcttttacacatggagtctcaactccaggacgtcgatcccggaggcgatctcgcaactgtgaacagccagttaaagaagttgcaatcaatggagagtcaggtggaggagtggtacagagaggtgggtgaactacaggcacagactgccgctctgcctctggaacctgctagtaaagagcttgtcggggaacggcagaacgccgtgggcgagagactcgtgcggctgctagagccactgcaggaacggagacgtctcttgctggctagcaaggaattgcatcaggttgctcacgacctcgatgacgagctggcctgggtgcaggagagacttccactggctatgcagacggagaggggcaacggactgcaggccgtccagcaacatataaagaagaaccagggcctccgaagggaaattcaggcgcacggaccaaggctggaggaggtcctggagagagccggggccctcgcctccttgcgtagccctgaagcagaagcggtgcgccgcgggctcgagcagcttcagagcgcatgggccggtctgagagaagcggcggagcggagacagcaggtgctcgatgctgcctttcaggtggaacaatactatttcgatgtagctgaggtggaggcctggttgggcgagcaggagctcctcatgatgagcgaggacaaaggaaaggatgaacagtcaaccctccagctgcttaaaaaacaccttcagttagagcagggagttgaaaactacgaggagagtattgctcagctgagccgccagtgcagggcgcttttagagatgggccaccccgacagcgagcagattagcagaagacagagtcaggtagacaggctgtatgtggccctcaaagagctcggcgaggagaggagagtggcattagagcagcagtactggttgtaccaattatccagacaggtgagcgagcttgaacactggatcgccgagaaggaggtcgtggctggttctcctgagttgggacaagactttgagcatgtgtccgtattgcaggaaaaattctctgagttcgcatctgaaactgggatggccggcagggagcgactcgcggcggtgaatcagatggtagacgagctcattgagtgtggtcatacagctgctgcaaccatggccgaatggaaagatgggcttaatgaggcgtgggctgagctcctcgagctgatgggaactcgagcccagttgctggctgcttctagagaactgcataaatttttttcagatgccagggaactgcaaggccagattgaggaaaagaggaggagattgcctagattgaccacaccccctgaaccccgacccagtgcatcatccatgcaaaggaccttgagagcatttgagcatgacctgcaactcctggtgagtcaggttaggcaactgcaggaaggcgctgctcagttgcggaccgtgtatgccggagagcacgccgaagcgattgctagcagggagcaggaggtgctccagggctggaaggaactgttatccgcttgtgaggatgctaggcttcacgtgagctccaccgctgacgcgctccggtttcattctcaggttagggatctccttagctggatggatgggattgcctctcagatcggtgcggcggataaaccacgcgacgtgtcctccgtggaggtgctaatgaattatcaccaagggctgaaaactgagcttgaagccagggtgcctgaactgaccacttgccaggagctgggacgctctttgctgctaaacaaatcggcgatggccgatgaaatccaggcccaattggacaagctgggaacacggaaagaagaagtcagcgaaaagtgggacagacactgggagtggcttcaacagatgctcgaggtgcaccaattcgctcaagaagctgtcgtggctgacgcttggctgaccgcacaggaacccctcttgcagtcacgcgagctaggtagtagtgttgacgaagtagagcagttgattcggcgccatgaggcctttaggaaggcagctgccgcctgggaggaaaggttctctagcttaaggcggttaactactatcgagaaaataaaagccgaacagtccaaacaaccgccaactcctctgctgggcaggaaattttttggggaccccactgagctcgccgccaaggctgcccctctcctgcggcctggcggttacgagcgcgggctggaacctctggcaaggcgtgcaagcgacacactgagtgctgaggtgcgcacacgagttggatatgtgcgtcaggagttgaaacccgaaagactccagcctagaattgaccggctgcctgagattccagggcgtgttgagcctgctgcgcttccagccgctcctgaggacgccgccgaaacacccgctacgcccgctgccgctgaacaggttcgaccccggccagaacggcaggaatccgctgaccgcgccgaagagttgcctagacgtcggcggcctgaaagacaggagagcgtggaccagtcagaggaggcagcccgccgcagaaggcctgagcgccaggaatccgccgagcatgaagctgctcactcactgactttgggacgctatgagcagatggagaggcgccgggaacggcgcgagcgccgcctggagcgccaggagagcagtgaacaggagatgcccatcaggggggacctggttaaaggcaaggccaccctggcagacatcgtcgagcagttacaggagaaggaagcagggcccggcttgcccgccggaccatctctaccccagccacgggaactgccacccggcagactgcctaacggtctggaactgcctgagagaactccccgaccagaccggcctcgtgccagggatcggccaaagccgaggaggaggcccagacctagagaggggggcgagggcggcggaagccgcaggtctagatctgctcctgctcaaggcggctcagcaccggcacctcctccacccccgactcacaccgtgcagcacgagggatttctcttacgcaaacgcgagctggatgctaaccgtaagtcatcaaaccgcagctgggtgtcactgtactgcgtgttgtccaaaggcgaactgggcttttataaggactccaaggggcccgccagcggctcgactcacggaggggaacccctcctgtctttgcataaggccacaagcgaggtggcttctgattacaaaaagaagaagcacgtgtttaaactgcaaacccaggacgggagtgagttcttgctgcaggctaaagacgaggaggagatgaacggctggctggaagcagtcgccagctccgttgccgagcatgccgaaatcgccagatggggccaaacactgccaacaacatcatcaaccgacgagggtaacccaaaacgtgaaggtggcgaccgtagggcatctggcaggagaaagtag

SEQ ID NO: 206710 - DNA, 2037 bp, synthetic construct
  misc_feature 1..2037: note = Description of Artificial Sequence: Synthetic coding sequence
  source 1..2037: mol_type = other DNA
atgctgatggcccgggacggcacccgggaggacaaccacaagctgcataaaaggtggctgcgccaccaggcttttatggcggagttggcacagaacaaggaatggctagagaaaatcgaaagagaaggccagcaattgatgcaggaaaaacccgaacttgctgcctctgtccggaaaaagctcggagaaattcggcagtgctgggccgaactcgaaagcaccacacaggccaaagcccgacagctgttcgaggcatctaaggcggatcagctcgtccagtctttcgctgaactcgacaaaaagttacttcacatggagtcacagcttcaggatgtcgacccaggcggggacctggccactgttaattcacaattaaaaaagttgcaaagcatggagagccaggtcgaggaatggtatcgagaagtgggcgagctccaggctcagaccgccgcactgcctttggagcctgcctcgaaagagctggtaggtgagcgtcagaatgcggttggtgagagactggtgcggcttttggagccactgcaggagagacggagactactgctggcctcgaaggaactgcatcaggtggcacatgacttggatgatgaactggcatgggtccaggagcgcctgcccctggcaatgcagaccgaaagggggaatgggctgcaggctgttcagcaacacatcaaaaagaaccagggcctgagacgcgaaatccaggcacatggcccaaggctggaggaggtgctagagagagcgggcgctttggcctctttacgcagtcctgaggccgaggctgtccggcgtgggctggagcagctgcagtccgcttgggctggccttcgggaggctgccgagcgaagacagcaggttctagacgcagccttccaggttgagcagtattattttgacgtagccgaggtggaggcatggctcggggagcaggagctgctaatgatgtccgaggataaggggaaagacgagcagagcaccctgcagctcctgaagaaacacctccaactggagcagggtgtggaaaactacgaggagagtattgcgcagctttcgaggcagtgcagagcactgcttgagatgggacaccccgacagcgagcaaatcagcagaaggcagagtcaagtggaccggctttatgtagccctgaaggagctgggcgaagaacgacgggtggcacttgaacaacagtattggctgtatcagctgtctcgacaggtgtccgaactggagcattggatcgcagagaaagaagtggttgctggatctccagagctgggccaggactttgagcatgtgagcgtgctccaggaaaagttctctgagttcgcaagcgaaaccggaatggccggacgagagagactggccgccgtcaaccagatggtggacgagttaatagagtgcggccacacagccgctgccaccatggctgaatggaaggacgggctcaacgaggcctgggccgagctacttgagctcatggggaccagagcacagctacttgccgcctctagggaactgcacaaattcttcagtgatgctagggaactgcagggacagattgaagagaagcggcggaggctgcctcgactcactacccctccagagccccggccgtccgctagtagcatgcagcgtaccctgcgtgcttttgaacacgacctgcaactcttggtgagtcaggtgagacagcttcaggagggcgctgcccagctgcgcactgtttatgctggtgagcacgccgaagccatagcctcacgcgagcaggaggtgctgcaaggctggaaggaactcctttccgcctgtgaggacgcacgtcttcacgtgtcgagtactgccgacgcattgcgatttcattcccaggtacgtgatctcctgtcttggatggatggaatagcatctcagattggcgccgccgacaagccccgctgcccatccagcttgctgggtctacctgcaagtccttggtggccaacacctgctacacccagccccctgacagctcctttctccatggaatag

SEQ ID NO: 206711 - DNA, 3924 bp, synthetic construct
  misc_feature 1..3924: note = Description of Artificial Sequence: Synthetic coding sequence
  source 1..3924: mol_type = other DNA
atgccccactaccccagctgcagcagcgcccccagcctgggcaccccaaggcccccccagattcagcagctggaagctcgtcatcgcaaccaggagaaccagctgcgggcacaacaatggatgcagaaactgcacgatcagctcgaactacaacatttcttgcgagattgtcacgaactcgatgggtggatacacgagaagatgcttatggctagagatgggacgcgggaagacaaccataaactacataagcgatggttacgccatcaggccttcatggccgagctagctcaaaataaagagtggctggaaaaaattgagcgcgaagggcagcagctcatgcaggaaaaacccgaactcgccgcttccgtccgaaaaaagctaggcgagatcaggcagtgttgggcagagcttgagtcaacaacacaggctaaagcacgtcaactcttcgaggcatccaaggccgaccagcttgtccagagttttgctgaactggacaagaaattacttcatatggaaagtcagcttcaggatgtggatccaggcggtgacctggcaacagtcaacagccagctgaagaagctgcaatccatggagtctcaggtggaggaatggtaccgcgaggtaggtgagctacaggcccagacggctgccctgcccttggagcccgctagtaaagagctcgttggagagcggcagaacgctgtgggggaacgcctggtgcggttgctggaaccgttacaggaacgccggagactcctgctggcatccaaggagttgcaccaggtcgcccatgatctggacgatgagctcgcttgggtgcaggaacggttgcctctggccatgcagacggagcgaggcaatggtcttcaagcggtgcagcaacacatcaagaagaatcaggggctcaggcgcgagattcaggcacacggcccgcgcctggaagaagtactggaacgcgccggtgcactggcaagcctccgatcccccgaggcagaggcggtaagaagggggctcgagcagcttcagagtgcctgggcgggactgagggaggccgctgaacgcaggcagcaagtactcgatgctgcatttcaagtggaacaatattactttgatgtagcggaggtggaggcctggcttggagaacaggagctgcttatgatgtccgaggacaaaggaaaggacgaacagtctacactccagctgctgaagaaacacctgcagttggagcagggcgtagagaactacgaagaatccatcgctcagctgtccaggcaatgtagagctctcctagagatgggtcaccccgattccgagcagattagtaggcggcaatcccaggttgatcggttatacgtggctctcaaagaactcggagaggagcggagggtggcgttagagcagcagtattggctttaccagctgagccgccaggtgtcagaacttgagcactggattgccgagaaagaggtggtcgcggggagcccggaactcggtcaggattttgagcatgttagcgtattgcaggaaaagttcagtgagtttgccagtgaaactgggatggccggtagagagcggcttgccgctgtgaaccagatggttgacgagctgattgaatgtggacacaccgcggctgctactatggcggagtggaaagacgggttaaatgaggcgtgggcagagctgctcgagctgatgggcactagggcccagctattggcggcctcccgagaactgcataagtttttcagtgacgctcgggaactgcaggggcagatagaggagaaacggcgtcgcctgccgagacttactaccccaccagaaccgagacctagcgctagctcaatgcaacgcactttaagggctttcgaacacgacttgcagctgctcgtgtcgcaggtgagacagctgcaggagggagcggcacagttgcggacagtctacgcgggggaacatgcagaagccattgcttcccgcgagcaggaggtgctgcaggggtggaaggagctactgtccgcttgcgaggacgcccgcctgcatgtctcttctaccgcagacgctcttagatttcactctcaggtacgggatctgctgtcttggatggacggcatcgcatcccaaattggcgccgccgacaagccccgggatgtctcatctgtggaggtcctaatgaactatcaccaggggctgaagactgagttagaggcacgtgttcccgaattgacaacctgccaagaactaggcaggtccctgcttctgaacaagtcagccatggcagacgaaattcaggcacagctggacaagctggggacaaggaaagaagaggtgtcagagaagtgggaccgccattgggagtggctgcaacagatgttggaagtgcatcagtttgcacaggaggcagtggtagccgacgcatggctcactgctcaggagcccctgttacagtcccgcgagctgggaagtagcgtcgacgaggtagaacagttgattcggaggcatgaagccttccgcaaagccgcagcggcctgggaggaacgtttcagctctcttaggcggctcaccaccatcgagaaaattaaggccgaacagtccaagcaaccccccactcctttacttggacgcaagttctttggcgaccctaccgaactggcagctaaagccgctccacttctgcggccaggcgggtatgaaaggggcctcgaaccgctcgctcggagggcttctgataccctgtctgccgaggtgcgcacaagggtggggtatgtgaggcaggagttgaagcccgaaagattgcaaccgaggattgatcgcttacctgaaatccccggccgcgttgaaccagcggccctccctgcagctcccgaggatgccgccgagaccccggctacacccgcagcggctgaacaagttcgcccgagaccagaacggcaggaaagtgccgaccgtgccgaggaactgcctcgaaggcgcagacccgagaggcaggaatcagttgatcagagtgaagaagcggccaggcgccgccgtcctgagagacaagagtctgctgaacacgaagccgcacactcactgacgttgggacgctacgagcagatggaacggcgtagggaacgaagagagcggcgactggagcggcaggagagctccgagcaggagatgcctattcgaggggacctggtgaaaggcaaagccacacttgcagatattgttgaacagttgcaggaaaaagaagcaggtcccggccttcctgcggggccatcgctgccgcaaccccgcgagctgccacctggaaggctgcctaacggcttggagttgcctgaaagaacaccccggccagatagaccacgggccagagacaggcctaagccccggcggcggccacggccccgcgaggggggagagggcgggggcagtcggcgctcccgctcagctcccgcccagggagggtcggcaccggcccccccacctccccctacccatacagtacaacatgagggctttttgttgcgaaagcgagagcttgacgcaaatcgcaagagtagcaatagatcttgggtgtctctttattgtgtgctgtctaaaggagaacttggtttctataaagatagcaagggccctgcgtccgggagcacgcatggcggggagcccttgctatcccttcacaaggcgacctcagaggtggcctctgactataagaagaagaagcacgtctttaagctgcagacccaggatggctccgaattcctactgcaggctaaggatgaggaggagatgaatggatggctcgaggccgtggcatcatcagttgccgagcatgcagagattgccaggtggggacaaaccttgccaacgacgagctccacagatgagggaaacccgaagcgcgaagggggtgataggcgcgctagcggcaggcggaagtag

SEQ ID NO: 206712 - DNA, 7695 bp, synthetic construct
  misc_feature 1..7695: note = Description of Artificial Sequence: Synthetic coding sequence
  source 1..7695: mol_type = other DNA
atggcccaggtgcccggcgaggtggacaacatggagggcctgcccgcccccaacaacaaccccgcggccaggtgggaaagcccagatcgcggatgggaacgcgagcaaccggccgcatctacagcagccgcgagtctcttcgaatgtagtaggatcaaggcgcttgctgatgagcgggaagccgtgcagaagaagacctttactaagtgggtcaattcacatctggcaagggttggctgccatataggcgatctttatgttgacctcagggacggattcgttctgacgcgcctgcttgaggtactttccggcgaacagctgccaaggccaacccggggacgcatgagaatacactcactggaaaatgttgacaaggcactgcagttcttgaaggagcagcgggttcatttagagaacgttggctctcacgatattgtcgacgggaatcaccggctgacattgggcttggtttggaccatcatactgaggtttcagattcaggtgatcaagatcgagacagaagataacagggaaacgaggtccgccaaggacgccttactgctctggtgtcaaatgaagaccgctgggtacccagaggtcaacatccagaattttacgactagttggagagatggcctcgcgttcaatgctctgattcataggcaccggcccgatctcgtcgactttagtaaactcaccaagtctaatgccaactataacctccagagagcctttaggactgcagagcaacacctaggactcgcaagactgcttgaccccgaggacgtgaacatggaagcccctgatgagaagtccatcatcacctatgtggtgtctttttaccactacttctccaaaatgaaggctttggctgtggagggcaaaagaattggtaaggtcctggatcaggtgctggaggtcggcaagattatcgaacgctatgaggaactggccgctgagttgctcgcctggattcatcggaccgttggcttgattagcaatcagaaattcgccaatagcctctcaggcgtccagcagcagctgcaggcgtttaccgcgtactgtactctcgagaaacctgtgaaatttcaggaaaagggtaatctggaagtacttctgttttcaatccagtcaaagctcagagcttgtaatcgcaggctgttcgtgccccgagaagggtgtggcatttgggatattgacaaagcctggggcgaattggaaaaggcagagcatgaacgcgaggcagcactgcgagccgaacttataagacaggagaagctggagctgctggcccagcgatttgaccacaaagtggccatgagggaatcttggctcaacgagaatcagcgcctggtgtcccaagacaacttcggctacgagcttcccgccgtggaagccgcaatgaagaaacatgaggccattgaagcagatatcgcagcatacgaggaacgagtccagggcgtggccgagctagcccaggctcttgctgcggaggggtattacgacatcaggagagtggcagctcagagagacagcgtactgcgccagtgggccctcttaacaggcctggtcggcgcacggagaaccaggctggaacagaacttagccctacagaaagtctttcaggaaatggtctatatggttgactggatggaagagatgcaagcccagcttctctctcgtgaatgcggccagcacctcgtcgaggcagatgacttgttacagaagcatggcctgctcgagggcgatatagcagcgcaaagcgagcgtgtggaggccttgaatgcggctgcattacgcttttcacagctacagggataccagccctgtgaccctcaagtgatttgcaatagggtgaaccacgtgcacggttgcctagcagaactgcaggagcaggccgctcggcggagggccgagttggaagcgagccgctccctgtgggccttactccaggagttagaggaggctgagtcatgggcacgggataaggagcgcttgctggaagctgcaggtggggggggagctgcaggcgccgccggagcagccgggaccgccggcggcgcacatgatctgtctagcaccgccaggctcctagcccagcacaaaatccttcaaggagagctcgggggacggagagcactgctgcagcaagccctcaggtgtggcgaggaactagtggcagctggcggggctgtcggtcctggagccgacacagtccatctcgttgggctggcagaaagagcggctagcgctagaaggcggtggcagagactcgaggaggcagccgccagaagagagcgtcgcctgcaggaagcaagagcgctgcaccagttcggggccgacttagacgggttgcttgactggctgcgcgacgcctatcgccttgccgctgctggggatttcgggcatgatgaagccagttcccggaggcttgctcgacagcaccgggccttgactggggaggtcgaagcccaccgggggcccgtctctggtctccgtcggcagctggcaacacttgggggcgctagcggagccggccccctggttgtggcactgcaggttagagtggtcgaagcagagcaactatttgctgaggtgaccgaggtggccgccctcaggcggcagtggctgagagatgccctggcggtgtaccgtatgttcggcgaagtgcatgcctgcgaattatggatcggtgagaaggagcagtggctgctttctatgcgtgttcctgacagcctcgatgatgtggaagttgtgcagcaccgattcgagagcctagatcaggaaatgaactctctaatgggccgggtgctcgacgtcaaccacaccgttcaggagctggttgaaggcgggcatccttcgagcgacgaagtcaggtcctgtcaagatcatttgaactcccgctggaataggattgtggaactcgtggagcagcgaaaagaggagatgtcagctgttctgctggtagaaaatcatgtgctggaggtggctgaggtgcgggcgcaggtgcgggagaaaagaagagccgtcgagagtgcaccacgcgccggaggcgcactgcagtggcggctctccggcttagaagctgctctgcaggcattggagccacgtcaggccgccctgttggaagaagccgccctgttggccgaacgattcccagcccaagctgcgcgcttgcaccagggtgccgaggagctcggcgcggagtggggcgctttggcatccgcagctcaggcatgcggggaagccgtcgctgccgctgggcggttgcaacgtttcttacacgacctggatgcatttctggactggttagtgcgggcccaagaagctgctgggggatcagaggggcccctgccaaacagtttagaggaagccgatgctctcctcgccagacatgcggcactcaaggaagaggtagatcagagggaggaagactacgcccgaattgtggcggccagcgaggccctgctggcggcagatggcgcagagttaggacctggtctcgcactggacgaatggcttccccacctggagcttggatggcataaactgctcggtctctgggaggccagacgggaggccctagtccaggcccacatctaccagctgttcctgcgcgacttgcggcaggcgctggtggtcctcaggaaccaggagatggcgctgagcggggctgagctgccaggcaccgtggaaagcgtggaggaagcacttaagcaacatagggacttcctgactaccatggaactgtcccagcagaagatgcaggtggcggtacaggcagcggagggtctccttaggcaggggaacatctatggagaacaggcccaggaggccgtgacccgcctgttggagaaaaaccaggaaaaccaactgcgcgctcagcagtggatgcagaaattacacgaccagttggaactgcaacactttctccgagactgccatgaacttgacgggtggatccacgagaagatgctgatggcacgggacggaacaagagaagacaaccataaactgcacaagcgatggctacgacaccaggccttcatggctgagctggcgcaaaacaaggagtggctcgagaagattgagagagaggggcagcaactgatgcaggaaaaacctgaactagcagcatcagtgcgaaaaaagctgggggagatccgtcagtgctgggccgaactcgagtcgaccactcaggcgaaggctagacagcttttcgaggcaagtaaggcagatcagctggttcagtctttcgccgagctcgataaaaaacttctgcatatggagtcacagctgcaagatgtggacccaggcggggacctggcaaccgtgaactcccagcttaagaaactgcagagcatggagagtcaggttgaggagtggtaccgtgaggtcggagaactgcaagcccagactgcggctctccctctggaaccggcctccaaagagctcgtcggcgagcggcagaatgcagtcggcgaaaggctggtgaggttattagaaccacttcaagagcgacggagattgttactggccagtaaggagctgcaccaggtggcacatgactggacaacatcttgggcttgggtacaggagcggttgcccctggcgatgcagactgaaagaggcaatggccttcaggccgttcagcagcacattaagaaaaaccagggcctcagaagagagattcaagcacacggccccaggctagaggaagtattggagcgggcaggagccttagccagtttgcgctccccggaagctgaagctgtgcggcgggggctagagcagttgcagtccgcgtgggcagggctgagagaggccgcggaacgtaggcagcaggtgctggatgctgccttccaagtcgaacagtactacttcgatgtggccgaggtggaggcttggctcggtgagcaggagcttcttatgatgtccgaagacaagggcaaggatgaacagtccacattacaactgcttaagaagcacctgcagctggagcagggggtggaaaattatgaagagagcatcgcacagttatctcgccagtgccgggccctgcttgaaatggggcacccagactcagagcagatttctcgccgtcagtcgcaagtcgatcgcctgtacgtcgcactgaaggagttaggtgaagagcgccgagtagcgctagagcagcaatattggctctatcagctgagtcgacaggtgtctgagttggagcattggattgcagagaaagaggtggtggccggatcccccgagctggggcaagatttcgaacacgtttcagttttgcaagagaagttctccgaatttgcttccgaaacaggcatggcaggaagagagcgcttggcagctgtaaaccagatggtggacgaacttatagagtgcggccacacagccgccgctaccatggctgagtggaaggacggactgaatgaggcctgggccgaacttctagaactcatgggtacaagagctcagctgctagcggccagtcgagagctccataagtttttctccgacgcccgggagctgcaaggacagatcgaagagaaacgcagacgactgcctcggctgaccacgccacccgagcccagaccttctgccagttccatgcaacgtactttgagggcctttgaacacgacctgcagcttctggtttcacaggtccgacagctccaggagggagccgcgcaactcaggaccgtgtatgccggggagcacgcagaagcgattgcttctcgggaacaggaagtgctgcagggctggaaagagttactcagtgcctgcgaggacgctcgtctacacgtctccagcaccgccgatgcattgaggttccacagtcaggtgcgggatctgctatcgtggatggacggaattgcttcccagattggagctgctgacaaaccccgtgacgtaagctccgtcgaggttctcatgaattatcaccaaggtttgaagacagagctggaagcccgggtcccggaacttaccacgtgtcaggaactcggacggtcccttcttcttaacaagtcggccatggctgatgaaatccaggcccagttagacaaactggggacccggaaagaggaggtgtccgagaagtgggacaggcattgggagtggctacaacaaatgctggaggtgcatcagttcgcccaggaggcagtagttgcggatgcctggctcactgctcaagaaccattactgcagagccgggagctcggttccagtgtggatgaagtagagcagctgataagacgccatgaggcctttaggaaagcagctgcagcctgggaagagcgcttcagctccctccgccggctgacaactatcgaaaaaatcaaggcagagcaatccaagcagcctcccactccattactagggagaaaatttttcggcgaccccacagagcttgctgcgaaagccgccccgttgcttcgccctggcggctacgagcggggcttagagcccttggcaaggagagcttccgacacgctctctgcagaagtaagaactagggtgggatatgtgagacaggaattgaagccagagcgtttacagccgaggattgaccggcttccagagattccgggcagagtggagccagctgctctgcccgctgcccctgaagacgcagccgaaacccccgctacccccgccgcagctgagcaggtcagaccccgtcctgaacgacaggaatcggcagatcgggccgaggagttgcctcggaggcgccgtccagagagacaagaaagcgtggaccagagcgaggaggccgccaggaggagaaggcctgagagacaggagtctgcagagcatgaggctgcccactctcttactctcggacggtacgagcaaatggagcggagacgggagagacgggaacggagattggagcggcaggaaagcagcgagcaggaaatgccaattaggggtgacctggtgaaggggaaggccacgctcgccgacatcgtcgagcagctgcaggagaaggaggccggccctgggctccccgctggcccctcccttccacagcccagagaactgcctcctggaagacttcctaacgggctcgaactgcctgagagaaccccaagacccgatagacccagggccagggacaggccaaagccccggaggcgtccacgcccccgtgaaggcggggagggcggagggagtcggaggagccggagcgcccccgcgcagggggggtcagcccctgctcctcctcctcctcccacacatacagttcagcatgaaggttttctgctgcgaaaaagagaactagacgccaacaggaaaagttcaaacaggtcttgggtttcgctgtactgtgttctgtccaagggtgagcttgggttctataaggattctaagggccccgctagtgggtcaacccacggcggcgagccactgctcagcctccacaaggcgacaagcgaggttgcgagcgattataaaaagaagaaacatgttttcaagctccagacccaggacggatcagaatttctcttgcaggcgaaagacgaagaggaaatgaatggttggctcgaagctgtggccagtagtgttgctgagcatgcggaaattgcgaggtggggccagacactgcccaccacatcatctacagacgaaggtaatcccaagcgagagggcggggatcgccgggcctcgggtcgccggaagtag

SEQ ID NO: 206713 - DNA, 11025 bp, synthetic construct
  misc_feature 1..11025: note = Description of Artificial Sequence: Synthetic coding sequence
  source 1..11025: mol_type = other DNA
atggccggccagccccacagcccccgggagctgctgggcgccgccggacaccgatccagaaggccatccacagaattgagggtaccccccagcccctctctgacaatggacagccaatacgagacaggccatataaggaaactgcaagcaaggcatatgcaaatgcaggagaagaccttcaccaagtggattaacaacgtcttccagtgcggacaagccggtattaagatccggaatttgtacacggagttagccgacggtatacacctgctgcgcctacttgagttgatttccggtgaggcgcttccaccaccctctcgcggtaggctaagagttcatttcctggaaaattctagccgggctctagctttcctcagagccaaggtgcccgttcctctgattgggcccgagaacattgtggacggtgatcaaaccctgatcttaggtctcatctgggtcattatactgagattccagatatcacacatcagtcttgacaaggaggagttcggagcctcagccgcgctgctgagtaccaaagaggctctgctcgtctggtgccagcgtaagaccgcatcatataccaacgtcaatatcactgactttagcagatcttggtcagatggtctcgggttcaacgcgctgatccatgcacacagaccagacctgctggattatggatctctcaggccagaccgaccgcttcataacttggcttttgcatttcttgttgcggaacaggaactgggcattgcccagcttctggaccccgaagacgttgccgcggcccagccagatgaaaggtctattatgacttacgtgagcttgtactatcattattgctcacggctccaccaaggccaaacagtgcaacgacgcctgacaaaaatactgcttcagctgcaggagaccgagctgctgcagacacagtacgagcagctggtggcggatctcctgcggtggattgcggagaaacagatgcagctggaggcccgcgattttcctgactctctcccagcgatgaggcagctcctggctgcgtttacaatttttagaacccaggagaagcccccaagactccagcagcgtggtgctgcagaggcactcttatttcgattacagacagcactgcaggcgcaaaaccgccggcccttcttaccacacgaagggcttgggttagccgagctgagccaatgctgggcggggctggagtgggcagaggccgccaggagtcaggccctacagcagaggctgctgcagcttcagagactggaaaccctagctagaaggttccaacacaaggccgctttacgggagtcattcctcaaagatgccgagcaagttctagatcaggcccgcgctcctccggcttctctggctacggtggaggccgcagtgcagagattagggatgctcgaggcgggcatcctgcctcaggagggtcgtttccaggccctggcggagattgctgatattttaagacaggaacagtaccattcctgggctgacgtggccaggcggcaagaggaggttaccgttaggtggcagagactgcttcagcacctgcagggacaacgcaagcaggttgcggacatgcaggccgtgttgtccctcctgcaggaagtagaggcagcttcacaccagctggaagaactgcaagagcccgcgcgtagcacggcttgcggacagcagctagccgaagtcgtcgaacttctgcaacgccatgacctcctagaggcacaggtgtccgctcatggggcccacgtgagccacttggcccaacaaacagctgagctagatagctccctgggtacatcggtagaagtgttgcaggccaaggccagaacactcgcccaactccagcagtcgctcgtggccctcgtcagggcgagacgcgccttacttgaacagacacttcagagagctgaatttctgcggaactgtgaggaggaggaggcgtggctcaaggaatgtgggcagagagttggtaatgcagcacttggtagggacttatctcagatcgcaggtgccctccagaaacataaagccctcgaagctgaagtccatagacaccaagctgtgtgcgtcgatctcgtgagaaggggccgggatctgtcggctagaaggccccctactcagcccgacccaggggagagagcggaggcagtacagggcggttggcagctgcttcaaaccagagttgtggggcggggggcccgccttcagactgctcttcttgtgctgcagtactttgctgacgctgcggaggccgctagttggctgcgggagaggcgatcttccctcgagcgcgcctcctgcggtcaagaccaggccgccgctgaaactctgttgcgccggcatgtgcgcttagaacgagtattgcgcgctttcgccgcggagctccgaaggctggaggagcagggtcgggccgccagcgcgcgcgcgagtcttttcacagttaatagtgccctgtccccaccgggtgaatcccttagaaacccaggtccctggtctgaagctagttgtcatcctggcccaggcgatgcctggaagatggctctcccagccgaacccgatccagactttgatccaaacaccattcttcaaacccaggatcatttatctcaggactacgagtcactcagagccctggcccaactgcgccgcgcacgtcttgaagaggccatggctctgtttggtttctgctcatcttgcggtgaattgcaactatggctggagaagcaaacggtgctcctacagagggtgcagccacaggcggatactttggaggtgatgcaactaaaatatgaaaacttcctgactgcattagctgtggggaagggactatgggcagaagtatccagctcagccgagcagttgcgtcaacgatatcccgggaatagcacccagattcaaagacagcaggaggaactgtcccagcggtggggacagctggaggctctgaaacgggagaaggctgtccaactggcccactccgtggaggtgtgttcttttctgcaggaatgcgggcccacccaggtccagctccgcgacgtacttttgcaactcgaagctctacaaccaggcagcagcgaagatacctgccacgcacttcaactggcccaaaagaagactcttgtgctggaaaggagggttcattttttgcagagcgtggtcgtcaaggtggaagaacccggctacgctgaaagccagcccctccagggccaagtcgagaccctgcaaggtctgttaaagcaagtgcaggagcaggtagcacaacgtgcccggagacaggccgaaacccaggctaggcagagcttcctgcaggaatctcagcagctgcttctctgggccgaaagtgtgcaggcccaactgcgcagcaaggaagtgagtgtggatgtggcatcagcccagagactgctgagggagcatcaggacctgctggaggaaatccacctatggcaagaacgcctccagcagctggacgcccaatcccaaccgatggccgcactggactgtcccgactctcaggaagtgccaaataccctgcgcgtgctgggacagcagggtcaggaactaaaagtactgtgggaacaaaggcagcaatggttacaagagggcctggagttacaaaaatttggccgggaagtagacggctttacggccacctgcgccaatcaccaggcgtggttgcacctggacaatcttggggaggatgtccgggaggctctctccctgctgcagcagcaccgggaatttgggcggctgctcagtactctgggccctcgcgctgaagctcttcgggcccacggcgagaagcttgtccagtctcaacatcctgcggcccacactgttcgggagcagctccaaagtattcaggctcaatggacacggcttcagggaaggagcgagcagcggcgcagacagctcttggcttcccttcagctgcaagaatggaagcaggacgtggcggaactgatgcagtggatggaggagaagggattgatggccgcccacgagcccagtggcgctaggaggaatatcctgcaaaccctcaagagacacgaggctgcagaatcagagttgctggctacccgccggcacgtggaagctttacagcaggttggtcgggagctgttgtcaagaagaccttgcggacaggaggacatccagacaagactgcagggattgcgcagcaagtgggaggcactcaaccgcaaaatgactgaaaggggggacgagttgcagcaagccgggcagcaggaacagctgctgcgtcaactgcaggacgcaaaggagcagcttgaacagctggaaggggccctgcagtccagcgaaaccggccaggatctcagaagctcccagagactgcagaagcgccatcagcagctggagtccgaatcgcgcactttggccgccaaaatggctgctcttgctagcatggcacatggtatggccgcttcacccgctatcctggaagagacccaaaagcatctccgtaggttagagctcttacagggtcacctggccatcagaggacttcaacttcaggcgagcgtggagcttcaccaattctgccacttgagcaatatggagctgtcatgggtagcagaacacatgcctcatggttcacctaccagctacacagagtgcctgaatggagctcaatccctacaccggaagcacaaggagttgcaggtcgaagtgaaagcccatcagggccaagtacagagagtactgagcagcgggaggagcctggcagcatccggtcatccccaggcacagcacattgtggaacagtgtcaggagcttgaaggccactgggctgaactcgaacgtgcctgcgaggcccgtgctcagtgtttgcaacaggcggtcacattccagcagtatttcctggatgtgagcgagctagagggctgggtggaggaaaaaagaccattggtgagctctcgggactatggacgagatgaggccgccactctgaggttgattaacaagcaccaggctcttcaggaagagcttgccatttactggagctctatggaagagctcgaccagactgctcagacgctgaccggccctgaggtgccagagcagcagcgggtcgttcaggaacgtctgcgtgagcaactcagagccctccaggagctggctgctaccagagatcgagaactagaaggaactttgaggctgcacgagtttcttcgcgaggctgaggacctgcagggatggctggctagtcaaaagcaggccgctaaaggtggcgaatcgcttggggaggatccggaacatgccctgcacctctgcaccaagttcgccaagttccaacaccaggtggagatgggcagtcagcgtgtcgctgcatgcagactcctggcagagtcactattggaacgggggcactctgctgggcctatggtacggcagcgccagcaggatctgcagacagcgtggtccgagctgtgggagctgactcaagctcgtggccacgccctgagagatacagaaaccactcttagggtccatcgagacctgttagaagtgcttactcaggtccaagagaaggcgacatccctgcccaacaacgtcgctagggatctctgcgggcttgaggcgcaactgcgatcccatcagggactagagagggagctcgttggcactgaacggcagttgcaagagctgcttgaaaccgccgggcgagtgcaaaagctgtgtcctggcccgcaggcgcatgcagtccagcaacggcagcaggccgttacacaggcctgggcggttctccagcgccgaatggagcagcgacgggcccagttggagcgggccaggctgctggcacgtttcaggactgctgtgcgggattacgcttcttgggctgcccgagttcggcaggaccttcaggttgaggagtctagccaggagccttcgtccggacccctaaaactgagcgctcatcagtggctgcgggccgaactggaagctcgggaaaaactatggcagcaggccacccagctgggccagcaggcgcttctcgcagcagggacccccactaaggaggtgcaggaggagctgagggcacttcaggaccagcgggatcaggtttaccagacctgggccagaaagcaggagcgactgcaggccgaacagcaagagcagctctttctgcgtgagtgtggtcgactggaagaaatcctggctgcgcaggaggtcagcctgaaaacttcggctctgggctcttccgtggaggaggtggagcagctgatccggaagcatgaagtcttcctgaaggtcctaaccgctcaggacaagaaagaggccgctctgcgcgaaagattgaaaacacttcggagaccaagggtgcgagatcgactgccaatcctgctacaaaggaggatgagagtgaaggagctagcggaatcccgggggcacgcattacatgccagtctccttatggcgtcatttacacaggccgctacacaggcagaagactggatccaggcatgggcgcaacaactcaaggagccagttccccccggcgacctgcgggataagctaaagccactgttaaaacatcaggctttcgaggcagaggtccaggcgcatgaagaagtcatgacctcagtggccaaaaagggtgaggctctcctcgctcagagccatccaagggctggagaagtgtctcagcgcctccagggcttgcgaaaacattgggaagacttgagacaagcaatggccctccggggacaagagttggaggatagacggaacttcttggagtttctgcagagggtagatttggcagaagcctggattcaggagaaagaggtcaagatgaacgtgggcgaccttggacaggatcttgagcattgcctgcagcttaggagacgcctgagagagtttcgtggtaactccgcaggggacaccgtgggagatgcctgtatccgcagtatatccgacttaagtttgcagctcaaaaaccgtgaccctgaggaggtgaagatcatatgtcaaaggcgttcacagctaaacaaccgttgggccagtttccacggcaacttgctccggtaccagcagcaactggagggcgctctcgaaatccacgttctgtcccgagaacttgacaacgtcacgaaacggatccaggagaaggaagccctgatccaggccctggactgcggtaaggacctggaaagtgtgcaacggctgttaaggaagcacgaagaattagaaagggaggtgcatcccatccaagcccaagtcgagagtcttgaaagagaagtgggccggttatgccagcgctcgccggaggccgctcacggactgcgacacaggcagcaagaagtggctgaatcttggtggcaactgaggagccgcgctcaaaagaggagagaggccctggacgcattacatcaggcccagaaactgcaggccatgttacaggagctcctggtgagcgcccagcgactgagagctcagatggacacctcaccggctccaaggagccccgtggaggccagaagaatgctggaggagcatcaggaatgcaaggcagaactcgacagttggaccgacagcatctcattggccagatccacaggtcagcagctcctgactgctggacatcctttttcttccgatataagacaggtactggctgggttggagcaagagttgtctagtctggagggcgcctggcaggaacaccaactccagcttcagcaggcactcgagctgcaactgtttctcagctccgtggagaagatggaacggtggctatgttctaaggaggactcgttggcgtctgaaggactctgggatcctctagcccctatggagccacttctctggaagcacaagatgctggagtgggacctcgaagtgcaggccggaaaaatttcagccttggaggccaccgcaagaggcctacaccaggggggtcatcccgaagctcagagcgcactgggcaggtgccaggccatgctcttgcggaaggaagccctgtttcggcaggcagggactcgacgtcaccgtcttgaagagttaaggcaattgcaggcctttctccaggactctcaggaggttgccgcttggcttagggaaaagaatctggtagcactggaagaagggctcttggatacggctatgctacccgctcagctgcagaaacaacagaactttcaagctgagttggacgcctcgatgcatcagcaacaggagcttcaacgagagggccaacgcctgttacagggcggacaccccgccagcgaagccatccaggagaggctagaagagctgggcgcactctggggggaactgcaggataattcccagaagaaagttgcaaaactccagaaggcctgcgaggcactaagactgcggaggagcatggaagagcttgaaaactggctggagcccatcgaagtagaactgcgcgccccgacggtaggccaggcgcttcctggcgtgggtgagcttctcggtactcaaagggaactggaagccgctgttgacaagaaggcacgccaagccgaagctctgctgggacaagcacaagcttttgtgcgcgagggccattgtctggcacaggacgtggaggagcaggcaagacgcttgctgcagaggttcaagagtctcagagagccgttgcaggagagacgcacagccctggaagctagatctctcctcctgaagttttttagagacgcagacgaggaaatggcgtgggtgcaggagaagctcccgttggccgctgcccaggattatggccagtccttgtcagcagtcaggcacctacaggaacagcaccagaacctggagagtgagatgtcaagtcacgaagctctgaccagagtcgtactcgggaccggttacaagttagtgcaagcaggccattttgcggcacacgaggtagcagccagggttcagcaactagaaaaggcaatggcacatttgcgggcagaggctgcgcggcggcggctgctcttgcagcaggcacaagaagcccagcagttcctgaccgagttgctggaggcagggtcatggctggcagagcggggtcatgtacttgattccgaggacatgggccactccgccgaggcaactcaggcactcctgcggcgactggaagccaccaagcgcgatctggaggccttctcccctcgaatagaacgacttcaacaaaccgcagcccttctcgagtcccgtaagaatcctgaaagtcccaaagtgctcgcacagctccaggctgtcagggaagctcatgctgagctcctgcgtagggcagaagcccggggccacggcctgcaagagcagttacaattgcaccagctggaaagagagaccttactgcttgatgcttggctgaccacgaaggcggctacggccgagtcacaggactacggacaggatcttgaaggagttaaggtccttgaagagaagttcgacgcctttcgaaaggaggtgcagtcgctcggccaagcgaaggtgtacgctctaagaaagctagccggcacgctggagcgtggagcccctcgccgctacccacacatacaggcacagagatcacgaattgaggctgcctgggagcggctggatcaggcaatcaaagcccggaccgagaacctagccgctgctcacgaagtccactcattccagcaggctgctgccgaattacagggtcggatgcaggagaaaactgctcttatgaaaggggaagacgggggccactctctttcctcagtcagaactctgcaacagcagcaccggaggcttgagcgagaactggaagcgatggagaaagaagttgccagactgcagacagaggcttgtaggctgggacagctgcatcccgcagcaccaggtggactggccaaggttcaggaggcgtgggcaacgctgcaggcaaaggcccaggaaagaggacagtggctggctcaggctgcacaaggacacgctttcctaggccgctgtcaggagctgttggcctgggcccaagaacggcaggagttagcttcttcagaggagttggcagaagacgtcgctggagctgagcagctgttgggtcagcacgaggagctgggccaagaaatcagggaatgcagattacaggcccaagatctgcgccaggaaggacagcaactggtggataattctcacttcatgagtgcggaggtcactgaatgcctgcaggagctggaaggacggctgcaggagctggaggaagcgtgggcattgcgctggcaacgttgtgccgagagctggggattgcagaaactccggcagagattggaacaggctgaggcctggctggcttgctgggaaggtctcctgcttaagccagactacggccatagtgtcagtgatgtggagctgctgctccacaggcatcaggatctggagaagctgctcgcggcccaggaggaaaaatttgcacaaatgcagaagacagaaatggaacaggagctgctgctgcagcctcaagaactgaaacccggaagggcgggatcctcgctcactagcttccagtggcgcccaagcggccaccaggggctcggagcacagttggccgaaacccgtgacccacaagatgccaagggcacccccaccatggaagggagcctggaattcaagcagcaccttctgcccggcggccgtcagccttctagcagtagctgggactcttgcagaggcaaccttcagggttctagcctcagcttgtttctggatgaacgcatggcagcagagaaggttgcaagcatcgccctcttggatctgaccggcgccagatgcgaaaggcttcgaggccggcacggacgtaagcatacattcagcctgcgactaacatctggggccgagatccttttcgctgctccttctgaagagcaggccgagagctggtggcgagccctgggcagtactgccgcccagtctctaagccccaaattaaaagccaaacccgtgagctctctgaatgagtgtacaacgaaagacgcccgacctggatgcctcctgcgctcggatccctag

SEQ ID NO: 206714 - DNA, 942 bp, synthetic construct
  misc_feature 1..942: note = Description of Artificial Sequence: Synthetic coding sequence
  source 1..942: mol_type = other DNA
atgcggcacaaccagatgtgctgcgagaccccccccaccgtgaccgtgtacgtcaagtcggggtcgaatcggagccatcagcctaagaagcctataactttaaagcgccctatctgcaaggataattggcaagctttcgagaagaacacccataataataacaagtccaagcggccgaaagggccctgcttggtcatccagcgacaggacatgacggccttctttaagttgtttgacgacgatctcatccaggacttcttgtggatggattgctgctgcaaaatcgccgacaagtacctgctggccatgaccttcgtgtattttaaacgggccaaattcactatttccgagcacacaagaataaattttttcattgccttgtacctggcgaacaccgtggaagaagatgaagaggaaacaaaatatgagatattcccctgggcactcggcaaaaactggaggaaattgtttcctaactttctcaaacttcgagatcagctctgggaccgaattgactatagggcgatcgtaagtcgtcgctgttgcgaagaggtcatggccatcgcccccacccattacatatggcagcgtgaacgctctgtacatcactctggggccgtgcggaactacaatcgagatgaggtccaactgcccaggggcccctctgccactccagtagactgttccctgtgtgggaaaaaaagaaggtacgtgcgtctgggtctctccagcagttcctcactttcaagtcatacagccggcgtgacggagaagcattctcaggactcatataactccctgtctatggacattataggagatccaagccaagcctacactgggtcggaagtggtgaacgaccatcagagtaacaagggcaagaagactaattttctcaaaaaggacaaatcaatggaatggtttacgggatcggaggaatag

SEQ ID NO: 206715 - DNA, 942 bp, synthetic construct
  misc_feature 1..942: note = Description of Artificial Sequence: Synthetic coding sequence
  source 1..942: mol_type = other DNA
atgcggcacaaccagatgtgctgcgagaccccccccaccgtgaccgtgtacgttaagtcaggcagcaaccgttctcaccaacctaagaaacctatcacgttgaaaaggccaatctgtaaggataactggcaagcctttgaaaaaaatacacacaacaacaacaaatccaagcggcctaagggcccttgtttggtaatccagcggcaggacatgaccgccttttttaaactttttgatgatgatcttatccaggacttcttatggatggattgctgctgtaagattgctgacaagtatcttctggctatgacctttgtgtattttaagcgtgctaaattcacaattagtgagcacactagaatcaatttctttatcgcactgtatctagccaataccgttgaagaagacgaagaagagacaaagtatgagatcttcccatgggccttagggaaaaattggaggaagctgtttcctaactttctcaaactgcgagaccagctgtgggatagaatagactaccgagccatagttagtcgcaggtgctgtgaagaagtgatggctatcgccccaacgcactacatttggcaaagggagcggagtgtgcaccattcaggagccgtcagaaattacaaccgcgacgaagtgcagttacctcggggcccaagcgcgacccctgtggactgttccctttgtgggaaaaagaggcgctatgtacgtctaggcctgtccagctcctccagtctgtctagccacacagcaggagttaccgaaaaacatagccaggacagctacaattcattgagcatggacatcatcggtgacccaagccaggcctataccgggagtgaagtggtcaatgatcaccagagcaacaagggcaagaaaaccaacttcctgaaaaaagataagtcaatggaatggtttacagggagcgaggagtag

SEQ ID NO: 206716 - DNA, 384 bp, synthetic construct
  misc_feature 1..384: note = Description of Artificial Sequence: Synthetic coding sequence
  source 1..384: mol_type = other DNA
atgcggcacaaccagatgtgctgcgagaccccccccaccgtgaccgtgtacgtaaaaagcggatctaaccgctctcatcagccgaagaaaccgatcactttaaaaagacctatctgtaaggataactggcaggcttttgaaaaaaatacccacaataataacaagtctaagcgcccgaaggggccgtgcttggtgattcagagacaggacatgaccgccttcttcaagttgtttgacgacgacctgattcaggactttctgtggatggattgctgttgtaagatagcagataaatacctcctggctatgacgtttgtgtacttcaagagggcgaagtttactatttcagagcacacccgtattaacttcttcatagctctgtag

SEQ ID NO: 206717 - DNA, 882 bp, synthetic construct
  misc_feature 1..882: note = Description of Artificial Sequence: Synthetic coding sequence
  source 1..882: mol_type = other DNA
atgctgtgggccatccccgagctgggcagcccctgccccatcagcatttcttatgagatgtctgactctcaggaccctaccaccagccctgtggttaccacacaggtcgagctgggtggctgttcacggcagggaggcggaaatggcttcctaaggttcagacagcatcaagaagttcaggcgtttttaagtcttctcgaagactcatttgtgcaagaattcttgtccaaggatccttgtttccagattagtgacaagtacctgctggccatggtcctcgtctattttcagagagcacaccttaaactgtctgagtacacccactcttccctcttcctcgcgctgtacctcgccaatgatatggaggaagaccttgaaggtcctaagtgtgagatatttccatgggccctcggcaaggactggtgcctgcgcgtgggaaagttcctgcaccagagagataaactgtgggcaagaatgggattccgagccgttgtcagcaggcaatgctgcgaggaagtcatggccaaggaacccttccactgggcatggactcgcgacaggcgaccccatcacgggggagttcaacgagtgtgtccccaggttcctgtccggctccccaggggccctggtcttagcccaccacattgctctccctgtgggttaccgcaacattgtagtagccatctgctgaagccagtctcaagtaaatgtccgtccttaacgtcggagtgtcaccgtccaccttctcaaaattatttgagtagagtcaagaacgcgtggggcggtgatttcttgatcgtattgcctccccagatgcagctggaacccgggacctacagcctgagaatcttccccaagcccccagctcggcccggacactag

SEQ ID NO: 206718 - DNA, 1122 bp, synthetic construct
  misc_feature 1..1122: note = Description of Artificial Sequence: Synthetic coding sequence
  source 1..1122: mol_type = other DNA
atgaacgtggacaagttcctgatcgtgtgctacctgaagaaggaggtgtggggattcgaatcttattctctttccggaaccacttgcttccagtggaactattttgtgtggtccctgcgatttttctttagctgtggaagcagcaagtatcacctgaccccccttccaataaaaaaggtggattaccctcacaagaggggacagaattggggcagttacgtgcacaacagtctacccaggttcaattgggactacaggtcctgtttccatacctggaagcgagcgtctgacaatagagagagggcctacgagcattctgcctacggacaccacgaacgagggacgggcggtttcgacagaacccgtcattatgaccaggattactaccgtgaccctcgggagagaaccctgcagcatggactatattacgcctccaggtctagaagtccaaatcggtttgatgcccacgacccaaggtacgaacctcgtgcccgggaacaatttaccctaccctctgtggtgcatcgtgacatctaccgcgacgatataacccgggaagtgcgtggacggaggccagaacgcaattaccaacacagccgcagtcggtctcctcacagttcccagtcgcggaatcagtccccccagagactggccagccaggcatcacgtcctaccagatccccttctggctctgggtctaggtccagaagttcatcaagcgactccatatcctcgtcctcgtcaacgtcaagcgactcatccgatagctcctcaagttccagcgacgactctcctgctagatccgtgcagtccgcggcagtgccggctccaactagccagttactgagtagcttggaaaaggatgagcccaggaaaagtttcggaatcaaagttcagaacctccctgtacgtagtacagatacctctttaaaggatgggctattccacgagttcaagaaattcggcaaggttaccagcgttcaaatccatggtactagcgaggagagatacggcctggtgttctttcggcagcaagaggaccaagagaaagctctgacagcgagcaaaggaaagctgttttttgggatgcagattgaggttaccgcgtggattggcccgtag

SEQ ID NO: 206719 - DNA, 10995 bp, synthetic construct
  misc_feature 1..10995: note = Description of Artificial Sequence: Synthetic coding sequence
  source 1..10995: mol_type = other DNA
atggtgcgggagacccggcacctgtgggtgggcaacctgcccgagaatgtccgagaggagaagatcatcgagcactttaagcgctatggacgcgtcgaatcagtgaagatcctgccgaagcggggatccgaaggcggagtggcagctttcgtggactttgtggatatcaaatccgctcagaaggcacacaactcagtgaacaagatgggggaccgtgacctgcgcacagattataacgaacctggaacgattcctagcgccgcacgcggactggacgacaccgtgagcatcgcgagccggagtagagaagtctctggttttcgcgggggcgggggtggtcctgcatatggcccaccaccttccctgcacgctagggaggggaggtatgagcgtcgactagacggggccagcgataatagggaacgagcctacgaacattctgcatacgggcatcacgagcgggggacagggggtttcgatcggacccgccattatgaccaggattattatagggatccaagagagcggactctgcaacacggcctgtactatgcaagtcgatcccgatcacctaacagattcgatgcgcatgaccctagatacgaacccagggccagggagcagtttactctccccagcgtggtgcacagagatatctaccgggacgatattacccgggaggtgcgggggcggcggccagagagaaactaccagcacagtcggtcccgatctcctcactcttcccagtccaggaatcaatctcctcagagactggccagtcaggcatcacggccaacccgttctccctccgggtccggctctcgttctagaagtagcagcagcgactcaatctccagctctagctcaacaagttcagattcttctgattctagttccagctctagcgatgattcgccagctcgtagtgttcagtcagctgctgtacctgctccaacctcacagctgctgtcttccctggaaaaagacgagccccggaaatctttcggaataaaagtccagaacttgcctgtgaggtcgactgacacctcacttaaagacggtctttttcatgaattcaagaaatttggaaaagtgacgtccgtacaaattcatggaaccagcgaagagaggtatggcctggtcttttttcgtcagcaggaagaccaggagaaagcacttaccgcttcaaagggcaaactgttctttggcatgcagattgaggtgacagcttggatcggtccggagacagaatccgaaaacgagttccggccactggacgaaagaattgatgagtttcacccaaaggccacacgcaccttatttatcgggaacctggaaaagactacaacgtatcacgatctgcgcaacatctttcagcggttcggcgaaatagttgatatcgacatcaagaaagtgaatggggttccacagtacgccttcttgcaatactgcgacatcgccagcgtgtgcaaggccattaaaaaaatggacggtgagtacttaggcaataatcgtctgaagctcgggtttgggaagtccatgccaacgaattgtgtctggctggatggcttgtcatccaacgttagcgatcagtacctgacccggcatttttgccgttacgggcctgtggtaaaagtcgtgttcgacagattgaagggaatggctctggtgctctacaacgaaatcgagtatgcccaagctgccgtcaaggagactaaaggcaggaaaattggagggaacaaaatcaaggtggacttcgctaatagggaatcccagctggcattttaccactgcatggaaaagtcaggccaagatatcagagatttttatgagatgctggcagaaaggagagaggagcgtagggcgagctatgactacaatcaggatcggacctactacgaatccgtcagaaccccagggacctaccctgaagactccaggcgagattatccagcccgggggagggagttttactcagagtgggaaacctaccagggagattactacgaaagtaggtactatgatgatccacgggagtatagggattatcggaacgacccatacgagcaagatatccgggaatatagttatagacaaagagaacgagagcgagaacgggaaagattcgagagtgatagagatcgggaccacgaaaggcggcccatagagagatcccaatcccctgtgcatcttaggagacctcagtctccaggcgcaagtccctcccaagcagaacgcctaccttccgactccgagaggcgattatatagtcgtagctctgacaggagtggctcttgcagcagcctgagcccccctcgttatgagaagctggataaaagccgccttgaacgctacaccaagaacgagaaaacagacaaggagagaacgtttgatcctgaaagagtagaaagagagcgccgactaattcgcaaggagaaagtcgagaaggataaaaccgacaaacagaaacgaaaggggaaagtccattcaccatccagccaaagctctgaaaccgaccaggaaaatgagagagaacagtcaccagaaaaacccaggtcctgtaacaagctgagtagagaaaaagcagacaaagagggaattgcaaagaaccgtctggagctgatgccctgtgtggtgctgacccgggtcaaggaaaaggaagggaaggtgattgatcacacacctgtggagaagctgaaggcaaaacttgacaatgacacagtgaagagttctgctctcgatcagaagctgcaagtgtcccagaccgagcccgcgaagagcgatctctccaaactagaatccgtgcggatgaaggtgcccaaggaaaaagggctgtcatctcatgtggaagtggtagagaaagaaggccggctaaaggcgcgaaaacaccttaagcctgaacagccagcagacggtgtgagcgcagtggatctggagaaactggaagcccgcaaacgccgttttgccgattccaacctgaaggccgaaaagcagaaaccagaggttaagaagagttctccagagatggaagacgcccgcgtcctgagcaagaaacaacctgacgtgagttctcgggaggttattcttctccgggaaggcgaagctgagcgaaaaccggtcagaaaagagattctgaagcgggaatccaagaagataaagctcgaccgcttgaataccgtcgcttcaccaaaagactgccaagaactcgcttcgataagtgttggatccggttctcgaccatcttccgatctgcaggccaggctgggcgagctcgccggggaaagtgtggaaaaccaagaagttcagtcaaaaaaacccattccctccaaaccgcaactgaagcagcttcaggttctggacgatcaaggccccgaaagagaagacgttaggaaaaactattgttcattgcgagacgagaccccagagcgtaagagtggtcaggaaaagtcccacagcgtaaataccgaggagaaaattggcatagatattgaccacacgcaatcttatcggaaacagatggagcaatctcgcaggaagcagcagatggagatggaaatcgccaagtcagaaaaattcggctctcccaaaaaagatgtggacgagtacgaacggcgcagtctggttcatgaggtaggcaaacccccccaggacgttactgacgatagccctccatccaagaaaaagcgtatggatcatgtcgattttgacatatgcacgaagagggagaggaactacagatcgtcaaggcagatctccgaggactctgagcggaccggcggttcacccagcgttcgccacggctcgtttcacgaggacgaggatccgattggatctcctcgtctgctgagtgtgaagggctccccaaaggtcgatgagaaggtgttaccgtactctaacatcaccgtgcgtgaggagtcgttgaagtttaacccttacgactccagccgaagggagcagatggcagatatggcgaaaatcaaactgtctgtgctgaacagcgaagacgagctgaaccgctgggattcacaaatgaagcaggacgctggcaggtttgatgtgagctttccaaactctattattaagagagacagcctgcggaaaaggtctgtccgggatctggagcctggcgaggtcccaagcgattcagatgaggatggggagcacaagtcccattcccccagagcatcggctctgtacgagtcgagtcggttatcatttttacttagagatcgagaggataaattgcgtgagcgggatgaacggctgtcctctagtcttgaacgcaataaattctacagcttcgctttggacaagaccatcacaccggatacaaaagctctgctggaacgggctaaatctttgtcctcaagtagagaagagaattggtcgttcctcgattgggattctagattcgcgaactttagaaacaacaaggataaagaaaaggtggattcggcccctcggcccatccctagttggtatatgaaaaaaaaaaaaattcgcaccgactcagagggaaaaatggacgataagaaagaagatcataaagaggaagagcaagaaaggcaggagctgttcgccagccgctttttacactccagcatctttgaacaggatagcaaacgactccagcacttggaacgcaaggaagaagacagcgacttcatctctggcagaatctacggcaaacagacaagcgaaggagccaattcaacaacagacagtatccaggaaccagtggtgttatttcattcacgcttcatggagcttacacgcatgcagcaaaaagagaaagaaaaagaccagaaaccaaaggaggtcgagaaacaggaggacaccgagaatcatcctaagaccccagagagtgctcctgaaaacaaggatagcgagctgaagaccccaccttcagtcggaccgccctcagtcacggtggtcacccttgagagcgccccaagcgccctcgagaaaacaactggagacaagacggtggaggcgccgcttgtgacggaggagaaaactgtggagcccgcgacggtgagcgaggaggcaaaaccagcgtcagaacccgcgcccgcccccgtggaacagctggagcaggtcgatctgccccccggcgcagaccctgacaaggaggccgctatgatgcccgccggggttgaagagggctcctctggggaccagccaccttacctggacgctaaaccccctacccctggtgcatctttctcacaggccgagtctaacgtagaccccgaaccggatagcacccaaccactctcaaaacctgcacagaaatcagaggaagctaacgagccgaaagcggaaaaacctgatgcaacggccgatgccgagcctgatgccaaccagaaagccgaggcggccccagaaagtcagccacctgccagcgaagaccttgaggttgatccccccgttgctgcaaaggataagaaaccaaacaaatctaagcggtcaaaaacccctgttcaggcagcagccgtttcaatcgtggaaaaacctgttacccgcaagagtgaacgtatagacagagaaaagctcaagagatccaattcccctcggggcgaggcgcaaaagttactggaactgaaaatggaagcagagaagattacccggaccgcctctaagaactcggctgcagatctggaacaccctgagccaagccttcccctgtcacggacgcgcagaaggaacgtgcgctctgtctacgcgaccatgggcgaccacgaaaacagatcgcctgtgaaagagccggtcgaacaacctagagtcactcgaaaacgtctggaacgtgaattgcaggaggccgccgccgtgcccacaacccccaggcgcgggcggcctccaaaaacccggcggagggctgatgaagaagaggagaacgaggccaaagagcctgcggaaactctgaaaccacccgagggatggcgaagcccgagatcccagaagacggctgctggcggcggcccccaagggaagaaaggcaaaaacgaacctaaggtggatgccacgagacccgaggctacaaccgaggtcgggccacaaataggtgtgaaggaatcttcaatggagcccaaggccgccgaggaagaggcaggttcagagcagaagcgggaccggaaggatgctgggaccgataaaaatccccctgagaccgcccctgtggaggtggttgagaagaagcctgctcccgagaaaaatagcaaatcaaagagggggcgtagtcggaattcaagattggcagtggacaaatctgcttcactgaagaatgtcgatgccgctgtgtccccccggggggcagcggcccaggcaggcgagcgcgaatccggagtagtggctgtgtcccccgaaaagtctgaatcaccacagaaggaagacggactctcatctcagttgaagagcgacccagtggacccggacaaggagcccgagaaggaggatgtgagtgctagcggccccagccccgaggctacacagctggcaaaacagatggagctcgagcaagctgttgaacatatcgccaagttagccgaggcctcagcttctgccgcgtataaagccgatgcccccgaggggcttgctccagaggaccgggacaagccagcccatcaggcatccgagactgaacttgccgcggcaattggaagcatcatcaacgacatctcaggagagccagagaattttccggccccgccaccatacccaggggaatcccagacagacctgcagccgcccgccggtgctcaggccctgcagccctcggaggaaggtatggaaaccgatgaagccgtgagcgggattctcgagacagaggcggctacagagtcaagtaggccccccgtgaacgcccccgatccctccgccgggcccaccgacactaaagaggctagggggaactcgtccgagacctcccacagcgtgccggaagcaaagggatccaaagaggtcgaagtaaccctggttcggaaggacaaagggcggcagaagacaacacgcagtcgtcgcaaaagaaacacaaataagaaggttgtcgcgcccgtggaaagccacgtgccagagagtaatcaggcccagggggagtctccggccgctaacgagggtaccacagtgcagcatcctgaagcaccccaggaagagaagcagtcagaaaaaccccactctactcccccacaatcctgcaccagcgatttgtctaaaatccctagcaccgagaactcctctcaggagatctccgtcgaagaaaggacccctaccaaagccagtgtgccaccagatctgccacccccccctcaacccgcccccgtggacgaagagccacaagcccgtttccgcgttcattccattattgaaagcgatccagtaacacccccatcagacccatccattcctatccccacactcccaagtgtcactgcagcgaaactcagcccgccagtggctagcggcggaatcccccatcagtctccacccactaaggtgacagaatggattacacggcaagaagagccgagggctcagtctacacctagcccagctcttcccccggataccaaggcgagtgacgtggatacctctagcagtacccttcgcaagattctcatggatccaaagtacgtttcggcgacatccgtaacttctacttccgtgacaacggctatcgcagagcctgtgtcagccgccccatgcttacacgaggctccacccccgccagtggacagcaagaaaccgctggaggagaagaccgcccccccagttacaaacaacagtgaaatccaggccagcgaagtactggtagcagccgacaaggagaaggtggcacctgtcatcgcccccaaaataacatccgtgattagcaggatgccagtatccattgacctggaaaatagccagaaaattacattggcaaagcccgccccacagaccctaactggactggtgagcgccctgacggggctcgttaatgtgagccttgttccggtgaatgccttgaagggtcccgttaagggttcggtgacaaccttgaagagcttagttagtacgcccgctggaccggtcaatgtgctgaagggccccgtgaatgtactaaccggtcccgttaatgtgctgacgaccccagtaaacgcgacggtcggaaccgtaaatgcagctccagggaccgtgaatgcagccgcatccgcggtcaacgcaactgctagtgccgtgacagtgacagcaggagctgtgacagccgcatccggaggagtgacagcaacgaccggcaccgtgactatggcaggcgcggtaatcgctccaagcactaagtgcaagcagcgagcctccgcaaatgagaactcacgctttcaccccgggagcatgccggtcattgacgacaggccagcagacgcaggcagcggcgcaggcctaagagtgaacacgagtgagggtgtggtgctgcttagttattcggggcagaaaaccgagggaccgcagcgcataagcgccaagatctcccagattccccctgctagcgccatggatattgaatttcagcagtcggtcagcaaaagccaggtgaaacctgactcagtgaccgcctcccagcccccatctaagggccctcaggctccagccggctacgccaatgtcgccacgcactcaaccttagttctcactgcccagacctataacgcaagtcctgttattagctctgtgaaggcagaccgaccaagtttagagaaacctgagcccattcacctgtctgttagcacccctgttactcagggtgggaccgtgaaggtgctcacgcagggaatcaatacgccgcccgtgctcgtccataaccagctggtactgacccctagcattgtcaccacaaacaaaaagctggctgaccccgtcacattaaaaatcgaaacgaaagtgttgcagcccgccaacctgggttccaccctgaccccccatcacccaccggctctcccatcgaagttacccacagaggtgaatcacgtccccagcggaccatctatccccgccgatagaactgtgtctcacctagctgccgcaaaacttgatgcgcacagccctcgtccgagtggccctggtcctagtagtttcccccgggcctcccacccttcgagcaccgcctccactgctctttcgaccaatgccacagtgatgttggccgctggaatacccgtccctcagttcatctctagcattcatcccgagcagagcgtcattatgccaccacattccattacgcagacagtgagtctctcccatctgtctcaaggggaggtgagaatgaacaccccgacgctcccatccataacatacagcattaggccagaagctctgcactcacccagggctcccctgcaaccacagcagattgaggtccgagctccgcagcgggcaagcacacctcagccagcaccggcaggggtgccagccttggcttctcaacaccccccggaagaggaggtccactatcacttgccagtagcgagagcaacggccccggtacagtcagaagtcctggtcatgcaaagtgagtacagacttcacccatatacagtaccaagggacgtgaggattatggtacaccctcacgtcaccgccgtgtccgagcagcctcgtgcagccgacggcgtggtaaaggttcctccagcctctaaggcaccgcagcaaccgggaaaggaggctgccaagacaccagacgccaaagccgcccctactcccaccccagcccccgttcctgtgcctgttcccttgcccgcccctgcgcctgcaccccatggtgaagccagaattctgaccgtgacacccagtaatcagctccagggtctccctctgactccaccagtggtcgtaacccatggcgtgcagatcgtgcactcctctggagagttatttcaggagtaccgctacggagacatcagaacataccacccccctgctcagctgacacacacacaattcccagctgcttcttctgtgggcctgccgtcacggactaaaacggcagcacaagggcctccccccgaaggggagcctcttcaacctcctcagccagtccagtctacgcagccagctcagcctgcccctccatgcccccccagtcaactaggtcagcctggccagcccccgagttctaagatgccacaagtgtcacaggaagccaaaggcacacaaacaggtgtcgagcaacctcgcctgccggcggggccggccaaccgtccaccagaaccccacacgcaggtacaaagggcccaggccgaaaccggcccaactagcttcccttcccccgtcagcgtctctatgaagcctgacctcccggtgagtctgccaacccagaccgccccgaaacagcctcttttcgtgcctactacctctgggccaagcacaccccccggtctcgtgctcccccacacagaatttcagcctgccccaaagcaagattcttctccccacttgacgtcacagcggcccgtcgatatggttcagctcttaaaaaagtatccgattgtctggcagggcctgctggccctgaaaaatgatacagccgcagtgcaactacatttcgtctccggcaataacgtgctcgcacaccgtagcttgccactcagcgaagggggaccacccctccggattgctcaaagaatgcgacttgaagcgactcaacttgagggggttgcgcgaagaatgaccgtagagactgactactgcctattgctggctttgccatgtggcagggaccaagaagatgtggtgtcccagacagaaagcttaaaggctgcattcatcacttacctgcaggcgaaacaggcagccggaattattaacgtgcctaatcctggatccaatcaaccagcctatgtgctgcagatttttcctccctgtgagttcagtgaaagtcatctttctaggcttgcccccgatttgcttgcttccattagcaacatcagcccacaccttatgattgttattgcaagtgtatag

SEQ ID NO: 206720 - DNA, 1122 bp, synthetic construct
  misc_feature 1..1122: note = Description of Artificial Sequence: Synthetic coding sequence
  source 1..1122: mol_type = other DNA
atgaacgtggacaagttcctgatcgtgtgctacctgaagaaggaggtctggggatttgaaagttattctctgagtggcacaacatgtttccagtggaattactttgtttggagcctgcgatttttttttagctgtgggtcttctaagtaccatctgaccccgcttccgattaaaaaagtggattacccccacaagcgcgggcagaattggggctcatatgtgcataattctctcccaaggttcaattgggactatcgatcctgttttcacacctggaaaagggccagcgataatcgcgagagagcttacgagcattcagcttatggccaccatgagcgtgggaccggggggttcgacagaacacgacattacgaccaagactactatagggacccgcgggaacggacactccagcatggcctgtactatgcgagccgttctagaagtcctaaccggttcgacgcgcacgacccaaggtacgagccccgcgcccgggaacagtttacactaccctccgtagtccaccgcgatatttacagggatgacataactagagaggtgagagggcgaagacccgaaaggaattatcagcatagcagatccaggtccccacacagttcccagagcagaaatcagtctcctcagaggctggcctcacaggcgtcaaggccaacccgcagcccaagcggatcgggctcaaggtccaggtccagcagctccgacagcatctcgagctctagcagcacaagtagtgacagctccgactcaagcagttcatcctcagatgactctccggcccgctctgtccagtccgcggcagttccagccccgacttcacagctgctctctagtttggaaaaggacgagcccaggaaatcctttggaattaaagtgcaaaacttgcccgtccgcagtacagatacgtctctgaaagacggcttgtttcacgaattcaagaagtttggcaaggtcacatcagtgcagatacacggcacatcagaggaacgttacggcttagtgtttttccgtcagcaggaggaccaggaaaaggcccttaccgcaagtaaaggcaagctgttctttggtatgcaaatcgaagttaccgcttggatcggcccctag

SEQ ID NO: 206721 - DNA, 894 bp, synthetic construct
  misc_feature 1..894: note = Description of Artificial Sequence: Synthetic coding sequence
  source 1..894: mol_type = other DNA
tgacaggccagccggcccacccggagccccagcggcagcggcagccgatcgagatccagctcatccgactctatatcttccagcagttccacttcatcagatagcgactcatcatcatcgtctagtgacgactccccagcacgttcagttcagtccgctgccgtgcccgctcctacctctcagcttctcagtagcctggaaaaggatgagccacgaaagagctttggaatcaaggttcagaatctgcccgtgcgatctaccgacacaagtctgaaggacggcctgttccacgaattcaagaaattcggaaaagtgacgtccgtccaaattcatggcacaagcgaggagcgctacggactcgtctttttcaggcaacaggaggaccaagagaaagctctcacagcatccaaaggcaaactgttctttggcatgcagattgaggtgactgcatggattggtcctgagaccgaatcagaaaatgagttccggccgctcgacgaaaggattgacgaatttcatccaaaggccacccggacattattcatcggaaatctggagaagactaccacgtaccatgatctgcgaaatatctttcaacgatttggagaaatagtcgacatcgatattaagaaggtaaacggagtgccccaatatgctttcctgcagtactgcgacatcgcttcggtctgtaaggcgataaaaaaaatggacggtgaatatctggggaacaaccgtctcaaactggggtttggaaagtctatgcctacaaactgcgtgtggttggatggactgtcctctaatgtaagtgatcagtatttaacgcgacacttctgtcggtacgggcccgttgttaaggttgtgtttgaccggctgaagggtatggccctcgtctag

SEQ ID NO: 206722 - DNA, 885 bp, synthetic construct
  misc_feature 1..885: note = Description of Artificial Sequence: Synthetic coding sequence
  source 1..885: mol_type = other DNA
atgagcccccggggcaccggctgcagcgccggcctgctgatgaccgtggggtggttgctgcttgccggactccagtctgcacgcggaaccaatgtcacagctgcagtacaggacgccgggctggctcacgaaggagagggagaagaagaaaccgagaacaatgacagcgagacagccgaaaactacgccccccctgaaacagaggatgtcagtaatagaaacgtcgtgaaggaggtggagttcggaatgtgtactgttacctgcggaattggcgtacgggaggtcattctgaccaatggatgcccagggggggagtctaagtgcgtggttcgtgtcgaagagtgccggggccctaccgactgcgggtggggaaagccaatctcagaatcccttgaaagtgtacgactcgcctgtatacatacatctcctctgaatcgcttcaaatatatgtggaagttactgcgtcaggatcaacaaagtatcatcctggtgaacgattccgccatcctagaggtgagaaaagagtcacatccactggcattcgagtgcgacacgctggacaacaatgaaattgtggcgactataaagtttactgtttacactagctccgagctgcagatgaggcgcagctctctccctgcgaccgacgccgctctgattttcgtactcaccattggtgtgattatttgtgtcttcataatctttctcctgattttcattattataaattgggctgcggtgaaagctttttggggagctaaagcctccaccccagaagtgcagagcgaacaatccagtgtgcgatataaggactcaacgtccttggaccagctgcccacagaaatgcctggcgaggacgatgctctgagtgaatggaatgagtag

SEQ ID NO: 206723 - DNA, 648 bp, synthetic construct
  misc_feature 1..648: note = Description of Artificial Sequence: Synthetic coding sequence
  source 1..648: mol_type = other DNA
atggtgagcgccctgcggggcgcccccctgatccgggtgcacagcagcccagtgtctagcccaagtgtgtccggcccccgtcgcctggtatcctgtctgtcatcccagtcatcggcactgtcccagagcgggggcggaagcacctccgctgccggcatcgaggccagatcccgagcgctgagaagacggtggtgcccagcagggattatgctgctcgcgctggtatgtcttctgagttgcttattaccatcatccgaagccaaactctatggcaggtgtgagttggcccgagttctccacgactttgggcttgatggttatagaggttactctctggcagactgggtgtgccttgcctatttcacctcaggctttaatgcagcggcccttgattacgaggcagacggatcaactaacaatggcattttccagatcaacagtcggcgatggtgtagtaacttaactcccaacgttcccaatgtgtgccgtatgtattgctccgacttactcaacccaaacctgaaggatactgttatctgtgctatgaaaatcacacaggaaccccaggggctgggatactgggaagcctggagacatcattgccagggcaaggatctgactgaatgggttgacggatgtgacttctag

SEQ ID NO: 206724 - DNA, 627 bp, synthetic construct
  misc_feature 1..627: note = Description of Artificial Sequence: Synthetic coding sequence
  source 1..627: mol_type = other DNA
atgatccaggaggaccacgagggcagccaggacggcggcgtgcacagcagtcccgtcagcagccccagcgtgtcagggccacgaaggcttgtcagctgcctttccagccagtcttccgccctcagtcaatccggcggcggaagcaccagtgccgccgggatcgaggcccggtccagagcactgcggcgtcggtggtgccctgcaggtattatgctcctcgcactggtctgcttgttgtcttgtttgttgcctagttcagaagcaaagctttacgggaggtgtgagttggcccgggtcctccatgacttcggtctcgacggttaccgaggctactctctcgccgattgggtgtgtttggcttactttactagtgggtttaacgccgccgctttagattacgaggccgatgggtctacaaataatggtatctttcagattaacagccgtaggtggtgtagtaacctgactccaaatgtccccaacgtctgtagaatgtattgcagtgatctgctgaacccaaatcttaaggacacagtgatttgcgctatgaagatcactcaagagccccaagggcttggatattgggaggcctggcgccaccactgtcaaggcaaagaccttacgtag

SEQ ID NO: 206725 - DNA, 339 bp, synthetic construct
  misc_feature 1..339: note = Description of Artificial Sequence: Synthetic coding sequence
  source 1..339: mol_type = other DNA
atggtgagcgccctgcggggcgcccccctgatccgggtgtgcctggcttactttactagcggattcaatgctgccgcactggactatgaggccgacgggagtaccaacaacggcatcttccagatcaacagccgtcgttggtgcagtaatttaacgcccaatgtccccaacgtatgccgcatgtattgcagcgacctgctcaatccaaacctcaaggacacggtcatatgcgccatgaagatcacccaagaaccccagggactcggttattgggaggcctggcgacaccattgtcagggcaaagatcttactgaatgggttgatggatgtgacttctag

SEQ ID NO: 206726 - DNA, 372 bp, synthetic construct
  misc_feature 1..372: note = Description of Artificial Sequence: Synthetic coding sequence
  source 1..372: mol_type = other DNA
atgaccagcggctggaccgacaccggcgacaccgcctggctgaccgcctacgctctgccatacgcaggtgtatgtcttgcttattttacttcgggcttcaacgctgctgcgctggattacgaagcggacgggagcacaaataacggtatttttcagatcaatagcaggagatggtgttccaacctgactccaaacgtgcctaatgtgtgtcgaatgtactgcagcgatctcttgaaccctaatctcaaggacactgttatctgtgccatgaagataacccaggaacctcaaggattaggttattgggaagcctggcggcatcactgccagggcaaggaccttacggaatgggtggacgggtgtgacttttag

SEQ ID NO: 206727 - DNA, 375 bp, synthetic construct
  misc_feature 1..375: note = Description of Artificial Sequence: Synthetic coding sequence
  source 1..375: mol_type = other DNA
atggtgctgtgctggctgctgctgctggtgatggccctgccccccggcacaacaggggttaaggactgtgtgttctgtgagctgactgatagcatgcaatgccctgggacctacatgcactgcggcgacgacgaagactgcttcaccggtcacggcgtcgctccagggactgggccagtgatcaataaaggatgcttgcgggcaacatcttgtgggttggaggaaccggtttcttaccgcggcgtgacatacagtctgaccaccaactgctgtacaggtaggctctgcaatagagccccttcgagccaaactgtaggtgcaacaacaagcctggcactgggcctggggatgttactacctccacgtctgctttag

SEQ ID NO: 206728 - DNA, 480 bp, synthetic construct
  misc_feature 1..480: note = Description of Artificial Sequence: Synthetic coding sequence
  source 1..480: mol_type = other DNA
atgaaggcctggggcaccgtggtggtgaccctggccaccctgatggtcgtgactgtggacgcgaaaatttatgagcgctgcgagctggccgctcggttggagcgtgctggcttgaatggatacaaaggctacggagtcggcgactggctgtgtatggctcattatgagagtggatttgataccgccttcgtggatcataaccccgacggaagcagcgaatatggcatcttccaactgaactccgcctggtggtgcgacaacgggattacacccacaaaaaacctttgtcatatggattgtcatgatcttctgaataggcacatcctcgacgacattagatgcgccaaacagattgtgtcctcccagaacggactctctgcatggacgtcctggcgccttcactgcagtggacatgatctaagcgagtggctcaaagggtgtgatatgcacgtgaagattgatccaaagatccatccatag

SEQ ID NO: 206729 - DNA, 480 bp, synthetic construct
  misc_feature 1..480: note = Description of Artificial Sequence: Synthetic coding sequence
  source 1..480: mol_type = other DNA
atgaaggcctggggcaccgtggtggtgaccctggccaccctgatggtagtcacagtggatgcgaaaatctacgagcgctgtgagctagcggccaggctggaaagagccggattgaacggctataagggctacggcgtaggagattggttatgcatggctcactatgaaagtgggtttgataccgcttttgtcgatcacaaccctgacggttccagtgagtatggcatttttcagctcaactctgcctggtggtgcgataacggaattacgccaactaaaaacctttgtcatatggactgtcacgatctgctgaacagacacatactcgacgatatcaggtgtgccaaacagatagtaagctcccagaacggtcttagcgcctggacttcttggaggctacactgctcgggtcacgatttgtcagagtggctgaagggctgtgatatgcacgttaagatcgaccccaaaatacacccttag

SEQ ID NO: 206730 - DNA, 3207 bp, synthetic construct
  misc_feature 1..3207: note = Description of Artificial Sequence: Synthetic coding sequence
  source 1..3207: mol_type = other DNA
atgcggagcgccgccaagccctggaaccccgccatccgggccggcggccacggcccggatcgcgtgcggcctctcccagccgcctcctccggaatgaagtcctcaaagtcatccacaagtcttgcttttgaatccagactgagccgtctcaagagagccagcagcgaggacacgctgaataaaccaggttccacagcagctagtggggtcgttagactgaaaaaaaccgcaacagctggcgcaatctcagaactgactgaaagcagactgaggagcggaacaggtgcattcacgacaacaaagagaactggtatacctgcacctcgtgaattctccgtaaccgtttctcgggagagatccgtccctagggggcctagcaacccacgtaaatccgtgagctcacccaccagtagcaatactcctacaccaacaaagcacctgcggaccccaagtaccaagcctaaacaggagaatgagggtggcgagaaggcagctctggaatcccaggtgcgggaacttctcgccgaggccaaagctaaggactctgagatcaaccggttacgctctgagttgaaaaaatataaggagaagcgaacactgaacgctgagggtactgacgcgctcggacctaacgtggacggcaccagcgtttcgccaggggacacagaacctatgatccgagccctcgaggagaagaacaaaaacttccagaaggagctgagtgatctggaagaagaaaatcgcgtcctcaaggagaagctgatttacctggaacactcccctaacagtgagggggcagcctcccataccggggactcctcctgtcccacctctattacgcaggaaagctctttcggtagtccgacgggaaatcagatgagtagcgatattgatgaatacaagaaaaatatacatggtaatgcattgaggacgagcggttcatccagctccgacgtgacaaaggctagcctgtcccccgacgcttctgattttgagcatatcacagctgagaccccatccaggcctctgtcatccacatccaaccctttcaaaagttccaagtgttcaacagctggttcttcccctaattcagttagcgaactgtccctagcctctctaacggaaaaaatccagaaaatggaggagaaccaccattccaccgcggaagagctacaggccacgctacaggagttgtccgaccagcagcagatggttcaagagctgactgccgaaaatgagaaactggtggacgagaagactatcctcgagacaagcttccatcagcatcgagagagggctgagcaactgtctcaggagaacgaaaaactgatgaatctcctgcaggaacgtgttaaaaatgaagaaccaacaacccaggaaggcaagattatcgagttggaacagaagtgcacagggattttggagcaagggcgcttcgagagggagaagctgcttaatatccagcagcaattgacctgttccctgcgaaaagtcgaagaggaaaatcaaggagccctcgagatgatcaagagactgaaggaggaaaatgagaaactcaatgaatttctggagctcgaacgacacaacaacaacatgatggccaagacattggaggaatgccgggtgacactcgagggactgaagatggaaaatggttccctcaaaagtcacctccaaggggagaagcagaaggccactgaggcgtccgctgtcgaacagacggctgaatcctgtgaggtacaagagatgttaaaggtagcaagggcagaaaaggacctgctcgagcttagctgtaacgaattgaggcaggaacttttaaaggcaaatggggagatcaagcatgtgtccagtcttttggcaaaggtagaaaaagattacagctacttaaaggaaatatgcgatcaccaggcagaacagctcagcaggaccagtttaaagctccaagagaaagctagcgaaagcgatgccgaaataaaggacatgaaggaaacaatcttcgagctggaggatcaagtggagcagcatcgggcagtcaaactgcacaacaatcagttgatctctgagctggagtcatccgtcatcaaactggaggaacaaaagagtgatctggagaggcagctcaagactcttaccaaacagatgaaggaggagactgaggagtggagacgttttcaggccgatctccagacagcagtcgtggttgcgaacgacattaaatgtgaggctcaacaagaactgaggaccgtaaaaaggaaacttttagaggaagaagagaagaacgctcgactgcagaaggagttgggtgatgtgcagggccacggtagggtcgtgacatctagggctgcccctcctcccgtagatgaagaaccagagtcatcagaggtagacgcagccggccgctggccaggggtttgcgtgagccgaaccagcccgactccgccggaatccgccacaaccgtcaagagccttatcaagtccttcgacctcggacgacccggcggcgccggacagaacatctctgtccataagaccccccggtctccgctttcagggattccagtccggaccgcccccgcagccgcagtatcccccatgcaacgacacagcacttattcaagtgttcgtcccgcgagccgaggcgtaacacagaggctcgacctaccagacttgcccctgagtgacatattaaaggggagaaccgaaactttaaagcctgacccacatctgaggaagagtcccagccttgaaagcctgagtcgtcccccctccctcggttttggagacacaagactcctgtctgcctccactagagcctggaagcctcagtcaaaactaagtgttgaaaggaaagaccccttggcggcccttgcccgtgagtacggaggtagcaagcgcaatgccttattaaaatggtgccagaagaagactcagggttatgcgaatatcgatattaccaatttcagctcatcttggagcgatggcctggccttttgcgcactattgcacacctacctgcccgcccacatcccctaccaggagctgaactctcaagaaaaaaaacggaatttgctccttgcatttgaagctgccgagagcgttggtatcaagccctctctcgagctctccgaaatgctgtatacagaccgccctgattggcagtctgtaatgcaatatgtagctcagatttacaagtacttcgaaacttag

SEQ ID NO: 206731 - DNA, 2112 bp, synthetic construct
  misc_feature 1..2112: note = Description of Artificial Sequence: Synthetic coding sequence
  source 1..2112: mol_type = other DNA
atgggcaaccacagcggccggcccgaggaccccgagcccggcgccttcaccacgacgaagcggaccggcattccggccccacgcgagttttcagtaacggtgtcacgcgagagatcagtgcccaggggaccctccaatcccaggaagtcggtctccagtccaacttctagcaatactccaacacctaccaagcatcttagaacaccatcaacgaagcctaaacaggagaacgaggggggagagaaagccgcgctcgagtctcaggtccgggagctgctcgctgaagcaaaagctaaagatagtgagataaaccggctgcggtctgagttaaaaaagtataaagagaagcggacgctcaatgctgagggtacagacgcattaggaccgaacgttgacgggacttccgtgtcccccggcgataccgagccaatgattcgtgcccttgaggaaaagaataagaacttccagaaggagctgagtgacctggaggaagaaaaccgcgtattgaaggaaaagcttatctacctggaacactctcctaatagcgagggcgctgcatcacacactggggattctagctgtcctacgagcatcacacaggagtcaagcttcggatcgcctaccggcaatcagatgagttccgacattgacgagtacaagaaaaatattcatggaaacgcactcagaacctcaggctcaagctcttccgacgttacaaaagctagcctgagcccagacgcgagcgacttcgagcacattaccgcagagacgcccagccgcccgctgtctagtactagtaaccccttcaagtcatcaaaatgctccacagcaggcagcagtccgaatagtgtctcggaactttcactcgcctcgctgacagagaagatacagaaaatggaggaaaaccatcatagcactgctgaggagctccaagctaccctgcaggagttgtccgaccaacagcagatggtgcaggagctcaccgctgaaaatgagaagctggtcgatgagaagaccatcctggagacatcatttcatcaacatcgagaacgggcggaacagctcagccaagaaaatgagaagctcatgaaccttttacaggaacgcgtgaagaacgaagagcccaccacacaggaaggaaaaattatcgagctggaacagaaatgcaccgggatcctggagcagggtagattcgagcgcgagaaactgctaaatatccaacagcagctgacttgttccctgcggaaagtggaggaagaaaaccagggagccctggagatgatcaagcgcctgaaggaggaaaacgagaaactgaatgaatttctggaacttgaacgacataacaataacatgatggctaaaacgctggaagaatgccgtgtgacccttgagggcctgaaaatggagaacggcagtcttaagtcgcacctgcagggcgagaagcagaaggcaaccgaagcctctgcggttgagcaaacagcggagtcatgtgaagtgcaagagatgctgaaggttgccagagccgagaaagacttgctggagctgtcatgtaatgaactgagacaggaactgcttaaagcaaatggtgagataaaacatgtaagctccctgcttgcaaaagttgagaaggactactcctaccttaaagagatttgtgaccaccaggcagaacagctgtccagaacatcgctcaaattacaggagaaggcctcggagagcgatgcagaaatcaaggacatgaaagagactatcttcgaactggaggaccaggttgaacaacatcgggctgtgaagctgcacaataatcagttgatttccgagttggagtcctccgtgattaagcttgaagagcagaagagcgacctggaacgccaactcaaaactttaaccaagcagatgaaagaagagaccgaggaatggcgcagattccaagcagatctgcagacagccgtggtggttgccaatgatatcaagtgcgaagctcagcaagaactaaggacagtgaaacggaaactgttagaagaagaagaaaaaaacgcacgtctgcagaaagagctgggcgacgtgcagggccacggacgcgtggtgaccagccgcgccgcaccaccatag

SEQ ID NO: 206732 - DNA, 2130 bp, synthetic construct
  misc_feature 1..2130: note = Description of Artificial Sequence: Synthetic coding sequence
  source 1..2130: mol_type = other DNA
atgggcaaccacagcggccggcccgaggaccccgagcccggcgccttcacgacaaccaagcgaactgggattcctgcacctagagagttttcagtcacagtgtcacgagagcgatccgtgccgcgtggtccttctaacccccggaaaagtgtctcctcacccacaagcagcaacacacccacccctacaaaacacctacgcaccccatctaccaagcctaagcaggaaaacgagggcggggaaaaagcagcactcgagtcacaggtgcgcgagctgttggcagaggccaaggccaaggactccgagattaatagattgaggagtgagctgaaaaaatacaaagagaaaaggactctgaacgccgagggtaccgacgctcttggcccgaacgtggatgggacttccgttagtccaggggatacagagcctatgattcgcgccttggaggagaagaataaaaactttcagaaggagctcagtgaccttgaagaagagaatcgtgtcttgaaagaaaaactgatataccttgaacactctccaaatagcgaaggggctgcttctcacaccggcgatagctcctgcccaacgtctattacacaggaatcaagcttcggttcgccaacaggaaatcagatgagttcagacattgacgaatacaaaaagaatatacatggcaatgctcttcgcacgtcaggctccagttctagcgacgtcaccaaggcctccctgagcccagacgcgagcgattttgagcacatcaccgcagaaacaccgagcagaccactctcctccaccagcaatccattcaaaagcagcaagtgcagcacagcgggctcctcccctaattccgtctctgaactttctctggcctccctcaccgagaagattcaaaagatggaggagaatcatcactctacagctgaagagttgcaggctacacttcaggagctgagcgaccagcagcagatggtccaggagctgacagccgaaaacgaaaaattggtcgatgagaagactatcctcgagacttcctttcaccagcaccgagaacgcgccgagcagctctcccaggaaaatgagaagctcatgaatctgctgcaggaacgagttaaaaacgaagagcctactacgcaggagggcaagataatcgagctggagcaaaagtgcacgggaattcttgaacagggacgcttcgaacgggaaaaattgctgaatattcaacaacagctgacctgttccctgcggaaggtggaagaggagaatcagggcgcactcgaaatgataaagaggctgaaggaagagaatgagaagctcaacgaattcctggaactcgagcgtcacaacaataacatgatggccaaaacgttggaagaatgccgagtaacacttgaggggctgaaaatggaaaacggaagcttgaagagccatcttcagggggaaaagcaaaaagcaaccgaagccagtgccgttgagcagactgctgagtcttgtgaagtacaggaaatgctgaaggtggctagagccgagaaggatctgctagaactgtcgtgtaacgagctcaggcaggagcttctgaaggcaaatggagaaattaagcatgtgtcgtctctgctggctaaggtggaaaaggattatagctacctgaaggaaatctgtgatcaccaggcagagcagctgtctaggacgtccctcaaactacaagaaaaagcatctgagtctgatgccgagatcaaggatatgaaggagactatctttgagctcgaagatcaagtcgagcaacatcgggccgtaaagctccacaataaccagctgatttctgagctggagtcgtctgtgatcaagctagaagagcagaagagcgaccttgagaggcaattgaagacccttactaaacagatgaaggaggaaactgaagagtggaggcggtttcaggccgacctccagacggccgtggttgttgctaacgacattaagtgtgaagctcagcaggagctgagaaccgtcaaaagaaagttgctggaagaggaggaaaagaacgcacgactgcagaaagagctaggagatgtgcaagggcacggtcgagtcgtcacctctcgagcagctccccccagcttagggtccgtcagctag

SEQ ID NO: 206733 - DNA, 2964 bp, synthetic construct
  misc_feature 1..2964: note = Description of Artificial Sequence: Synthetic coding sequence
  source 1..2964: mol_type = other DNA
atgggcaaccacagcggccggcccgaggaccccgagcccggcgccttcactactacgaaaagaactggaataccagccccacgtgagttctccgtgaccgtctccagggagaggtctgtgccaagaggtccctctaatcccagaaagtctgtgtctagccccaccagcagcaatactccaacacccaccaagcatttgagaacgccatctacaaaacctaaacaagagaatgaaggcggcgaaaaagccgctctggagagccaggtcagggagctgctggccgaggccaaggccaaggactcggagataaatagactcagaagcgaactgaaaaagtataaagaaaaaaggacattaaatgccgagggaacggatgccttgggaccgaacgtagatggtacctctgtgtcccctggcgatactgagcctatgattagggccctggaggaaaagaacaagaacttccaaaaggaactgtccgacttagaggaggagaatcgggtcttaaaagagaaacttatctatctggagcatagccccaacagcgagggagccgccagccacaccggggattccagctgccccaccagcattacacaagagagcagcttcggatcacctactggaaatcaaatgagctcagatatcgacgaatataaaaagaacatccacggcaatgccctgaggactagcgggtcttcctcttctgacgtgaccaaggctagcctcagccctgacgcttcagactttgagcacataaccgcagaaacgccctcccgtcccctgagcagcaccagcaacccatttaaaagttcgaagtgttccactgccggtagctcacctaatagtgtcagcgagttgagtttggcaagtctgacggaaaagattcagaagatggaggagaatcatcattccactgcagaggaactccaggcaaccctgcaagagctatccgaccagcaacagatggtgcaggagctcacagccgagaacgagaagctggttgatgaaaaaaccatcctggagacatcttttcatcagcaccgtgagcgcgccgagcagttgagccaggagaatgaaaagcttatgaacctactacaagaaagagtgaaaaatgaggagccaacaactcaagaggggaaaataatcgagttagaacagaagtgtactggaattcttgaacaggggagatttgaacgcgaaaaactcctgaatattcaacagcagctaacctgtagcttgcgcaaagtcgaggaagagaatcaaggtgccttggagatgatcaaacgccttaaggaagaaaacgaaaaactcaacgagtttctcgaactggagaggcacaacaataacatgatggcgaaaacgctggaagagtgccgcgttaccctggaaggactcaagatggagaatggaagcctgaaatcacacctgcaaggggagaagcagaaagccaccgaggcctccgctgtggagcagacagctgagagctgtgaggtgcaggagatgctgaaggtggcccgggcagagaaagacctgttggaactctcatgcaacgagctccgtcaggagttgctgaaggctaatggcgaaattaaacacgtgtccagcctcctcgccaaggtagaaaaagactactcctatctgaaagaaatctgtgatcaccaggcagagcaactctcccgcacctctctaaaacttcaggagaaggcaagcgaaagcgacgccgaaatcaaagatatgaaggagacgattttcgaactggaagatcaggtggagcagcaccgcgccgttaaattacataataaccaactgatctccgaactcgaatcaagtgtgattaagttggaggaacagaaatctgatcttgagcgccagctaaagactttgacaaagcagatgaaggaggagaccgaggagtggcggaggttccaggccgacctacagaccgctgtagtggtcgctaacgatattaagtgtgaggcacaacaggagctacgaactgtcaaaaggaaactcctagaggaagaggaaaaaaacgctcgcctacaaaaggagctgggagacgtccagggccacggccgagttgtgacgtcacgcgctgccccaccacctgtcgacgaggaacctgagagctcggaagttgatgcagccgggcggtggcccggtgtgtgcgtgtcacgaaccagtcccacacctccagaaagtgcaacaacagtcaaatccttgattaaatcgttcgacctagggaggcccggaggcgctggccagaatatctctgttcacaagacacctcggtccccactgagtgggatccctgtgaggaccgcaccagcggccgcggtttctccgatgcaacgccattcgacttacagctctgtcaggccggcctcccggggtgtgacccagaggctggacctgccagatctccccctgtcagacatcttgaagggacggacggagacgctaaagcccgacccgcatctcaggaagagcccgagccttgaatcactatcacgtcctcctagccttgggtttggggacactcggttgttatccgcatcgacacgcgcatggaagccacagtctaagctgtctgtagagagaaaggaccccctggccgcgctagccagagagtatggaggcagtaaacgaaatgcattgcttaagtggtgccagaagaagactcaagggtatgcaaatattgacattacgaacttctccagctcctggagtgacgggctcgccttttgcgccctacttcacacttacctgccggctcacattccatatcaggagctgaactctcaggagaagaaacggaatctcctattagctttcgaagctgcagagagcgtgggtatcaagccgtcccttgagctctctgagatgctgtataccgatagaccagattggcaaagcgtgatgcagtacgttgcccagatctacaaatactttgaaacatag

SEQ ID NO: 206734 - DNA, 2373 bp, synthetic construct
  misc_feature 1..2373: note = Description of Artificial Sequence: Synthetic coding sequence
  source 1..2373: mol_type = other DNA
atgcggagcgccgccaagccctggaaccccgccatccgggccggcggccacgggcctgacagggttcgtccacttcccgcggcttcatcaggcatgaagagctccaagagcagtacatcattagctttcgagtcaaggctcagtcgactcaaacgcgcgtcctccgaagacacgttaaacaaacctggctccacagcggcttcgggtgtcgttaggctgaagaagactgccaccgcaggggcgatttccgagctgactgagagccgcctgaggagcggaactggtgcgtttacaacgactaagcgcacaggtatcccagcgcccagggagttcagtgttactgtgtctcgagagcgaagcgtgcctaggggaccctcaaacccgagaaagtctgtcagctcccccacgagcagcaatacacctactccaacgaaacatttacgaacaccctcgaccaaacctaagcaggaaaacgagggcggggaaaaggccgccctcgaaagccaggtgagggaactacttgctgaagccaaggccaaagactcggagataaatcgactccgcagcgagcttaagaagtacaaggagaaaaggaccctcaatgctgaaggcaccgatgcactggggcccaatgtagatggcacctcggtgtctcccggggacaccgaaccaatgattcgagcgttagaggaaaagaacaaaaacttccagaaagaactctctgatctggaggaggagaatagagtcctgaaagaaaaattgatctacctggaacattcccctaattcggagggagccgcaagccacacaggcgactcatcatgtccaactagcatcactcaggagtcatcctttggaagtccgaccggaaatcagatgtcttcagatattgatgagtacaaaaaaaatatccacggtaacgctctgcggaccagcggcagtagctcatctgatgtgactaaggcttcactgtctcctgacgcctctgacttcgagcatatcaccgctgagacaccatcccgcccgctgtcatccaccagcaatccgttcaaatcatctaagtgctccactgccggctctagcccaaattccgtatccgagctgtccttagcttcactcacggaaaaaatacaaaaaatggaggagaaccaccacagcaccgccgaggagctccaggccacactccaggaactttccgaccagcagcaaatggtgcaggagctgaccgcggagaacgagaaactggtggacgagaaaactatcttagagacgagtttccaccagcatcgcgagagagccgagcaacttagccaggagaacgagaaactcatgaacctactgcaggagagagtgaagaacgaggagcctacaacacaggaaggaaagattatagaattggaacagaagtgtactggcattttggagcagggccgattcgaaagggaaaagctgttaaacattcaacagcagttaacgtgctcactccggaaggtggaggaggagaatcaaggcgcgctcgagatgattaagcgtcttaaggaggagaacgaaaaactcaatgaattcctggagctcgaacggcacaacaataacatgatggcaaaaactttggaagaatgtcgtgtcacactggaaggccttaagatggaaaatggcagcttaaaatcgcatttacagggcgagaaacaaaaggctaccgaggcatccgcagtggagcagacagcagaatcatgcgaggtccaggagatgttgaaggtcgcacgggccgaaaaagatctgttggagctctcgtgtaatgaacttcgacaggagctcttaaaagccaatggcgagataaagcatgtgagttctctacttgcaaaagttgaaaaggattattcttaccttaaagagatctgcgatcaccaagctgaacaacttagtcgcacttcactgaagctgcaggaaaaagcctctgagagtgacgctgaaatcaaggatatgaaggagacaatctttgaactggaggaccaggtcgaacagcaccgcgcggtgaagctccacaacaaccagctgatatctgagctcgaatcttccgtgattaagcttgaggagcagaagtctgacctggagcgccagttgaagacactcaccaagcagatgaaagaggagacggaggagtggcgccggttccaggctgatctgcaaactgcagtggttgtggccaacgacatcaagtgcgaggctcagcaagagctgagaactgtgaagcgcaagctgctggaggaagaggagaaaaatgcccggcttcagaaggaattgggggatgttcagggacacggcagagtggtcacctcccgcgcagctccacctagcctgggttccgtgagctag

SEQ ID NO: 206735 - DNA, 3090 bp, synthetic construct
  misc_feature 1..3090: note = Description of Artificial Sequence: Synthetic coding sequence
  source 1..3090: mol_type = other DNA
atgcggagcgccgccaagccctggaaccccgccatccgggccggcgggcacggcccagatcgcgtgcgaccccttcccgccgcttctagcggaatgaaatcttctaaatcctctacgtcactggcttttgagagcagactaagcaggctgaaacgcgcatcgtctgaggatactttgaataagcctggcagtacagctgcgagcggagtagttagactaaaaaagacggccaccgcaggagctatcagtgagttaaccgagtctagactgaggtctggaacaggcgcatttactactacaaagcggaccgggatccctgccccaagagaattttcggtcaccgtgagccgagagcgctccgtgccccgcggcccctctaaccccagaaaaagtgtgagctcccctactagttctaacacaccgaccccaacaaagcatctccggactccgtcaacaaaaccgaagcaagagaatgaaggcggtgaaaaggcagccctggagtctcaagttcgagagctgctcgcagaagccaaggcaaaggattccgaaattaatcggctgcgttccgaactgaaaaaatataaggaaaaaagaacgctgaacgcggaaggcacagatgccctcggtccaaatgttgacggcacgagtgttagccccggagacaccgagcccatgataagagcacttgaggaaaagaataaaaattttcagaaggagctctccgacctggaggaagagaaccgcgtacttaaagaaaaactgatctatctggagcacagtcctaattctgagggcgctgcctctcataccggggacagcagctgccccacgagtattacacaggaatcatctttcggaagccccacagggaatcagatgagttccgatatagacgaatacaaaaaaaatatacacgggaacgccctgaggacatcaggctcctcgtcttcagatgtgaccaaggcatccctgtccccagacgcgagcgacttcgaacacatcacagcagagactccaagccggcccctcagcagcacctcgaatccctttaaatcatcaaagtgctcaacagcaggttcctcccccaactcagtaagcgaactctccctggcctctctcactgagaagatacagaaaatggaagagaaccaccacagcactgcagaggagctgcaagcaaccttgcaggagttgtctgatcaacagcaaatggttcaggagctgaccgccgagaacgagaagctggttgacgaaaaaacaattctggagactagcttccaccagcacagagagagggcggaacagctgtcccaagaaaacgagaagttgatgaacttgcttcaggaacgggtgaagaacgaggagcctactacacaagagggaaaaatcatcgagctggagcagaagtgcaccggtatcctcgagcaaggcaggttcgaaagagagaaacttctcaatatacagcaacagctaacctgttcccttcgaaaagtcgaagaggagaaccagggcgccctggagatgatcaagcgtctgaaggaagagaatgagaagctgaacgaattccttgaactggaaaggcataacaataacatgatggctaagaccctcgaagagtgtagggttacactggaagggttaaagatggagaatggatccttgaaaagccatttacaaggtgagaagcaaaaagcaacagaagcctccgcggtcgaacagaccgccgaaagttgcgaggtccaagagatgttgaaagtggccagggctgagaaggatctgcttgagctgtcttgcaacgaactgcgccaggagcttctaaaggctaacggagaaatcaaacacgtaagtagccttctcgctaaggtcgagaaagactactcatatttgaaagagatctgcgaccatcaagccgaacagttgagtaggacatctctgaagcttcaggagaaggcctcagaaagcgatgctgagattaaagacatgaaggaaactatctttgagcttgaagaccaggtcgagcagcatagagccgtaaaacttcataacaatcagctcatatctgagctggagtcctccgtcatcaaactggaggagcagaaatccgatctggagagacagcttaagacgctgacgaagcagatgaaagaggaaacagaagagtggcgccgtttccaagctgaccttcagactgccgtcgttgtcgcgaacgatattaagtgcgaggcacagcaagagctcagaacagtgaaacggaagctccttgaggaggaagagaaaaacgctcgcctacagaaagagctgggagacgttcagggtcatggcagggtggtgacaagccgggccgcacctcccccggtggacgaagagcctgaaagtagtgaagtggacgccgctggacgctggcccggtgtttgtgtaagtagaaccagcccaacaccccccgagagtgccacaactgtgaaatctttgattaaatccttcgacctgggcagacccggtggtgcgggacagaatatctctgttcataaaactccgcgttcacctctctctggaattcctgtgagaacggccccagccgcagctgtgagtccaatgcagcggcattctacatactcctccgtacgcccggcgagtcggggggtgacgcagaggctggacctgccagacttaccgctttcagacattctaaaaggaaggaccgaaacactcaagcctgacccacatttgcgtaagtcgccaagcttagaaagcttgagtcgccccccatcactaggcttcggcgatacacggcttctgagcgcaagtacaagggcttggaaaccccagtcaaaactctccgtcgagcgaaaagatccactagccgctctggcaagggagtacggggggagcaagcgaaacgctcttctaaaatggtgccagaagaagactcaggggtacgccaagcgtaacttactgcttgcgtttgaggccgcggaatccgtcggcataaaacccagcttggagttgtctgaaatgctgtacaccgaccggcctgactggcagagcgtgatgcaatatgtggctcagatttataagtatttcgaaacttag

SEQ ID NO: 206736 - DNA, 237 bp, synthetic construct
  misc_feature 1..237: note = Description of Artificial Sequence: Synthetic coding sequence
  source 1..237: mol_type = other DNA
atgcggagcgccgccaagccctggaaccccgccatccgggccggcggacatggtccagaccgggtccgccccttaccagccgccagctcaggaatgaagtcaagcaagtcctcaacatcgctggcctttgagtccagattaagtaggcttaaaagagcatcatccgaggatacgctcaacaaaccgggcagcaccgccgcctctggggtggttagactaaagaagaccgccacctag

SEQ ID NO: 206737 - DNA, 1227 bp, synthetic construct
  misc_feature 1..1227: note = Description of Artificial Sequence: Synthetic coding sequence
  source 1..1227: mol_type = other DNA
atgaaggagaccatcttcgagctggaggaccaggtggagcagcaccgtgccgtgaagctacacaataaccagttaatctcagaactagagagctctgtgataaagctcgaggaacaaaaatctgatctggaaaggcagttgaaaactttgactaagcagatgaaagaagaaacggaggagtggaggagattccaggcagatctgcagactgcggttgtggttgcaaacgacatcaaatgtgaagctcagcaagagctccgcaccgtgaagcgcaaacttttggaagaggaagagaagaacgcaaggctgcaaaaggagttaggcgatgttcagggccacgggagggtagttacttcaagagctgccccacccccagtggacgaagagcctgaaagcagtgaagtggatgcagcaggacgttggccaggtgtttgtgtctcacggaccagcccaacaccacccgaaagcgcaaccaccgtgaaatcccttatcaagagtttcgatctgggcaggcccggaggagccggccagaatatatctgtccataaaactccaagatcgccactgtccggaatcccggtgcgaaccgcccctgctgccgcagtgagtcctatgcagagacatagcacatactcctcagtgcgcccagcctcaaggggtgtgacacagcggctggatctgccagaccttccgttaagcgatatcctgaaagggaggaccgagaccttaaagccagatccacacctcagaaagagccccagcctagagagtctgtccaggccaccatccttggggtttggtgacacccggctcctgtccgccagtactagagcatggaagccccaatccaagctgtcagtggagcgaaaggaccctctggccgcgctagcacgagagtacggtgggtctaaaaggaacgccctcttaaagtggtgccaaaagaaaactcagggatatgctaacatcgacatcaccaatttctcttcaagctggtccgacggcttggccttctgtgctctgttacacacctatttacctgctcatatcccttatcaggaactaaactcccaagaaaaaaagcggaatttgctcttggcttttgaggcagcggagtcagtgggaattaagccgagcctggagctgtcagaaatgttgtatacagacagacctgactggcagagcgtcatgcagtatgttgctcagatttataaatactttgaaacttag

SEQ ID NO: 206738 - DNA, 3354 bp, synthetic construct
  misc_feature 1..3354: note = Description of Artificial Sequence: Synthetic coding sequence
  source 1..3354: mol_type = other DNA
atgaagaaggccagccggagcgtgggcagcgtgcccaaggtgagcgccatatctaaaacccagacagcagagaaaatcaagcccgagaactcgagcagcgctagtaccggcggaaaattggtcaagccaggtactgcggccagccttagtaagacaaagagctctgacgacctccttgccggtatggccgggggggttaccgtcaccaatggggttaaaggcaagaagtctacgtgccccagcgcagctccatcagcgtcggcgcccgcaatgacaaccgtggaaaataagtctaagatctctaccggtacggccagctctaccaaaagatcaacctcaacgggaaacaaggaatcttccagtacgagggaacgacttcgggaacggactagactgaatcaaagcaaaaagctgccgtcagccggacagggcgccaatgacatggcactcgcaaagcgctctcgcagtagaacagcaacagagtgcgacgttagaatgtcgaagtccaagagcgacaatcaaatatcagatagagctgctcttgaggctaaggtaaaagatctactgactctggccaagacaaaggatgtggaaattcttcacctgagaaacgagcttcgtgatatgagggcccagttaggaattaatgaggatcatagcgagggcgatgagaaatccgaaaaggagacaattatggcccaccagccgactgatgtagagtcaacactgctccagttacaggagcaaaatactgcaattcgggaggagctgaaccagctaaagaacgagaacaggatgctgaaggatcgactcaacgcactcggcttctccttggagcagcgcctggacaattctgagaaactgtttggatatcagagcctgtcacccgagatcacaccagacaatcagagcgatgggggaggcacactgacatcatccgtggaaggaagcgccccaggatctgtcgaagacctgttgtcacaagacgaaaatactttgatggatcatcagcattctaattccatggataatctcgattctgaatgcagcgaagtataccagcctctaacctcaagcgatgacgctctggatgcaccgtcatcaagcgagagcgagggtattccgtcaattgagagatcccggaaaggctcttcggggaacgcctccgaagtgtccgtcgcctgcctgaccgaacgtattcaccagatggaagaaaatcagcactcgacctcagaagagcttcaagcaacacttcaggaattagccgacctgcaacaaataactcaggagttgaattctgagaacgagaggctgggtgaggaaaaggtcatactcatggaatccctctgtcagcagagcgataaactcgagcacttcagccgacagatcgagtatttccggtccctcctggatgaacatcatatatcttacgtgattgatgaagacgttaagagcgggaggtacatggagttggaacagaggtacatggacttagccgaaaatgccaggtttgagcgtgaacagctgctcggcgtgcagcagcaccttagcaatactctaaaaatggccgaacaggataacaaggaggcacaggagatgattggggctcttaaggagcgaagtcaccatatggaaaggataatagagtcggagcagaaggggaaggcagcccttgctgcaactcttgaagaatacaaagctaccgtggcgtcagatcaaattgagatgaatcgccttaaggcccagctagaaaacgaaaagcagaaggtcgccgagctctatagcatccacaatagcggagataagagcgacatccaggacttgttggagtccgtgcgattagacaaagagaaagcagagactttggcgtccagcctgcaggaggatctcgcacatactcgcaacgatgcgaatcgccttcaggacgccattgcaaaagtggaagacgagtacagggcctttcaggaagaggctaaaaagcagatcgaggacttaaacatgactcttgagaaattgcgctccgaccttgatgaaaaggagactgagagaagtgacatgaaagagaccatattcgagctggaagatgaagttgagcagcaccgcgcggtcaagctccacgataacctgatcatatccgacttggagaacacagtgaaaaagctccaggatcagaaacacgatatggaacgggaaataaaaacccttcacagaagattgcgggaggaatccgcagagtggcggcaatttcaggccgatttgcaaactgccgtggtcattgccaacgacatcaaaagcgaggcccaggaagagatcggggacctcaagcggaggcttcacgaggcccaggaaaaaaatgaaaagctcactaaggaactggaagagattaagagtagaaaacaggaagaggagagaggtagagtctataattacatgaatgctgtggaacgagatttggctgccctgcgacagggcatgggcctctctagacggtccagcacctcgtccgaacccacccctacagtgaagactttgattaagtcttttgattcggcatcccaggtgccaaacccggccgctgccgcgattcctaggactcctctctcccctagtccgatgaaaacccctccggccgctgcagtatctccgatgcaaagacacagcatttccggcccaatctctaccagtaagccgctgacagcgctgagtgacaaacgaccaaattacggtgaaatcccggtgcaagagcacctgctgcgcacatcctcagcaagccgccctgcatcactaccaagggttcctgccatggagtccgctaaaacattatccgtcagccgtagatcctccgaagaagtgaagcgtgatatttctgcacaggagggagcctcaccggcatccctcatggctatgggtaccacatccccccagctctccctgtcctcttcgcccacagcctctgtcactccaaccactagaagtagaatccgtgaagagcggaaagatccactctcggctctggccagggaatacggaggatcaaagcggaacgccttgctgaagtggtgtcagaagaaaactgagggataccagaatatagatatcaccaacttcagctcgtcctggaacgatggactggctttctgtgcactgctccacacttatcttcccgctcacatcccttaccaggagttgaacagccaagacaagcgtcgcaattttatgctggcattccaagcagctgagtccgtcggcataaaatcaacgctcgacatcaatgagatggttcgcactgaacgaccagactggcagaacgtgatgctatatgtgacggctatttacaagtattttgaaacttag

SEQ ID NO: 206739 - DNA, 2820 bp, synthetic construct
  misc_feature 1..2820: note = Description of Artificial Sequence: Synthetic coding sequence
  source 1..2820: mol_type = other DNA
gtgcccgaggccgtgcggtggggctacttcatccccgagcagagccaattcgcttgcaaatgcattactaaaaggcagcctcggatgaaaaaggccagcagaagcgtgggatcggtgcccaaggtgtccgctattagtaagacccagactgccgagaagatcaaaccagagaactctagtagcgctagtaccgggggcaagctagtcaagcctggaacagcagctagtttaagcaagacaaaatccagcgacgacctactggcgggaatggccggcggcgtgaccgtgacaaatggtgtgaagggtaaaaagtctacctgcccatcagctgctccctccgccagcgcgcctgccatgaccacagttgagaataaatctaagatcagcactggtacggcaagcagcacgaagagatcgacatcaacaggaaacaaggaatcctcaagcacaagggaacgactccgcgagcgcacaagactgaatcagtccaagaaactcccatcggccgggcaaggcgccaacgatatggccctcgccaaaaggtctcggtcgcgcacagcaactgaatgcgatgtaagaatgagtaagagtaaatccgacaaccagatttctgacagagctgcactggaggctaaagtgaaggatctgcttactctcgcaaaaaccaaggatgtggagattctgcacctgcgcaacgagcttagagacatgagagctcagctcggaataaatgaggaccattccgagggggatgagaagtcggaaaaggagacaataatggcccaccagcccactgatgtcgaatccacgctcctgcagctgcaagagcagaacaccgcaatccgagaggagctaaaccagctaaaaaatgaaaatcgcatgctgaaggataggctgaatgctttagggttctctctcgagcagagactggataacagcgaaaaattattcgggtaccaaagcctctctcctgaaataactccagataatcagtccgatggaggaggcacactgacttcttccgtggaggggtcagctcccggaagtgtggaggacctgctgtctcaggatgagaacacacttatggatcaccagcattccaatagcatggataatctggactcggagtgtagcgaggtgtatcagccccttacctcttctgacgatgccctcgatgccccaagctcaagtgagtctgaaggaatccccagcatcgagcggtcaagaaaaggcagtagcgggaatgcgagcgaagtgagcgtagcatgtttgaccgaaagaatccaccaaatggaggagaaccaacactccacatcggaggagctccaggcgacactccaggaacttgcggatctgcaacaaattacacaggaactcaacagcgaaaatgagcgcctgggggaagagaaagtgatcctcatggaaagtctgtgccagcagagcgacaagttggagcacttttcccggcagattgaatactttagatctctactcgacgagcatcacatctcctatgtcattgatgaggatgtgaagtcaggccgatacatggagcttgaacagcgctatatggacctggcagagaacgccaggtttgagcgcgagcagctcctgggagtgcaacaacatctgtcaaatactttaaagatggccgagcaggacaacaaggaggcccaggagatgatcggagccctgaaggaacgatcccatcatatggaaagaattatcgaatcagagcaaaaagggaaggctgccctggcagccactctggaggaatataaagctaccgtggcgagtgatcaaattgagatgaataggctcaaggctcaattggaaaacgaaaagcagaaagtggctgagctctatagtatccataacagtggtgataagtccgatatccaggacctgttggaaagcgttcgattggacaaggaaaaagcagagacactcgcatcatctcttcaggaagatctagcacataccagaaatgatgccaatcggttgcaggatgcgattgccaaagttgaggatgaatacagggccttccaggaggaagctaagaagcagatagaggaccttaatatgactcttgagaagctgagatctgacctggacgagaaggaaaccgagaggagtgatatgaaggagactatcttcgagctggaagatgaagtggaacagcaccgagccgtcaaactgcacgataacctgatcatctcagatctcgaaaacaccgtgaaaaaactccaggatcaaaagcatgacatggaacgagaaataaagaccttgcacaggagactcagagaggagtctgctgaatggcggcagtttcaagcggacttgcaaaccgccgtcgttatcgctaacgatattaagtccgaggcacaggaagagatcggtgacctgaagcggcggctccacgaagcccaagagaaaaacgaaaagctcactaaagaactcgaagagattaaaagccggaaacaggaggaggaacggggccgagtgtataattatatgaatgccgttgagcgcgatctggctgcgttaagacagggcatgggcctgtcacggaggagtagtactagctcagaaccgactcccacagtgaaaactcttatcaaaagctttgattcagccagccaggtaccgaacccagccgccgcagctatccctagaaccccgctgtccccatcccctatgaaaactccacctgcagctgccgtctcgcctatgcagatggagagttcctctgttgcacatgctggcatgcaatggcgcgatctggggagcctccagcccctgcctccaggattcaagtag

SEQ ID NO: 206740 - DNA, 2370 bp, synthetic construct
  misc_feature 1..2370: note = Description of Artificial Sequence: Synthetic coding sequence
  source 1..2370: mol_type = other DNA
atgaagaaggccagccggagcgtgggcagcgtgcccaaggtgagcgctattagcaagactcagactgcagaaaagatcaagcctgagaattcctcgtcagcctcgaccggggggaagttggtgaaaccgggcactgctgcatcactgtcgaagacaaagagtagcgacgacctccttgcgggcatggcgggcggcgtgacagtgacaaatggggtcaagggcaagaaatcaacctgtccctcagctgccccgtcagcgagcgctccagcgatgacgaccgtcgaaaataaaagcaagatatccactggcaccgctagctctactaagagatccacgtctaccggcaacaaggagtcctcctctacacgagagaggcttagagaacgaacacgcctgaaccagtccaagaagctgccttccgccggacagggggccaacgacatggcgttggctaaaaggagccggtcgcgtaccgccaccgagtgcgacgtgaggatgagcaaaagcaaaagcgataaccagatcagtgaccgtgcagccctcgaagcgaaagttaaggatctcctgactttggccaaaaccaaagacgtggaaatcctacaccttagaaacgagttaagagacatgcgggcccaattgggtattaatgaggatcatagcgaaggtgacgagaagagcgaaaaggagactattatggcccatcagcccactgatgtcgagagtaccctgctccagctgcaagaacagaacacggcaatcagagaggagctaaaccagctaaagaacgaaaatcgcatgctgaaagaccggttaaacgctctgggattctctctggaacagaggctggataactcagagaagctgttcggctaccaatcacttagtcccgagataactcccgataatcagagcgacggggggggcactctgacctctagtgtcgagggctctgcgcccgggagtgtggaagatcttttgagccaggatgagaatacgctgatggaccatcagcactcaaatagcatggataacctggactcagagtgttccgaggtttatcagcccttgacatctagtgatgatgccttggacgccccatcatcctccgagagcgaaggtataccctctattgaacggtcaaggaagggctcatctggcaatgccagtgaggtgagcgtggcttgccttacagaacgaatccaccagatggaagagaatcagcactctaccagtgaagagctgcaggcgactctgcaagaactcgctgatctgcagcagattacccaggagcttaattcagaaaacgaacgcctgggcgaagagaaagttattttaatggagagcttatgccagcagtccgacaaacttgagcattttagcaggcagatcgagtattttcgcagcttactggatgagcatcacattagctacgtgatagacgaggatgtcaaatccgggcgctacatggaattggagcagaggtacatggatttagctgaaaacgcccggttcgagagggaacaactccttggtgtgcagcagcacctaagtaacactctcaagatggctgagcaggacaataaagaagcccaggagatgatcggtgcccttaaggagcgcagccatcatatggagagaatcatcgagtcagagcagaaaggcaaggcagccttagcagcaactctcgaagagtacaaggcaaccgtggccagcgatcagatcgagatgaatagattgaaggcgcaactggagaatgaaaaacagaaggtggccgaattgtatagcattcataacagcggagacaaatcagacattcaggatcttctggagtctgtgcgattggacaaggagaaagcggagacattagcctccagcctgcaggaagatctcgcacatacaaggaatgatgctaatcgactgcaggacgcaattgccaaggtcgaggatgagtatagagctttccaggaagaagcaaagaagcagatcgaagacttgaacatgaccctggagaagctgaggtctgacctcgatgaaaaagaaactgagcgctcagatatgaaggaaactatctttgaactggaggacgaggttgagcagcatcgggccgtgaaactacacgataatctgatcatcagcgacctggaaaacaccgtgaagaagctccaggaccagaaacacgatatggaaagggaaatcaagactcttcaccgtcggctgcgagaggaatctgctgagtggcggcaattccaggctgatctacagaccgccgtggtgatcgcaaatgacattaagtccgaggcccaggaggagattggggatctgaagcgcaggctgcacgaagcccaggagaagaacgaaaaattaacttag

SEQ ID NO: 206741 - DNA, 3354 bp, synthetic construct
  misc_feature 1..3354: note = Description of Artificial Sequence: Synthetic coding sequence
  source 1..3354: mol_type = other DNA
atgaagaaggccagccggagcgtgggcagcgtgcccaaggtgagcgctatatcgaagacacaaactgcagagaaaattaagcccgagaactcttctagcgccagtaccgggggtaagctggttaagccgggaactgccgcttccctcagtaagacgaagagtagtgacgatctgttagctggtatggctgggggagttactgtgactaatggtgtgaagggaaagaaatccacatgccctagtgctgccccctccgcctctgcccctgctatgacgaccgtcgagaataaaagcaagatctccacaggtacggcttcatctacaaaaaggagtacgagcacaggcaataaggagagttctagtacgagggagcgcctaagagagcggacaagactgaaccagtctaaaaagctgccctccgccggtcagggtgccaacgatatggcactcgcaaagcgtagcaggagccgcacagcaacagaatgcgacgtgcggatgtcaaaatccaaatccgataatcagattagtgatagggcggctctggaagcgaaggttaaggacctgctcacgctggcaaaaaccaaggatgtggaaattctccatttgcggaacgaactgagagacatgcgtgcgcagctgggcattaacgaggatcacagcgaaggcgacgaaaaatcagaaaaggagacaattatggcacaccagccaacagatgtggaatccactctcctacagctgcaggagcagaacactgccatacgagaagagctaaaccagctaaagaatgagaaccgcatgctgaaggatcggttgaacgctctgggcttctcactcgaacaaagattagacaacagtgagaaactattcgggtaccagagcctcagccccgaaatcacaccagataaccagagtgatggcggcggcactcttacaagcagcgtggagggatctgctccagggagtgtggaagatctgctgagtcaggacgagaacaccctgatggaccatcaacacagtaattctatggacaatctcgactcagagtgcagcgaagtgtaccaacctcttacatcctcggacgacgctctggatgccccatcatcgtctgagagtgaggggatcccctccattgaacgctcacggaaaggaagctcggggaacgctagtgaagtgtctgtcgcgtgcctgacagaaagaattcaccagatggaggaaaatcagcactctacctccgaggaactgcaggcgacgcttcaggaactggcagatctgcagcaaattacccaagaattaaactcagagaacgaaagactgggcgaggaaaaagtgattctgatggagtctctgtgccagcagagtgataaactggaacatttttctcgccagatcgagtactttagaagtttgctagacgaacatcacatcagctatgtgatagacgaagatgtgaaatccgggcggtacatggagctggaacagcggtatatggatctggcggagaacgcaagattcgagcgcgagcaactgttgggcgtccaacaacacctgagcaatacgttgaaaatggccgaacaagacaataaagaagcacaggagatgattggcgccctgaaggaacgtagtcatcatatggagaggatcatcgagtccgagcagaaagggaaggcagcactggcagcgactctggaggaatataaggcaactgttgccagtgaccagattgaaatgaacagactgaaagctcagcttgagaacgagaaacagaaggttgctgaactctatagcattcataacagcggagataagagcgatattcaagaccttttagagtccgtaagactcgataaagaaaaagctgagactctggcctcaagcctgcaggaggatctcgcccacacacgaaacgatgcaaaccggctacaagatgcaattgccaaagtcgaagacgaataccgcgccttccaagaggaggccaagaaacagatagaggatcttaatatgaccctagagaagctacgctctgatctagatgagaaagaaaccgagcgctccgatatgaaagagaccattttcgagctggaggatgaggtggagcaacacagggcagtgaaattacatgacaatctgataataagcgaccttgaaaacacagtgaagaagctgcaggatcagaaacacgacatggaacgtgagatcaagaccctccaccgtagactgcgtgaggaatccgcagaatggcgccagttccaggcagacctgcagactgctgtggtcatcgctaatgacataaagagtgaggcacaggaagaaattggggacctcaagaggagactccatgaagcccaggaaaagaatgagaagctaaccaaggaactcgaggagataaaaagccgcaaacaagaagaagaacgggggagggtttataactacatgaacgccgtggaaagggatctggccgcactaaggcagggaatgggactgtctcgccgctcctcgaccagcagtgagcccactccaaccgtgaagactctgatcaagtcttttgattcggcgtcccaagttccaaatccagcggcagctgcgattccacgcactcctctgtctccctcacccatgaaaacacccccagcagctgcagtgtcgcccatgcagaggcattctatttcaggacctatcagtacgagcaagcctctcactgcactgagtgataagcgtcccaactatggcgaaattcccgtgcaggaacatctactgcgaacaagttcggctagccgccctgcatcactgcccagagttccagcaatggagagcgccaagaccctgtctgtctcccgaaggtccagcgaggaggtcaagagggacatcagcgcccaggagggcgccagcccagctagtctcatggcaatgggtactacatcaccccagctttctctctcaagcagccccacagcgagcgttacccctactactcgcagtagaattcgcgaagagcggaaggaccccctttccgccctggcgcgagagtacggtggctccaaacggaacgcgctgctcaaatggtgccagaagaaaactgaaggataccaaaacatagatattacaaacttttcttctagctggaatgacggcctcgctttttgtgcgttattacacacctacttgccggcccacatcccttaccaggaactgaactctcaggacaagaggagaaacttcatgctggcctttcaggctgcagagtcggttggtattaagtccacgctcgatatcaacgaaatggtccgaaccgagaggcctgactggcagaatgtcatgctctacgtgacagcgatctataagtactttgagacctag

SEQ ID NO: 206742 - DNA, 3237 bp, synthetic construct
  misc_feature 1..3237: note = Description of Artificial Sequence: Synthetic coding sequence
  source 1..3237: mol_type = other DNA
atgaagaaggccagccggagcgtgggcagcgtgcccaaggtgagcgccattagcaagactcagacagcagagaagattaagcccgagaactcctcatctgcgtcgaccgggggcaaactggtcaaacccggaacagcagcttcactgtccaagaccaagagttctgatgacctcctggctggtatggctggaggcgtgaccgtcaccaacggcgtaaaggggaaaaaatccacctgcccaagcgcagctccatctgcttctgcccccgcaatgaccaccgtggagaataagtctaaaatttcaaccggaaccgcctccagtacaaaaaggtcaacctcgaccggaaacaaggagtcaagctccacaagagagcgtctgagagagaggacccgattgaaccagagcaagaaactgccctctgctggtcaaggcgccaatgatatggcattggctaaaaggtctcgtagtaggacagccaccgaatgcgacgtgcggatgagcaaaagtaagagcgataaccagattagcgaccgcgcagccttggaggcaaaggtcaaagacctcctgactttggccaaaacaaaagacgtggaaatccttcaccttaggaatgagctcagagacatgcgtgcgcagctcgggataaatgaggatcatagtgaaggagacgaaaaatctgaaaaggagactatcatggcacatcagccaactgacgtggagtctacactcctccagttgcaggaacagaatactgccattcgcgaggagctgaatcagttaaaaaacgaaaatcgcatgcttaaagaccggctgaatgcactgggctttagtttggaacagcgcctggataattcagagaagctctttggatatcagtcgctttcccccgaaattactcccgataaccagtctgacggggggggcaccttgacttcctctgttgagggtagtgcaccgggatctgtagaggacctactaagccaagatgagaacacgctgatggaccaccagcactctaatagcatggataatctcgactcagaatgttctgaggtataccagcccctcacctcctctgacgatgccctagatgcgccttccagttctgagagcgagggcatcccaagcattgaaagatctcgaaagggcagctctggaaatgccagtgaagtcagcgtcgcttgtctgacagaacggatacaccagatggaggagaaccagcattcgacatctgaagaactgcaggcaaccttgcaggagctggcagatttgcagcaaatcacacaggagttaaattccgaaaatgagcggctgggagaggaaaaagtcatcctgatggaaagcctgtgtcagcagtctgacaagctggaacattttagccgccaaattgaatatttccggagcctcctcgacgagcaccatataagttacgtaatagatgaggatgtgaaatctggacggtatatggagctcgaacaacgctacatggacctcgctgagaacgcaaggtttgagcgcgagcaactgctgggcgtgcagcaacacctcagcaatacactaaagatggccgagcaggacaacaaggaggcccaagagatgattggtgccctgaaggaaagatcacaccacatggagagaatcatcgagtccgaacagaaagggaaggctgcactggctgcgactctggaggagtacaaagccaccgtagcctcggaccagattgaaatgaatcggttaaaagctcaacttgagaatgagaaacagaaggtagcggaattgtattctattcataactctggagacaagtccgatatccaggatctccttgaatcggtgcgccttgacaaagaaaaggccgaaacgctcgcctcgtcgcttcaagaagacttggcacacactcgcaacgacgccaacagactgcaggatgccattgccaaggtggaagacgagtaccgagcatttcaggaggaggccaagaagcaaattgaggatctgaatatgacattggagaaacttagaagtgacctggacgaaaaagagactgagagatccgacatgaaagagacaattttcgaattggaggacgaagtggagcagcatagggcagtaaagctgcacgataatctcatcatctctgatctcgagaatacagtcaagaaactgcaagatcagaagcatgacatggagagagaaatcaaaaccttgcacagacggttgcgagaggaaagcgctgagtggcgtcaattccaggccgacctgcaaactgcagtcgtaattgcgaatgacattaaaagtgaggctcaagaggagattggagatctcaaacggaggctgcatgaagctcaggagaagaacgagaagctgaccaaagaacttgaagagattaaatcccgcaagcaggaggaggaacgcgggcgggtctataactatatgaacgcagtcgaacgcgacttggcagcacttcgccagggcatggggctcagtaggcgctcttcaacatctagtgaacctacgcctaccgtgaaaaccctgatcaaaagttttgattctgcctcacaggttcctaaccctgcagctgccgcaatccctcgcactcccctgagcccttctcctatgaagacccccccagccgcggccgtgtcccctatgcagcgccatagtataagcggaccaatctcaacctcaaagcccctgacagccttaagtgacaagagacctaactatggagagattccggtacaggaacacctgcttaggacaagcagtgcctctcgaccagcgtcccttcctcgcgtgcctgcaatggagtccgcaaagacgttgtcagtaagtagaagaagcagcgaggaagtaaagcgggatatctcagcccaggagggtgcatctccagcaagtctgatggccatggggacgacctcaccacagctgagcctaagcagcagccccactgcatcagtaaccccaacgacacgatcacgcatcagagaggaacgcaaggatccactttcggctctggccagggaatacgggggcagtaaaaggaatgctttgttgaagtggtgccagaagaagactgaaggatatcagcgccgaaacttcatgttagctttccaggcagcggagagcgtgggtatcaagagcaccctcgacattaacgagatggtgagaaccgagcggcctgactggcagaacgtgatgctatacgtaacagccatttataagtactttgaaacgtag

SEQ ID NO: 206743 - DNA, 2781 bp, synthetic construct
  misc_feature 1..2781: note = Description of Artificial Sequence: Synthetic coding sequence
  source 1..2781: mol_type = other DNA
atgaccaccaaggactaccccagcctgtggggcttcggcaccaccaagactttcaaaatacccatcgaacacctggacttcaagtacatcgagaagtgctctgatgtgaagcacctggagaagatcttatgtgtcttgcgcagcggcgaggagggttattaccccgagctcactgaattctgtgaaaaacacctacaggctctggcacctgaatcgagggcactccgtaaggacaaacccgccgcgactgccgcttcgtttactgcagaggagtgggagaagatcgatggggatattaagagttgggtctccgaaattaaaaaggaggaagacaagatgcactttcacgaaacagagacctttccagctatgaaagataatttacctccggtacggggtagcaacagttgcctgcacgttggcaaagagaaatactctaaaagacccacaaaaaaaaaaaccccaagagactacgccgaatgggacaagtttgatgtcgaaaaagaatgtctaaaaatcgacgaggattacaaagagaagaccgtcatcgataagagtcacttgtctaagatcgaaacccgcatcgatactgcgggcctgacagagaaagagaaagatttcttagctacccgggaaaaggagaagggtaatgaagcattcaatagcggagattacgaggaagcagtcatgtactatacccgcagcatcagcgccttaccaaccgtggttgcctacaataatagagcccaggcagaaattaagctccaaaattggaacagcgcctttcaggactgcgagaaagtgcttgaattggagcctgggaacgtaaaggcgctcttgaggcgcgccaccacatataaacaccagaacaagctgcgggaggccactgaggatttgtcaaaggtattagacgtggaacctgataatgaccttgcgaagaaaaccctcagcgaggtcgagcgcgaccttaaaaacagcgaagcagcctccgagacgcagaccaaaggaaagagaatggtcatccaggagatagagaactctgaggacgaggagggcaagagcggaagaaagcacgaggatggtggcggagataaaaagccagcagaaccagccggcgcggcccgcgccgcccaaccctgtgtgatgggcaatatccagaaaaaacttactggaaaggccgagggaggcaaaaggcctgcgcgcggtgctccccagcggggccagaccccagaggccggggcagacaaacggtctcctcggcgggcctccgcggccgcggccgccggtggaggcgccaccggacaccccgggggggggcagggcgcagagaatccagcggggctgaaatcacaaggtaacgaactgtttcgctcagggcagtttgccgaggcagcgggcaagtattcggcggccatcgctcttctcgaacccgcgggcagtgagattgcggacgacttaagcatactgtactcgaaccgtgcagcctgttatctcaaggagggtaactgttcaggatgtatacaagactgtaacagggcattagaactccatcccttttctatgaaacctctcctgcggagggcgatggcctatgagactctagagcagtatggcaaagcgtatgtggattataagacagtgctccaaattgattgtggactgcagttggcgaacgattccgtgaacaggttaagtcgcatacttatggaattggatggaccaaattggagagagaaactgagccccatccctgccgtgcctgcctcagtccctctgcaggcctggcaccccgccaaggagatgatctctaagcaggcgggtgatagtagcagccacagacagcaagggataaccgacgagaagacatttaaagccctcaaggaagaaggtaaccagtgcgttaacgataagaattataaggacgcactatcaaagtatagtgagtgtctgaaaataaataacaaagaatgtgctatctatacaaatagggcactgtgttatctgaagctgtgccagtttgaagaagccaaacaggattgcgaccaagcactgcagttggcagacggaaacgtcaaggcattctacagacgggcattggcgcataagggtctgaagaattaccagaaaagtctcatagatctgaataaggtgatcctgctggacccctcgattatcgaggccaaaatggaactggaggaggttaccaggctgctgaatctgaaggataagaccgccccttttaacaaagaaaaagagaggagaaaaatcgagattcaggaggtgaatgaaggcaaagaagagccgggcaggcccgccggcgaggtgtcgatgggctgtttggccagcgagaaaggcggtaagtctagccgctcgcctgaggatcctgaaaaacttcctatagccaaacccaataatgcttacgagtttggccagattattaacgcgttaagcacccgcaaagacaaagaagcatgtgctcacctcctagccattactgctcccaaggatctcccaatgttcttgtctaataaattggagggggatacatttttgctactcatccaatcattaaagaacaatctgattgagaaagatccgtcactcgtttatcagcacctgctgtacttgtccaaggcagaaagatttaagatgatgctcacgctgatcagcaaggggcagaaggaacttatcgagcagctgtttgaggacttatctgacacccctaacaaccacttcaccctggaagatatccaggccctgaaacggcagtacgaactgtag

SEQ ID NO: 206744 - DNA, 2781 bp, synthetic construct
  misc_feature 1..2781: note = Description of Artificial Sequence: Synthetic coding sequence
  source 1..2781: mol_type = other DNA
atgaccaccaaggactaccccagcctgtggggcttcggcaccaccaagaccttcaagattcccattgaacatcttgatttcaagtacatcgagaagtgtagcgatgtaaagcacctggagaaaattctatgtgttctgcggagcggagaggagggatactaccctgaacttaccgaattttgcgagaagcatctgcaggcactggctcctgagtctagagccctccgtaaggacaaacccgccgccacagccgccagcttcacagcagaagagtgggagaagatcgatggagacattaagtcttgggtgtctgaaataaaaaaggaagaggataagatgcattttcatgagaccgagactttcccggctatgaaggacaatttgccccccgttcgtgggtcaaatagctgtctgcatgtgggcaaggagaagtatagcaagcgtccaacaaaaaaaaagaccccaagggactacgccgagtgggacaaatttgatgttgaaaaagaatgtctcaagattgacgaagactacaaggaaaagacagtgatcgataagtctcacctgagcaaaatcgaaactagaattgacaccgcgggactgaccgagaaggaaaaagacttcctcgccacacgagagaaggagaagggcaatgaggcttttaactccggcgactacgaggaggcagtgatgtattatacgcggtctatctccgcccttcccaccgtggtcgcatacaacaaccgagcacaggccgaaatcaagctgcagaattggaactctgcctttcaggactgtgagaaagtactggaattggaacctggaaatgtgaaagctctgcttcgtcgggctacaacatacaaacaccagaataagctgcgtgaagccaccgaggatctgtcaaaggtcctggatgtcgagcccgacaacgatctggccaagaaaaccctctccgaggttgagagggatctgaaaaactcagaggccgcgtctgagacacaaactaaggggaagaggatggtgatccaggagatcgaaaactctgaggatgaagagggtaagtctggacggaaacatgaagatggaggaggtgataaaaagcccgctgaacccgcaggtgcagcccgggcagcgcagccctgtgtgatgggtaatattcagaagaaacttacgggcaaggctgagggaggcaaaaggcctgcaagaggagcacctcaacgcggccagacaccagaggccggcgcagacaagcgatcccctcgaagggctagcgccgcagcggctgcagggggaggggcgaccggtcaccctggcggaggccaaggcgccgaaaatcccgcaggactcaaatcacaggggaatgagctgtttaggagtggccagtttgccgaagcagctggaaagtactccgctgcaatagctcttttggagcccgcggggtcagagatagctgacgacctcagtattctgtattctaacagagctgcttgctacttgaaggaggggaactgtagcggatgcatccaagactgcaaccgagctcttgagctgcatccatttagcatgaagccactgctcagacgggccatggcttacgaaactttggaacaatacgggaaagcatacgttgactataagacggttttacaaattgattgtgggttgcagctagcaaatgactccgtcaatcgcctgagccggattctgatggagttggatgggcctaattggcgagagaagttatcccccatacctgctgtgccagcatctgttcccctgcaggcttggcaccccgctaaggaaatgataagtaaacaggccggcgacagctcctcgcaccgccaacaggggattacagatgagaaaaccttcaaagccttaaaggaggaagggaatcagtgtgtaaatgataagaactacaaagacgccctgtctaaatacagtgagtgtctgaaaatcaacaacaaggaatgcgcgatctacactaacagagcactatgttacttaaagctgtgccaattcgaagaagcaaaacaggattgcgaccaagccctgcagttggctgacgggaacgtgaaggccttttatcggagggctcttgcgcacaagggactcaagaactatcaaaaatcacttattgacctcaataaagtgatactgctcgatcccagcatcatagaggccaagatggaactggaggaagttacaagactccttaacctaaaagataaaacggccccttttaacaaagagaaagagcgccggaagattgagatccaggaggtcaatgagggcaaggaagaacccggtcggccagccggggaggtgtccatgggatgtctggcttccgagaagggcgggaagtcatctaggagccccgaggatcccgaaaagctgccaatcgccaagcctaacaatgcttatgaatttgggcagattatcaacgctctgagcacacgaaaggataaggaggcatgtgctcacctactggccattacagcccccaaggacctcccaatgtttttaagtaacaagctggaaggggacacattcttgcttttgatccagagcctgaaaaataatttaatcgagaaggatccctctcttgtgtaccagcatctactctacttgtctaaagctgagagattcaagatgatgctgacattgatatccaaaggccagaaagagttaattgaacagttgttcgaggacctctcagacacgcccaataatcattttactctggaagatattcaggccctgaagaggcagtacgaactgtag

SEQ ID NO: 206745 - DNA, 1044 bp, synthetic construct
  misc_feature 1..1044: note = Description of Artificial Sequence: Synthetic coding sequence
  source 1..1044: mol_type = other DNA
atggccgcccagcggggcatgcccagcagcgccgtgcgggtgctggaagaagcccttggtatgggcctcaccgcggcaggagatgcccgggacacagcggacgcagtcgctgcggagggtgcctattatctcgagcaagtaacaatcactgaagccagcgaggatgactacgagtacgaggaaattccggacgacaatttctcaatcccagagggagaagaagacttggctaaagccattcagatggctcaagagcaggccaccgacacggaaattctggagcgtaagaccgttttgccaagcaaacacgccgtgccggaagttatcgaagatttcctctgcaactttctgatcaaaatggggatgacccggacactagactgcttccaatccgaatggtatgaactgattcaaaagggagtgacggagcttcgtacagtgggcaatgtgcccgacgtttacacacaaattatgctgctagagaacgagaataaaaacctcaagaaagacctcaagcactacaagcaggcggctgacaaggcgagagaggacctgctgaaaatccagaaagagagggacttccacagaatgcaccacaaacgcattgtgcaggaaaagaacaagcttataaatgatctgaaaggcttgaaacttcactacgcaagctacgagcccaccatccgcgtcttacacgagaagcaccacacactccttaaggagaaaatgctcacaagcctggagagagacaaggtggtgggccagataagcggactgcaggagaccttgaaaaagcttcaacgcggccattcctaccatgggccccagatcaaggtcgatcacagcagggagaaggaaaacgcgcccgagggccctacgcaaaaagggctgcgcgaggccagagagcaaaataagtgtaaaacaaaaatgaaggggaatactaagcaatggactggcaactctcagacctggaacaaaactgtgccgctgcaagataccatcggtagaaggcaggagaacaacagcgcacaccagcacatcgattag

SEQ ID NO: 206746 - DNA, 1896 bp, synthetic construct
  misc_feature 1..1896: note = Description of Artificial Sequence: Synthetic coding sequence
  source 1..1896: mol_type = other DNA
atggccgcccagcggggcatgcccagcagcgccgtgcgggtgctggaagaggccctggggatggggctgaccgccgcaggagatgctcgcgataccgctgacgcagttgcagccgaaggcgcctactatttggagcaagttacaattacggaagctagtgaggatgactatgagtatgaggagatccctgatgacaacttttctatccctgagggggaagaggatctcgctaaagcaatccagatggcacaggaacaggccaccgatacagagatcctcgagaggaagactgttctcccttccaaacacgccgtgccagaggtgatcgaagactttctgtgcaattttttgataaaaatgggcatgactcgtactttggactgttttcagagcgaatggtacgagctgatccagaagggggtcacagagcttcgaacggtgggaaacgtgcccgacgtttacacacagatcatgttgctggaaaatgaaaataaaaatctgaagaaagatcttaagcattataagcaggccgctgacaaggcacgggaagacttgttgaagattcagaaggagcgggatttccatagaatgcaccacaaaaggatagtacaggagaagaacaaactgattaacgacttgaaaggattgaagctgcattacgcaagttacgagcctacgattcgggtgctgcacgagaaacaccacactttgctgaaagaaaaaatgctgactagtctggaacgcgacaaggtggtgggtcagatcagcggattgcaggaaacacttaagaaactgcagcgcggccactcttaccatggcccacaaatcaaggtcgaccactccagggaaaaggagaatgcaccggagggtccgactcagaagggtctgcgggaagctcgcgaacaaaacaagtgcaaaaccaagatgaaaggtaatactaaagattctgagtttcccatcgatatgcagcctaatcctaacctcaatgtgagtaaagagtccctgagtccggcaaagttcgattacaagctgaaaaatattttcagactgcacgagttgccagtcagttgtgtcagcatgcagccacacaaggatattctagtatcctgcggagaggacagactgtggaaggtgctcgggcttcccaaatgcaacgtcctgttaaccggtttcggccacactgattggcttagcgactgctgtttccacccatccggagataaacttgctacgtccagtggagataccaccgtgaagctttgggatctttgcaaaggagattgcattctgacgttcgaaggacacagccgggcagtatggtcctgcacttggcactcatgcgggaactttgtagccagcagctctttggacaagacgagcaaaatatgggatgtgaacagtgaaaggtgtagatgtacgctgtacggtcacacagactcagtaaattctatagaattcttcccatttagcaacactctgctgaccagcagcgcagacaagacccttagcatttgggacgcccgcacaggcatctgcgagcagtccctgtacggccacatgcacagtataaacgatgctattttcgatcctagggggcacatgattgcctcctgcgatgcttgcggggtgactaaattgtgggatttcagaaaattactccccatcgtcagtattgacatcggtccctcccctggtaatgaggtgaactttgattcgtccggccgggtgctcgctcaggcatcaggcaatggggtgatacatttactcgatctcaagtctggcgaaatccataaacttatggggcatgagaatgaggcccacactgtggtcttctctcatgatggagagattcttttctctggggggtctgatggcaccgttcgcacctggtcctag

SEQ ID NO: 206747 - DNA, 1614 bp, synthetic construct
  misc_feature 1..1614: note = Description of Artificial Sequence: Synthetic coding sequence
  source 1..1614: mol_type = other DNA
atgaccatgaacatgaagcggtaccagatgaccatcctggccagccagaaggtgaagaaaatctggcagaaacagtttagatggccaaagaataggctccagatcctgaagttctggtatgaactgatacaaaaaggggtgacagaactgcgcactgttggcaatgtacctgatgtttacactcagattatgctgttggaaaacgagaacaaaaatctgaaaaaagacctcaagcattataaacaggcagctgataaagcacgagaggacctgctgaaaatccagaaggaacgagacttccacaggatgcaccataaacgcatcgtgcaggagaagaataagttaatcaacgacctgaaaggcctcaaactgcactatgccagctacgagcccaccattcgggtgctccatgagaaacaccatacgctgctgaaggaaaaaatgttgacttctttagagagagataaggtcgtaggccagatcagtggcctccaagagacactgaaaaagctgcagcgcgggcattcatatcacggtccgcagataaaagttgaccactcgagggaaaaagaaaatgcgcctgagggcccaacccaaaagggactcagagaggctcgagaacagaacaagtgcaaaaccaagatgaaagggaacactaaggatagcgagtttccaatagacatgcagcctaaccctaatctgaacgtttcaaaagagtctctgtccccggcaaaatttgattacaagctgaagaacatctttcgcctgcacgaactgcccgtcagttgtgttagtatgcaacctcacaaggatattctggtatcgtgtggagaagaccgcttgtggaaggtgttgggcctacctaagtgtaatgttcttctcaccggcttcgggcataccgattggttgagcgactgttgcttccatccgtcgggcgataagttggcaacctcgtcaggcgatactactgttaagctgtgggatttatgcaagggcgactgcattctgacgtttgagggccacagtagagccgtttggtcctgcacctggcacagttgtggcaactttgtggccagttccagcttggacaaaacaagcaaaatttgggatgtgaacagtgaacggtgtagatgcaccctgtacggccatacagacagtgtgaattcaatagagttcttccccttttctaacacactcctcacaagttctgccgataaaacgttgagcatctgggacgccagaaccggtatttgtgaacagtcactgtacggtcacatgcattcaattaatgatgccattttcgaccctagagggcatatgatagcctcttgtgatgcctgtggcgtcactaagctgtgggattttaggaaactgttgccaattgtgtccattgatattgggccgagtccgggcaacgaggttaattttgattccagcggccgagttcttgcccaggcctccggcaacggggtaattcaccttctggacttgaaatcaggcgagatccacaagctcatggggcacgagaacgaggcccatacggtggtgttcagtcacgatggggagatactattttcaggcggaagtgacggcacggtgcgcacctggagctag

SEQ ID NO: 206748 - DNA, 756 bp, synthetic construct
  misc_feature 1..756: note = Description of Artificial Sequence: Synthetic coding sequence
  source 1..756: mol_type = other DNA
atgggcgtgggcaccaaggcccgggccagccactggcggcggctgctttctctcggagctacccccgaggagccactgttggacttcaagatacctgacgacaacttttctattccagagggcgaggaagacctggctaaggcgatacagatggctcaggaacaggccactgacaccgagatcctggagcgaaaaactgttctgccatctaaacacgccgtgcctgaggtaattgaggattttctctgtaacttcttgataaagatgggcatgacgcggacacttgattgctttcaaagcgaatggtatgaactcattcagaagggcgtcactgaactccggacagttggaaacgtgcccgatgtatacacccaaatcatgttgctggagaacgagaacaaaaatctgaaaaaagatctgaaacactacaaacaggctgccgataaagcacgcgaggatctccttaagatccagaaggaacgcgacttccaccgtatgcatcacaaacggattgtccaagagaaaaataagctaatcaatgacttgaagggcttgaaactccactacgcaagctacgaacccacaatccgcgtcctgcacgagaaacatcatacattattaaaagagaaaatgttgacatccttagagagggacaaggtggttggacagatctctggtctgcaagagacgctcaagaaactgcagcgtggccatagctatcacggccctcaaattaaaggaaaatgtaagatgtag

SEQ ID NO: 206749 - DNA, 552 bp, synthetic construct
  misc_feature 1..552: note = Description of Artificial Sequence: Synthetic coding sequence
  source 1..552: mol_type = other DNA
atggccgcccagcggggcatgcccagcagcgccgtgcgggtgctggaggaagcactcggcatgggtttgaccgcagcaggagatgctcgggacactgctgacgctgtggctgcagagggcgcctactatctagagcaagttacgatcactgaggcaagcgaggatgactacgagtacgaagaaatcccagacgacaacttttcaattccagaaggggaagaagaccttgcaaaggccatacagatggctcaggagcaggctacagacaccgagatcctggaacgaaagactgtccttccatccaagcatgcggttcccgaagtcatcgaagatttcctgtgtaacttcctgattaagatgggaatgacacgcactctggattgcttccaatccgaatggtacgaactgatccagaagggggtcactgaactcaggactgtggggaatgttccagatgtatatactcagatcatgcttcttgagaatgagaataagaatctaaagaaagacctgaagcactacaagcaggcagcagagtatgtgatcttttag

SEQ ID NO: 206750 - DNA, 768 bp, synthetic construct
  misc_feature 1..768: note = Description of Artificial Sequence: Synthetic coding sequence
  source 1..768: mol_type = other DNA
gacagcgagttccccatcgacatgcagcccaaccccaacctgaacgttagcaaagagtccctgtctcccgcgaaatttgactataagctcaaaaatattttccggctgcatgaattgcctgtgagttgtgtatcaatgcagccccacaaggacatcctggtgagctgtggagaggataggttgtggaaggtgctggggttgcccaaatgcaacgtgttactcactggctttggccacaccgattggctctccgactgctgctttcacccctcagaaagatgccgctgcacattatacgggcacaccgattctgtaaattctattgaatttttcccttttagtaacacattgttgacctcttccgcagacaagacactgtcaatctgggatgccaggacgggaatatgtgaacagtccctgtacggacacatgcattccatcaatgacgccatcttcgaccccagaggccacatgattgcttcgtgcgatgcctgcggagtcacgaagctttgggattttcggaaactattacccatcgtatccatcgacataggcccgtcgcctgggaatgaggttaactttgactcctccggccgagtgttggctcaggcgagtggcaacggggtgatccacctgttagatctgaagtctggggagattcacaaactgatgggtcacgaaaacgaggctcacaccgtggtctttagtcatgatggagaaatactcttctctgggggcagcgatggtacagtgcgcacttggtcttag

SEQ ID NO: 206751 - DNA, 1314 bp, synthetic construct
  misc_feature 1..1314: note = Description of Artificial Sequence: Synthetic coding sequence
  source 1..1314: mol_type = other DNA
atgcggcggagcagccggcccggcagcgccagcagcagccggaagcatactcccaacttcttctctgaaaacagttcaatgtccatcacttcggaagacagcaaaggcttacggagtgccgaaccgggtcctggcgagcccgagggcagaagggctcgagggccttcctgtggagagccagccttatcagccggagtcccaggcggaaccacatgggcaggttctagtcaacagaaaccagcaccgagaagccacaattggcagacagcttgcggcgccgctaccgtaaggggcggggcttcagagccaacaggcagcccagtggtgtccgaagagccactggacttgttgcccacattagacctgaggcaggagatgccacccccccgcgttttcaaaagcttcctctcgcttctgttccaaggactcagcgttcttttgtccctagcgggggacgtcctggttagcatgtatagggaagtgtgctccattcgcttcctgtttacagccgtctcactgctcagcctcttcttatccgccttctggctggggctcctgtatctggtgtcacctctcgagaacgaacccaaggaaatgctgaccctttcagaataccacgagcgggtgcgctctcaagggcaacagcttcagcagcttcaggccgaactcgacaagctgcacaaggaagtgtccacagtgcgggccgcaaactccgagagagtggccaaactagtgttccagcggcttaacgaggactttgtcagaaaacccgactacgcattgagcagcgttggcgcttcgattgacttacagaaaacctcccacgactatgccgaccgaaacaccgcctatttttggaatcggtttagcttttggaactacgcaaggccccccacagtcattctggaaccacacgtgtttcctgggaattgttgggctttcgagggggaccaagggcaggtggttatccagctgcccggacgggtgcagttgtctgatatcactttacagcatcccccaccatctgttgaacatacagggggtgcaaactccgcccctcgggactttgccgtgtttggattacaagtctacgacgagacggaggtatccctgggcaagttcactttcgacgtcgagaagagcgaaattcagaccttccacctccagaatgaccccccagctgctttcccaaaggttaagattcaaatactcagcaattggggccacccacgcttcacttgcctgtaccgcgtaagggctcacggcgtgaggacatctgaaggagctgaaggctcggctcaggggccgcactag

SEQ ID NO: 206752 - DNA, 1377 bp, synthetic construct
  misc_feature 1..1377: note = Description of Artificial Sequence: Synthetic coding sequence
  source 1..1377: mol_type = other DNA
atgagccagcggcaggtgctgcaggtgttcgagcagtaccagaaggccaggactcagtttgttcagatggtggccgaactcgccactcgcccccagaacatcgaaactctccagaatgcaggggttatgtcgttactcagaacccttttgctcgacgttgttcccacaattcagcagacagcggcattggcccttggccgcctggcaaactataacgatgacttggcagaggccgttgtcaagtgcgatatactgccccagcttgtctatagcctggccgagcagaatcgattctataaaaaggctgccgcgttcgtgctgagagctgtcggtaagcacagcccgcagctggcgcaggctattgttgactgtggagcgcttgatactttggtgatatgcttagaggatttcgatccgggagttaaggaggccgctgcctgggccctacgctacattgctaggcataatgcagagctttcacaagccgttgttgatgcgggggctgtccctttgttagtcttgtgcatccaggaaccagagattgcccttaaacgaattgctgctagcgcactcagcgacattgctaagcactctccagaactcgcacagacagtggttgatgccggggcagtagctcatctggcgcagatgattctgaacccagacgcaaagctcaaacaccaaattttgtccgcattgtcacaggtgagcaagcacagcgttgacttggccgaaatggtggtcgaggccgaaatcttcccggtggtactgacatgcctgaaggacaaggacgagtacgtgaagaagaacgccagcaccctcattcgcgagattgctaaacacaccccagagctgtcccagctggtggtaaacgcggggggcgtggctgccgtcatcgattgcattggctcttgcaaaggcaatacacggctccctgggattatgatgctgggttacgtagccgcccactccgagaatctggccatggctgtgattatctctaagggcgtgcctcagctcagcgtctgtctctctgaagaacccgaggaccacattaaagcggcagctgcttgggctttaggtcaaatcggccgacataccccagaacatgccagagctgtggcggtgacaaatacgttgcctgtgctgctatccttgtacatgagtaccgagagctccgaggatctccaggtgaaatccaagaaggctattaaaaacattcttcagaaatgtacttacctcccggctctggagccattcctgtacgatgccccaccaaacatcctgaaacacgtagtcggtcagttttccaaagtactctttccttggatctttcgctacacatctgcagagggagggcagctgagtacgacttag

SEQ ID NO: 206753 - DNA, 813 bp, synthetic construct
  misc_feature 1..813: note = Description of Artificial Sequence: Synthetic coding sequence
  source 1..813: mol_type = other DNA
atgagccagcggcaggtgctgcaggtgttcgagcagtaccagaaggccaggactcagttcgtgcaaatggttgctgaactcgccacgcgccctcaaaacatcgagacgctgcagaatgccggcgttatgagcctgctgcgtacattacttctggacgtggtacctactattcaacaaactgcagccctcgctctgggcagactggctaactataacgatgacctggctgaagctgtcgtcaaatgcgatatcctgcctcagctggtgtacagtctcgccgagcagaatggcgtgcctcagctgtctgtctgtctgtcagaggaacccgaggatcacataaaggccgctgccgcctgggctctggggcagatcggaaggcataccccagaacatgctcgcgccgtggcagtcacgaacacccttcccgttctgttatcactctatatgtccaccgagtcaagtgaggacctgcaagtgaagtcaaagaaggctatcaagaatattctacagaagtgtacatacctgcctgctttggagcccttcctttacgacgcgcctcctaacatactcaaacatgttgtcggacagttttctaaggtcctccctcatgactcaaaagcccggcggctgtttgtgacctcgggtggtctcaaaaaggtgcaggagatcaaggccgagcccggttctttactgcaggaatacattaactccatcaattcctgctatccagaagaaatcgtacggtattacagccctggatacagcgacacactgttacagcgggtagacagctatcagccacttaataattag

SEQ ID NO: 206754 - DNA, 1758 bp, synthetic construct
  misc_feature 1..1758: note = Description of Artificial Sequence: Synthetic coding sequence
  source 1..1758: mol_type = other DNA
atgagccagcggcaggtgctgcaggtgttcgagcagtaccagaaggcaaggacccagttcgtgcagatggtggcagagctcgcgacaaggcctcagaatatcgagacccttcaaaacgcaggtgagccaggtgcccggacaccggtggccccccgagctctctccccacgccggcttagacccgcagccttacccgtggagctattagggtctcgtagcgtcggcactggggtcagaaagtctattcacagttttcagcgcgtctttggcgggcaggcggaaagggttaaattgccggacggttgcggacgatgcgcgctgtccctctttccgagtagtctccatacaggggtgatgagtctgcttaggacactcttactggatgtggtccctaccatccagcagacagcagctctcgccttggggcgactggccaattataacgacgacctggcagaagctgtggtgaaatgtgacatcctgccccaactcgtatattctcttgctgaacagaatcgattctacaagaaggccgcagccttcgtgctaagggcagtgggcaaacacagccctcagcttgcccaggctatcgttgattgtggggccctcgatacactggtgatctgcctggaggactttgaccccggcgtcaaagaagctgcagcatgggcccttcgatacatagcccggcataacgcagagttaagtcaagccgttgtggatgcgggagcagtgccgctgctggttttgtgcattcaggaacccgaaattgcactgaaacggatcgcagctagcgctctaagtgacattgcgaagcattcacctgagttagcccaaacagtggtagacgccggcgctgtggcccacttagctcagatgatccttaatccagacgcgaaattgaagcaccagattctgtcagcacttagccaggtgtccaagcactcagtggaccttgcggagatggttgtggaggccgaaatttttccagtagtcctgacatgtctgaaggacaaggacgaatacgtgaagaaaaacgccagcacactgattagggagatagccaaacatacccccgaactgtcgcaattggtggtgaacgccgggggtgttgctgccgtaattgactgcatagggtcctgtaaaggtaatactcgacttcctggaataatgatgcttgggtacgtggccgcacactccgaaaacctcgccatggcagtgatcatctccaaaggtgtgccacagctctctgtatgtttgagtgaggaaccagaggatcatatcaaggcagccgcggcctgggctctggggcagatcggacgtcacacccctgaacatgctcgtgcggtagctgtcacaaacacactaccagtgctgctgtccctgtacatgagcacagaatcatcagaagatctgcaggttaagtcgaaaaaagcaatcaaaaacatcttgcagaagtgcacctatcttccagcattagagcccttcctgtatgacgcaccaccaaacatcttgaagcacgtggttgggcagttctcaaaagtgttgccccatgattctaaggcgcgcaggctcttcgtgacttctggaggtctgaagaaggtccaagaaatcaaggcagaaccgggatcactactgcaggaatatattaacagtattaattcttgctacccagaagaaattgtgcgttactatagtcccggctattccgatacactgctgcagcgagtggactcttatcagcctctgaataattag

SEQ ID NO: 206755 - DNA, 1530 bp, synthetic construct
  misc_feature 1..1530: note = Description of Artificial Sequence: Synthetic coding sequence
  source 1..1530: mol_type = other DNA
atgagccagcggcaggtgctgcaggtgttcgagcagtaccagaaggcccggacgcaatttgttcagatggttgccgagttagctaccagacctcaaaacatcgaaacattacagaatgcaggagtcatgagcctgttacgaacactgcttctggacgtcgtcccgacgatacagcagactgctgcgctcgccctgggccggcttgcgaattacaatgatgatctagcggaagctgtcgttaaatgcgatattctgccacagcttgtctactctctcgctgaacagaatcgcttttacaaaaaggcagccgcatttgtgcttcgcgctgtggggaagcactctccccagcttgcccaggccatcgtcgattgcggagccctggatacactcgtcatatgcttggaggacttcgaccccggggtaaaggaggccgccgcctgggcgctacgttacatagcaaggcataatgccgagctcagtcaggctgtggttgacgcaggcgctgtgcccctgctcgttctgtgtatacaggagcctgaaatcgccctgaagcgtatcgctgctagcgccctatcagacattgctaaacactcacccgaactcgcccaaaccgtggtagacgctggcgcggtggcccatctggcgcagatgatacttaatccagatgccaagctgaagcaccagattctttcggccttgtcccaggtctccaagcattcagttgacctggctgaaatggtcgtagaggcggaaatcttccccgtcgtgcttacctgtttaaaggacaaagacgaatatgttaagaagaatgcaagtacacttatacgagagatcgctaaacacacccccgagctcagccagctcgtggtgaacgccgggggagtagctgccgtgattgattgtattgggtcctgcaaaggaaacaccagactccctggtattatgatgctcgggtacgtcgcagcgcactcagaaaatctcgctatggccgtcatcatttcaaaaggcgtccctcagctcagcgtgtgtctctcagaagaacctgaggaccatatcaaagcggctgccgcctgggccctgggccagatcggccgtcatactcctgagcacgcaagagccgtagctgtgaccaataccctgccagtgctcctatcgctgtatatgtctacagaaagttccgaagatctgcaggtgaagagcaagaaggcaattaagaacattctgcagaaatgcacctatttacctgccctagagccattcctgtacgacgctccgcccaatatccttaagcatgtggtcggccagttctccaaggtgctgccgcatgactctaaagccaggcgactgtttgtaacctcaggggggcttaagaaggtccaagaaattaaggcagaaccaggctcactgttgcaagagtacatcaacagcattaactcttgttaccccgaggaaatcgtcagatactatagccctggctactcggacaccctgctacaaagagtcgatagttaccaaccattgaacaactag

SEQ ID NO: 206756 - DNA, 741 bp, synthetic construct
  misc_feature 1..741: note = Description of Artificial Sequence: Synthetic coding sequence
  source 1..741: mol_type = other DNA
atgagccagcggcaggtgctgcaggtgttcgagcagtaccagaaggcaaggactcaatttgtacagatggtggctgagctagccactcggcctcagaatattgagacattacaaaacgctggcgaacctggcgcccgcacacccgtcgcccccagggctctttctcctcgccggctgcgccctgcggccctgcccgtggaacttctgggtagccggtctgttggtacaggggtgagaaagtccatccacagctttcaacgcgtgttcgggggacaggctgagcgcgtcaaattacctgatgggtgtggacgctgtgcgctgagcctgtttccaagttcactccataccggcgtcatgtccctcctacggacccttctgctcgatgtggtgcccacaattcaacagaccgccgcgctggctctggggaggttggctaactacaacgatgatctggctgaggctgtggttaagtgcgatattttacctcaactcgtgtactccctggcggagcagaacaggttctataagaaggcagctgctttcgtgcttagagccgttgggaagcacagcccccagctagctcaggctatagtggactgtggcgctctcgatactttagtgatttgtctcgaagacttcgaccccggcgtgaaagaagctgccgcttgggcactccgatacattgcacgccataacgcagagctctctcaagcggtcgtagacgcaggcgccgttccatag

SEQ ID NO: 206757 - DNA, 576 bp, synthetic construct
  misc_feature 1..576: note = Description of Artificial Sequence: Synthetic coding sequence
  source 1..576: mol_type = other DNA
atgagccagcggcaggtgctgcaggtgttcgagcagtaccagaaggctcggacgcagttcgtccaaatggtagccgagctggccacccggcctcaaaacatcgagactctccaaaacgccggtgtcatgagccttctgaggactctgttgcttgacgttgtacccacaatccagcagacggcagccctggctctggggaggctggcaaattataacgatgatcttgctgaagcagtcgttaaatgcgacatcttgcctcagctcgtttactctttagccgagcagaatggcgtcccacagttaagcgtatgcctgtcagaagagccagaagaccatatcaaagccgccgccgcgtgggccctgggccaaattggccgacataccccggaacacgcccgcgctgttgctgttacaaacaccttacccgtgctgcttagcctatacatgagtacggagagctcagaggacttgcaggtcaagtctaagaaggcgatcaaaaacatcttgcagaagtgcacgtacctgccagcactggagcccttcctatacgacgccccacctaatatcctgaagtag

SEQ ID NO: 206758 - DNA, 1455 bp, synthetic construct
  misc_feature 1..1455: note = Description of Artificial Sequence: Synthetic coding sequence
  source 1..1455: mol_type = other DNA
atgcacagcctgaccatggacctgtggatccccaacggccaggccggcgttatgagcttactgaggacgctcttgcttgacgtcgtaccaaccattcagcagaccgctgccctggctttgggccgcctggccaattataacgacgatttggcagaggccgttgttaaatgcgacatcctaccccaactcgtgtattcactcgctgaacaaaacaggttctacaaaaaagcggcagctttcgtgctccgcgcagtcggcaaacacagtcctcagctcgcgcaggccattgtcgattgcggtgcgctcgataccctcgtgatatgcctggaggattttgatccgggcgttaaggaggcagcagcatgggcccttcgctatatagcgagacataatgcagagctgagccaggcagtggttgatgcgggggctgtgcctttgttagtgttgtgcattcaggaacctgagatcgccctgaagcggatcgctgcgtccgccttaagcgacattgctaaacatagcccagagcttgcccagacagtcgtggacgccggggccgtcgctcacctggctcagatgatcctgaaccctgatgctaagctgaagcaccaaatactttctgccctgtctcaggtgagtaagcactccgtggacctggccgagatggttgtcgaggcagaaatcttcccagtggtgctaacatgccttaaggacaaagacgagtatgtgaaaaaaaacgcctccaccttaattagagagatagcgaagcacacccccgagctctcccaactggtggttaatgctggaggcgtcgctgctgttattgactgtatcgggagctgcaaaggaaacacgaggttgcccggaatcatgatgttgggatatgttgcagcacacagcgagaatctggccatggcagtgatcatctcaaagggtgtcccccaactatctgtctgtctcagcgaagaaccagaagaccatataaaggcagctgccgcgtgggctttggggcagatcggacgacacactcccgagcatgccagggctgtcgcggtgactaacacactgccagtcttgctaagtttgtatatgagtactgaaagctcagaggacctccaagtaaaatcaaagaaggctataaaaaacattctccagaagtgtacctacctgcctgccctcgaacctttcctgtatgatgcccccccaaacatcctgaaacacgtggtggggcaattctcaaaagttttgcctcatgattcaaaggccagacggctgttcgtcacgagcggcggtctgaaaaaggtccaggaaataaaggccgaacccggctccttattgcaggagtacattaattcaataaactcatgttacccagaagagattgtaagatactattccccaggctattcggataccctgctgcagagggtggacagctaccagcccctgaataattag

SEQ ID NO: 206759 - DNA, 1506 bp, synthetic construct
  misc_feature 1..1506: note = Description of Artificial Sequence: Synthetic coding sequence
  source 1..1506: mol_type = other DNA
atggagaccaacgagagcaccgagggcagccggagccggagccggtcattagacatccagcccagtagtgaaggtttggggcccacctccgagcctttcccatctagtgacgatagccctcgatccgccctagcagcagcaacagccgccgcggcagctgcggcttcagccgcagccgctacagccgctttcaccactgccaaagccgccgccctgtccacaaagacacccgctccttgtagcgagtttatggagcctagtagcgatccctccttacttggcgagccgtgtgctggtccaggcttcacacacaatatcgcccacgggtccctgggttttgagccggtttatgttagttgtattgctcaggacacatgcacaactaccgatcactcgagtaaccccggcccagtgcccggatcatctagtggcccggtcctgggttcttccagtggcgcgggacacggcagcggtagtggcagcggaccaggctgcggtagtgtgccagggtcggggtccggtcctgggccaggatcaggacccggaagtgggcctggacacgggtccgggtcacaccccggaccagctagcggtcccgggcctgacactggaccagacagtgagctatccccctgtatcccacctgggttccgtaacctcgtagccgacagggtacctaactatacatcctggagtcagcactgcccatgggaaccccagaaacagcccccctgggagttcttgcaggttcttgagcccggagctcgaggtctttggaagcctcctgatatcaaagggaaattgatggtgtgctacgaaaccctccccaggggccagtgccttctctataattgggaagaggaacgggcaaccaatcatctggatcaggtgccgagcatgcaggacgggtccgagagcttttttttccgccatgggcacagaggactgctaacaatgcagctgaagagtcccatgccttccagtacgacccagaaggattcatatcaacctccaggaaatgtctattggccgctcagaggtaaaagagaggccatgctcgaaatgctactgcagcaccagatctgtaaggaagtgcaggccgagcaggaacccacacgcaaactgtttgaagtggagtctgtaactcaccacgactatcgcatggagttagctcaggcaggaaccccagccccaactaagcctcatgactaccgacaggagcagccagaaactttctggattcagcgcgctccccagttgccaacctggtggcccttaccaactcaagtcccagcagctgaggactacctgacctggaaagagtggggttttaccggcgtccaggaggtcctgtctgcactcctgagagccacacccggcgaatactctgtgaatatctgcggtatgaacgaacatcctgtatgtagtaggacctggaccaatagattatgtcatcaagagatggggagcaaaaaaaccgttacccaggaagatagggggtggtag

SEQ ID NO: 206760 - DNA, 1458 bp, synthetic construct
  misc_feature 1..1458: note = Description of Artificial Sequence: Synthetic coding sequence
  source 1..1458: mol_type = other DNA
atggagaccaacgagagcaccgagggcagccggagccggagccggtccctggatatccagccttcttcagaagggctgggccctactagtgaacctttcccatcatctgacgatagtcctcgcagcgctctggctgccgccaccgcggcagccgctgccgctgcctctgctgcggcagcgacagctgctttcactaccgccaaagcagccgctctgtccacaaaaactcccgccccctgctcagaattcatggaaccttcatccgatccttctctgcttggtgagccctgcgctggccccggcttcacgcacaatatcgctcacggctctctcggattcgaacctgtttatgtaagctgcatcgcacaggatacatgcacaactacagaccatagcagcaatcctggacccgtgcccgggtcctctagcggtcccgtgctggggtccagttcaggagcggggcatggcagtggatctgggtccggacctggatgcggtagtgtgccgggctcaggtagcggtcccgggcccggctcgggaccaggatccggccccggacacgggtccggcagccatccaggccctgccagtggtccagggcccgataccggccccgattcggagttgtccccttgcattccccccggctttaggaacctggtcgccgacagggtccccaattacacttcttggtcccagcattgcccttgggaaccgcagaagcagcccccatgggagtttctgcaggttctggagcccggagcccgaggcttgtggaagcctcctgacattaaggggaagctgatggtctgttatgagactctcccccggggccaatgcttgctgtataactgggaagaagagcgcgctacgaatcaccttgaccaggttcccagtatgcaggacggatcagagagcttttttttccgacatgggcacagagggctgcttacaatgcagctgaaatcacccatgccctcttctacaacgcagaaagattcctaccagcctccgggcaacgtgtactggcctttgagaggcaagagagaagctatgctggagatgctgttacagcaccagatctgcaaagaggtgcaagccgagcaagagcctaccagaaagctgtttgaggtcgaatccgtgactcatcacgactacagaatggagctggcgcaggctggaactccagcccccactaagccacacgattaccgacaagagcaaccggagacattctggatccaaagggcaccacagctgccaggcgtgagtaacatcaggacactggacacaccgtttcgcaaaaattgttcctttagcactcccgttcctctatctctgggaaaactgctcccttacgagcctgagaactacccctatcagctgggggagatctcctcattaccttgccccggaggccggctgggaggtggtgggggacgcatgacacccttttag

SEQ ID NO: 206761 - DNA, 1281 bp, synthetic construct
  misc_feature 1..1281: note = Description of Artificial Sequence: Synthetic coding sequence
  source 1..1281: mol_type = other DNA
atggagaccaacgagagcaccgagggcagccggagccggagccggagccttgacatccagccgtcctcagagggccttggccccaccagcgaaccgttcccttcatcagatgacagtccaaggtccgccctagccgcagctactgcagccgcggccgcagccgccagtgcagcggccgcgacagccgcatttaccacagctaaggccgccgccctctcgacgaaaacgcccgccccatgctcagagttcatggagccatcctcggatccatccctgttgggcgagccttgcgcggggcctgggttcacacataatatagctcacggcagtcttgggtttgaaccagtgtacgtgagctgtatcgcccaggatacatgcacaacaacagatcattcatccaacccggggcccgtacctggatcctcctctggcccggtcctgggcagcagctccggcgccggccacggatccgggagtgggagcggacctggatgcgggagcgtgccagggagcggctccgggccagggccggggtcaggccctggcagtggaccaggacacggttccggatcccacccaggacctgcttcaggaccaggacccgacacagggcctgatagcgaactgtctccttgtatccctcctggctttaggaacctggttgccgaccgtgttccaaactatacctcttggagtcagcattgcccatgggagccacaaaagcagccaccatgggaatttctccaagttttggagccaggggccaggggtctgtggaaacctccagacatcaagggcaagctgatggtgtgctatgaaacgcttcctaggggccagtgcctgctgtacaactgggaggaagagagagctactaatcacctggaccaggtgccatccatgcaggacgggagtgaatctttcttcttccgccatgggcacagagggctcttgacgatgcagttgaagtcacccatgcctagttccactacgcagaaggacagttaccaaccgcctggcaatgtgtactggcctttgcggggaaaacgagaggctatgttggagatgcttctgcagcaccaaatctgcaaagaagtacaggccgaacaggagccaacgcggaagcttttcgaagttgaatctgtgactcaccacgattaccggatggagctagcccaggcagggaccccagcccctactaaaccacacgactacagacaagagcaaccggagactttttggatccagagggccccacagctgcctgtatgtgagggggactag

SEQ ID NO: 206762 - DNA, 3966 bp, synthetic construct
  misc_feature 1..3966: note = Description of Artificial Sequence: Synthetic coding sequence
  source 1..3966: mol_type = other DNA
atggagctggaggacggcgtggtgtaccaggaggagcccggcggctcaggggctgtgatgagcgaaagggtttctggcctagccggatctatctatagagaatttgagagactgatcgggcggtatgacgaggaggtcgtcaaagagctgatgcctttagtggtcgctgtcctcgaaaaccttgattcagttttcgcacaggatcaggaacatcaggtggagttggagctgttgcgcgacgacaatgaacagttgataacccagtacgaacgtgaaaaagcacttcgcaaacatgctgaggagaaatttatcgagtttgaggactctcaagagcaggagaagaaagacttacagaccagagtggagtcactcgaatcccagacgcgacaactcgagcttaaagctaaaaactacgccgaccaaatcagccggctcgaagagagagaagcagagctgaagaaggaatataacgcgctccaccagcggcacacagagatgatccacaattatatggagcacctggaacgcacgaaactgcaccaactctccggcagtgatcagctggagtctaccgctcatagtcggattcggaaggagaggcctatcagtctgggaatttttccccttcccgccggcgatgggcttctgacacctgacgcccagaaaggcggtgagactcccggctctgaacagtggaagtttcaggaactctctcaacctcgaagccatacatcactgaaggtttccaacagccccgaaccacagaaggctgtggagcaagaagacgagctgagcgatgttagccagggcgggtctaaggcgacaacccctgctagtactgccaactccgacgtcgctacaattcctaccgacaccccattgaaagaggaaaatgagggatttgtcaaggtaaccgacgctccaaacaaatccgagatatcaaagcatattgaggtccaggtagctcaggaaactcgaaatgtgtcaacaggcagcgccgaaaacgaggagaaatctgaagtgcaggcaatcatcgaatccacgcccgagctggatatggacaaagatctcagtggatacaaaggatccagcacccccactaagggcatagagaataaagccttcgacagaaatacggagagcttgtttgaggagctgagcagtgcaggaagcggtctcatcggtgacgtggatgaaggcgcagatctgctggggatgggcagggaggtagaaaatttgatcttggagaacacgcaactgttagagaccaagaatgctttgaacattgtaaaaaacgaccttatcgctaaagttgacgaattgacatgtgagaaagacgttctgcagggcgagctggaggcagtgaagcaagctaaactgaagttggaggagaaaaacagggaactggaagaagaactgagaaaagccagggccgaagcggaggatgccagacaaaaggcgaaggatgacgatgacagcgatattcctacggcgcagcgaaaaagattcacccgcgtggagatggctcgggtgctgatggagagaaaccaatacaaagaaagacttatggagctgcaggaagctgtcagatggaccgaaatgatcagagcttctagggagaaccctgccatgcaagaaaagaaacgtagttcaatctggcaattttttagtagactttttagctctagctcgaacaccaccaaaaaaccagaaccccccgtgaatttgaaatataacgcccccacttctcacgtgaccccctctgtcaagaagagatcctccactctgtcacaattgcccggcgataagtcaaaggcattcgatttcctttcggaagagaccgaggcctccctggcttcacgcagagagcagaagcgcgaacagtataggcaggtgaaagcccacgtccagaaagaggatggacgagtgcaggcctttggttggtccctcccccaaaagtacaaacaggtgacaaacgggcagggggagaataagatgaagaacctgcctgtgccagtgtatctccggcctctggatgagaaggatacaagcatgaagctgtggtgcgccgtcggagtgaatttatctggcggaaagacgcgggacggcggtagcgttgtaggcgcctccgtcttttataaggacgtggccggtctagatactgagggatcgaaacagcgcagcgcctctcagagttctttggataaattagaccaggagctgaaggaacagcagaaagaactgaaaaaccaggaggagttgtcatccctggtgtggatctgtacctccacacacagtgctacaaaagttctgattatagatgcagttcaacccggcaacatcctagacagttttaccgtctgtaacagtcatgtcctatgtatcgcctccgttccgggggctcgggaaacagactatcccgctggcgaggatctgtcggagtcaggtcaggtggacaaggccagtttgtgtggctcaatgacctccaactcttccgccgagaccgactcgctgttgggcggaatcacggtcgttggctgcagcgccgagggggtcaccggcgctgccacttcgccttccacaaatggcgctagcccggtgatggacaagccccctgaaatggaggccgagaacagcgaagtcgacgagaatgtcccgactgcagaagaagccactgaggctactgagggtaatgcaggatcagccgaggatacagtggacataagtcagacgggcgtctacacagagcacgtctttactgatcctttgggtgtgcagattccggaagatctgtcccctgtgtatcagagcagtaatgattcagacgcctacaaggaccagatcagtgttctgcccaacgagcaggatctcgttcgtgaagaggcccagaagatgtctagcctgttacctaccatgtggctcggagctcagaacggctgcctctatgtgcactcgagcgtggctcagtggcgtaagtgcctgcattccattaagctaaaggattcaatactctccattgttcacgtgaaagggatagttctcgtcgctctcgccgatggcactctggccatatttcatcgaggagtggacggacagtgggatctgtccaactatcatctgttagacctcggtcgcccccaccatagtatcaggtgcatgaccgttgtgcatgacaaggtgtggtgtggatacagaaacaaaatctatgttgtgcagccaaaagctatgaagatagagaagagcttcgatgcacaccccaggaaggaaagccaagtgcggcaactggcctgggtgggagacggagtttgggtgagcatacgcctcgattccacattgcgtctgtatcacgcccacacctaccaacatctccaggacgtggacattgagccctacgtaagcaagatgttagggaccgggaagctggggttttcattcgttcgaataaccgccctgatggtttcgtgtaaccgcctgtgggtggggactgggaacggagtgatcatttctattcctctcactgagactaataagacaagcggtgttcctgggaaccgcccagggtccgtgattcgcgtgtacggagacgagaactctgataaagtgacacctggcacgtttatcccttactgctcaatggcacacgcacagctatgtttccatgggcacagggatgccgtgaagttctttgttgccgtgcccggtcaggtaattagcccccagtcttcctcttctggaaccgatctgaccggagacaaagccggcccttccgcccaagagcctgggtcacaaacccccctgaagtctatgctcgtgatctcgggaggcgaagggtacatcgattttagaatgggagacgagggaggggaatccgaattattgggtgaggatctcccattggagccgagtgttaccaaggcggagcggtctcacttaatcgtatggcaggttatgtatggcaacgagtag

SEQ ID NO: 206763 - DNA, 3924 bp, synthetic construct
  misc_feature 1..3924: note = Description of Artificial Sequence: Synthetic coding sequence
  source 1..3924: mol_type = other DNA
atggagctggaggacggcgtggtgtaccaggaggagcccggcggctctggtgctgttatgtcagagagagtgagcggactcgccggcagcatctatcgggagttcgaaagactgatcgggcggtacgatgaggaggttgtcaaggaactgatgcctctggtggtagcggtgctggaaaatttggatagcgtgtttgcccaggatcaggaacatcaggttgagctggaattgctgagggacgataacgagcagctgattacacagtacgaaagagaaaaggccctgaggaagcatgcagaagaaaaattcatcgagttcgaggactcacaggagcaggaaaagaaagatttgcagacaagagtcgaaagtctggagtcccagaccagacagttggagctgaaggctaaaaactacgccgatcaaattagcagacttgaagagcgagaggctgaactcaaaaaggaatataatgcattgcatcaacggcatacagaaatgattcacaactatatggaacatctcgaacgcaccaagcttcaccaactatcaggcagcgatcagctcgagtccaccgctcacagccgcattagaaaagaacgccccattagcttgggcatcttccctttgcctgcaggggacggcctcctgacaccagatgctcagaaaggcggtgagacaccaggctctgagcagtggaaattccaggagctctcccagcctcggagccatacgtctctgaaggacgagctgtctgatgtgtctcagggtggcagcaaggccacaactccagcttccaccgcaaactctgacgtggcaacaatcccgaccgacactcccctgaaagaggagaacgaaggattcgtgaaagtgaccgacgctccaaataagtccgagatctcaaagcatattgaagttcaggtcgcacaagagacgaggaatgtaagcaccggcagcgccgagaacgaagagaaatccgaggtccaagcaattattgagtcaacacctgagctggatatggacaaagacctcagcgggtataagggctctagtacccccacgaagggaatcgagaacaaggccttcgatcgcaacaccgaatctttgtttgaggaattaagctctgccggctcaggccttattggtgatgtagacgagggagcagacctgcttggcatgggccgtgaggtcgagaatttaatactggaaaacacccagcttcttgaaacaaaaaatgccttaaatatcgtgaaaaacgatttgattgccaaagtggacgagctcacatgcgaaaaggatgttttgcagggggaattggaggcggtgaaacaggcaaagctgaagctggaggagaaaaatcgggagttggaagaggagctgaggaaagccagggcggaggccgaagatgcaaggcagaaggcgaaagatgatgatgactcagatatccccactgcacaaaggaaacgattcacccgcgtggaaatggcccgcgttctgatggagcgcaatcagtataaagagagactgatggagttgcaggaggcagtgcgctggaccgagatgatccgggcgtcccgcgagaatccagcgatgcaggaaaagaaaaggagctcgatctggcagttcttctccagactatttagtagttcatccaatacaaccaagaaacctgagcctcccgtgaacctgaaatacaatgcaccgacatctcacgtaacacccagcgtcaagaagcgctcttcaaccctttcacaattacccggcgataaaagtaaggcgttcgactttctgtccgaagaaacagaggcatcattagccagtagaagagagcagaagagagaacaatacaggcaggtgaaggcccacgtgcagaaagaggacgggcgcgtgcaagccttcggatggagtctccctcagaagtataagcaggtgaccaacggccagggggagaataaaatgaagaacctgccagtgccagtttacttacgtcccctggacgaaaaggacacctctatgaaactgtggtgcgctgttggcgtcaaccttagcggcggcaaaacacgagacggaggctctgtagtaggcgcttcagtattttacaaagacgtcgcgggcctcgacaccgaagggtccaagcaaaggtcagcatctcagtcctcccttgacaaattagatcaagagcttaaggaacagcaaaaggaactgaagaaccaggaggagctgtcctcgttggtctggatttgtacctcgacacacagcgccacaaaggttctgatcattgatgccgtccagccaggaaatattctggactcttttactgtgtgtaattcccatgttttgtgtattgccagtgtgcctggagcgagagagacagattacccggctggggaggacctgagcgaatccggccaggtcgacaaagcctctttgtgtggatctatgacctctaattcttctgcagaaacggatagtctgctgggcgggatcactgtggtgggatgcagcgccgagggcgtgaccggcgctgccacatcgcccagtacaaacggtgcctctcccgtgatggataagccacccgaaatggaagccgagaactcagaggtggatgaaaacgtgcctactgccgaggaggcaaccgaggcgaccgagggtaacgctggctcagccgaggacaccgtggatatctcccagaccggcgtttatactgagcatgtattcacggatcctcttggtgtgcaaattcctgaagatctgtctcccgtgtatcagagtagcaatgacagcgacgcttataaggatcagatatctgttttgcctaacgaacaggacttagtcagggaggaagctcagaaaatgagtagtctgctccccacaatgtggctgggtgcacagaacggttgcctttatgtgcattcgtctgtggcccagtggcgaaagtgtttgcattcaatcaagttgaaagattccattttaagcatagtgcacgttaaggggatagtgttagtcgccctagcagatggcacacttgctatcttccataggggagttgatggccaatgggacctttcaaactatcatcttttggacttgggaagaccccatcacagtattcgatgcatgactgtcgtccatgataaagtgtggtgtggctatcgcaataaaatttatgtagtgcagcccaaggccatgaaaattgaaaaatcattcgacgcgcatccaagaaaggagagccaggtacggcagctcgcctgggtcggggacggcgtctgggtgagcatacggctggacagtaccttacgcctgtaccatgctcatacttatcagcacttacaggacgtggatatagagccgtacgtgtcaaagatgctgggcacaggcaagctcggcttctcattcgttcgtatcacagctctgatggtgtcttgcaatcgtttgtgggtaggaaccggcaacggagtgattatttctatccctctgacggaaaccaacaagacatctggagtgccaggtaatcgccctggttctgtcatacgcgtatacggggacgaaaacagcgacaaagtgacaccagggaccttcataccctactgtagtatggctcatgcacaactgtgcttccacggacacagagacgccgttaagttcttcgttgccgtcccgggccaagtgattagtccccagtcaagctccagtggaacagacttgactggcgacaaggcgggacccagcgcacaggaaccagggagccagaccccccttaaatcaatgctcgtgatctcagggggcgaaggttatatcgacttccggatgggggatgagggcggggagtcagaactgcttggcgaggacctgcccctagaaccatccgtgacaaaggccgagcgatcacatctcattgtgtggcaagtaatgtacggcaacgagtag

SEQ ID NO: 206764 - DNA, 1908 bp, synthetic construct
  misc_feature 1..1908: note = Description of Artificial Sequence: Synthetic coding sequence
  source 1..1908: mol_type = other DNA
agcctgaaggacgagctgagcgacgtgagccagggcggcagcaaggcaacgaccccagcctccacagctaacagtgatgttgccactattcccacagacacccctcttaaggaggagaacgaaggttttgtgaaagtaactgatgccccaaataagtccgagatcagcaaacacattgaagtgcaagtggcccaggaaacaagaaatgtttctactggttccgccgagaatgaggagaagtctgaggtgcaggcaatcatcgagagcacacccgagctggacatggataaggatctctccggctacaaggggagcagcactccaaccaaggggatagagaacaaggccttcgatagaaacacagagtctctgtttgagaagaggtcttccacactgtcacagctcccaggagataagagtaaggcctttgacttcctgtccgaggagacagaagcgagcttggcctccaggcgcgaacagaaacgagagcagtaccggcaagtgaaagctcacgtccagaaagaagatgggcgggttcaggcttttggctggagtttgccccagaaatacaaacaggttaccaacggtcaaggagaaaacaagatgaaaaaccttccggttcccgtctaccttcgacctttggatgagaaggatacatccatgaaaaagttgtggtgcgccgtgggcgttaacctgagtgggggaaagaccagggacggtggatccgtggtcggcgccagtgtcttctataaggatgtggcaggactagataccgagggctcaaagcagagaagcgctagccagtcgtcactggacaagctggatcaggagctcaaggagcagcagaaggagctgaagaaccaggaggaactcagcagtctcgtgtggatttgtaccagcacccactccgcgacaaaggtgctcataatcgacgctgtccagcccgggaatatcctggatagttttaccgtctgtaattcccatgtgctatgcatcgcatctgttcctggagcacgggagaccgactacccagctggtgaagacctgtctgagagcggacaggtcgacaaggcctctctgtgtgggagtatgacaagcaactcttctgctgaaaccgatagcctgctgggcggcatcactgttgtaggctgctcagcggagggggtaactggagcggcaacttccccctctactaacggtgcttcacccgttatggacaagccacctgagatggaggcagaaaattctgaggtcgacgagaacgtgcccacagctgaggaggccaccgaagctaccgagggcaacgcgggcagtgcagaggacacggtcgacataagccagaccggggtgtatacagagcatgtttttacggatcctcttggagtgcagatcccagaagacctttccccagtctaccagagctctaacgacagcgatgcctacaaggaccagatatctgtgctaccaaacgaacaggacctagttcgggaagaggcacagaaaatgagctccctccttcccaccatgtggttgggggcacaaaacggttgcctatacgtgcatagctcagtggcccagtggaggaaatgtctgcattccatcaaactcaaggacagcatactgtctatagtgcacgttaagggcatcgtccttgtcgctttggcagacggcacattggctatcttccacagaggtgtcgacggccagtgggatctatccaattaccatctactggacctcgggcgcccgcatcattcgatccgctgtatgacagtggttcatgataaagtctggtgtggttaccgcaacaaaatttacgtcctgcacagcagcctgggggacggcgcgaggccctgcctgaaaacagataagcaggcgaagaaccggttgaagagcggctttcactag

SEQ ID NO: 206765 - DNA, 3207 bp, synthetic construct
  misc_feature 1..3207: note = Description of Artificial Sequence: Synthetic coding sequence
  source 1..3207: mol_type = other DNA
agcctgaaggacgagctgagcgacgtgagccagggcggcagcaaggccactactcctgcctcgactgctaattcggatgtggccaccatcccgacagacaccccgctgaaggaagagaacgaaggctttgttaaggttactgacgctccaaataaaagcgagatctccaagcacattgaagtccaggtcgcccaggaaaccaggaatgtgtcaactggttcagccgaaaacgaggagaaatcagaagtgcaagccatcattgaatctaccccagagttggacatggacaaggacctgtccgggtacaagggaagctcaacacctaccaaaggtatcgagaacaaagccttcgaccgcaacacagagagcctattcgaggagcttagctccgctggaagcggtctgataggcgatgtggacgaaggagctgacttacttggaatgggacgggaagttgagaatttgattcttgaaaacactcaactgttagaaactaagaacgctctaaatatcgtgaagaacgacctaattgccaaggttgacgaattgacatgtgagaaagacgttctccagggagagcttgaagccgtcaagcaggctaagcttaagttggaggaaaaaaatcgagaactggaagaagagctcaggaaagctcgtgcggaagcagaagatgcccgccaaaaagcaaaggacgatgacgacagcgacattccaacagcccagagaaagagatttacccgggtcgagatggccagagtactgatggagaggaatcagtacaaggaaagactgatggagctgcaagaagccgtccggtggacagaaatgattcgggctagccgagagaatcctgcaatgcaagagaagaaacgctcctctatatggcaatttgttcctactaggttcagtcgcctgttctcctcttcgtctaatacaactaagaaacctgaaccccctgtgaatttgaagtacaacgccccaacttcccatgttacgcctagcgtgaaaaagcgttcctcgactctcagccaactgcccggagataaaagtaaggccttcgacttcctttccgaagaaaccgaagctagcttggcaagcagacgcgaacagaaaagagagcaataccgtcaagtgaaagcccacgttcagaaggaggacggtagggtgcaggccttcggttggagcctcccgcagaaatataaacaagtgaccaacgggcaaggggagaacaaaatgaagaatctgccagtgcccgtttatctcaggcctttggatgaaaaggatacgagtatgaaaaaactgtggtgtgcagtcggggtgaacctcagcggcgggaaaacgcgcgatggcgggagcgtggtgggggccagtgtcttttacaaggacgttgctgggctcgatacagagggctcaaaacagaggtccgcttctcagagctctctggataagctcgaccaagaactcaaggagcagcagaaggagctgaagaaccaagaggagcttagcagccttgtatggatttgcacatcaactcactcggctaccaaggtgctaatcatcgacgctgtccagcccggaaacatcctggactcctttactgtgtgcaattctcacgtgctttgcattgcgtctgtgccaggcgctcgcgaaacagactacccagcgggcgaagatttgtcggaatcaggccaggtggataaagcgtcactctgtgggtccatgacatccaactcctccgctgaaacggattccctcctgggtggcatcaccgtcgtcggttgctcggctgaaggtgtgacaggtgccgcaaccagtccgtcaaccaacggggcaagtcctgtgatggataagcccccggagatggaggcagaaaacagcgaagttgacgaaaatgttcctaccgctgaggaggcaactgaggccaccgaaggaaatgccggttcagctgaggacactgttgatatctctcagacgggggtttatactgaacacgttttcaccgaccctctgggagtgcagatccccgaagacttaagtccagtctaccagagtagtaatgacagcgacgcctataaagaccagatttccgttctgccgaatgaacaggacctggtgcgcgaggaggcacagaagatgtcttcacttcttccaactatgtggcttggcgcccagaacgggtgtctttatgttcattcatcagtggcacagtggcgaaagtgccttcactcgatcaaacttaaggatagcatccttagcatcgttcacgttaagggcatcgtgttggtggcgttagccgatgggaccctcgcaattttccaccggggtgttgatggccagtgggatctgtcaaattatcacttgctcgacctcggaaggccacaccatagtatcagatgtatgacagtcgttcatgataaggtgtggtgcgggtacagaaataagatctatgtggtacaacccaaggcaatgaaaatcgagaaaagcttcgacgcacaccccaggaaggaatctcaggttcggcagttggcctgggtcggtgatggcgtttgggtgtcaattcgtctggatagcacccttcggctctatcacgctcacacgtatcagcacctgcaggatgtggatatcgagccctatgtctccaagatgttgggtacaggtaaattgggcttcagtttcgtccggatcaccgctcttatggtctcttgtaataggctctgggtgggcaccggaaatggtgtgattatatctattccactgactgagaccaacaagacatcaggggtacccggcaatcgcccagggagtgtgatccgggtgtacggggatgagaattccgataaagtcactcccggaaccttcatcccctactgttcaatggcccatgctcaattgtgttttcatggacacagagatgcagtgaagttttttgttgccgtgcccggccaagttatttctcctcagagctcttcttccggcactgatctgacaggcgacaaagcgggacctagcgctcaggagccagggagtcaaacacccctgaagagcatgttagtgatctccggcggcgagggctacatcgatttccgcatgggcgacgaaggcggcgaatcagaactactgggggaggaccttccgctagagccatccgtaactaaagccgagcgcagccatcttattgtctggcaggtgatgtacggcaacgaatag

SEQ ID NO: 206766 - DNA, 3237 bp, synthetic construct
  misc_feature 1..3237: note = Description of Artificial Sequence: Synthetic coding sequence
  source 1..3237: mol_type = other DNA
agcgtgaaggtgagcaacagccccgagccccagaaggccgtggagcaggaagatgaactttcagatgtatctcagggcggtagtaaagctacaacacctgcctcaacagcaaactccgatgtcgcaaccatcccgactgatacgccactcaaagaagagaacgagggattcgttaaagtcaccgacgcaccaaacaagagcgaaattagtaaacatattgaagtgcaagtggcccaggagacccggaacgtaagcacagggtccgctgagaacgaggaaaagagcgaggtccaagcaattatagaaagtacccctgaactggatatggataaggatctgtccggatacaaaggtagcagtacccccaccaaaggcattgagaataaagcattcgaccgcaacacggaatccctgttcgaggagctgtctagcgccgggtctggactaattggagacgtggatgagggagcggacctgttaggcatgggcagggaagtagagaatctgattctcgaaaatacacagttactggaaaccaaaaatgctctcaatatagtgaaaaatgacctgattgccaaagtcgatgaactcacctgcgagaaagacgttcttcagggagagctggaagctgtcaaacaagccaagcttaagcttgaggagaaaaaccgagagcttgaggaagaacttcgcaaggcccgagcagaggccgaggacgccaggcagaaagccaaggatgacgacgatagcgatatcccaaccgcacagcgcaaacgtttcacccgcgtcgagatggccagagtgttaatggaaagaaaccaatacaaagagagactgatggaactccaagaggcggtgagatggacagaaatgatcagagcaagtagggagaacccagcaatgcaagaaaagaagcgtagctccatttggcagtttttttcaaggctcttttcctcgagtagtaacactaccaaaaagcctgaaccgccggtgaatttaaagtataacgccccaacctctcatgtcacaccaagtgtgaaaaagcggagtagtacgctgtcccagttgccaggggacaaatcaaaggcatttgatttcctgtctgaagagaccgaagcatcactcgccagccgcagagagcagaagcgggagcagtacaggcaggtgaaagcccatgtgcagaaagaagacgggagggtacaggcttttggttggtcactgccacaaaagtacaagcaggtcacaaatgggcaaggagagaacaaaatgaaaaacctgcctgtgccggtatacctgaggcccctggacgagaaggatacctccatgaaaaaattgtggtgcgccgtgggagtgaacctaagcggcggaaaaactcgggacggcgggtcagtggtgggcgccagcgttttctataaagatgtggcgggcttggacactgaaggctctaagcagcggtccgcatcgcagagctccctggacaagctggaccaggagttgaaggagcagcagaaggaactgaagaatcaagaagaacttagcagcctagtttggatttgtaccagtacccattcagctacaaaggtgcttatcattgacgcagtgcagccagggaatatactcgactcatttacagtctgcaacagtcatgtactctgcatcgcttcagtgccaggcgcccgggaaacagactaccctgcaggcgaggacttgtctgagtctggccaggtggataaagcctcactgtgcggatccatgacttccaattcgtccgctgaaacagattccctacttgggggaatcacggtcgtgggctgctcggccgaaggcgtgacgggggctgccacatctccttctacaaatggcgcctccccagttatggataagccgcccgagatggaagcagagaacagcgaagtagacgagaacgtgcccaccgctgaagaagccactgaggctactgaaggaaacgcaggctccgccgaggacaccgtagacatttctcagacgggcgtgtacactgagcatgtgttcacagatccactaggcgtccagattccagaagacctgagcccggtgtatcagtccagcaatgactctgacgcctacaaagaccagatttctgtattacctaacgaacaagatttggtgagagaggaggcccaaaaaatgtcttctctcctccccacgatgtggttgggcgcccagaacgggtgcctatacgtgcattctagtgtcgcccagtggagaaagtgcctccactcgatcaagttgaaagactcaatcctgtcaatcgtccacgtgaaagggattgtccttgttgctcttgcggacggaactttagcaatcttccatagaggggttgacggtcagtgggacctcagcaattaccatctgttggatctggggcgtccacaccattccattaggtgcatgactgtggtgcacgataaggtctggtgcggatatcgcaataagatttacgttgttcagcccaaggctatgaaaatagagaaatcttttgacgctcacccaaggaaggaatcccaagtccgccagctggcatgggtaggggatggagtttgggtgagtatccggctggacagtaccctgcggctgtaccacgctcatacatatcagcatttgcaggacgtggatatcgaaccctacgtgtctaaaatgttggggaccggaaaattaggcttttcgtttgtgagaatcacagcactgatggtatcctgcaaccgcctctgggtcgggacaggcaatggggtgattattagcatccccctgactgagacaaacaaaacttcaggcgttccagggaatcggccagggtctgtgattcgagtgtatggggatgagaactcagacaaagtgacccctggcaccttcatcccctactgttccatggcccatgcacagctctgctttcacggacatagagatgcggtgaagtttttcgtggcagtcccaggacaggtgatcagtccccagtctagctcctctgggacggatctgacaggcgataaggcagggccttccgcgcaagaacccgggtcccagacccctctcaagagtatgctggtcatctccgggggggagggctacatcgactttcgaatgggggacgaggggggcgagagcgagttgctgggggaagatcttcctctggaaccgtctgtcactaaagccgaacgatctcatctcatcgtctggcaagtaatgtatggtaacgagtag

SEQ ID NO: 206767 - DNA, 3936 bp, synthetic construct
  misc_feature 1..3936: note = Description of Artificial Sequence: Synthetic coding sequence
  source 1..3936: mol_type = other DNA
atggagctggaggacggcgtggtgtaccaggaggagcccggcggctctggggccgtcatgtctgaacgcgttagcgggcttgctggtagtatctatcgggaatttgagaggctaattgggagatacgacgaggaagtagtgaaggagctgatgccactggtggtagctgttctggaaaacctggattctgtgtttgcccaagatcaggaacatcaggtcgaactcgagcttttgcgcgacgacaacgagcaactgatcacacagtacgaaagagaaaaagccctcaggaagcacgcagaggaaaagtttattgagttcgaagactcgcaggagcaggaaaagaaagatctgcagacgagagtcgagtccctcgagtcacaaacaagacagctcgaactcaaggctaagaattatgcagatcagatctctcggctggaagagcgagaagccgaattaaaaaaggagtataatgccctccaccagcgccacacggaaatgatccataactatatggaacacctggaacgtaccaagctacatcagctgagtgggagcgatcagctggagagcacagcccattccaggatcagaaaagaacgcccaatttcgctgggcattttcccccttcccgctggcgacgggcttctgactcctgatgcccagaagggaggcgaaactccaggcagtgagcagtggaaatttcaagagttgagccagccaaggagccacacctccctgaaagacgaactgtccgacgtgtcgcagggaggctcgaaagccacaacacctgcaagtactgctaattcggacgttgcaacaattcccacagacactcccctgaaagaggaaaatgaggggttcgttaaagttacagacgctccaaataagagcgagatcagcaaacatatagaagtccaggtggctcaggagacgagaaacgtctccaccgggagcgcagagaatgaggaaaagagcgaggtgcaagccatcattgaatccacgcccgagctcgatatggacaaggatctgtccggttataaagggtcctctaccccaaccaagggaattgaaaacaaggcctttgataggaatactgagagcctgtttgaagaactcagcagcgctggtagcggactgattggcgacgttgacgaaggggcagacctcctgggcatggggcgtgaggtcgaaaatcttattctggagaacacccagctcctcgagactaagaatgccctgaacatcgtgaagaatgatctcattgccaaagtggatgagctgacatgcgagaaggatgtcctccagggcgagctcgaggcggtaaaacaggctaagctgaaactcgaggaaaaaaacagggagttggaggaggagcttaggaaggcaagggcagaagccgaggacgccagacagaaggcaaaggacgatgatgattctgacatacccactgcacagaggaaacgctttactcgagtcgagatggccagggtgctcatggagagaaaccagtacaaggaaaggcttatggagctccaggaggccgtgcggtggactgagatgatcagggcgtcacgtgagaaccccgcgatgcaagaaaaaaagaggtcgagcatttggcaattcgtccccacacggtttagtcgcctgttctcaagctcttctaatacgaccaagaagccagaaccacccgtaaacctgaagtacaatgctcccactagccacgtgacacccagtgtcaagaagaggtcaagcacattgtctcagctgcccggcgataaaagtaaggctttcgacttcctctccgaggaaacagaggcatccctggccagtagacgcgagcagaagcgcgagcagtacaggcaggtcaaggcacatgtgcaaaaggaagacggccgcgtccaggccttcggttggagtctccctcaaaaatacaaacaggtcacaaacgggcagggagaaaacaagatgaaaaatctccctgtgcctgtttatttgagaccccttgacgagaaggatacgagtatgaagttatggtgtgctgtgggcgtgaacctgagcgggggaaagacaagagatgggggaagcgtggtcggcgcgtctgttttttataaagatgtggctggactggacaccgaaggctcaaagcagagaagtgcgagtcaatcttccctggataaactggaccaggagttgaaagagcaacagaaagaactcaaaaatcaggaggagctctctagcctggtctggatttgcacctcaacacatagcgccacgaaagtgctaataatcgacgccgtgcagccaggcaatattctggactccttcaccgtgtgcaatagtcacgtgctgtgcatcgcatccgttcctggagcacgcgagacagactatcccgctggggaagacctgagcgaatctggtcaggtagacaaagcatcgctctgcggctctatgacaagcaatagttctgccgaaactgactctctgctgggcgggatcacagtggttggctgttctgcagagggggttactggtgccgccacttctccgtcgacgaacggggctagtcccgtgatggacaagccacctgagatggaggcagagaattctgaggtcgacgaaaatgtgccgactgcagaagaagctactgaagccaccgagggcaatgctgggagcgccgaggataccgtagatatttcccaaaccggcgtgtacaccgaacacgtgttcacagacccactcggcgttcaaatcccagaagacctcagcccagtgtatcagtcctcgaacgattcagatgcatacaaagatcagatcagcgtcctgcctaatgaacaggacctggtccgcgaggaagctcagaaaatgtccagcctgttgcccactatgtggttgggcgctcagaatggctgcttgtacgtccattcatcagttgcccagtggaggaaatgcctccattctatcaaactgaaggacagtatcctttcgatcgtgcacgtgaagggcatcgtcttagttgccctcgccgacggcacactcgcaatttttcatcggggagtggacgggcagtgggacttatcgaactaccatctgctggatctggggaggcctcaccattctattagatgcatgaccgtggtgcacgataaggtgtggtgtggctaccgtaacaaaatctacgtggtgcagcccaaagcaatgaagattgagaaatctttcgatgcacacccacggaaagaatctcaagtgcgccagctcgcttgggtgggagacggcgtatgggtctccatcagactcgatagcacacttcgactgtaccatgctcacacctaccaacatctccaggacgtcgacatcgagccttacgtatcaaaaatgttgggtaccggcaagcttggcttcagttttgtgcgtattacggccctgatggtgagctgtaacagactctgggtcggcactgggaatggagtgattatctcgatccccctcacggagaccaacaagactagcggagttcccggcaacaggccaggcagcgtcattagagtatatggtgacgagaactcagacaaagtaaccccgggcacattcatcccctattgttctatggctcacgcccagctgtgttttcatgggcatagggatgcagtgaagttttttgttgccgtacccggtcaagttatctcaccacagtcaagcagttcgggcaccgatctgaccggggataaagcgggaccttctgcccaggagccagggagtcagactccactcaagagcatgctggtcatctctggcggtgaaggctatattgactttcgtatgggagacgaaggaggtgagagtgaacttctcggggaggatcttcctctggaaccctccgtgaccaaagctgagaggtcccatttgatcgtgtggcaggtgatgtacggcaacgagtag

SEQ ID NO: 206768 - DNA, 3534 bp, synthetic construct
  misc_feature 1..3534: note = Description of Artificial Sequence: Synthetic coding sequence
  source 1..3534: mol_type = other DNA
atgagccccggctgcatgctgctgttcgtgttcggcttcgtgggcggcgccgtggtgatcaacagcgccatcctcgttagtctaagcgttctcctgctggtgcatttcagcatcagcacgggagtgcccgcgctgacccagaacttgcctcgcattttgagaaaggagaggccgatttccctgggcatattccctctgccggcaggagacgggctgctcactcctgacgcccaaaagggtggggagactccgggtagcgagcagtggaaattccaggagctcagccaacctcgcagccacacctcactcaaagacgaactgtctgatgtgagccagggcggcagcaaggcaacaactcccgcctcgacagctaattcagacgtagcaacaatacctacggacaccccacttaaagaggaaaacgagggcttcgtgaaggtcaccgatgcccctaacaagagtgagatttcaaagcacatagaagtgcaggtggctcaggagaccaggaatgtgagcacgggtagcgctgagaacgaggagaagagcgaggtgcaggccatcatcgagagtacacctgagttagacatggacaaggatctgtccggatataaggggtcatcaactcccacgaaagggatcgagaataaggccttcgatcgaaataccgagtctctgtttgaggaattgtcatcggcgggcagtggtctgataggtgatgtggatgaaggtgccgacctgctgggcatgggcagggaggtggaaaatctaatcttggagaacactcaactgctagagacaaaaaacgcattgaatatagtgaaaaatgatctaatcgctaaggtcgacgagctcacgtgcgagaaagatgtcctccagggagagctcgaggcagtcaaacaggcaaaacttaaactggaggagaaaaatagggaactggaggaggagctccggaaggcccgtgccgaagcagaggacgcacgccagaaagctaaagacgacgacgatagcgacattcctaccgcgcaacggaaaagatttacacgagtggagatggctcgtgtcttaatggaacgcaaccagtataaagaacgccttatggaattacaggaggctgtaaggtggacggaaatgataagagcctcaagggagaatcccgcaatgcaggagaaaaagagaagtagcatctggcaattcttttcccggctgttctccagctcttccaatactacaaagaagcctgagcctcccgtcaacctgaagtacaacgcgcccacgtcacatgtaaccccaagtgtgaagaagagaagctcaactctgtctcagctgccaggggataagtccaaagcttttgactttctgagcgaagagaccgaggcctctcttgctagcaggagagagcaaaaaagggaacaatatcggcaggtcaaagcacatgtgcaaaaggaagatggaagagtgcaggcctttggctggtcactgccacagaaatacaaacaggtcaccaatgggcaaggtgagaataagatgaagaatctcccagttcccgtgtacttaaggccactggatgaaaaagatacctccatgaagctctggtgcgcagttggagtgaacctgtcaggaggcaaaacccgggatggggggtcagtggttggcgcctctgtgttttacaaagacgtcgcaggactggataccgaaggtagcaagcagaggagcgctagtcaaagctcgcttgacaagctagaccaggagctgaaagaacagcaaaaggagctgaagaaccaggaggaactgagcagtcttgtgtggatatgtacctcgactcattcagcaaccaaagtacttatcatcgatgctgtccagcctggcaatattctcgattcattcaccgtctgcaattcccacgtgctctgtattgcttccgtgcccggtgcaagagaaaccgactaccccgcaggcgaggatctgtccgaatctggccaggttgacaaggccagtttgtgtgggagtatgactagtaattcaagtgctgaaacagactccctgctcggcggcattactgtggtaggttgctcggccgagggcgtgaccggggctgctacaagccctagcacaaatggcgcaagtccagtgatggataagccgcccgaaatggaagccgagaacagcgaggtggatgaaaacgtgcctaccgccgaggaagcaactgaagctacggagggcaatgctggaagcgccgaggacactgtagatattagtcaaacaggcgtgtatacggaacacgtgtttaccgacccactcggagtgcaaattcccgaagaccttagtcctgtataccagagcagtaacgactccgacgcttacaaagaccagatcagcgttttaccaaacgagcaagacttagtgagggaagaagctcagaaaatgagtagcctgcttcccactatgtggctcggcgcccagaatgggtgcctgtatgtacacagctcagtggctcagtggcgcaaatgtctgcattctattaagctgaaagatagtatactgagtattgttcatgtaaaggggattgtcctcgtcgcattggctgatgggaccctggctatttttcataggggcgtcgatggacagtgggacttatctaattatcacctactggacctgggccggccgcatcactctataagatgtatgacagtggtccatgataaagtctggtgcgggtatcgaaataagatttatgtagttcagccaaaggctatgaagatcgaaaaaagttttgatgcccacccgagaaaggaatctcaggtaaggcagctggcctgggtgggagatggtgtgtgggtgagtatccgtcttgatagtaccctgaggctgtaccatgcccacacatatcagcacctgcaagacgtggatatcgaaccttacgtaagtaaaatgctaggcacaggcaagttaggttttagttttgtgcggatcactgcgctgatggtaagctgcaaccggctgtgggtgggcacgggaaacggtgttattatcagcatacccttgactgagaccgtgatcttacaccagggcagattgctcggattaagagctaacaaaactagcggcgttcctggaaataggcccggaagcgtgattcgcgtttatggcgacgagaatagcgataaggtcactcccggaaccttcatcccctactgctccatggcccacgcacaattgtgcttccatggccatcgcgacgccgtgaagttcttcgtagccgttccaggacaggtcatctctcctcagtcttcctcatcaggaacggacttgactggcgacaaggccgggccgagtgcacaggagcctggcagccagacgcctctaaaatctatgctggtcatttctggaggagagggctatatagatttccgcatgggcgatgagggtggtgagtcggaacttctgggagaggatctccccctggagccgtcggtgaccaaggctgaacggtcccatctgatcgtgtggcaggtcatgtacggcaacgagtag

SEQ ID NO: 206769 - DNA, 2760 bp, synthetic construct
  misc_feature 1..2760: note = Description of Artificial Sequence: Synthetic coding sequence
  source 1..2760: mol_type = other DNA
atggtgatgcggtggggcgagcggaacgacgtgatcgcctgggagttactccaagacggggtggaaaacgcattaaatattgtgaaaaacgacctgatagcaaaggtagatgagctgacatgtgagaaagatgtgctacagggggaactggaggccgtgaaacaggctaaactaaagctcgaggagaaaaatagggaactggaagaggagttgcggaaagctagggctgaggcggaagatgctcggcagaaagcaaaggacgacgacgattccgacatcccgacagcccagcgcaaacgctttacaagagtagagatggcccgagtgctgatggaaagaaatcagtacaaagagcgtctcatggaactgcaagaggctgtgaggtggaccgaaatgattcgcgcttcccgggaaaaccccgcaatgcaggagaagaagagatccagcatctggcaatttttctctcgactctttagcagtagcagcaatactaccaagaagcctgaacctcctgtgaatctgaaatacaacgccccaacttcacacgtcaccccgagtgtgaagaagagatctagcactctctcccaactcccaggggacaagtctaaagctttcgactttctgtccgaggaaaccgaggcaagtctggcctccaggagggagcagaaaagagaacaatatcgtcaggtgaaggctcacgtccagaaggaggacggaagggtccaggcctttggctggagtctgccccaaaagtacaaacaggtcaccaatggccagggagaaaataagatgaagaatcttcccgtcccggtgtatctgagacctctcgacgagaaagacactagcatgaagctctggtgcgccgtcggggtcaatctctccggcggaaagactcgggatgggggcagcgtggtgggagccagtgttttttataaggacgtggcaggactagacaccgagggcagcaagcaacgctctgcctctcaaagtagcttagataagcttgatcaagaactcaaggagcaacagaaggagctaaagaatcaggaggaattaagttctctcgtgtggatctgtactagcactcattccgccactaaagtgttgattatcgatgctgtgcagcccggcaacattctagattcttttacagtctgtaacagccacgttctgtgcatcgcctctgtgcctggagcacgtgagacagactaccccgcaggggaggatttgtccgagagcggacaggtggacaaagcttctctgtgtggaagtatgacctccaattcatccgctgagacagattctctgttgggtggaattaccgtggtgggctgctccgcagagggggtcaccggggccgcaacttccccctctactaatggggcgagtcccgttatggataaaccccctgaaatggaggctgagaattctgaggtcgatgagaacgtcccaactgccgaggaggcgacagaagccacagaaggcaacgcgggctctgcggaggatacagtggacatctctcagacaggagtgtacaccgaacacgtcttcacagaccctctgggagttcagatcccagaggatctctcaccagtgtatcaaagcagtaacgattccgacgcttataaggatcagatttctgtcttacctaacgaacaggacctcgtccgcgaggaagcccagaaaatgagctctttactgcctacgatgtggctcggcgcgcagaatggctgcctgtacgtccacagttcggtggctcagtggaggaaatgcctacactccataaaattgaaggattctatcctatccattgtacatgtgaagggcatagttttagttgctttagctgacgggacactggcaatcttccacagaggcgtagatgggcaatgggatttgagcaattaccacctcctggaccttggccggccccatcactctatccgctgcatgacagtcgtccacgacaaagtgtggtgtgggtatcgaaacaagatttatgtggtccagcccaaagccatgaaaattgaaaaaagtttcgacgcccacccaaggaaggagtcacaagtccgtcagctggcgtgggtgggggatggtgtatgggtgagcatcagacttgattcgactctcaggttatatcacgctcacacctaccagcatctacaagatgtagatatcgagccttatgtttctaaaatgctgggaaccggtaaactcgggttctcttttgtacgtatcactgctctaatggtctcctgtaatcggctgtgggtgggcaccggcaacggcgtaattatctcaatccccctcacagagactaataaaacgtcaggcgttcctgggaacaggccgggtagcgtaatacgcgtatatggcgacgaaaactcagacaaggtgacgccagggacattcatcccttattgcagcatggctcacgctcaactgtgctttcacggacacagagatgcagtgaaattttttgtggcagtgcctggccaagtcattagcccccagagtagtagcagtggaaccgatctgactggtgataaggcgggaccatccgcccaggaaccgggaagccagacgccactcaagagtatgttggttatatccgggggcgagggttatatcgacttcaggatgggagatgagggtggcgaaagtgagctactgggagaggatctacccttggaaccttccgtgactaaagcggaaagaagccacctgattgtgtggcaggtaatgtacggaaatgagtag

SEQ ID NO: 206770 - DNA, 825 bp, synthetic construct
  misc_feature 1..825: note = Description of Artificial Sequence: Synthetic coding sequence
  source 1..825: mol_type = other DNA
atggagctggaggacggcgtggtgtaccaggaggagcccggcggcagtggagccgttatgagtgagcgtgtgtcagggttggccggtagtatttacagggaatttgagaggctcattgggcgttacgacgaggaggtcgtaaaggaattgatgccattagtggtggccgtgttggagaatctggattcagttttcgcccaagatcaggaacaccaggtggagcttgagcttctgcgtgacgacaacgagcagctgatcacacagtacgagagagaaaaggccctgcgaaaacatgcagaggagaagtttatcgaatttgaggattcacaagagcaggagaaaaaggacctgcagacgcgcgtggagagcctcgagagccagactagacaactcgagctcaaagcgaagaattatgccgaccagtctgcgatgtcgcctggttgcatgctcttgttcgttttcgggtttgtgggcggggctgtggttataaacagtgccattttggtcagtctgtcagtcctactgctcgtgcacttttcaattagcactggcgtacccgcactcacccagaatctccctcgtattctgaggaaagagcgccctataagtctcggaatatttcccctgcccgcaggtgatggactgctgacacccgatgcgcagaaggggggcgaaaccccaggaagtgagcaatggaaattccaagaactttctcagccaagatctcacacaagtcttaaggttagcaatagtccggagcctcaaaaggcggtagaacaggaggtgcgtatggtattgttaaacattttgcagaaagtgtattag

SEQ ID NO: 206771 - DNA, 1053 bp, synthetic construct
  misc_feature 1..1053: note = Description of Artificial Sequence: Synthetic coding sequence
  source 1..1053: mol_type = other DNA
atgaagcccctggtgctgctggtggccctgctgctgtggcccagctccgtgcctgcgtatccatctatcacagtgactcctgatgaggagcagaatctcaatcactacattcaggtgttggaaaatctcgtgcgcagtgttcccagtggggagcctggaagagaaaagaaatccaacagcccaaagcatgtttactccatcgctagcaaggggagcaagtttaaagaactggttacacatggggacgcctctactgaaaatgacgttctgacaaaccctatatctgaggaaactaccacgtttccaaccggaggctttacaccggagatcgggaagaagaagcacacagagagtacgccgttctggtccataaaaccaaataacgtttcgatcgtactccatgctgaggagccatatatagaaaatgaagaaccggagcccgaacctgaacctgcagcaaagcagacagaagccccacgcatgctgcctgtcgtgacagaatcctccacaagcccatacgtcacttcatataaaagtcccgttacaacgctagacaagagcaccggaatcggcatttctacggagtccgaagacgtcccccagctgtctggcgagacggccatcgaaaaacccgaagagttcggcaagcaccctgaatcatggaataatgatgatatactgaagaaaattctggacatcaatagccaagtgcagcaagccctgctctccgacacttccaacccggcctatagggaggatatcgaggcctccaaagaccatcttaaaagaagcctcgctctggccgctgctgccgaacacaagctaaagactatgtataaaagtcaactcttaccagtcggaaggactagtaacaagattgacgatattgaaacagtcatcaatatgctctgcaacagtaggtcaaaactgtacgagtatttagacattaagtgcgtgcccccagagatgcgggaaaaagcagctaccgtgttcaataccctgaagaatatgtgcagaagtcgccgtgtgactgccctcctcaaagtatattag

SEQ ID NO: 206772 - DNA, 711 bp, synthetic construct
  misc_feature 1..711: note = Description of Artificial Sequence: Synthetic coding sequence
  source 1..711: mol_type = other DNA
atggccagcagcgtggacgaggaggccctgcaccagctgtacctgtgggtggataatatcccactctccagaccaaagcgtaatctgtccagggatttctctgatggggtgttggtggctgaagtgattaaattttatttcccaaagatggttgagatgcataattatgttcccgccaatagcctgcagcagaaattgtcaaactgggggcatctcaatcggaaggttctgaaacgactgaattttagtgtccctgacgacgtgatgcgcaaaattgcccagtgcgcccccggggtggttgaacttgttttgattcctctgcgtcaaagactggaggagagacaacggaggagaaaacagggagccggctccctgcaggaactggcgccccaagacggttccgggtacatggacgttggcgtaagccagaaggctaggggtgagggggtcccagatccccagggtggcggtcagctgagctgggatcgcccacctgccccacggcctccggcatacaatagagcactgcagggggatcctagcttcgtgctgcagatcgccgagaaggaacaggagctgttagcctcgcaggagacagttcaagtgttgcagatgaaggtgcgccgactagagcatttattacaacttaaaaatgtaagaattgaggacctgtcaagacgccttcagcaggctgaacgcaagcagagatag

SEQ ID NO: 206773 - DNA, 351 bp, synthetic construct
  misc_feature 1..351: note = Description of Artificial Sequence: Synthetic coding sequence
  source 1..351: mol_type = other DNA
atgtgcgaccagaccaagcacagcaagtgctgccccgccaagggcaaccaatgctgtccaccccagcaaaaccagtgttgtcaaagcaagggcaaccagtgttgccctcccaaacagaatcagtgttgtcaacccaaggggagccagtgttgtccaccaaagcacaatcactgctgtcaaccaaagccaccttgttgcattcaggccaggtgttgcgggctggagacaaaacccgaggtaagcccattaaacatggagtctgagccaaactcccctcagacccaggacaaagggtgccagacgcagcagcagcctcactctcctcagaacgagtcccgcccctctaaatag

SEQ ID NO: 206774 - DNA, 294 bp, synthetic construct
  misc_feature 1..294: note = Description of Artificial Sequence: Synthetic coding sequence
  source 1..294: mol_type = other DNA
atggacaagcagagcagcgccggcggcgtgaagcggagcgtgccctgcgatagcaatgaggcgaatgagatgatgcccgagacaccaacaggcgactccgacccgcagcctgccccaaagaaaatgaagaccagcgaatcctcgactatcttggtggtgcgataccggcgtaatttcaaaaggacatctccagaggaactgttgaatgaccacgctcgggaaaacagaatcaatccgttacagatggaagaagaggaattcatggagattatggtagagatccctgccaaatag

SEQ ID NO: 206775 - DNA, 2019 bp, synthetic construct
  misc_feature 1..2019: note = Description of Artificial Sequence: Synthetic coding sequence
  source 1..2019: mol_type = other DNA
atgcggagcatccggagcttcgccaacgacgaccggcacgtgatggttaagcattccactatctacccaagccctgaagagctagaagccgtacagaatatggtctctaccgttgaatgcgcattgaagcatgtgtccgattggcttgacgagacaaacaagggcaccaagacagagggcgagactgaggtgaagaaggacgaggccggagaaaactattcgaaggaccaaggcggaagaactctttgtggggtaatgaggatcggtctggtggcaaagggcctcctgatcaaagacgacatggatctggaactcgtcttgatgtgcaaagacaagccaaccgagacattgcttaacacagtgaaagacaatctgccaattcagatacaaaaactgaccgaggagaagtaccaggttgaacagtgtgttaacgaagcgagtatcataattaggaacacaaaggaaccaactctgacactcaaagtgatcttaaccagcccacttatacgggatgaactagaaaagaaagatggcgagaacgtttcaatgaaggatccgcccgacctcctggataggcagaagtgcctcaacgctctggcatccctccggcatgctaaatggttccaggcaagagcaaatggtctcaaaagctgtgtgatcgtgctgagaattctgcgcgacctctgcaatcgcgtgccgacatgggccccactcaaagggtggcccctagagctgatctgcgagaaatccatcgggacctgcaacaggcctctgggcgccggtgaagcgctgaggagggtcatggagtgcctagcttctggtattctgcttccaggtggacccgggctgcacgatccatgcgaaagggaccccaccgatgctctaagctatatgacaatccagcagaaggaggatataacccactcggcccagcacgcactgaggctgagcgcatttggtcagatctacaaagtgctcgaaatggatcctctgccaagttctaaaccgttccagaagtattcttggagcgtgaccgacaaggagggcgcgggcagcagtgctctgaagcgcccattcgaggatggtctgggtgacgacaaggatcccaacaagaagatgaagcggaacctccggaagattcttgactccaaggccattgacctcatgaatgctctaatgcgcttaaaccagatcaggccgggcctacagtacaaactcttgagccagagtggccctgtgcacgccccagtctttacaatgagcgtggatgtcgatggaacaacttatgaggccagtggcccgagcaaaaagactgctaaactccatgtggcggtgaaggttctgcaggctatgggttaccccacaggctttgacgctgatattgagtgtatgagttccgacgagaagtctgacaacgaatccaagaatgaaaccgttagctcgaacagctccaacaacaccggaaacagcaccaccgagactagtagtacgctcgaagtgaggactcaggggccaatcctgacagcgagcgggaagaacccggtgatggagttgaatgagaaacggcgaggcttaaagtacgagttaatctctgagactggcggtagccacgataagcggtttgtgatggaagtggaggtcgacggacagaaattcaggggtgcaggccctaacaagaaagtggccaaagctagtgcggcactggctgcgcttgagaaattattttctggccccaatgctgctaacaataaaaagaagaagatcatcccacaggccaagggagttgtgaacactgccgtcagcgctgctgtgcaggccgtgcgcggaagaggcaggggcaccctgacacggggggcctttgtgggcgcgaccgccgctcccggatatattgcccccggctatggaactccttacggatacagcactgccgcccccgcttatggcctgccgaaaaggatggtccttctgccggtaatgaagttcccaacttacccggtgccccactactcctttttttag

SEQ ID NO: 206776 - DNA, 1977 bp, synthetic construct
  misc_feature 1..1977: note = Description of Artificial Sequence: Synthetic coding sequence
  source 1..1977: mol_type = other DNA
atggtgaagcacagcaccatctaccccagccccgaggagctggaggcagttcagaatatggtgtccactgtagaatgtgctctgaagcacgtgagcgattggctggatgaaaccaataaaggcacgaagacggaaggagagaccgaagttaaaaaagacgaagctggggagaattactccaaggaccagggaggacgcacactttgcggcgttatgcgaatcgggctggtggctaaggggctgttaatcaaggatgatatggatcttgaacttgtccttatgtgcaaggataaaccgactgagactctcctgaacacagttaaggataatctccctatccagatccaaaagctcacggaagagaagtaccaggtcgagcaatgcgttaatgaggcttcaatcataattcgcaacaccaaagagcctaccctgacgctaaaggtcatattaacctcacccctgatccgggatgagcttgaaaagaaggacggtgagaacgtgtctatgaaagacccaccagatctgctcgataggcaaaagtgcctgaacgctttggccagcctgaggcacgcaaagtggttccaggccagagcaaacggactgaaaagttgcgtaatcgttttgcgcatattgcgcgacctctgtaacagggtgcctacatgggcccctctgaaaggctggcccttagagctgatttgtgaaaagagcattggaacgtgtaatcgacctctgggcgcgggggaagcgttgcgacgggttatggaatgtttagcatcgggcatcctcctcccgggaggacccggtctgcacgacccgtgcgaaagggatccgacagacgccttaagctatatgacaatccagcagaaagaagacatcacgcatagcgctcagcacgctctccgtctaagcgcgttcggccagatctataaagtcttggagatggatccattgccgagtagtaagccttttcagaagtatagctggtcggtcacagacaaggagggggccggctctagtgcgttgaaaagaccctttgaggatgggctgggggatgataaggacccaaacaagaaaatgaaacgaaacctgcgcaagattttggatagcaaagcaatcgacttgatgaacgctctgatgagacttaatcagattcgtcccggactacagtacaaactcttaagccagtctggcccagtgcatgcacctgtgtttactatgtcagtcgacgtggacgggacaacgtatgaagcatccggcccctcaaaaaaaacagccaagctgcatgttgccgtgaaagttctgcaggccatggggtaccccaccggctttgacgctgatattgaatgcatgagcagcgatgagaagtccgacaacgaatcaaagaatgagaccgtctcctctaacagctcaaataacactgggaattcaaccaccgaaacttctagtaccctcgaagtcagaacacaaggacccatcctgactgcctccggtaaaaatcccgtgatggagcttaatgaaaagagacgcgggctcaaatatgaactgatctcggagaccggcggatcccatgacaagagattcgtgatggaagtggaagtggacggacagaaattccgcggggctgggcctaacaaaaaggttgctaaggcgtccgccgctcttgccgctcttgaaaaactgttctctggtcccaatgcagcaaataataaaaagaaaaagattattcctcaagcaaagggtgtcgtcaacacagccgtcagcgccgccgttcaggctgtgagggggcgcggccgtggtaccttgaccaggggtgcttttgttggtgctaccgccgccccgggatacattgcccccggatatgggaccccctatgggtacagtaccgccgctcctgcctatggcctgcctaaaagaatggtattgcttcctgtcatgaaattccctacttacccggtgccacattactctttcttctag

SEQ ID NO: 206777 - DNA, 285 bp, synthetic construct
  misc_feature 1..285: note = Description of Artificial Sequence: Synthetic coding sequence
  source 1..285: mol_type = other DNA
atgcggagcatccggagcttcgccaacgacgaccggcacgtgatggtaaagcatagcactatctaccctagtcctgaggaactcgaggctgtacagaatatggtgagcacagtcgagtgtgccttaaagcacgtaagtgattggctcgacgaaacgaataagggtacaaaaactgaaggcgaaactgaggttaagaaagatgaggctggagagaactacagcaaatggagtgacatagtttggtgcaacgaggattggcctggttgcaaaagattggcggattag

SEQ ID NO: 206778 - DNA, 2019 bp, synthetic construct
  misc_feature 1..2019: note = Description of Artificial Sequence: Synthetic coding sequence
  source 1..2019: mol_type = other DNA
atgcggagcatccggagcttcgccaacgacgaccggcacgtgatggtcaaacattccacgatctatccttcccctgaagagctggaggccgtacagaatatggtaagtacagtggagtgtgctctgaaacacgtgagcgattggctggacgaaacgaacaagggaactaagactgagggtgaaaccgaggtgaagaaggatgaagccggcgagaactactcgaaggatcagggcgggagaaccttgtgcggggtaatgcgcatcggcttggtggctaagggacttctgattaaggatgacatggacctggaactggtattaatgtgtaaggataagcccactgaaacactgctgaacactgtgaaggataacttaccaatccagattcagaagctgaccgaggaaaagtaccaagtagagcagtgcgtgaacgaggcctcgatcatcattagaaacactaaggaacctactctcacgcttaaggtgatccttacaagcccactgatcagggatgaattggagaagaaggatggcgagaacgttagcatgaaagaccctccggacctcctggaccggcagaaatgccttaatgctctggcgtccctaagacacgcaaagtggtttcaggctcgtgcaaatggattgaagtcctgcgtgattgttctgcgtattcttagggacctgtgtaacagggtacctacatgggcccctcttaagggttggcccctggagctcatctgcgaaaagagcattggcacatgtaacaggcccctgggtgccggtgaagccctgcgaagggtcatggaatgcttagcctcaggcattcttctcccaggcggcccaggtctgcatgacccttgcgagcgagatccaacagacgctttaagttacatgactatccagcagaaggaggacatcacccacagcgcccagcatgctttacgcctgtctgctttcggacaaatttataaggtccttgaaatggatcccttaccaagctccaaacctttccaaaagtacagctggagtgtcactgataaagagggagcaggtagcagcgctctgaagaggcctttcgaggatggcctaggagatgataaagatcccaataagaaaatgaagcgcaacctgcggaaaattctggactcaaaggcgattgatcttatgaacgctctcatgcgtcttaatcaaatacgtcctggcctgcagtacaaacttctgtcccaatctgggcctgtgcacgcccctgtgtttacaatgagcgtggacgtcgacggcacaacttatgaagccagcggaccctcaaagaaaacagccaaactgcatgtggcggtcaaagtgctgcaggccatgggatacccgacgggattcgatgcagacattgagtgtatgtcaagcgatgagaagtctgataacgaatctaagaatgaaactgtttcgtctaatagctcgaacaacaccggcaactctacaactgaaacttctagcacacttgaggttagaacgcagggaccaatcctgacagcaagcggaaagaatcccgttatggagctcaacgagaaaaggcgaggattgaaatacgaactcattagtgagactgggggctctcacgacaaacgctttgtgatggaggttgaggttgatgggcagaaatttaggggagccgggccgaataaaaaagtggccaaagcttcagccgcgctggccgccctggagaagctgttctccggccccaacgccgcgaataataagaaaaagaaaataattcctcaggctaaaggcgtggtgaatacagccgtatcagccgccgtgcaggcagttcgggggcggggtcgcggcacactcaccagaggtgctttcgtgggcgccactgctgccccaggctacatcgcgcctgggtacggtaccccatacgggtacagtactgccgcccctgcatacggtctcccaaagcgtatggtgctcttgccggtgatgaagtttcccacataccctgtgccgcactatagcttcttctag

SEQ ID NO: 206779 - DNA, 225 bp, synthetic construct
  misc_feature 1..225: note = Description of Artificial Sequence: Synthetic coding sequence
  source 1..225: mol_type = other DNA
atgcggagcatccggagcttcgccaacgacgaccggcacgtgatggtaaaacacagtacaatctatcctagtcccgaagagctggaagcagtgcagaacatggtgtcgacggtggaatgtgccctgaagcacgtgtctgactggctggacgagaccaacaaggggacaaagacggagggcgagaccgaagtgaaaaaagacgaggccggcgagaattattcatag

SEQ ID NO: 206780 - DNA, 1776 bp, synthetic construct
  misc_feature 1..1776: note = Description of Artificial Sequence: Synthetic coding sequence
  source 1..1776: mol_type = other DNA
atgagcctgctgaccaactacgagggcctgcggcaccagatcgagagactagttagggagaacgaggagctgaagaaactggtccgcttgatccgggagaatcacgaactcaagtcagccataaaaacacaggctggcggacttggaatcagcggctttacctcaggactcggggaagcaactgctgggttgagctccaggcagaataacggtgtctttctcccaccgagcccagccgtggctaacgaaagagtccttgaagaggtcggaataatggcactcgctccgctggccgagatgttgacctccctgcagccgagcgccaccccagggagccttatgtccccactaactggtacactctctaccctcttgagcggcccagcccccacttcccagtcaagccctttaacctccttccttactagccccatcgccggccctctgacaggtaccttagcttcgtcactgggactgccctccacgggtaccctgacaccttcctccttggttgctggacctgtggccatgagccagtctagcccattgatcgcccccgttatgggaactgtcgcggtgtctttgtccagtccactgctgagctctacagccactccacctggtgtctcacagaacttactcgctaatcccatgagtaatttggtgcttccggaagcaccgcgtctgcgcctagcagagccgctccgaggtgggcccactggcccacagtctcctgcctgtgtcgttcctaccgcaacaacgaaagtcccgctttccaccgaacccccacagtccacccaggaccccgaacctctgagcatggccttcgccggggcgccgttgcagacctcaacgcccattggggctatgggcacaccagcacctaagaccgcattttcctttaatacatcagacacccaagcccaaccgagcgcagcccaagaacaagtcgtgcccgcctccgtgcccacatctcccactacatcccccaccgtcaccgtactggcaagtgctccagccctggccccacaagtcgctacatcctacactccttcaagcactactcatattgcacagggtgcacctcaccctcccagccgtatgcataactcccctacccaaaaccttccagttccgcactgtccacctcacaacgctcattcacccccaagaacatcatcgtcacccgccagcgtcaacgattcgcggggaccaaggaccaccgaacccagcactaagtcaatgatggaggtggaaaggaagttggcccaccgcaaaacctccaagttcccagaaaaccccagggagagtaagcagctcgcgtgggagaggctagtgggtgaaatagcttttcagttggataggcggattttgtccagtatcttcccagaaagggtgcggctgtacggatttactgtctctaatatcccagaaaagatcattcaggctagtctcaacccttcagaccacaaattagatgaaaagctgtgccagagactgacccaaagatatgtaagtgtcatgaaccgactccagtcactgggatataacggtcgggtgcatcccgccctaacggagcagctcgtgaacgcttacggcatattgcgagaaagacccgaactggcagcgtcagaaggcgggccctatactgtggacttccttcagcgggtggtggtggaaacagtgcacccaggcatgctcgccgatgccttactgttgcttagctgcctgagtcagttggcccacgatgatggtaaacccatgttcatctggtag

SEQ ID NO: 206781 - DNA, 1326 bp, synthetic construct
  misc_feature 1..1326: note = Description of Artificial Sequence: Synthetic coding sequence
  source 1..1326: mol_type = other DNA
atgagcctgctgaccaactacgagggcctgcggcaccagatcgagcggctggtcagggagaatgaagagctgaagaaactggtgagactgatccgagagaaccatgagttgaagtccgccatcaaaacccaagccgggggcctaggaatttcaggattcacaagcgggcttggggaggccacggccggtttgtctagccggcagaacaatggagttttcctgccacctagccccgccgttgcaaacgagcgagtgctggaggaagtcggcattatggcattagccccacttgcagagatgctgacatcactacagcccagtgccacccccggttcgctgatgagtccactgacgggcactctgtctaccttgctgtcagggcccgcccccaccagccagagctctccattgaccagtttcttgacctctcccatcgcaggacctctgacagggacattggctagtagcctgggcttgccttccactggtacccttacgccctcttcccttgttgccggtccggtggctatgtcacaatccagtccactgatcgcccctgtaatgggaacagtcgcagtgtcgctatctagccctctgctgagttcaaccgccacccctccaggggtgtcacagaatctgctcgctaatccgatgagtaaccttgtgctcccagaggcgcccaggttgcgtcttgcagaaccgctgaggggcggtccgactggaccccaatcccctgcttgcgtagttcctaccgcgaccacgaaagttcccctctcaactgaacctccccagtccactcaggaccccgaacctttgtccatggctttcgcaggtgcccctctccagacatccacaccgattggagccatgggaacccccgcccccaagactgccttttcctttaatacctccgacacacaagctcagcccagcgccgcacaagaacaggtcgtgccagcttccgtgcccacatcacccacaacaagccccaccgtgactgtgctggccagtgcccctgctcttgccccccaggtcgccacctcttatacgcccagtagcacaacccacatagcacagggcgcaccccaccctcctagcagaatgcataactctcccacccagaacctgccagtcccccactgccccccccacaacgcccacagtcccccaaggacctcatccagccccgcatccgtcaatgacagcagaggcccaagaacaactgaacccagtaccaagtctatgatggaggttgagcgaaagctggctcataggaagacgtccaaatttcccgagaatcccagaggctttcccgagccacagtag

SEQ ID NO: 206782 - DNA, 573 bp, synthetic construct
  misc_feature 1..573: note = Description of Artificial Sequence: Synthetic coding sequence
  source 1..573: mol_type = other DNA
atgagcagcagcgccctgacctgcggcagcaccctggagaagagcggagatacgtgggaaatgaaagccctcgacagtagtcggctagttccttggccccctcgtggcctcgggtccagcactcagcacccgaataagccacattgcgccttggccagttgtcaaggaccgggtgttttgcccggggcggccagcgccctgccagaactaacatttcagggtgatgtgtgccagagcgagacctgtcagcgttacttacaggcggccatctcactggacatagccgtgagccaaattaacctgctcggcagaccatcaagccctcctgctctgctgattcagcagggttcttgtgagcaggtaatccacaattctactccacagttcttggggatggaggacggggacaatgagcgaacaacaggttggctgtggcgactgtgcgaggacattgacgccgaaccttcctcgaccggatgcagccggagcaaccagctgacgtttactgaaggttgctttgtgagatcactgagcaccgtttactctaatactcacattcacacacatctgtag

SEQ ID NO: 206783 - DNA, 1791 bp, synthetic construct
  misc_feature 1..1791: note = Description of Artificial Sequence: Synthetic coding sequence
  source 1..1791: mol_type = other DNA
atgggcttcatcatccacatccagcaggtgaagaagcagcggaagaagctagaccaggggcttatcctgaagaaagaaaagtaccgcaaggaaaaaaaatgcgccagtctgagcttcgaagtgtccagtgatgggggcacggagccatcagccctggtcgacgacaacggatccgaggaagacttttcgtatgaggacctctgtcaggctagcccccgctacctgcagccaggtggtgaacaactcgccattaacgagctcatatcagatggaaacgtggtgtgtgcagaggccctttgggatcacgtgaccatggatgatcaggaactgggattcaaggccggcgatgtgatacaggtgcttgaggcctctaacaaggattggtggtgggggaggagcgaggataaggaggcttggtttcccgcaagcttcgtcaggctccgagtgaaccaggaggagctatccgagaacagctccagtacaccaagtgaagagcaggatgaggaggcttcacagagtagacatcggcactgcgagaataagcagcagatgcgaaccaacgtgattcgagaaatcatggacacagaaagggtgtacataaagcaccttagggacatttgcgaagggtacatccgtcagtgccgcaaacacaccggtatgttcacagtcgcccagctggccacaatatttggtaacatagaggacatctataaattccagcgcaagttcctgaaagatctcgaaaaacagtacaacaaggaagagccccacctcagtgaaatcggatcatgctttttgcaaaaccaggagggcttcgctatctattccgaatactgtaataaccatcctggagcatgcctcgagcttgctaatttgatgaagcagggaaaatatcgccattttttcgaagcctgtcgtctgctgcagcagatgattgatatcgccattgacggcttcttgctgacccccgtgcagaagatatgcaaataccctttgcaactggcggaactgctcaaatataccactcaagaacatggagattacagcaatattaaggccgcctatgaggccatgaagaacgtagcgtgtctgataaatgaaagaaaacggaaactagagtctatcgacaagatcgcgagatggcaggtgtcaatcgtgggatgggaaggattggacatcctcgatcggagctctgagcttatccacagcggggaactcaccaagatcaccaaacaaggaaagtcacagcaaaggactttttttctcttcgaccatcagcttgtgagttgtaagaaagatctcttgaggcgagacatgctctattataaaggtcgcctcgacatggacgaaatggaactggtggacctgggcgacgggcgtgataaggactgtaacctgtcggtgaagaacgcgttcaagctggtgagccgcacaacagacgaggtttatctcttctgtgcgaagaagcaagaagacaaggcacgctggcttcaagcctgtgccgatgagcgccggcgggtgcaggaagataaagagatgggcatggaaatttccgaaaaccaaaagaagctcgcaatgctcaatgcccagaaggctggccacgggaaatcaaaaggctataaccgatgccctgtggccccaccacaccagggcctgcacccaattcatcaacggcatattacaatgccaacttctgtgccccagcagcaggttttcggcttggccgaacccaagcgaaagtcttccctcttctggcatacctttaatcgactgacacctttccggaagtag

SEQ ID NO: 206784 - DNA, 1959 bp, synthetic construct
  misc_feature 1..1959: note = Description of Artificial Sequence: Synthetic coding sequence
  source 1..1959: mol_type = other DNA
atgaccagcgccagccccgaggaccagaacgcccccgtgggctgccctaaaggcgctaggcgtcggcgtccaatcagtgtaattgggggcgtatctctgtatggaacgaatcagaccgaagaactggataacctcctcacccagccggctagccggcctcctatgcccgcccaccaggtccccccctacaaagctgtgtcggcccggttcagaccgtttacattttcccagtccacacccatcggcctcgacagggtgggacgcagacgccagatgagagcaagtaacgtgagctccgacggtggaactgaaccctctgctttagtggatgacaatggttcggaggaggatttctcttacgaagatttgtgccaggccagcccgcggtacctccagcccgggggtgaacaattagcaatcaacgagctgatctcggacgggaatgtggtctgcgcagaggcactttgggaccacgtgacaatggacgatcaggagctggggttcaaggctggagatgtgatccaggtcttagaagccagcaataaagactggtggtggggacgcagcgaggacaaggaggcctggttccccgccagttttgttcggctgagggtaaaccaggaggagctgtctgaaaactcctcaagcacaccatccgaagagcaggacgaggaggccagccagtctcgtcatcggcattgtgaaaacaaacagcagatgcggaccaatgtgatccgggagataatggacactgagcgtgtttacattaagcacctgcgcgacatttgtgagggatacatcaggcagtgtaggaaacatacaggcatgtttactgtcgcccagctggctactattttcggaaacatcgaggatatatacaaattccagcggaagtttctaaaggacctcgaaaagcaatataacaaagaagaaccacatttgagcgaaatcgggtcatgctttttgcagaaccaggagggcttcgcaatttattctgagtactgcaataatcacccgggggcctgcctggagctggctaatctgatgaagcagggcaaatataggcacttcttcgaggcctgccgccttctccagcagatgattgacatcgctattgatggttttttactcacaccagtacaaaaaatttgcaaatacccactgcaacttgccgagcttctgaagtacaccacacaggagcacggagactattccaacattaaggccgcctacgaggctatgaaaaatgtcgcttgtctgatcaacgagcgcaaacgcaagctggagagtattgacaaaattgccaggtggcaggtgtctatcgttgggtgggagggactcgacattctggatagatccagcgaacttatacacagcggcgaattgactaagataaccaagcaaggcaaatcgcaacagcgcactttttttctatttgaccaccaactggtctcttgcaagaaagacctccttcggcgcgacatgctttattacaaaggtcgattggacatggacgagatggagctggtcgaccttggcgacggccgggataaggattgcaacctgtcggttaaaaacgcgttcaaactggtgtctcggaccaccgatgaggtgtacttgttttgcgcgaaaaaacaggaggacaaagctcgatggctgcaagcttgtgcagacgagagaagacgtgtgcaggaagacaaagaaatgggaatggaaatttcggaaaatcaaaaaaaactggctatgctgaatgcccagaaggctggccatggcaaatcaaaaggttacaatcgatgccccgttgccccaccccaccaggggttgcatcccatccatcagagacatatcactatgccaaccagtgtaccgcagcaacaggtgtttggtctggcagagccgaaacgcaagtcttctttgttctggcatacgtttaaccggctaaccccgtttcggaagtag

SEQ ID NO: 206785 - DNA, 3834 bp, synthetic construct
  misc_feature 1..3834: note = Description of Artificial Sequence: Synthetic coding sequence
  source 1..3834: mol_type = other DNA
atgacccaggccgccgtgcggccctgggccccctgcctggagaacatgaccactgccccgaatggtttgggtccggggcctgccgccccatgcgctgggtccgacctgaaggacgcaaagatggttacatcgctggcatgtggcaacggagtctgtggatgctcccctggcggcgacaccgatacccaggaggcaaaactctcacccgccaaactcgtgaggttgttttccaccagcagaaaacggactggggcccaccccgagagacctcattccatggttctcgtgggcaattcaagcacatggaacaccttagcatctttccgcaagatgggctcgttcaagaagcttaagagctctgtactaaaggggatccaatcccgggagggttcaaacgcatgttcaaaaggagaagcatccgagcatggcctggggaaatcaattcctaatggcgcagtgcctggggcccaggccagtcgcggctcccccctcgctcctgggcccgcttgcggggcactgcggcctgccgagtggggcaccctagatggatcagacttggaggataccgatgacgcgtttcagaggtctacccatcgttcccggagcctcaggcgcgcctacggcctgggaagaatctgcctactcgacgcaccacagaaccatgccactccaactatagccactgggcaggtgccagccgtctgcgagattttggtgcgagatcccgaaaacaactctatgggttatcggcgaagcaagtccaccgataacctcgcattcctgaagaagagttcctttaaaagaaagtccaccagtaacctcgcggatctgcgcaccgcccatgacgccagagtccctcaaaggaccctgagttccagttccaccgacagtcagaagctgggctccggcagaacaaagcgctggcgatcacctatcagggccaaagactttgaccgggtcttcaagttagttagcaacgtcaccgaggccgcttggagaagagaatctccaagaagcggcgcaccctctccgggagaagcctctctcaggctgcaggctcactctaggttacatgacgactactcaagaagggtctcaagaagcactgagcaagactcaagacgcgggggcgccgtcatgcatggaacaaccgccacatgtacagtggccccggggttcggatctgctaccagtaagggtccacatctagacgccgacacggcggtgttcccgctggagactaaatccagttgggcggtcgaaagcgacagttcgtgtacctgcagctcacttccctctcccattgtgcaagatgtcctgtctaaagactcttgcgatccaaatgctggctctcagctgacatttgatccggagcaacccccaacgccactgaggcccacaacacctaagcctcaatcaccacagagtccccagagccccggtgccgggagcgcctcatgccatagcaatcacagcgcactgtctgcaaactcagaagagagcgaggggcgggccgaagagcccgcccagagggagcccggaccagtgagcctacaggatccactggaggccacacatggcgacgaaggatcaaaggacctcctggttaatattggggttgcggcaggtcccgaagaaaaggagaaggaagaggtcgtccccgacggaccctggcgcagaagctcctcccaggatgaggaacgtacggaagcacagcgaacacccaagcgccggtggggctcagggcgccgacctagaccaagaccgtttagtgactacggtcagctggcaagccggagtctgagtatccccgaggacagcgtggctgctgatccacagaaagaagacagggtggatgaggatcctcaagcttcaatgacctctgcatcccctgaagatcaaaacgctcctgtcggctgccctaaaggtgccaggaggaggcggcctatctctgtaattggtggggtaagtctgtacggaacaaatcaaacagaggagcttgataacctgctgactcaaccagcctcccgaccccccatgcccgcccaccaggtcccaccatacaaggcggtgagcgcccgattccgccctttcacattctcgcagtcaactccaatagggctcgatcgagtgggacgtagaaggcagatgcgcgcctcaaatgtgtctagcgacggaggcacggaaccaagtgcgctggtcgatgacaatgggtctgaagaggattttagttatgaggatctctgtcaggctagccctcgctacttgcagcccggaggggagcaacttgcaatcaacgaactgatatccgatgggaatgttgtctgtgcagaagctttgtgggaccatgtaactatggatgaccaggagttaggattcaaggctggcgatgtcatacaggtgctggaggcgtctaacaaagattggtggtggggtaggtctgaagataaagaggcctggtttccggcctcctttgtaaggctccgagtgaaccaggaagagctgtcggagaatagctcaagcactccctcagaagaacaggatgaagaggccagccagtctcggcacagacactgtgagaacaagcaacagatgaggacaaatgttatcagggagattatggacaccgagcgggtttatattaaacacttgagggacatttgcgagggatatatccgccaatgccgcaagcacactgggatgtttactgtggcccagcttgctaccatctttggaaatatcgaagacatctataagtttcagaggaagttccttaaagatctggaaaaacagtataacaaagaggaaccccacctctctgagattggatcctgctttctacagaatcaagagggatttgccatctattccgagtattgcaataaccatcccggcgcctgtttggagctagctaatttaatgaagcaggggaaataccggcacttttttgaagcatgtagacttcttcaacagatgattgacatcgcgatcgatggctttctgctgaccccggttcagaaaatctgcaaatatcccctacagttggcagagctgctgaagtatacaactcaggagcatggtgattatagcaacattaaagccgcttatgaggccatgaaaaacgttgcatgcctgatcaatgagaggaaacgcaagctcgagtctatcgacaagattgcccgttggcaagttagtatcgtaggctgggagggactcgacattctagaccgctcctctgaactgatccatagcggggaactcacgaaaatcacaaagcaagggaagagtcaacaaaggacatttttcctttttgatcatcaattggtgagctgcaagaaagacctcctgagacgtgacatgctgtactataagggacggctggatatggacgagatggagctagtcgatctcggcgatggtcgtgacaaagactgcaatcttagcgtgaaaaacgctttcaagctggtaagccgcactaccgatgaggtttatttattttgtgctaaaaagcaggaggacaaggctcggtggttacaagcttgcgccgatgagagaagaagggtccaagaagataaagaaatgggaatggagatcagcgagaaccaaaagaaactggccatgttaaacgcacagaaggctggacacgggaagagtaaaggctacaatcgctgtcctgtcgccccacctcaccaaggtttgcacccaattcatcagagacatattacgatgcccacttctgtcccacagcaacaggtgtttgggctagccgaacctaaacgtaaaagttccttgttttggcacacctttaaccggctgacgcctttccggaaatag

SEQ ID NO: 206786 - DNA, 3948 bp, synthetic construct
  misc_feature 1..3948: note = Description of Artificial Sequence: Synthetic coding sequence
  source 1..3948: mol_type = other DNA
tgacccgtggccacccaggagcccgacgtgcagggccggtgcgagtgccaggacggcatccctggagatgagggccttgagctcaggtccgctgacagtgccgtgcctgttgccatgacccaagccgccgtgcgtccatgggctccctgcctggagaacatgactacagcccccaatggtctgggccccgggccggccgcaccatgcgctggttccgacctgaaggatgccaaaatggttacgtccctcgcatgcggcaatggggtatgcggctgcagtcctggcggcgataccgacacccaggaagcaaaactctctcccgccaaattggtgcgccttttctccaccagccgcaaacgcacaggcgcccacccagagagaccacacagtatggtcttggtgggtaattctagcacttggaacacattagctagtttccggaaaatggggtctttcaaaaaactgaaatccagtgtactgaagggcattcagtctcgagagggctccaacgcatgtagtaaaggcgaggccagtgaacacgggctggggaagtccataccgaacggcgcagtacccggagcccaggcatccagaggctctcccctggccccgggtcctgcatgtggggcactgaggcccgccgaatggggaaccctcgacgggtccgacctagaggacactgacgacgcttttcagagaagcacccatagatcgcgtagcctccgcagagcatacggcctaggtaggatctgtctcttggatgccccacagaatcacgccacacctaccatcgcaaccggacaggtgcccgccgtctgtgaaatcctggtgagagacccagagaataactccatggggtataggcgcagcaagtctactgacaacctggctttcctgaagaagtctagctttaaacgtaagtccactagcaatcttgccgatttacgcacagcgcacgacgcccgggtacctcagcgcaccctgtccagctcaagtacggactcccaaaaactgggcagtgggagaactaagcgttggaggtcaccgatacgagcaaaagactttgaccgggtattcaaactggtgtccaacgtcactgaggcagcatggcggcgagagagccctagatccggagcaccgtcaccaggtgaggccagcttgcggctgcaggcacattcaagattacatgacgattactcaagaagagtttcaaggtcgaccgagcaggactccagacggggtggcgcagtgatgcatggtaccaccgctacctgtaccgtggcaccgggcttcggctccgcgacgtcgaaagggccgcacctcgatgccgacactgcagtctttccactggagaccaagtcttcctgggcagtggagtcagattcttcgtgtacctgtagttccttgcccagcccgatcgttcaggacgtgttaagtaaggacagctgtgacccaaatgctggctcacagctgacattcgaccctgagcagccaccgacacccctccgacccaccactcctaagccccagagcccacagtccccacagtctcccggtgccggatcagcctcttgtcattctaatcattctgctctctccgctaacagtgaggagtcagaagggagggctgaggagccggcgcagcgggagccagggccagtgtccttacaagatcctttggaagccacccacggggacgagggtagtaaagacctgctggtgaatattggtgtcgctgcaggacctgaggagaaggaaaaagaagaggtagtgcctgatgggccctggcgacgatcctcgtctcaggacgaggaacgcactgaggcacagagaacacctaagcgccgatggggctccggaaggagacccaggcctcggcctttcagcgactatggtcagctcgcctcccgatccttgtcaatccccgaggattctgtcgccgctgacccccagaaagaagatagagtggatgaggatccacaggcctcaatgactagcgcgtctccagaggatcagaatgcccctgtggggtgcccaaaaggcgcccggcgcagacggcctatttcagtcataggaggggtgtcgttgtacgggaccaatcagacagaggagctcgacaatctgctgacccagccggcctctcgtccacctatgccagcacatcaagtgccaccatacaaggctgtgtccgccaggttcaggccttttacgttttctcagagcactcccatcggtctggatcgggtggggcgacggcgccagatgagagcttccaatgtctcttccgatggcggcacagagccctctgctctagtggatgataacggttcggaggaagacttcagctacgaggatctctgccaagcctcccctcggtatctgcaacccggtggcgaacagctggccataaacgaactgatctccgacgggaatgtggtgtgtgccgaggcactgtgggaccacgtgacgatggacgaccaagaacttggcttcaaggctggagatgttattcaggtgttagaagcatctaacaaggactggtggtgggggcgcagcgaggacaaggaggcctggttccccgctagcttcgtgcgtttacgggtgaaccaagaagagcttagtgaaaatagcagttccacaccttcagaggagcaggacgaggaagccagccagtccagacatcgacactgtgagaataagcagcagatgcggacaaacgtgatccgcgagatcatggataccgagagagtgtacatcaaacatctgcgggatatctgtgaggggtacataaggcagtgcaggaagcacactggaatgttcaccgtcgctcagttagctacgatcttcggaaacattgaggacatctataaatttcagaggaaattcttgaaggacctggagaaacagtataataaggaagaaccgcatctgtcggagatcggatcatgctttcttcaaaaccaggagggcttcgccatatatagtgaatactgtaataatcatccaggggcgtgtcttgagctcgcaaatcttatgaaacagggaaaataccggcatttctttgaggcatgccgcctgctgcaacagatgattgacatcgccattgacggattcctgctgacaccggtccaaaaaatctgcaaatatccattacagctcgcggagttgctgaagtataccacccaagagcacggcgactactcaaacattaaggcagcatacgaagcaatgaagaacgtggcctgccttatcaacgaaagaaagcgcaaactggaatcgattgataaaatcgcccggtggcaggtgtctatcgtaggctgggagggcctggacattttggatagatcatctgagctgatccatagtggggagctaacaaagataactaagcaaggcaagtctcagcagaggaccttctttttatttgatcaccagcttgtgtcctgtaagaaagatctactgagacgagacatgttatactacaaaggcaggctcgatatggatgaaatggaacttgtggacctcggagacggccgggacaaggactgtaatctctcagtaaaaaacgcatttaaattggtttcccggactacagacgaggtttacctgttttgtgcaaaaaagcaggaggacaaggccaggtggttgcaggcttgtgccgatgagagaagaagggtacaagaagacaaggagatgggcatggaaattagcgagaatcagaaaaaattggcaatgctgaacgcccaaaaagctggacatggcaagagcaagggctacaatcggtgtccagtggccccaccccaccaagggttgcatcctattcaccagcgccacattacaatgccaacttcagttccacagcagcaggtctttggcctagccgagccgaagcgaaagtcatccctgttttggcatacatttaacagattgacacccttccgcaagtag

SEQ ID NO: 206787 - DNA, 1851 bp, synthetic construct
  misc_feature 1..1851: note = Description of Artificial Sequence: Synthetic coding sequence
  source 1..1851: mol_type = other DNA
atgcccgcccaccaggtgcccccctacaaggccgtgagcgcccggttcaggccattcacctttagccagagcacaccgatcggcctggatcgcgtcggaaggcggaggcaaatgagggcaagcaacgtgtcatcagatggaggcaccgagcccagtgccttagttgacgacaatggctcggaggaggatttcagctatgaagacctatgtcaggccagtcctaggtacttgcaacctggcggggaacagctcgcaataaacgagttaatctccgacggcaacgtggtgtgcgcagaggcgctctgggatcacgtgaccatggatgatcaggaactgggtttcaaggctggagatgttatccaggtgcttgaagctagcaacaaggactggtggtgggggaggtctgaggacaaggaagcctggttccctgctagtttcgtgaggcttcgggttaatcaggaagaacttagcgaaaactcttcctccactccgtccgaggaacaggacgaggaagctagccagtcccgtcaccgccactgcgagaataagcagcagatgcgcaccaacgtgatcagggaaatcatggataccgagcgtgtctacataaaacacctgcgagatatttgtgaaggatatataaggcagtgtcgaaagcatactggaatgttcacagttgcccagctggccactattttcggcaacatcgaagatatttataaattccaacggaaatttctgaaagacctggagaaacagtacaacaaggaagagccacacctgagcgagataggatcttgctttctacagaatcaggaagggtttgcgatttacagcgaatattgcaataaccacccgggggcctgtctcgagttagccaacttaatgaaacaggggaaataccgccacttctttgaagcatgcaggctccttcagcaaatgatagatatagccatcgatgggtttctgctcaccccagtgcagaaaatctgcaagtatcccctgcagcttgccgaactgttgaagtacacgacacaagaacacggcgattactctaacattaaagccgcctacgaagcaatgaaaaacgtggcgtgcttgatcaatgaaagaaaaagaaaactggaaagcattgacaagatcgcccggtggcaggtgtcgattgtggggtgggaaggactagacatccttgacaggagctctgagctaatccactctggagaactgacgaaaatcacgaagcaggggaagtcacagcagcggaccttttttctgtttgatcatcagctcgtctcctgcaagaaggatctcctccgtcgcgacatgctctattacaaaggtaggttagatatggacgaaatggagctggtggatcttggggatgggcgagataaagattgcaatcttagtgtgaaaaacgcctttaagctggtttctagaacgacagacgaggtctacctattctgcgctaaaaaacaggaggataaggcccgctggcttcaggcatgcgcagatgagcgccgacgagtgcaggaagataaggagatgggtatggagattagcgagaatcagaaaaagctggcaatgctgaatgcgcagaaggctggacacggcaaaagtaaagtacgactgcagcaggttccctgcggcccaacagctcccgggcctgccccccaccccccagcccctcatcattacgcgcacaaacggccccctgccgctggtctgtggcctggaggaacccaggaagaggtcttggcactgctggcccacctgcaacaggcccatccactgccagaaatgaaaactggaggttgcgccagtatggaactgggcgtcaaaaggaggaactag

SEQ ID NO: 206788 - DNA, 1710 bp, synthetic construct
  misc_feature 1..1710: note = Description of Artificial Sequence: Synthetic coding sequence
  source 1..1710: mol_type = other DNA
atggacgccggcagcagccggagcctggagaacgccgtgaaccggatctaccacgatcaattggtgcccaagatcaatacttcaaagaagatgagcacgcttgcccaccctcccaatatccttgaaatgtcccaggagatcaagaagaattgcggaggaaagcaggtggaaataaccctggagcggacaaaaatgaccaagggtatcaaagaaaagcagtctaacgaccttgaaaaggccgccttcaaaagaaaggcagagggcgaagagaagcctacccgcaagaaacaggctaaaatcaccgaactggacaaccaactcatcactatgccacttcctcatatcccactgaaaaatatcatggatgtggaaatgaaactggtatatattgatgagatgggcgtgcgttacgagtttgtcgaaagtttcatgtccactggcagtcagcccacatgtcaggctgccgaaattgttgatcccttgtctgtccataatttctcattcctgccccagatagacaagtggttacaggttgccttgaaggacgcatccagctgctaccggcagaagaagtacgctctcgctgcagggcaattcagaactgctcttgaactgtgcagcaaaggggccgtgttgggcgagcctttcgatgcccctgccgaggacattgcgtctgtcgcatcctttatagaaactaagcttgtgacttgttatctccggatgcggaagcctgacttggccttgaaccacgcccacaggagcatagtgctgaatcctgcatactttaggaaccacctacggcaggcgacggtgttccggtgtctggagcggtactccgaggccgctcggtctgcaatgatcgccgactatatgttttggctgggtgggggccgcgaagaatctatttctaaattaattaaattgtattggcaggcaatgatcgaggaggccattactagagctgaatcgttttctgtcatgtatacgcccttcgcaactaagatcagagctgataaaatcgagaaggtgaaagatgctttcactaagacccacccagcctacgctgaatacatgtataccgatcttcaggccctccacatgctcccacagactgtcgactggtcgtcctttccacctcaacagtatctgctcaccctgggattcaaaaataaagacgacggcaaattcctagagaaaataagttcgcggaagctgccaatctttactgagcataaaaccccctttggcttgacaagagaggatactgttcgacaaatggagaccatgggtaaacgaatcctgccaatcctggatttcattaggtctacacagctcaacgggtcttttcctgcttcgtcaggagtgatggagaaacttcagtacgcctctcttctttcacagctacaacgagtgaaagagcaatctcaagtgattaaccaggctatggccgagctagcgacaatcccatatttgcaggatatttctcaacaagaggccgagctgctccagagtttgatggcagacgcgatggatacgctagaggggcggaggaataacaatgagcgtgtgtggaacatgatccaaaaggtaggacagatcgaagactttctgtaccagctcgaagatagttttcttaaaacaaaaaagctccggacggccaggcgtcagaaaactaagatgaagcggctgcagaccgtccagcaaaggtag

SEQ ID NO: 206789 - DNA, 1086 bp, synthetic construct
  misc_feature 1..1086: note = Description of Artificial Sequence: Synthetic coding sequence
  source 1..1086: mol_type = other DNA
atggccaccctggcccggctgcaggcccggagcagcaccgtgggcaaccaatactactttagaaattcagtggtcgatccttttcggaaaaaagaaaacgacgccgccgtaaaaattcaatcttggttccgcggctgtcaagtacgggcgtacattagacatctgaacagaatcgtcaccatcatacagaagtggtggcgcagttttcttggccgaaagcaataccagctgacagtacaggtggcatattacaccatgatgatgaacctttacaacgcaatggcggtgcgaatacagagacggtggcgcggttaccgcgtcaggaaatatctgttcaactattactatttgaaggaatatctgaaggtggtgagcgaaaccaatgacgctatccggaaggcccttgaggaattcgcagagatgaaagaaagagaggaaaaaaaggcgaacctcgaacgggaggaaaagaagcgagactaccaggcccggaagatgcactatctcctgagcaccaaacagatacctggcatctacaacagccccttcagaaaggaacccgacccctgggaactgcaactgcaaaaagctaagccacttacacatcgcaggcccaaggtgaaacagaaggactccacttccctgaccgactggctggcttgcacctcagcccgaagctttcctagatcagaaattttgccgcctataaatcgtaagcaatgccagggtccgttccgcgatattacagaagtgctagagcagcggtacagacctctggagccgacactgcgtgtggcagagccaatcgatgagttgaagctggccagggaagagctacgaagggaagaatggttgcagaatgtgaatgacaatatgttcctgccgttttcaagctatcataaaaatgaaaaatacattccctctatgcatctgagttctaaatacggaccaatttcttataaggagcagttccgtagcgaaaacccaaaaaagtggatctgcgataaggacttccagacagtcctcccaagttttgagctgttttccaagtatggcaaattgtatagtaaagctggccaaattgtgtag

SEQ ID NO: 206790 - DNA, 1617 bp, synthetic construct
  misc_feature 1..1617: note = Description of Artificial Sequence: Synthetic coding sequence
  source 1..1617: mol_type = other DNA
atggccgagaacctgaagcggctggtgagcaacgagaccctgcggactctgcaggaaaagcttgatttttggctgaaggaatataataccaatacatgcgatcagaacctcaatcactgtttggagctcattgaacaggtcgcgaaggttcaaggccagctgtttggtattctgacggctgctgcccaggagggggggcggaacgacggagttgaaacgatcaaaagcagattactaccctggcttgaagccagtttcactgccgcttcgttgggcaagtctgtcgactccaaggtcccttccctgcaggacactttcgaccgcgagaggcataaagaccccagcccccgcgatagagacatgcagcaactcgatagcaacttgaactcaactagaagtcagtgcaatcaggtccaggatgacctggtggaaacagagaaaaacctcgaggagtctaaaaaccgaagcgctatcagtctgctggcagccgaggaagagattaaccagctcaaaaaacagttgaaaagcctgcaagcccaagaagatgccagacatcgcaataccgaccagcgaagctctgagaataggaggtccgaaccatggtcactggaggaaagaaaaagggaacagtggaatagcctgaagcagaatgccgaccagcaggatacagaggccatgagtgactataagaagcaactgaggaacctgaaggaggagattgctgtattaagcgccgagaaatcagccttgcaaggaaggtcatctaggtctcgcagtccgtcccctgcgccacgctcccggagttgttccaggtcccggagtgcaagccccagcactgccgtcaaggtacgccggccctccccgaaccgctcgaagctgagcaatgttgccaggaaagctgccctgctctctagattttctgacagctactctcaagccagactggacgcccagtgtcttctgcgtcggtgtattgacaaggctgagaccgtacagaggattatatacatcgccacagtggaggcatttcacgtggccaagatggccttccggcatttcaagatccatgtgcggaagagtcttactccgtcatacgtaggcagcaacgactttgaaaacgcggtcctggactatgtgatctgccatttggacctctacgattctcagtctagcgtcaatgacgtgattagggccatgaatgttaatccaaagatttccttcccaccagtcgtggacttctgcttactcagcgacttcatacaggagatttgttgcatcgcgtttgccatgcaagccctggagccacccctggacatcgcctatggcgctgacggagaggtgttcaatgattgcaaatataggaggagctatgatagcgactttaccgcgccgctagtcctgtatcacgtctggcccgctctgatggagaatgattgtgtcatcatgaagggtgaagccgtcactcgtcggggagccttttggaactcagtgagaagcgtctctcggtgtagaagtcgctctctgtcacccatttgtccaaggtcgcagattggcttgaacacaatgagccgaagcaggagcccttcccctatccgctgtggactgcctagattctag

SEQ ID NO: 206791 - DNA, 504 bp, synthetic construct
  misc_feature 1..504: note = Description of Artificial Sequence: Synthetic coding sequence
  source 1..504: mol_type = other DNA
atgatcatcaccacctggatcgtgtacatcctggcccggaagggcgttggcctaccattcctccccataaccagtagtgacattgacgtggtagagtcagaggccgtctcagtgctgcaccactggctcaaaaagactgaagaggaagcttctagaggcattaaggaaaagctgtcgataaatcacccatcacaaggcgtccgcgagaaaatgagtacagacagtccacccacacatggccaggacattcacgttacgcgcgacgtagtgaagcatcatctcagcaagagcgatttgctggccaaccagagtcaagaggttctggaagagcgcactcggattcaatttattcgatggagtcacacacgaatctttcaagtgcccagtgagatgaccgaggatattatgagggacagaatcgagcaggtgaggcggtccatctcgcggctcactgacgtgtctgcccaggacttctcgatgcgaccctcatcttccgattgctag

SEQ ID NO: 206792 - DNA, 504 bp, synthetic construct
  misc_feature 1..504: note = Description of Artificial Sequence: Synthetic coding sequence
  source 1..504: mol_type = other DNA
atgatcatcaccacctggatcgtgtacatcctggcccggaagggcgtgggcttgcccttcttacccatcacttctagcgacatcgacgtcgtggaatcagaagcagtttctgtcctgcatcattggcttaagaagacagaagaggaggcatcccggggcatcaaggaaaaactgtcaataaaccacccatcccagggcgtgagggagaagatgagcaccgacagccctccaactcatggccaggatatccatgtcacacgcgatgtcgtgaagcatcacttatccaagtctgacttgttggcaaaccagagccaggaagtgctagaagagcggactaggattcagttcatcagatggagccataccagaatattccaggtcccctctgagatgaccgaagacatcatgcgggacagaatagagcaggtgcggcgctcaatttcccggctgaccgacgtctccgcccaggacttttccatgcgtcctagctcttccgattgctag

SEQ ID NO: 206793 - DNA, 1563 bp, synthetic construct
  misc_feature 1..1563: note = Description of Artificial Sequence: Synthetic coding sequence
  source 1..1563: mol_type = other DNA
atgggcaagcccagcagcatggacaccaagttcaaggacgacctgttcaggaagtatgtccagtttcacgagagcaaggtggacaccaccacctctcgtcagcggcccggttcagacgagtgtctgagggtggctgctagtacgctgctgtccctccataaagtggatcctttctaccgatttcgtctcattcagttctatgaggttgttgaaagttctctccgaagcctgagcagctctagtctgcgggcactgcacggcgcgttcagcatgctcgagaccgttggcattaatctctttctgtatccgtggaagaaagagttccggagtatcaaaacctacaccggacctttcgtatattatgtcaagtctacactgctggaggaggacattagagccattctgagttgtatgggctacaccccagagctgggcacagcgtataaactgagggaactggtcgagactttgcaggtgaagatggtgagctttgagctgtttctggcaaaggtcgaatgtgagcagatgctggaaatccattcacaggtgaaagacaagggctattcggaactcgatatcgtgagtgagcgtaagtcctctgccgaggatgtgagaggatgttctgatgctctgcgacgccgagcggaaggcagggaacacctcaccgcgtcgatgagcagagttgctctgcagaaatctgcttcagagagggcagctaaagactattacaagcccagggtcacaaagcctagtcgcagcgtggacgcctacgacagttattgggaatccaggaaacctccgctcaaagcctcgctgagccttcggaaagagccggtcgccacagacgtgggagacgatctgaaggatgagattatccgcccgtctccctccctgctgacaatggcttctagccctcacgggtcccctgatgtgctgcctcccgcatccccgtcaaatggtcccgccctcctgcgtgggacatacttttccacccaggatgacgtggacctgtatacagattccgaaccccgggccacatataggagacaggatgctttgcgacccgacgtttggctgctgcgcaacgatgcccattctctctaccacaagagatctcccccagctaaagagagtgctttgagcaagtgtcagagttgtggcctctcctgtagctccagcctgtgtcaaagatgcgactctctgttgacgtgccccccagcctcaaagccgtccgccttccccagcaaggcttccactcatgacagcctagctcacggcgcttctctcagagaaaaatatcccgggcagacacaggggttagatcgacttcctcatctccactctaagtctaagccatctactaccccaacttcccgctgcggtttttgcaataggccgggcgctacaaacacctgcacccagtgtagtaaagtgtcctgtgatgcctgcctcagcgcataccactatgatccatgttacaaaaagtctgaactgcataaattcatgccaaacaaccagcttaactacaagtcaacacaactgtcacacctggtgtaccgctag

SEQ ID NO: 206794 - DNA, 1563 bp, synthetic construct
  misc_feature 1..1563: note = Description of Artificial Sequence: Synthetic coding sequence
  source 1..1563: mol_type = other DNA
atgggcaagcccagcagcatggacaccaagttcaaggacgacctgttccggaaatatgttcagtttcatgaaagtaaagttgatacaacaacgtccagacagaggccggggtccgacgaatgcctccgagttgctgccagcacactgttgagcctgcataaagtcgaccctttctatcggttccggctgatccagttctatgaagtagtcgagtctagcctgcgttctctttcctccagttctctacgggctttgcacggcgctttcagcatgctcgaaaccgtcgggatcaacctcttcttatacccctggaagaaggaattcagatccatcaaaacttatactgggccgtttgtgtattatgtcaaatcaacactgctcgaggaggacatccgggccatcctgagctgcatggggtacaccccggagttgggtacagcttacaaactccgcgagctcgtggaaaccttgcaggtgaagatggtgtccttcgaactgttcctggctaaagtcgagtgtgagcaaatgctggaaattcacagtcaggttaaggacaagggatatagcgagctcgatatcgtcagcgaacgcaagtcttccgcggaggatgttagaggatgcagcgacgccctgaggcggcgggcagaaggtagggagcatctcacggcttccatgtcgcgcgtggctctccagaaaagtgcaagcgagagagccgccaaagattactacaagcctagagtcaccaagccctcgcgctcagtggatgcttacgattcatattgggaatccaggaaaccacctctaaaagcttcactgagcctgcggaaagagcctgtggcgaccgacgttggagacgatctgaaagatgaaataattagaccttcaccttctctcctgaccatggcttcatcgccgcacggcagtcccgacgtcctgcctcctgccagcccaagcaacgggcctgctctcctgcgcgggacctacttctccacacaggacgatgtggacctttatactgattccgagcccagggctacgtacagacgccaagacgccctaagacctgatgtctggttgctgcgcaatgatgcacatagcctgtatcacaagcgcagtccacctgccaaggagtcagcactttcaaaatgtcagtcatgcggactatcttgcagctcctcactgtgccaacgctgcgattctctgctcacctgcccccctgcttctaagcccagcgccttcccgagcaaggcgagcacccacgactcgctcgcgcacggcgccagtctgagggaaaaataccctggccaaacccaaggactagatcgactcccccatctgcacagcaagagcaagcctagcacgacccctacatccagatgtgggttttgtaacagaccaggcgcaaccaacacctgcacgcagtgtagcaaagtctcttgcgatgcttgtctaagtgcctatcactacgatccatgctataagaagtctgagctacacaagtttatgccgaacaatcagctcaactataagtccacacagctgtcacacctagtgtaccggtag

SEQ ID NO: 206795 - DNA, 1152 bp, synthetic construct
  misc_feature 1..1152: note = Description of Artificial Sequence: Synthetic coding sequence
  source 1..1152: mol_type = other DNA
atgggctacacccccgagctgggcaccgcctacaagctgcgggagctggtcgaaactctgcaagtgaaaatggtctcattcgagttattcctggccaaggtggaatgcgaacagatgctcgagattcactcccaggtcaaggacaaaggctactcagagcttgacattgtctcagaacgcaagtcttcagccgaagacgtgcgcggatgtagcgacgcattaagacgaagagcagaaggccgggagcacttaaccgcgtccatgagccgggtcgccctgcaaaagtccgctagtgagcgagccgccaaagattattataaacctcgcgtgactaagcctagtcgctctgtggacgcctacgactcttactgggagagcaggaaacctcctctgaaagccagcctgagtctgcgcaaggagccggtcgctaccgatgtgggagatgacttgaaggatgagatcatcaggccatctccctctctgctcaccatggcctcctcaccccacgggtctccggacgtcctgcctccagctagccctagtaatggacctgctctgcttaggggcacttacttctccacacaggacgacgtcgacctgtataccgactctgaaccgagagccacatataggcgacaggatgctctgcgcccggatgtatggttgctaagaaacgatgcccattccctgtaccacaaacgatccccacccgccaaggagagtgccctatctaagtgccagagctgtggcctcagctgctctagcagcctatgccagcggtgcgactctctcctgacttgtcctcccgcaagcaagccatctgccttcccttccaaggcctctacccatgattccctcgcccatggagcatctctgagggagaaataccccggacagacacaaggccttgatcgactgcctcatctccattcgaagtcgaaaccctcaacaacaccaacaagtcgctgcggcttttgtaatcgtcccggagctacaaatacctgtacgcagtgcagcaaggtgtcttgtgacgcctgtctgtcagcgtatcattacgatccatgttacaaaaaatctgagctgcataaattcatgcctaacaaccagctcaactacaagtccacccaactttcccatctggtgtacagatag

SEQ ID NO: 206796 - DNA, 2409 bp, synthetic construct
  misc_feature 1..2409: note = Description of Artificial Sequence: Synthetic coding sequence
  source 1..2409: mol_type = other DNA
atgctgggcgcccgggcctggctgggccgggtgctgctgctgccccgtgctggtgccggacttgctgcttccagaagatgccccggagtgtggcctagaacatggccacacaggagcccaagtcggggctcgtcatcaagggataaggacaggtcggccacagttagttcttcggtccctatgcccgcaggtgggaagggctctcacccctcttccacccctcagcgcgtgcccaatagactgatccatgagaagtccccctatctgctgcagcatgcttataaccctgtcgactggtacccatggggccaggaggcctttgataaggctaggaaagagaacaagcctatcttcctgtccgtggggtacagtacctgtcattggtgccacatgatggaagaagaaagtttccagaacgaggaaatcgggaggcttctttcagaagatttcgtttccgttaaggttgatcgcgaggaaaggcccgatgtggacaaggtgtacatgactttcgtacaagcaacgagtagtggaggcggctggccaatgaatgtctggcttacacccaatctacagccctttgtcggagggacttacttccctccggaggatggtctaacgcgggtaggtttccgaacagtgctgttgcggatccgtgaacaatggaagcaaaacaagaataccctgctcgagaactcgcagagggtcaccactgccctgctggctcggtcagaaatatctgtaggtgaccgccagctgccaccatcagcagctacagttaacaatcggtgcttccagcaacttgatgagggctacgatgaggaatacggagggttcgctgaggcccctaagtttcccacgcccgtaatcctgtctttcctcttttcctattggttatctcacaggctgacccaagacggaagccgcgcacaacaaatggctcttcacacgttgaaaatgatggcaaacggaggaataagagatcatgtcggacagggattccatagatactcaactgatagacaatggcatgttccgcattttgaaaagatgctgtacgatcaggcgcaactagctgttgcctattcgcaggcattccagctcagtggggacgagttttattccgacgttgctaagggcatcctccaatacgttgccagatcgctgtcccacaggtccggaggcttttacagcgcagaggatgccgatagcccgcccgagcgtggccagaggcctaaagagggggcatattacgtgtggacagtgaaagaagttcagcagctgctgcccgagcctgtgctcggagctactgaacccctgacaagcgggcagctgctgatgaaacactacggtctgaccgaggcgggaaacatctcccccagtcaggatcccaagggcgaattacagggtcagaatgttctgactgtgagatacagcctggaactgaccgctgcccgattcggcctcgacgtggaggcagtgcgcacactgctgaacagcgggctggagaaactgtttcaggccagaaaacaccggcctaaacctcatctggattccaagatgctggcagcctggaatggcctgatggtgtctggttatgcggtgacaggagccgtgctggggcaggatcggctgattaactatgccaccaatggcgcgaaattcctgaaaaggcacatgtttgacgtcgcgtccgggcgcttgatgcgaacctgttataccggcccaggtggcacggtggaacactccaacccaccctgctggggttttcttgaagactacgcctttgttgtacgcgggctactggatctctatgaggcgagccaggaaagcgcatggctagaatgggccctgcggctccaagacactcaggataaacttttctgggactcgcaagggggaggatacttctgtagtgaagccgaactgggggccggccttcctcttaggcttaaagacgatcaggacggagcagaaccttctgcgaactcggtgtcagcacacaaccttctccgcctgcacggattcaccggccacaaggattggatggataaatgcgtgtgtttgctgactgctttcagcgaaagaatgcgaagggtaccagttgccctgcccgaaatggtgcgagccctcagcgctcagcagcaaaccttgaagcagatcgtcatctgtggggaccgacaagccaaggacacaaaggccctggtgcagtgtgtccattccgtttacatccccaacaaggtgcttattttggctgacggcgatccttcgtcattcctgagccggcagctgccgttcttatccacactgcgccgcctggaggatcaggcaaccgcctacgtatgtgaaaatcaggcgtgtagtgtgcccatcacagatccgtgtgaattgcggaagctgctgcacccatag

SEQ ID NO: 206797 - DNA, 2361 bp, synthetic construct
  misc_feature 1..2361: note = Description of Artificial Sequence: Synthetic coding sequence
  source 1..2361: mol_type = other DNA
atgctgggcgcccgggcctggctgggccgggtgctgctgctgccccgcgccggtgctggcctcgccgcctctcgacgaggatcatcgtccagggataaagaccggagcgcgacagtatcgtcttctgtgcccatgcctgctggaggtaaaggctcacatccctcctcgactccccaacgtgtgcctaatcggctgatccacgaaaagagtccttatctactgcagcacgcctacaaccccgtggactggtacccgtgggggcaggaggcctttgataaagccagaaaagaaaataaacccatctttctgtctgttggatacagcacctgccactggtgtcacatgatggaggaagagtcctttcaaaacgaagaaatcggcagactcctttctgaagactttgttagcgtgaaggtagacagagaagaaagaccggatgtggacaaggtatacatgacctttgttcaggcaaccagcagcggcggaggatggcccatgaatgtgtggctcacccctaatctgcaaccatttgttggcggaacttattttccacccgaggatggcctcactagggtcgggttccggaccgttcttttacggattcgcgaacagtggaagcagaataagaataccttgctggagaattctcagagagttacaacggctttactggcgaggtcggagatctccgtaggtgatcggcagcttcccccatccgcagccacggtgaataacaggtgtttccaacagctcgacgaaggctatgacgaggaatatggggggttcgctgaagctcccaagttcccaactcctgttatcctcagtttcctcttctcgtattggctatcccaccggctgacccaggatggttcccgcgctcaacagatggcactgcatactttgaaaatgatggccaatggaggcataagagaccatgtgggccagggatttcatcggtattcaacagaccggcagtggcatgtccctcatttcgagaaaatgctctatgatcaggcacagcttgctgtggcctatagtcaggcttttcagttatctggcgacgagttctatagtgatgtggcgaagggaatacttcagtacgtggccagatcactgtcccacagatctggcggattctactcggccgaggacgctgatagcccccccgagcggggacagcgcccaaaggaaggagcctattatgtgtggacagtaaaggaagtgcagcagctgctcccagaaccagtgctgggagcaaccgagcctctcactagtggtcagcttctgatgaagcattacgggctgaccgaggcgggcaacatctcacctagtcaggatccaaaaggagagctccagggtcagaatgttctcaccgtgaggtacagcctggaactcaccgcagctaggttcggccttgatgttgaggcagtgcggaccctgctcaactctgggcttgagaagctgttccaagccagaaagcataggcctaagccacacctcgatagcaagatgcttgccgcctggaacgggctaatggtaagcggatacgccgtgaccggcgcagtgctcggtcaggataggctgataaactacgctaccaatggagccaagttccttaaaagacatatgttcgacgttgccagtggacggctgatgaggacgtgctacactggtcctggcgggacggtggaacactctaaccctccctgttggggctttctggaggattatgccttcgtcgttcgtggcctgcttgacctctacgaggcgagtcaggaaagcgcctggttggagtgggctctcaggttacaggacacacaggacaagctcttctgggactcccagggaggggggtatttctgctccgaagccgagctaggagcagggttaccattgaggcttaaagatgatcaggacggagcggaacccagtgccaactctgtgagcgcccacaatcttctaaggctgcatggttttactggtcataaggactggatggataaatgcgtctgtcttctgacagccttctccgagagaatgcggagggttcctgtggcgctgcccgaaatggttagagccctcagtgctcaacaacaaacacttaaacagattgtcatctgtggggatcggcaggctaaagacacgaaggccctggttcagtgcgtgcattccgtatacattccaaacaaggtgctcattttggcagatggcgatccctcctcattcctgagtagacagctcccgttccttagcacgctgcggaggctggaagaccaggcgactgcatacgtttgcgaaaatcaagcgtgtagcgttcccatcactgacccatgcgagctgcgcaaactgctgcacccatag

SEQ ID NO: 206798 - DNA, 2229 bp, synthetic construct
  misc_feature 1..2229: note = Description of Artificial Sequence: Synthetic coding sequence
  source 1..2229: mol_type = other DNA
atgcccgccggcggcaagggcagccaccccagcagcaccccccagagggtgccgaataggctgatccacgaaaagagcccctacctcctgcaacatgcctacaatccagtggactggtatccgtggggacaagaagcattcgataaggcgcggaaagagaacaagccgattttcttgtctgtgggttattcgacgtgtcactggtgtcacatgatggaggaggaaagctttcaaaacgaagagattggccgcctgttgtctgaagacttcgtcagcgtaaaggtggatagggaggagaggcccgacgtcgataaagtatacatgacatttgtccaggccacatcaagcggaggaggatggcccatgaacgtctggttaacccccaacttgcagccatttgtgggtggtacctacttcccgccagaggacgggctgactcgcgtgggctttcggacggtattactgcgcatccgggagcagtggaagcagaataagaacacactgctcgaaaactcccagcgagtcacaacagccctcctggcccggtcggaaatctcagtgggggataggcagctaccacccagtgcggctacagtaaacaaccgctgctttcagcagctcgacgagggttacgatgaggaatatgggggcttcgccgaagcccccaaatttccaacgccagtcatactgagtttcctgttctcttattggctgtcccaccgcctgacacaggacggtagtcgcgcccagcaaatggccctgcatactttaaagatgatggcaaacggcggtattcgagaccatgttggccagggctttcaccggtattctacagataggcagtggcacgtgccccactttgagaaaatgctctatgaccaggcccagctggccgtggcctatagtcaggctttccaactctctggagatgagttctattctgacgtggccaagggaattttgcagtacgttgctagatcccttagccatcgctccggtggcttttactcagctgaggacgccgattctccccccgagcgtggtcagaggccgaaggaaggagcttattacgtgtggaccgtcaaagaggtgcagcagctattgccagaaccagtgctgggggctactgagcctctgacatcaggacagctactgatgaagcactatggtctgactgaggcggggaacatctccccaagccaggatcccaagggtgaactgcagggacagaatgtgttgactgttaggtacagtctcgagctgacagcagcaagatttggtctcgatgtggaggccgtacgaaccctactcaatagcggacttgagaaactgtttcaagcacgaaagcaccgccccaaacctcatctggatagtaagatgctggctgcctggaatggtttgatggtgtccggatatgccgttacaggcgccgtgctgggacaagatcgtctgataaactacgctacaaacggcgccaagttcctgaagcgccatatgttcgatgttgcttctggccgactcatgcgcacctgctacactggaccagggggcaccgttgagcactctaacccaccatgctgggggttcctggaggactacgcatttgtcgtgaggggtctcctggacttgtatgaggcttcacaggagtctgcctggctcgagtgggccctacgactgcaggatactcaggacaagctattctgggacagccagggaggagggtatttttgcagtgaagcggagctaggagctggcctgcccctgcggctgaaagacgaccaagacggggcagagccaagtgctaacagcgtgtcagcccacaacctactcaggctccacggcttcactggacacaaagactggatggacaaatgcgtgtgccttctaaccgcattctcagagcggatgaggagagttccggttgcattgcctgagatggtgcgagccctgtccgcgcagcagcagactttaaagcagattgtgatctgcggggaccgtcaagcaaaggataccaaagcccttgtgcaatgtgtccatagcgtttatatccccaataaggtactgattctggccgatggcgaccctagcagtttcttatccagacagctaccctttttaagcactctgcgtaggttggaggatcaagctaccgcctacgtgtgcgagaatcaggcttgtagtgtgccaattaccgatccatgcgaactcaggaagttgctgcatccttag

SEQ ID NO: 206799 - DNA, 228 bp, synthetic construct
  misc_feature 1..228: note = Description of Artificial Sequence: Synthetic coding sequence
  source 1..228: mol_type = other DNA
ggccagggccaccagggccccggccagtgcgtgcacagcgtgtacatcccgaacaaagtgcttattcttgccgacggagatccttcatcattcctgagccgtcagctcccatttctgtcgactctgcgaaggctcgaagatcaggccaccgcatacgtgtgcgagaatcaggcctgctccgttcccatcactgatccctgcgagttacgaaagttgcttcacccgtag

SEQ ID NO: 206800 - DNA, 132 bp, synthetic construct
  misc_feature 1..132: note = Description of Artificial Sequence: Synthetic coding sequence
  source 1..132: mol_type = other DNA
atgctgggcgcccgggcctggctgggccgggtgctgctgctgcccagagctggagcagggctggctgcttctagaagatctgcttgttccccgacatcaagactcaactccctgcgatcgctgattccctag

SEQ ID NO: 206801 - DNA, 918 bp, synthetic construct
  misc_feature 1..918: note = Description of Artificial Sequence: Synthetic coding sequence
  source 1..918: mol_type = other DNA
atggccgccgccggccaggagaagggctacctgacccagaccgccgccgctctggataaaagtcccagtctgagtccacaactcgcagctcccatccgaggacgtccaaagaagtgtctagtttatcctcatgccccgaagtcatcccgcctgagccggagcgtgctaaggtggctgcaaggcttagacttgtctttcttccctcggaacatcaacagagacttttccaacgggtttctgattgcagagatcttttgcatatattacccatgggagctggagctctcaagtttcgaaaacggtactagcctgaaggtgaaactggataactgggcacagctggaaaagttccttgcacgaaaaaaatttaaactccctaaggagttgatccacggtaccatccattgcaaggcaggcgtgccagagatcctgattgaggaagtttacacgcttctgacacaccgggagattaaatctatacaggacgactttgtgaacttcaccgactacagttaccaaatgagactgccattagttagcagaagcacggtttccaagtcgatcaaggataacataaggttatctgagctgctttccaacccaaatatgctgacgaatgagctaaaagccgagtttctcatactcttgcatatgcttcaacgcaagctcggtcgcaagctcaatcctgagtggttcgatgtgaaaccaacagtgggcgaggtcaccctaaaccatctgcctgcccaagcctcaggacgtaggtataacttgaaggtcaagcgcggtagagtggtccccgtcctccccaacataggatccgggggctcgagccatcgggagattcatgtgaagcaggctggccagcactcctattattccgcaatgaagcccatcagaaatatggacaagaaaccttag

SEQ ID NO: 206802 - DNA, 2682 bp, synthetic construct
  misc_feature 1..2682: note = Description of Artificial Sequence: Synthetic coding sequence
  source 1..2682: mol_type = other DNA
atgagcagcaagaagaaccggaagcggctgaaccagagcgccgagaatggatctagcttaccaagcgccgcgagtagttgtgccgaagcacgagcccccagtgcaggctccgacttcgcagcaacctctgggacactaacagttaccaatctgctggaaaaggtggacgataagatccctaagacttttcagaattccctgatacacctcggtctgaacacgatgaagtctgctaacatctgcattggcagacccgtgttacttactagcctcaacggaaagcaggaggtttacactgcctggccgatggcaggctttcctggcggaaaagtgggtctgtcagaaatggcacaaaagaatgtgggtgtgagaccaggggacgcgatccaggtgcagcctctcgtgggagctgtgttacaggcagaagaaatggacgtcgctctgtcagacaaagacatggagatcaatgaggaggaactaacggggtgcatcctgcgaaagctggacggaaagatcgtgctcccaggcaattttctctactgcaccttctacggtaggccgtacaaactgcaggttctgagggtcaaaggggctgacggcatgatcctgggggggcctcagagtgactccgataccgatgcccaacggatggcgtttgaacaaagtagcatggagacttccagtttggagctatccctgcagctcagccaactggacctagaagatacccagatccccactagtcggtccacgccctataagcctattgacgacaggatcactaacaaggcttccgacgtgctactcgacgtaactcagtctcccggggacgggtctggtttgatgttagaggaagttacagggttgaaatgtaacttcgaatccgctcgggaaggaaacgaacagctgaccgaggaggagagactcttaaaattctccattggggctaaatgcaacactgataccttctatttcattagctcaacaacccgcgtgaattttacagagatagataagaactctaaggaacaggacaaccagttcaaggtgacatacgatatgattggcggactgtcatctcagctgaaggccatcagggaaattatcgagctgcccctgaagcagcctgagctgtttaagagctacggcatacccgccccaaggggcgtgttattgtatggccccccggggacaggtaagacgatgatcgcccgggccgtcgctaatgaagtaggagcttacgtctccgttatcaatggcccagaaatcatatctaaattctacggggagaccgaagctaagctcagacagatattcgccgaggctacactccgacacccctcaattattttcatcgacgagcttgatgccttatgccctaagcgagaaggagcccagaacgaggttgagaagcgggtcgtcgcttctctcttgacactcatggacggcattggctccgaggtgtcagagggccaggtactcgtactgggcgccactaaccggcctcatgcactggacgcggcgctgaggagacccggcaggttcgacaaagaaatagaaattggggtacctaacgcacaggatcgcctggatattcttcagaagctgttgagaagagtcccccacttactgaccgaagcagaactgctgcagctggctaatagcgctcacggctacgtgggggcagacctgaaggtactatgcaatgaggcaggcctgtgtgcacttcgccgaattctgaagaagcagcctaacctcccagatgtaaaggtggctggcctggtgaaaattaccctgaaggacttcctgcaagcaatgaacgatataagaccctcagctatgagagagattgcaattgatgtacctaacgttagctggagcgatataggaggtctcgagtcaattaaattgaagcttgagcaggctgtagaatggccactcaagcaccccgagtcctttataagaatgggaatccaaccacccaagggcgttctcctgtacggaccgcccggatgcagcaagaccatgatcgccaaggctctcgctaacgagagcgggttgaactttctcgccatcaaagggcctgaactgatgaacaagtatgtgggagagtctgaaagagccgtgagggagaccttccgaaaagctagggctgtagctccaagcatcatctttttcgatgaactggatgctctagcggtggaaagagggagttcacttggcgcaggaaacgtcgctgaccgagtactggctcagcttttgaccgaaatggacgggatcgagcaactgaaagatgtgaccatcctcgctgccaccaatcgcccagataggatcgacaaggccctgatgagaccaggacggatcgatcgcattatctatgttccgcttccagatgcagccactcggcgagagatattcaagctgcaatttcacagcatgcccgtgtcaaatgaggtagatctggatgagctgatattgcagactgacgcgtatagcggagctgaaatcgttgcggtttgtcgggaggccgccttgctcgccctggaagaggacatccaagctaatttgatcatgaaaagacactttacacaggccttgagtacagtcaccccccggattcccgaatccctgaggcgtttctatgaagactaccaggaaaaaagtgggctgcatacactatag

SEQ ID NO: 206803 - DNA, 750 bp, synthetic construct
  misc_feature 1..750: note = Description of Artificial Sequence: Synthetic coding sequence
  source 1..750: mol_type = other DNA
atgcagctggacaagttcatctaccacctggcccccgtggagaagagtcacgggcgcctgcaaaacagaactagccggtctcagaaaaaaaagagtaaatctccagaaagaagcaagtattgcataaacgccaagaattatgagcagcccacaattagctcaaagagccatagtccgtctccttacacgaagagacgaatgtgtgaactgtcagaagacacacgcagacggctcgcacacttaaatctcgggccttatgaattcaaaaaggagacagacaagccgccttttgtaattagacacgtggatcctccttccccaagagcagatactctgctgggctcttctgggagggattgtgagcgggatggttggtccagggtccataacgaccactcccacttgggatgctgtagaccaaaagattacaaagtcatacgcacaccccatggtagggactttgacgacagtctggaaaagtgtgaagagtacctgagtccaagaagctgctctaaacctaggcactctgcccgcacattgctggtacattcagcccctagcacaatgcctaaacactccccctctcccgttctcaatcgagcttctctgagggaacggttccacagcgactggtgctctcccagtaattgtgacgagattcatgaccgtgatgagagggaccttgaaaaagacgacgagcttgaacttaaacgaagtctgctctgccgggattcagcttatgattcctag

SEQ ID NO: 206804 - DNA, 1419 bp, synthetic construct
  misc_feature 1..1419: note = Description of Artificial Sequence: Synthetic coding sequence
  source 1..1419: mol_type = other DNA
atgcccaaggtgaaggccctgcagtgcgccctggccctggagatcagttcagtgacatgtcctggagtggtcctgaaagataaggaggatatatatttgtctatctgtgtcttcgggcagtataagaagacccagtgcgtacctgcaactttcccactagtgttcaacgctcggatggttttcgagaaggtattcccagacgccgtcgatccaggtgacgtcgtgactcagctggaatatgatactgctgttttcgaactcatccagctggtgcctcctgtaggcgaaaccctgtctacatacgacgaaaataccagagatttcatgtttccgggccccaaccagatgagtggacatcacgatagtaaccggcaggtaaccatgcgccggattagcggactgagaggcaacgccccccggctggagttcagtaccacctcagtgatcaccgagtgcctgataagctcgcgcaaatgtcatacccaggataagttcatctatcatcttgctccagtagagaaaagccatggcagactccaaaacaggacttcccggtcccaaaaaaaaaagtccaagtcgcctgaacggtcgaagtactgcatcaatgctaagaattatgaacagcctacgattagctccaaatcccatagtccttctccgtataccaaaaggcgcatgtgtgagttgtcagaggacacacgtcgtcggctagcacacctgaatctgggaccttacgagttcaagaaagaaacagataagccccctttcgtgatccggcatgttgaccctccaagccctagggctgatacgctgctgggctcctcggggcgggattgcgagcgggatggatggtctcgcgtgcacaatgaccattcgcatctcggttgttgtaggcctaaagattataaggtaattagaaccccgcacggccgcgatttcgatgatagccttgaaaaatgcgaggagtacctgagcccacgctcctgtagcaagccccgccacagcgctagaacactactggttcacagcgccccctcaaccatgccaaaacactcaccatcccccgttttgaacagagccagcctccgggagcggttccattccgattggtgtagtccaagtaattgcgatgagatccatgacagggacgagagggacctggaaaaagacgatgaactggagctcaaaagatcccttctgtgtcgagatagcgcttacgactccgatccagagtatagtagctgtcagcagcctcgaggaactttccatcttgacgacggggagtactggagtaaccgcgctgcgtcctacaaaggaaaatctcatagacctattttcgagaattcaatggataaaatgtacagaaatttgtacaaaaaagcctgcagcagcgcgtcacatactcaggagtctttctag

SEQ ID NO: 206805 - DNA, 1467 bp, synthetic construct
  misc_feature 1..1467: note = Description of Artificial Sequence: Synthetic coding sequence
  source 1..1467: mol_type = other DNA
atgcccaaggtgaaggccctgcagtgcgccctggccctggagatctcatctgttacttgtcctggtgtggtgctgaaagataaagaagatatatacttaagcatttgcgttttcggacagtataagaaaacccagtgtgtgcctgccacattcccactcgtcttcaatgccagaatggtgttcgaaaaagtcttcccagacgccgttgaccccggagatgtcgtaacacaattagagtatgataccgctgtgttcgagctgatccaactggtcccccccgtcggggagaccttaagcacttatgatgagaacactcgcgatttcatgttccctgggccaaaccagatgagcggacaccacgatagcaaccgtcaggtgactatgcggcggatcagcgggttgagggggaacgcaccccgactggaattcagcactacatcagtcatcaccgaatgccttatttcttccaggaaatgccacacgcaggacaaattcatataccacttggctccagtcgagaagtctcatgggagactgcagaaccggacctcaagatcccagaagaaaaagtccaagagccccgagcgcagcaaatattgcatcaacgctaaaaattacgagcagccgacaatctcttcaaagagtcactcacccagtccctataccaagagaaggatgtgcgagttgagtgaggacaccagaaggaggctagcccatttaaacctggggccatatgagttcaaaaaggagacggacaagccgcctttcgttataaggcacgtcgatcctccttccccacgcgctgacactctactcggcagtagtggccgggattgcgagagagacggatggtctcgggtgcacaatgatcactctcacttaggatgttgtcgccctaaggattacaaggtgattagaaccccccatggaagggattttgacgacagccttgagaagtgcgaagagtacctgagtccgaggtcatgcagcaagccaaggcattcagcaagaacactcctcgtacacagtgcaccgagcactatgcccaagcactcaccctcacctgtgctcaacagggcatcactgcgtgaacggttccattctgattggtgctcaccatccaattgcgacgaaattcatgaccgtgtcaagaatgtattgaaatcgcatcaggcccatcagaggcacttgtacgacgagcgggacctggaaaaagacgacgagctggagctgaagcggtcactcctgtgcagggatagtgcctatgattcagacccagagtacagttcttgtcaacagcctcggggaactttccacctggatgatggggagtactggagcaatagggcggcaagctataagggaaaatctcacagaccaatttttgagaacagcatggacaaaatgtaccggaatttatataagaaggcctgtagtagcgcgagccatacacaagaaagcttctag

SEQ ID NO: 206806 - DNA, 1251 bp, synthetic construct
  misc_feature 1..1251: note = Description of Artificial Sequence: Synthetic coding sequence
  source 1..1251: mol_type = other DNA
atggtgttcgagaaggtgttccccgacgccgtggaccccggcgacgtggtcacccagttagaactgggcgagaccctgtctacttacgacgagaatacacgtgatttcatgtttccgggccccaaccagatgtcaggccaccacgatagtaatcgacaggtgacaatgcggcggatctctgggctgcggggtaacgcaccacggcttgaattctcaacgacctcggtcatcaccgagtgcctcatcagctcccgcaagtgccatactcaagacaagttcatctaccaccttgcacctgtcgagaagagccacgggaggctgcagaatcgaaccagcaggtctcagaagaagaagtccaagtccccagagaggtctaagtactgcattaatgccaaaaactatgagcagccaactatctcatccaagtcccattcaccgtctccctacacaaaaagaagaatgtgtgagctttcggaagacactcggagaagactcgcccacctgaatctaggcccatacgagttcaagaaggagactgacaaacccccttttgtcatacgtcacgtcgatcccccgtcgccgcgcgctgacactctactggggtccagcgggagagactgcgaacgcgatggctggagcagggtgcacaacgatcacagccatctcggatgctgtaggccaaaggattataaggtgatccgtacacctcacggacgcgatttcgacgattctcttgaaaagtgtgaagagtatctaagcccaagaagttgctcgaaaccccgtcacagtgcccgcacactcctcgtccacagcgcacccagtactatgcccaaacacagtccttcgccagttctcaatagggcttccttgagagagaggtttcactccgattggtgttctccatcaaactgcgatgaaattcatgacagagtgaagaatgtgctgaaaagccaccaggctcatcagcgtcacctgtacgacgagcgagaccttgagaaagatgacgagttggagctcaaacgcagtctactctgccgggattctgcctacgatagtgatcctgagtacagttcctgtcagcagcctcggggtacattccacctggacgacggagagtattggagtaacagagcagcctcttacaaaggcaaatcccatcggccaatcttcgagaactcaatggacaagatgtaccgaaatctctataaaaaggcgtgcagctccgcgtctcatacacaggaatcattttag

SEQ ID NO: 206807 - DNA, 1377 bp, synthetic construct
  misc_feature 1..1377: note = Description of Artificial Sequence: Synthetic coding sequence
  source 1..1377: mol_type = other DNA
atggacggcagccggcgggtgcgggccaccagcgtgctgccccggtatgggccaccttgtttgtttaaaggccacctgtcgacaaaatctaatgccttctgtacagactctagctctttgcgtctgagcaccctgcagctcgtgaagaatcatatggccgtccattacaacaagatcctgtcggccaaggctgccgtcgattgttccgtcccagtctccgtctctacatctatcaagtatgcagaccagcagcgtcgcgagaagcttaagaaagagcttgcccaatgtgaaaaggagttcaagcttacaaaaacagcaatgcgcgccaactacaagaataattctaaatccctctttaacacgctgcagaagcctagcggcgagccccagatcgaagatgacatgttgaaagaagaaatgaacggcttcagttcatttgcccgcagtctggtgccaagtagcgagcgactgcatctttcgttacacaagagctccaaagtgattacaaatggcccagagaagaatagctctagttccccatcttcagtcgattacgccgcgtcagggccccgcaaactgagctcaggggctctctatggacgaaggcctcgcagcacctttccaaacagccatcggttccagctggtgatatctaaggcgccatcaggagacctgctcgataaacattctgagctgttcagcaacaagcagcttccatttacacccaggaccctgaaaaccgaggcgaaatcatttttgagccagtataggtactacaccccagccaaacgaaagaaggacttcaccgatcagcgcattgaggccgaaacgcaaacggagctaagcttcaagagtgaattaggaacggcggagactaaaaacatgacagacagcgagatgaacattaagcaggcatcaaactgcgttacctatgacgcgaaggagaaaattgcgcccctccccttagaaggccacgatagcacctgggatgagatcaaggatgacgcgctccaacattcctccccccgagctatgtgccagtacagcctgaagccaccatccactcggaaaatttattccgacgaggaggagctcctttacttaagtttcattgaagacgtcacggatgagatcctgaagttaggcttattttcaaacagatttctggaaagactgtttgagaggcatataaaacagaataagcacttagaggaggagaaaatgcgccacttattgcatgtgctgaaagtcgacctcgggtgtacttccgaggagaattccttctcatcagtgaaaggtgataacaatcacgatatggaactgtctactctgaagattatggagatgtcaattgaagattgccctctggatgtgtag

SEQ ID NO: 206808 - DNA, 1704 bp, synthetic construct
  misc_feature 1..1704: note = Description of Artificial Sequence: Synthetic coding sequence
  source 1..1704: mol_type = other DNA
atggacggcagccggcgggtgcgggccaccagcgtgctgccccggtacggccctccctgcctctttaaaggccacctctccaccaagtcaaacgctgccgtggattgcagcgtgcccgtgtccgtctctacctcaataaaatacgcggaccagcagaggcgagaaaaactaaaaaaggaactcgcccagtgcgagaaggagtttaagctgactaagacagctatgcgggcaaattataaaaataatagcaaatcacttttcaacacactgcagaagccttccggcgagccccaaatcgaggacgatatgttgaaggaggaaatgaatggttttagcagcttcgcacggagcttggtacccagctctgagaggctgcaccttagcctgcataaaagcagtaaagtcattaccaacgggccagagaaaaattcaagctcgagtccatcctccgttgactacgctgcctccggaccccgcaagctgtcatcaggtgccctgtacggccggagacccaggtccaccttccccaacagccatagattccagctggtgatttccaaggctcccagcggggacctcttggataagcacagcgagctgttcagtaataagcagctgccatttactccacgcacactgaaaaccgaggcaaagagcttcctatcccagtaccggtattataccccagctaaaagaaagaaagactttaccgaccaacgtatagaggctgagacccagacagagttgtctttcaagtccgagttaggcacggccgagaccaaaaatatgactgacagcgagatgaatattaagcaggcatcgaactgcgtgacctatgacgcaaaggagaagattgcgccactgccgctggaaggccacgattcgacatgggacgagatcaaggacgatgcattacagcacagtagtcccagggctatgtgtcagtacagcttaaaaccacccagcacaaggaagatctattccgatgaagaggagctactttacctgtctttcatcgaagatgttactgacgaaatcctcaaactgggtttattcagcaaccgattcctagaaagactgttcgaaaggcatattaagcaaaataagcatctagaggaggagaagatgaggcatcttcttcatgtgctgaaggttgatttggggtgtacaagtgaggaaaattctgtgaagcaaaacgatgtggatatgttgaatgttttcgattttgagaaggccgggaattctgagcccaacgagttaaagaacgagagcgaggttactatccagcaggagagacaacagtaccaaaaagcactagatatgttgctctcagctccaaaggacgagaacgaaatttttcccagcccaaccgagttctttatgccgatttacaagtctaagcactctgagggagtaattatacaacaggtcaatgacgaaaccaacttagaaacatcgaccctggacgaaaaccacccgagtatctccgactctctcacagatagagaaacctcggtgaacgttattgagggcgattcagaccctgagaaggtcgaaatcagcaacggcctgtgcggtcttaatacaagccctagtcaatcggtgcagttcagttcagttaagggcgacaacaaccacgacatggagctgtccactctcaagattatggagatgtctatcgaagattgccctttggatgtgtag

SEQ ID NO: 206809 - DNA, 1800 bp, synthetic construct
  misc_feature 1..1800: note = Description of Artificial Sequence: Synthetic coding sequence
  source 1..1800: mol_type = other DNA
atggacggcagccggcgggtgcgggccaccagcgtgctgccccggtacggtcctccatgtctgtttaagggacacctgtctacaaagtcaaacgccttttgcacagactcgtcttctctgcgtctgtctaccctgcagctcgtaaagaatcacatggcggtccactacaacaagatcctcagcgcaaaagccgccgtggactgctctgttcccgtgtctgtgtccacatcgatcaaatacgccgatcagcagaggagagagaaactgaagaaggaactcgcccaatgtgagaaagagtttaaactcaccaagacggccatgagggccaattataaaaacaattccaaatcactgtttaatacacttcagaaaccgtccggggagccacagattgaggacgacatgctgaaggaggagatgaacggctttagctcatttgctcgaagtctcgtgccatcttctgaacgtctacacctgtccttgcataaaagcagtaaagtgattacaaacggcccggagaagaactcgtcctctagccctagctctgtggattatgccgcgtctgggcctaggaagctcagcagcggggccctgtacggccgccggccgaggagcaccttcccaaacagccatcggtttcagctagtcatttccaaggccccatcgggggacctcctcgataaacacagtgaactcttcagcaacaagcagctgccgttcactccccggaccttaaaaacggaggctaaaagcttcttgagccaataccgttattatacgccagccaagcgcaaaaaagattttacagaccaaaggatcgaagccgagacacagactgagttatctttcaaatccgagttgggtaccgcagaaactaaaaacatgacggactcggaaatgaacatcaaacaagcttccaactgtgttacatacgacgcaaaagaaaaaatcgctccactaccccttgagggccacgactcaacctgggatgaaattaaagacgacgccctgcagcactcaagccctagagcaatgtgccaatactcattaaagcccccaagtactagaaaaatctacagcgacgaggaggagcttctttatctcagtttcatcgaggacgtcacggacgaaatccttaagttgggtctcttttctaacagattcctggagcgactctttgagcgtcatatcaaacaaaataaacacctggaagaggagaaaatgcggcacctgctgcacgtcttaaaggtggatctcggatgtacatcagaggagaactccgtcaaacagaacgacgttgatatgttaaacgtcttcgactttgaaaaggccggtaattccgaacccaatgagctgaagaatgaatcagaagtcacgattcagcaggaaagacaacagtaccagaaagcgctcgacatgttactctctgccccgaaggatgagaacgagatctttccctcccccacagagttttttatgcctatttacaagagtaaacacagcgagggggtgatcatccagcaggtgaacgatgaaaccaatctggagacatcgactcttgacgaaaatcacccaagcatctcggatagtcttaccgatagggagacctcggtcaatgttatcgaaggggactccgacccggaaaaagttgagatctccaatgggctctgtggactgaatacgtccccctcacagtccgtgcagtttagcagcgtaaaaggcgataacaatcatgatatggaactaagcaccctcaagatcatggagatgtctattgaggattgccccctcgacgtctag

SEQ ID NO: 206810 - DNA, 1704 bp, synthetic construct
  misc_feature 1..1704: note = Description of Artificial Sequence: Synthetic coding sequence
  source 1..1704: mol_type = other DNA
atggacggcagccggcgggtgcgggccaccagcgtgctgccccggtacggccccccctgcctgttcaaaggacatctctccaccaaatccaatgctgcggttgactgttctgtgcccgtcagtgtgagtacctccattaaatacgccgatcagcaaagaagagagaagctgaaaaaggaactggcccagtgcgagaaagagtttaagctgactaagacagcaatgagagccaactataaaaacaatagtaaatcactattcaacacactacagaaaccctctggcgagccccagattgaagatgacatgctcaaggaggaaatgaatgggttttcatccttcgcacgtagtctagtcccgtcgtcagagcgtctgcacctgagcctgcataagtcctcaaaggtcatcacaaacggtccagaaaagaattcatcatcctcaccctctagcgtggactatgccgctagtggtccccgaaaactcagctcaggggccttgtatggaaggcgaccaagatcaacatttccaaactcccatcggttccagctggtgatatcaaaagcacccagcggcgacctgctcgataagcactctgaactcttctctaacaaacagttgcccttcacacctagaacactgaagacggaagcgaagagcttcctgtcccagtaccgttattacacacccgccaagaggaaaaaagatttcaccgaccagaggattgaagcagagacccaaacagagttgtcattcaaaagcgagttgggtacagccgaaaccaagaatatgactgatagcgaaatgaacattaaacaggcgagcaattgtgtgacctacgacgccaaggagaaaatcgcccccctgcccctggagggccatgattcaacctgggacgaaatcaaagatgatgcgctgcagcacagtagcccaagggccatgtgccaatatagccttaaaccaccgagcacccggaagatttactctgacgaggaggaactcctctacttgtcgttcatcgaagacgtgacggacgaaattcttaaattgggactgttttctaatcgatttttagaacgcctgtttgagcgacatatcaagcagaataaacatctggaggaggaaaagatgagacatttgctgcatgtactaaaggtcgatctgggttgcacttctgaggagaactcggtgaagcagaatgatgtagacatgctcaatgtttttgattttgagaaggccggaaatagcgagcccaacgagctgaagaatgaatctgaggttacaatccagcaggagcgacagcagtatcagaaggccctggatatgctgttatctgctccaaaagatgaaaatgaaattttccccagtcctactgagttcttcatgcccatatataaatcaaagcacagtgaaggggtgattatccagcaggtgaacgacgaaacaaacctggagacttccacgcttgacgagaaccacccaagtataagtgatagccttaccgaccgcgaaaccagcgtgaacgtaatcgaaggagattcagatcctgagaaggtggagattagcaatggactgtgcgggttgaatacatcccctagtcagtcagtacagttctcgagcgtgaaaggtgataacaaccacgatatggaactgtctaccctcaagatcatggagatgtccatcgaggattgcccgctcgatgtgtag

SEQ ID NO: 206811 - DNA, 318 bp, synthetic construct
  misc_feature 1..318: note = Description of Artificial Sequence: Synthetic coding sequence
  source 1..318: mol_type = other DNA
atggcccccgccggcatgagcggcgcccaggacaacagctgcctgtatcaggagatcgcaccaagttttcaaagactgccctgtcccagaacctcctctcggcatttcagtgaagctatgacttgcccctgcggatggcgtccgttcaaaggaggccccggcggactgaaaggaccagtatggcccgccaaagaggaaaattcctgttcacacggcagaatccagagggtccaaaggagaagagttccctccgcctctccattgattcagaaaattaaccgccggagcgttctattccacccttactgttggtcgtag

SEQ ID NO: 206812 - DNA, 1638 bp, synthetic construct
  misc_feature 1..1638: note = Description of Artificial Sequence: Synthetic coding sequence
  source 1..1638: mol_type = other DNA
atgagccggaagcagaaccagaaggacagcagcggcttcatcttcgacctgcagtcaaacaccgttcttgcccagggcggcgctttcgaaaacatgaaagagaagattaacgctgttcgcgccatcgtaccgaacaaatctaataatgagatcattctagtgcttcagcatttcgataactgtgtggacaagacagtgcaggcatttatggagggatcagctagcgaggtcttgaaggagtggacggtgactggaaaaaagaagaataagaagaagaaaaacaagccaaagcctgcggcagaaccaagcaatggcataccggacagcagtaagtctgtaagtatccaagaggaacagtctgccccatcctctgaaaaaggaggaatgaatggctatcatgtgaacggagctattaatgacactgaatccgtcgactctctgagtgaagggctggagacactcagcatagatgcacgggaattggaagacccagaatccgcgatgctcgacactctcgatcgtaccggcagtatgctacagaatggtgtctccgatttcgaaactaaatctttaacaatgcactcaatccataattcccagcagcctcgcaatgctgccaagagcctgtcccggccgaccactgagacacagttcagtaatatgggcatggaggacgtcccgcttgctacatccaagaagctcagttccaatatcgagaagtcagtgaaagacctccagcggtgcactgtctcactagctagatatagggtggtcgtgaaagaggaaatggatgcttcaatcaagaagatgaaacaagctttcgctgaactggagagttgtctcatggatcgtgaggtggcgctcctcgctgagatggacaaggtgaaggcggaagctatggagattctgctctcccgccagaagaaagctgagctcttaaaaaagatgactcacgttgccgtgcaaatgagcgagcaacagctggtagagctgcgggccgatatcaagcatttcgtttctgagcggaaatatgatgaagatctggggcgagtggcccgtttcacttgtgatgttgaaaccctcaaaaagtccatcgattcattcggccaggtgtcacatcctaaaaatagctactctactcgttccaggtgcagtagtgtgacgagcgttagtctgagctcgccatcagatgcttcagccgcttcatcatccacctgcgcgtcacctcccagtctcaccagtgccaataaaaaaaatttcgccccgggtgaaacgcccgccgctattgccaattcttccggccagccataccagcccttgcgcgaagtcctcccaggaaatagaaggggaggtcagggctacaggccccagggacaaaaatccaacgaccctatgaaccagggtcggcacgacagcatgggccgctatcgcaatagtagttggtattcctcgggttcgcgataccagtccgccccatcgcaagcccccggcaatactatcgaacgcggacagacacacagcgctggaacaaatggcaccggagtctccatggagccatccccaccaaccccatcctttaagaaggggttgcctcagcgcaaaccaagaacatctcagacagaagccgtcaactcttag

SEQ ID NO: 206813 - DNA, 1638 bp, synthetic construct
  misc_feature 1..1638: note = Description of Artificial Sequence: Synthetic coding sequence
  source 1..1638: mol_type = other DNA
gtgagcaagaagaagaagaagaaggacagcagcggcttcatcttcgacctgcagtcaaacacagtattggcacaaggaggcgccttcgagaatatgaaagagaaaattaacgctgtgagggctattgtgccgaacaagagcaataatgagataattctcgttctgcaacactttgacaactgcgtggacaaaacagtgcaggcttttatggaaggcagcgctagtgaggtgctaaaggaatggaccgtgaccggcaagaagaagaacaaaaagaagaaaaacaagcctaaacccgccgcggaaccatctaacggaatcccagacagtagtaagagcgtatctattcaagaggaacaatccgcaccttctagcgaaaaagggggcatgaacggctaccatgttaatggtgctatcaacgatactgagtctgtcgactccctgagcgaaggcctggagacgctgtcaatcgacgcgagggagctggaggatcctgagtcagctatgctcgacaccctggacagaactgggagtatgctccagaatggcgtctccgacttcgagaccaaatcccttaccatgcatagtatccacaattctcaacagcccagaaacgccgctaagagtctatctcgcccgaccaccgaaactcaattcagcaatatgggcatggaggatgtgcctctagccacctccaagaagctgtctagtaatattgaaaaatccgttaaagatcttcagaggtgtacagtgtccttggctcggtatagagtagttgttaaggaagagatggacgccagtataaagaaaatgaagcaagctttcgcagaacttgagtcctgtctgatggatagggaagtggcgctgctggctgagatggacaaggttaaggctgaggccatggagatcctcctgagcaggcagaagaaggccgagctcctgaagaaaatgacccatgtggctgtccaaatgtcagagcagcagctagtcgagctgcgcgccgacatcaagcattttgtgagcgaacggaagtacgacgaagatttgggaagggttgcccggttcacttgcgacgttgagactctgaagaaatccatcgatagctttgggcaggtttcccaccctaagaattcatacagtacacggagtagatgcagtagcgtcacatccgtgagtttgtctagcccttctgatgcatctgcagcatcttctagcacatgtgctagcccaccctcattgacatcagcgaataaaaaaaatttcgctcccggggagaccccagccgccattgcaaattcatccgggcagccataccagcctctccgggaagtgctaccaggaaacaggcgcggcggccaggggtatcggccccaggggcaaaaaagcaatgatccaatgaatcagggccggcacgactccatgggccggtaccggaattcttcttggtacagcagcggatcgcgataccagagtgcgccctctcaggccccaggcaacactattgaacgcggccagactcacagtgcaggaacaaacgggaccggtgtcagcatggaaccaagcccacccactccatccttcaagaagggacttccccagcgcaaaccaagaacttctcaaactgaagcggtgaacagctag

SEQ ID NO: 206814 - DNA, 27 bp, synthetic construct
  misc_feature 1..27: note = Description of Artificial Sequence: Synthetic coding sequence
  source 1..27: mol_type = other DNA
atgagccggaagcagaaccagaagtag

SEQ ID NO: 206815 - DNA, 27 bp, synthetic construct
  misc_feature 1..27: note = Description of Artificial Sequence: Synthetic coding sequence
  source 1..27: mol_type = other DNA
atgagccggaagcagaaccagaagtag

SEQ ID NO: 206816 - DNA, 204 bp, synthetic construct
  misc_feature 1..204: note = Description of Artificial Sequence: Synthetic coding sequence
  source 1..204: mol_type = other DNA
atgagccggaagcagaaccagaaggacagcagcggcttcatcttcgatcttcagagcaacacagtactggcacaggggggcgccttcgaaaatatgaaagaaaaaattaatgctgtccgagcaatcgtccccaacaagtctaataatgagataatcctggttctgcaacattttgataattgtgtggataagactgtccagtag

SEQ ID NO: 206817 - DNA, 102 bp, synthetic construct
  misc_feature 1..102: note = Description of Artificial Sequence: Synthetic coding sequence
  source 1..102: mol_type = other DNA
atgagccggaagcagaaccagaaggacagcagcggcttcatcttcgacttacagtccaacactgtgctcgctcaaggaggcgcgtttgaaaatatgaaatag

SEQ ID NO: 206818 - DNA, 18 bp, synthetic construct
  misc_feature 1..18: note = Description of Artificial Sequence: Synthetic coding sequence
  source 1..18: mol_type = other DNA
atgagccggaagcagtag

SEQ ID NO: 206819 - DNA, 111 bp, synthetic construct
  misc_feature 1..111: note = Description of Artificial Sequence: Synthetic coding sequence
  source 1..111: mol_type = other DNA
atgagccggaagcagaaccagaaggacagcagcggcttcatcttcgatctccagtcaaataccgttctggctcagggtggtgctttcgaaaatatgaaggaaaaggtttag

SEQ ID NO: 206820 - DNA, 201 bp, synthetic construct
  misc_feature 1..201: note = Description of Artificial Sequence: Synthetic coding sequence
  source 1..201: mol_type = other DNA
atgagccggaagcagaaccagaaggacagcagcggcttcatcttcgacttgcagtccaatacagtgctcgcccagggcggtgcttttgagaatatgaaggagaaaatcaatgccgtccgcgctattgtgccaaacaagtcaaataatgagataatccttgtactccaacattttgataactgtgtagataagacagtttag

SEQ ID NO: 206821 - DNA, 105 bp, synthetic construct
  misc_feature 1..105: note = Description of Artificial Sequence: Synthetic coding sequence
  source 1..105: mol_type = other DNA
atgagccggaagcagaaccagaaggacagcagcggcttcatcttcgacctgcagagcaacacggttctcgcccaaggtggggcattcgaaaatatgaaagaatag

SEQ ID NO: 206822 - DNA, 297 bp, synthetic construct
  misc_feature 1..297: note = Description of Artificial Sequence: Synthetic coding sequence
  source 1..297: mol_type = other DNA
atgagccggaagcagaaccagaaggacagcagcggcttcatcttcgaccttcagagcaatacggtgctggcccagggtggcgcttttgaaaatatgaaggaaaaaattaatgcagtgagggcaattgtgcccaataaatccaacaatgagatcatcctggtgcttcagcactttgataattgtgtagataagaccgtccaggccttcatggagggatccgccagcgaggtgttgaaagagtggactgtgacaggaaagaaaaaaaacaagaagaagaagaacaagccgaagccttag

SEQ ID NO: 206823 - DNA, 225 bp, synthetic construct
  misc_feature 1..225: note = Description of Artificial Sequence: Synthetic coding sequence
  source 1..225: mol_type = other DNA
atgagccggaagcagaaccagaaggacagcagcggcttcatcttcgatctgcagtcaaataccgtcttggcacagggcggggcatttgaaaacatgaaggaaaaaatcaatgctgttagggctattgtcccaaacaaatctaacaacgagatcatcctggttttgcagcatttcgataattgtgtcgacaaaaccgtgcaggctttcatggaggggagtgcatag

SEQ ID NO: 206824 - DNA, 33 bp, synthetic construct
  misc_feature 1..33: note = Description of Artificial Sequence: Synthetic coding sequence
  source 1..33: mol_type = other DNA
atgagccggaagcagaaccagaaggacagctag

SEQ ID NO: 206825 - DNA, 1638 bp, synthetic construct
  misc_feature 1..1638: note = Description of Artificial Sequence: Synthetic coding sequence
  source 1..1638: mol_type = other DNA
atgagccggaagcagaaccagaaggacagcagcggcttcatcttcgacctgcagtccaataccgttctggcacaaggaggcgcttttgaaaatatgaaagaaaagatcaatgccgtcagggcaattgtgccaaacaagagtaacaacgagatcattctcgttctgcagcacttcgacaactgtgtggataagactgtgcaagccttcatggaggggtctgcctctgaggttctcaaggaatggacagtcaccgggaagaaaaagaataaaaaaaaaaagaacaagccgaagcccgcagcagaaccatccaacggcatccctgatagctccaagtccgtgagcattcaagaagaacaatccgctccctcttcagagaaaggcggcatgaacggctaccatgtgaacggagcgattaatgacacagaaagcgtcgatagcctttcagagggactggagacactgtcaattgatgccagggagctagaagacccggagtccgccatgctggacaccctggatcgcacagggagcatgctacagaacggagtgtccgacttcgagaccaaatccctgacgatgcactccatccacaattcccagcaacctcgcaacgccgcaaagtccctctcacgaccaacaaccgagacacaattctcaaacatggggatggaggatgtgcctcttgcgaccagcaaaaaactaagcagtaacatagagaaatctgttaaggacctacagaggtgtactgtatccctggctcgctaccgcgttgtcgttaaagaagagatggacgcaagtataaaaaaaatgaagcaggctttcgcggaactggagtcttgccttatggacagggaggtcgcacttctagccgaaatggataaagtaaaggccgaagccatggagatcctgctcagtcggcagaaaaaagccgaactgctgaagaaaatgactcacgtagccgtacaaatgagtgagcagcaacttgtggaattgagagctgacatcaaacacttcgtgtccgaaagaaaatatgacgaagacctaggccgcgtggccaggtttacctgcgacgtagaaaccctgaagaagtcaatcgattcgtttggacaagtcagccacccgaagaactcctattccactagaagtagatgttccagcgtgacgagcgtatcactgtcgtcgccctccgacgcctcagcagctagcagctccacatgcgcatcccccccttctcttacatccgctaacaagaagaattttgctcccggggagacccccgctgccattgccaattccagtggacagccttatcagcccctgcgagaagttctacctgggaataggagaggggggcagggctatcggccgcaaggacagaagtctaatgaccccatgaatcagggacggcacgacagcatgggtcgttatagaaactccagttggtattcttccggatctcgctaccagagtgcaccctcccaggcccctggcaacacaattgagcgtggacagactcactctgccggaactaatgggaccggagtgtcaatggaacccagtccacctaccccatccttcaagaaggggctacctcagaggaagccacgcacatcccagacagaagccgtcaacagttag

SEQ ID NO: 206826 - DNA, 1638 bp, synthetic construct
  misc_feature 1..1638: note = Description of Artificial Sequence: Synthetic coding sequence
  source 1..1638: mol_type = other DNA
atgagccggaagcagaaccagaaggacagcagcggcttcatcttcgatctgcagtctaacacggtgctggcccagggcggagcgtttgaaaatatgaaagagaaaatcaacgccgtcagagcgattgtgcccaacaaatcgaataatgaaattatcctcgtgctccagcactttgataactgcgtcgataagacagtgcaggccttcatggaaggctcggcgtctgaggtgttgaaggagtggacagtgacaggcaaaaagaaaaacaagaagaagaagaataagcctaaaccagccgccgaaccttctaacggcattccggatagcagcaaaagcgtctcgatccaggaggaacaatccgccccgagctctgaaaagggtggcatgaatggttatcacgtgaacggggccatcaacgatactgaatccgtagattctctaagtgaggggttggagacacttagcatcgatgcacgggagctggaggaccccgaatcagcgatgttggataccctggaccgaaccgggagcatgctgcagaatggagtcagcgacttcgagaccaagtccttgacaatgcactccattcacaactcccaacagccccgcaacgcagccaagagcctttctcgccccaccactgagacacaattttctaacatgggcatggaggacgtgcctctggccacgagcaaaaaactgtcgtcaaatatcgaaaaatccgtgaaggatttacaacggtgtacagtttcattggctagatatagggtagtggtcaaggaggagatggacgcaagcatcaaaaagatgaagcaggccttcgccgaactagagagctgtctgatggatcgcgaggtcgctttactggccgaaatggacaaggtgaaagcagaggccatggagattttactttcacggcaaaagaaggctgaacttctgaagaagatgactcacgtcgcagtccaaatgtctgaacagcagttagtggagctcagggctgatatcaaacactttgtgagcgaaaggaagtatgacgaggaccttggcagggtggcaagattcacctgcgatgtcgagaccctcaagaagtcaatcgattccttcggacaggtgtcccatcctaaaaacagctactctacccgcagcaggtgttcctcagtaacttcagtctcgctgtctagtccatctgacgcctccgcggcgagctcgtctacctgcgcatcaccaccctctctgacctcggccaacaagaagaatttcgcgcctggagagacacccgccgccatcgctaattctagcggccagccataccaaccactgcgcgaggtcctccccgggaaccggagagggggccaggggtacagaccacaaggccagaagtctaacgaccctatgaaccagggccggcatgacagcatggggagatacagaaactccagctggtattcatcaggttcccgataccagtccgccccaagccaggctcccgggaacactatcgaaaggggccaaacccatagtgccggcaccaacgggacaggtgtttcgatggagccaagccctccaacaccaagctttaaaaaagggcttccgcagcggaagcccaggacatcacagaccgaagccgtcaattcctag

SEQ ID NO: 206827 - DNA, 1677 bp, synthetic construct
  misc_feature 1..1677: note = Description of Artificial Sequence: Synthetic coding sequence
  source 1..1677: mol_type = other DNA
atggccgagctgaacacccacgtgaacgtgaaggagaagatctacgcagtgcgcagcgttgtgcccaacaaatcgaataatgagattgtccttgtgctgcagcagtttgatttcaacgtggataaggctgtgcaggcttttgtcgacggcagtgctattcaggtgcttaaagagtggaatatgactggtaagaaaaaaaataacaaaagaaagcgctcaaaaagcaaacagcaccaagggaacaaggatgctaaggacaaggtggaacggcccgaagccggacccctgcagccgcaaccccctcaaatacagaatggaccaatgaacgggtgcgagaaagactccagctctactgacagcgctaatgaaaagcctgccctgatccctcgggagaaaaagattagcatccttgaagaacctagcaaggcattgcgaggagtgactgagggaaaccggctgctgcaacaaaagctgtccctggacggcaacccaaagcctatacacggtaccacggaacggtctgacggcctgcagtggtccgccgagcaaccgtgcaatcccagtaagcccaaggccaaaaccagcccggtgaagtccaacaccccggccgcccacttggagattaaacctgatgagctggcaaaaaagaggggccccaacatcgaaaagtccgtgaaggatctccaaaggtgcacagtgtctctgacaaggtaccgcgtgatgatcaaggaagaagtggattccagcgttaagaagattaaagccgcttttgccgaactgcacaactgcataatcgataaggaagtttcattaatggccgaaatggataaagtcaaggaagaggcaatggagatcctgaccgcccggcagaaaaaggccgaggagctgaaaagattgacggatctcgctagtcaaatggccgaaatgcagttggctgagctaagggcagagatcaagcatttcgtcagcgaacgcaaatacgacgaggagctgggcaaagccgctaggttttcttgcgacatcgaacaacttaaggcccagattatgctctgtggggaaatcacacatccaaagaataactactcatctcggacgccatgttcctcgctgctccccctgctgaacgcccacgcggcaaccagtggcaagcagagcaatttcagcaggaagtcaagcacccacaataagccgtctgagggtaaagccgctaatcccaagatggtgagctcgctgcccagtactgctgatccatctcaccagactatgcctgctaacaaacaaaacggatctagcaatcagaggcgaagatttaatcctcagtatcataacaatcggctgaatggccccgctaaaagccaggggagcgggaacgaggccgaaccgctaggaaaaggtaattcccggcacgaacatcgtaggcagccgcacaatggcttcaggcctaaaaataaaggtggagctaaaaaccaggaggccagccttggtatgaaaacccctgaggcgcccgcccatagcgagaagccgaggcggaggcagcacgctgcagacacatcagaggccagacctttcaggggtagcgtcggaagagtgtcccaatgcaatctttgccccacccggatcgaggtgtcgacggatgctgccgtgttatccgtgccggcggtcaccctggtagcatag

SEQ ID NO: 206828 - DNA, 1470 bp, synthetic construct
  misc_feature 1..1470: note = Description of Artificial Sequence: Synthetic coding sequence
  source 1..1470: mol_type = other DNA
atggccgagctgaacacccacgtgaacgtgaaggagaagatctacgcggtacgcagcgttgtccccaataaaagcaacaacgagattgtgctggttttgcagcagtttgattttaatgtggacaaagctgttcaggctttcgtcgacggaagtgccatccaggtcctcaaggaatggaatatgacggggaagaagaagaataacaagcgcaaacgcagcaaaagtaagcagcaccaaggtaataaggatgcgaaagataaggtggagaggcccgaggctggacccctgcagccacagccaccacagatccagaacgggcccatgaatggttgtgaaaaggacagttctagtacagactccgctaatgagaaacccgctctcataccgcgcgagaagaagatatctatcctggaggaaccatcaaaggctctcagaggagttacagggcccaatatagaaaagtccgtaaaggatcttcagagatgtaccgtgtcgctgacgaggtacagagttatgataaaggaggaagtcgacagcagcgtgaaaaaaataaaagctgcttttgctgaactccataattgtatcatcgataaagaagtgtctctgatggctgaaatggataaagtcaaggaagaggcaatggagatactcacggctaggcagaagaaagcggaagagctgaaaaggctcactgaccttgccagccaaatggcggagatgcaactggcagaactgagggccgaaatcaagcatttcgtgtcagagcggaagtacgatgaagaactagggaaagctgcacggttttcttgtgacatagagcagctgaaagctcagataatgctgtgtggggaaatcacccaccccaaaaacaattacagctcacggaccccttgctcaagtcttctgcccctgctgaatgctcatgcggcaactagtggaaaacagtctaacttcagccgaaagtcttcgacgcacaataaaccgtccgaaggcaaagctgcgaaccccaaaatggtgtctagcctccctagtaccgccgacccaagccaccagacaatgccagctaataagcagaacgggagcagcaaccagagaagaaggtttaacccacagtatcacaacaaccgactgaatgggccggctaagagccaaggcagcggtaatgaggccgagcccctcggaaaaggcaattcaaggcatgagcaccggcgccagccccacaatggatttagacctaagaataagggaggagcgaagaaccaggaagcctccctcggtatgaagacccccgaagcaccagcccactcagaaaaacccagaaggcgccagcacgccgctgatacttcagaagcaaggccatttcgcggaagtgtgggccgagtgagccaatgcaacttgtgtcccactcggattgaagtctccaccgacgcagctgtgctatccgtgccggccgtgactctggttgcctag

SEQ ID NO: 206829 - DNA, 1677 bp, synthetic construct
  misc_feature 1..1677: note = Description of Artificial Sequence: Synthetic coding sequence
  source 1..1677: mol_type = other DNA
atggccgagctgaacacccacgtgaacgtgaaggagaagatctacgccgtccgcagcgttgtgcccaataaatccaacaacgagatagtgctagttctgcaacagttcgactttaatgttgataaggccgtccaggccttcgtggacggatcagccattcaggtgctgaaagaatggaatatgactggtaaaaaaaaaaataataagagaaaaagatccaaaagcaagcaacatcagggcaataaagatgccaaggacaaagtggagagaccagaagctggcccactgcagccccaacctccccagatccagaacgggcctatgaatggatgtgaaaaagacagctcttcgaccgacagtgccaacgagaagccggccctgatcccgagggagaagaaaatttccatcttggaggagccctccaaggctctgcgaggcgtgacagagggaaatagactgctgcagcagaaactatctctcgatggcaatcctaaaccgattcacggcacaactgagaggtctgatggactccagtggagcgccgaacagccgtgcaatccttctaagcctaaggccaaaacatccccagtgaagtccaacaccccagctgcccacttagaaatcaagccggacgagctagccaagaaacgcggccccaacattgaaaagagcgtcaaggatttgcagcggtgtactgtatctctgacaagatatcgggttatgataaaggaggaggttgattcgtccgtcaaaaaaatcaaagctgcgttcgccgaactgcacaactgcattatcgacaaggaagtctccctgatggccgagatggataaagtgaaagaggaagccatggaaattctcactgcacggcagaagaaagcggaagagcttaaacggctaaccgatttggcaagtcagatggcggaaatgcaattggctgagctgcgggctgaaatcaaacatttcgtgagtgaaagaaagtatgacgaagagctcgggaaagctgctagattctcatgcgatatcgaacagctgaaggctcaaatcatgctgtgtggagagattacacaccccaaaaacaactactcctccagaactccttgtagcagtttattgcctttgcttaatgcccacgcagctacctccggaaagcagtctaacttctctagaaagtctagcacacacaacaagccctctgaaggtaaggcagccaaccccaaaatggtgtcctctcttccttcaaccgcagatcccagccatcaaaccatgcccgctaacaagcagaacggctcatctaatcagcgccgacgtttcaaccctcaatatcataataaccgattgaatggccccgctaaatcccagggtagcggcaatgaggccgagccattggggaagggaaactcacgtcatgagcataggcggcaacctcacaacgggttccgccccaaaaacaagggcggtgccaagaatcaggaggcctctctgggtatgaagacccctgaggctcccgcgcactccgaaaaaccacgcaggcggcagcatgccgccgacaccagtgaagcacgtccttttagggggtcagttggacgggtcagccagtgcaatctgtgcccaaccagaatagaggtatccaccgatgccgccgtgctctccgtacccgctgtcaccttggttgcttag

SEQ ID NO: 206830 - DNA, 1701 bp, synthetic construct
  misc_feature 1..1701: note = Description of Artificial Sequence: Synthetic coding sequence
  source 1..1701: mol_type = other DNA
atggcctacagcacccggagcaagatggccgagctgaacacccacgtgaacgttaaagaaaaaatctatgctgtgcggtccgtggtgcccaataagagcaacaacgagatagttctcgtactgcagcagtttgacttcaacgttgacaaggcggtgcaggcctttgtcgatggatccgcgatacaagtgctgaaagagtggaatatgacaggcaagaagaagaataacaaacgcaagcgaagtaagtccaagcagcatcagggtaacaaggacgctaaagataaagttgagcgccccgaagctggccctctgcagccccagccaccacagattcagaacggacccatgaacgggtgcgaaaaagacagctcatccaccgactccgctaatgaaaagcctgcccttattcctagagagaaaaagatcagcatccttgaggagccttctaaagccctccggggagtgacagagggaaaccgcctgctccagcagaaactttcacttgacggcaatccgaagcctatccacggtaccacagagagaagcgacgggcttcaatggtctgctgaacagccgtgcaacccctcaaagccgaaggccaaaacatctccggtcaaaagcaatacgccagcagctcatctggaaatcaagcccgacgaactggctaaaaagaggggtcctaacatcgagaaatctgtcaaggacctacagaggtgcactgtgtctctcactagataccgcgtcatgatcaaggaggaggtggactccagcgtaaaaaaaataaaagccgcgtttgctgagctgcataattgcatcattgataaagaggtcagcctgatggccgaaatggataaggtaaaggaagaggcgatggaaatcctaaccgcaaggcagaagaaggccgaggaactgaaaagactcaccgacttagcgtctcagatggctgagatgcagttagcagagttaagagcagagattaaacattttgtgtctgaacggaaatatgatgaagagctgggtaaggcggcccggttttcatgtgacatcgaacagctcaaagcccagattatgttatgcggcgagataacccatcctaaaaataattacagttcgcggacgccatgtagcagtctgctgcccttgctgaatgcgcacgcagccacaagcggtaagcaaagcaatttctctcgtaagtcttccactcataacaaaccctccgaaggtaaagcagccaatccaaagatggtcagttcgctgccttctacggcggatccaagtcaccaaacaatgcctgccaacaaacagaatgggagttccaaccagcgtaggcgtttcaatccgcaataccataataatcgcctgaatgggcccgcgaaaagccagggcagcggaaatgaggctgaaccgctcggcaagggaaattcccgtcatgagcacaggcgacagccccataatggctttcgccctaagaacaagggcggggctaaaaatcaggaggccagcctgggaatgaaaacacccgaggctccagcgcactccgagaaacctaggagacgtcaacatgccgccgataccagtgaagcgcgcccttttcgcggatcggtgggcagagtgtcccagtgcaacctgtgccctaccaggatcgaagtgagcacagacgcagccgtcctgtctgtcccagcagtgacactggtggcatag

SEQ ID NO: 206831 - DNA, 801 bp, synthetic construct
  misc_feature 1..801: note = Description of Artificial Sequence: Synthetic coding sequence
  source 1..801: mol_type = other DNA
atggccgagctgaacacccacgtgaacgtgaaggagaagatctacgccgtacgctccgttgtgcctaataagtctaataatgagatagtcttagtacttcaacaattcgactttaacgtggacaaagctgttcaggcatttgtagacgggtcggccatacaggtcctcaaagagtggaacatgacaggaaagaaaaagaacaataagagaaagcggagcaagtccaagcagcatcagggtaataaggatgccaaagataaggttgagaggccagaggcggggcctttacagcctcagccaccccagatccagaacggccccatgaacggttgtgaaaaagactcatcatcaactgacagcgctaacgaaaagcctgctctcatccctcgcgaaaagaaaatcagtatccttgaggagccttcaaaagcattaagaggggtgaccggccccaacatcgagaaatccgtgaaagacctgcaacgctgtacagtgtcacttacccgataccgggtgatgattaaggaggaagtggactcctccgtgaaaaagatcaaagccgccttcgccgagctacacaactgcataattgacaaagaagtcagtctgatggctgaaatggataaggtcaaagaggaggccatggaaatccttactgctagacagaaaaaggcggaagaactgaaaagactgaccgacctggccagccagatggccgagatgcagttggcggagcttagagctgagatcaagcacttcgtctccgaaaggaagtatgacgaagagttgggcaaggcggcctag

SEQ ID NO: 206832 - DNA, 1677 bp, synthetic construct
  misc_feature 1..1677: note = Description of Artificial Sequence: Synthetic coding sequence
  source 1..1677: mol_type = other DNA
atggccgagctgaacacccacgtgaacgtgaaggagaagatctacgccgtgaggagtgtggtgcctaacaaaagcaataacgagatcgttcttgtgctgcagcagttcgatttcaatgtggacaaggccgtgcaagcctttgtggatgggtcagctatacaggtgctaaaggaatggaatatgactgggaaaaaaaaaaataacaagcgcaagcgctcaaaaagcaaacagcaccaagggaataaagatgcaaaagataaggtggaaaggcccgaagcagggccccttcaacctcaaccaccacagatccagaacggtcccatgaacgggtgcgaaaaagactcatcctccacagattcagcaaatgaaaagccagcactcattccaagggagaaaaaaattagtattctcgaggagcccagtaaagccctcaggggcgtcacggagggaaacaggctgcttcaacaaaaattgtctctcgatggtaaccccaagccaatccacgggaccacagagcggtccgatggcttgcagtggagtgccgaacagccgtgcaatccctctaaaccaaaggctaaaacttccccggtgaagtccaatactcccgcggcacacctcgagattaaacctgacgagctggccaagaagcgcggtcctaatatagaaaagtcagttaaggacctgcagcgctgtacagtgtcccttacgaggtatcgcgtgatgatcaaggaggaggttgattcgagcgttaagaaaataaaggcagctttcgccgagctgcacaactgtattattgataaagaggtatccctcatggccgaaatggataaggtgaaagaggaggcaatggagatcttaacagcccgacagaaaaaagcagaggagttaaagagacttactgatttggcctctcaaatggccgaaatgcagctcgctgagctgcgcgcagaaatcaagcacttcgtgtcagagaggaagtatgacgaagaattgggcaaagcggcacgctttagttgcgacattgagcagctgaaagctcagatcatgctgtgcggtgagatcacccacccaaagaacaactactcttcaaggactccctgctcctcgttgttgcccttactgaatgctcacgctgccaccagcggaaagcagagtaatttttcccgcaaatcttccacccacaataaaccttcagaggggaaggcagcaaatccaaaaatggtctcttctctcccttcaacagcagatccaagccatcagaccatgccggccaataaacagaacgggagttccaaccaaaggagacggttcaacccgcaataccacaacaacagactcaacggaccggcaaagtcccagggaagtggaaacgaagccgagccgcttgggaagggaaatagccgccacgagcacaggaggcagccacacaatgggttccgtcctaagaacaaagggggggctaaaaaccaggaagctagtctcggtatgaaaacgcccgaggccccggcccacagcgaaaaaccccgtcgccgtcagcatgctgccgacacgagtgaggccagaccttttaggggcagtgttggtagggtgtctcagtgtaacctgtgtcccacccggatcgaagtttctaccgatgccgccgtcctgtctgtgcctgccgtaactcttgtggcctag

SEQ ID NO: 206833 - DNA, 1767 bp, synthetic construct
  misc_feature 1..1767: note = Description of Artificial Sequence: Synthetic coding sequence
  source 1..1767: mol_type = other DNA
atggaccccttctgccacagcagcagcgagacccggctgctgagcggaacgctgttgtggattccaagagcgtattcaacaagaagcaagatggctgaactaaatacacacgtcaacgtgaaggagaagatctacgcagtgcgcagtgtggtacccaacaagagcaacaacgagatcgtgctcgtgctacaacagttcgacttcaatgttgacaaagccgtgcaggcattcgttgatggttcagccatccaggtgttgaaagaatggaacatgacaggaaagaagaagaataataagaggaagaggtctaagtctaagcaacaccagggcaataaggacgccaaggacaaggtcgagcgtcctgaggcaggtcctttgcagccacagcccccccagatccagaatggccccatgaacgggtgcgaaaaggacagcagcagcactgactccgccaacgaaaagcctgccctgatccctagggaaaaaaaaatttctattctggaagaaccttcaaaggccctgcgcggcgtgacagagggaaacaggctcctgcagcagaagttatccctcgacggcaacccaaaaccgatacacggaaccacagaaagatcagatggactacagtggagtgcagagcagccgtgtaacccttctaagccaaaggcaaagaccagccctgtgaaatcaaacacccccgcggcccatctggaaattaagccagacgagctggcgaagaagcgggggcctaacatcgagaagagtgtcaaggacttgcagaggtgcactgtcagtctcacacgttatcgggttatgatcaaggaagaggtggattcctctgtgaagaagataaaagccgcattcgcggaactacacaactgcatcatagacaaagaggtgtctctgatggccgagatggacaaggttaaggaagaggccatggagattcttaccgccaggcaaaagaaggccgaggagcttaagcgactgacagatctggccagccagatggccgaaatgcagctggctgagctgagggcggagatcaaacactttgtgtccgagagaaagtatgacgaagaactagggaaggctgcacggttcagttgtgacatagagcagttgaaggcccagatcatgttatgtggggagatcacccaccctaagaacaattatagctctcgcactccttgcagctctttgcttcccctcctgaacgcgcacgctgccacaagcggaaaacagtcaaacttttcaagaaagtctagtacgcacaacaagccttctgagggcaaggccgcgaacccaaagatggtctctagcctgcctagtaccgctgacccttcccaccagacaatgccggccaataaacagaacgggtcttctaaccagagaagaaggttcaacccacagtaccacaacaataggttgaatggaccggccaagtcccagggcagtggtaacgaggcagaaccactgggtaagggcaacagtcgtcatgaacatcgcaggcagccccataatggtttcagaccaaagaataaaggcggcgcgaagaaccaggaggcctctctgggaatgaagactcctgaggctccagcacatagtgaaaagccccgcaggaggcagcacgcagctgacaccagcgaagcccgaccgttccgtggctctgttgggcgggtgtcccagtgcaatctgtgcccgacacgtattgaggtgtccacagacgccgcagtgctcagtgtgcccgccgtgactctggtcgcttag

SEQ ID NO: 206834 - DNA, 1677 bp, synthetic construct
  misc_feature 1..1677: note = Description of Artificial Sequence: Synthetic coding sequence
  source 1..1677: mol_type = other DNA
atggccgagctgaacacccacgtgaacgtgaaggagaagatctacgctgttcggagcgtggtacccaataaatctaacaacgaaatcgttcttgttctgcagcagttcgactttaatgtagataaggctgtgcaggcatttgttgatgggagcgcaatccaggtgctgaaggagtggaatatgaccggaaagaagaaaaataataagagaaagagaagcaagtccaaacagcatcaggggaacaaagacgcaaaggacaaagtcgaacggcctgaagccgggcccttgcaaccacagcccccccagattcagaacggccccatgaacgggtgcgagaaggacagcagtagcactgactctgccaacgagaagccagccctgatccctagagaaaaaaagatttcaattctcgaggaaccaagcaaagcacttcgcggcgtgactgaggggaataggctgctgcagcagaaattaagcctcgacgggaacccgaagcctattcacgggactacagagcgatccgacggactccagtggtcagcagagcagccctgcaacccctcaaagcctaaggccaagaccagcccagtgaaaagtaacacaccagcagctcatcttgaaataaagccagatgagctcgcaaagaagcgcggtcctaacattgagaaatccgtgaaggatcttcagcgctgcacagtgagcttgacccggtacagagtcatgattaaggaggaggttgatagctcagtcaaaaagattaaagccgcatttgcagaattacacaattgcataattgacaaggaggtgagtctgatggccgaaatggacaaggttaaagaagaagcaatggaaatcctgacggcgcggcagaaaaaggccgaagagctcaagcgcctcacagatttggccagccaaatggctgagatgcagctggcggagctgcgcgccgagatcaaacattttgtttcagagcgaaagtatgatgaagagttgggtaaggccgccagattttcctgtgatatcgagcaactcaaggcccagattatgttgtgcggtgaaatcacccatcccaagaacaactatagctcccgaacaccttgttcttctctgctgcctctccttaatgcacatgccgcaacttcaggaaagcaaagcaatttttctagaaagagttcaacccacaacaaaccttctgagggcaaggctgctaaccccaaaatggtatcaagcctccctagcaccgccgatccaagccaccaaacaatgcctgccaataaacagaatggatcctctaaccaacggagacgattcaacccgcaatatcacaacaatcggttgaacggcccggccaaatcccaaggaagtggtaacgaggccgagccactaggtaaggggaactccaggcatgagcatcgcaggcagccacataacggttttagacctaaaaacaaaggtggtgccaaaaaccaggaggcgtccctggggatgaagacgccggaggcccctgcacacagtgagaaacctaggagacggcagcacgctgccgacacaagcgaagcccggccattccggggatcagtcgggagagttagccagtgtaatctctgccccactcggattgaggtttcaaccgacgccgcggtcctgagcgtcccagccgtaactctggtggcctag

SEQ ID NO: 206835 - DNA, 465 bp, synthetic construct
  misc_feature 1..465: note = Description of Artificial Sequence: Synthetic coding sequence
  source 1..465: mol_type = other DNA
atggccgagctgaacacccacgtgaacgtgaaggagaagatctacgctgtccgctcggtggtcccaaataagagtaataatgagattgtgttagtcctacagcagtttgattttaatgtcgataaagccgtccaggccttcgtcgacggcagtgccattcaagtactaaaggagtggaacatgaccggcaaaaaaaagaacaacaagcggaaaagaagtaaatctaagcagcatcagggtaacaaagacgccaaggataaggtcgaacggcccgaagccggaccactgcagccccaaccccctcagattcagaacggcccgatgaatgggtgcgagaaggacagtagcagcacggattcagcaaatgagaaaccagcccttatcccgagagagaagaagattagcatcctcgaagagccatctaaagctctgagaggggtgacagaagggaacaggctcctctag

SEQ ID NO: 206836 - DNA, 423 bp, synthetic construct
  misc_feature 1..423: note = Description of Artificial Sequence: Synthetic coding sequence
  source 1..423: mol_type = other DNA
atggccgagctgaacacccacgtgaacgtgaaggagaagatctacgctgtcaggagtgtggtgcccaacaagagtaataacgaaatcgtgctggtcctccagcagtttgatttcaatgtggacaaggccgtccaggcattcgttgatggttcagcgattcaagtgcttaaggaatggaatatgacgggtaagaagaagaataataaacggaagcgctccaagagtaaacagcatcagggaaataaggacgccaaagacaaggtggagaggcctgaagccggacctctccaaccccagccaccgcagatccagaacggccccatgaatggttgtgaaaaagattcatcgtccacggacagcgccaatgaaaagccagcactgatcccccgtgagaagaagattagcattttggaggaaccatag

SEQ ID NO: 206837 - DNA, 42 bp, synthetic construct; identical to SEQ ID NO: 100643
  misc_feature 1..42: note = Description of Artificial Sequence: Synthetic coding sequence
  source 1..42: mol_type = other DNA

SEQ ID NO: 206838 - DNA, 285 bp, synthetic construct
  misc_feature 1..285: note = Description of Artificial Sequence: Synthetic coding sequence
  source 1..285: mol_type = other DNA
atggccgagctgaacacccacgtgaacgtgaaggagaagatctacgctgtgcgttccgtggtgcctaataaatcaaataacgagattgtgttggtactgcagcagtttgacttcaacgtcgacaaggccgtgcaggctttcgtagacgggtccgctatccaggtgttgaaggagtggaacatgacgggaaaaaagaaaaacaacaagaggaagcgctcaaagtctaagcagcaccagggtaacaaagacgcgaaggacaaagtggaacgtcctgaggctgggtag

SEQ ID NO: 206839 - DNA, 348 bp, synthetic construct
  misc_feature 1..348: note = Description of Artificial Sequence: Synthetic coding sequence
  source 1..348: mol_type = other DNA
atggccgagctgaacacccacgtgaacgtgaaggagaagatctacgcagttagaagcgtggtccccaataagagcaacaatgagattgtgctcgtgctccagcagttcgacttcaacgtcgacaaagccgtccaggcgtttgtggatggctcggctatacaggttctaaaagagtggaacatgaccggcaaaaaaaaaaataacaaacgcaagaggtctaagtctaagcagcatcagggtaacaaggatgccaaggataaagtggagcgccctgaagccggtccgctgcaaccccagccaccccagattcagaacggcccaatgaatgggtgcgagaaggattcctag

SEQ ID NO: 206840 - DNA, 72 bp, synthetic construct
  misc_feature 1..72: note = Description of Artificial Sequence: Synthetic coding sequence
  source 1..72: mol_type = other DNA
atggccgagctgaacacccacgtgaacgtgaaggagaagatctacgccgtgcggagcgtggtcccaaactag

SEQ ID NO: 206841 - DNA, 522 bp, synthetic construct
  misc_feature 1..522: note = Description of Artificial Sequence: Synthetic coding sequence
  source 1..522: mol_type = other DNA
atggccgagctgaacacccacgtgaacgtgaaggagaagatctacgccgtgcggtctgtcgttccaaacaaatccaacaacgaaattgttctggtcctccagcagttcgactttaatgttgacaaagcagtgcaggctttcgtggacggatccgcgatccaggtcctgaaggagtggaacatgactggtaaaaaaaagaataacaagcggaaaaggagcaaatctaagcagcatcagggtaacaaagacgccaaggacaaagtcgaaaggccagaagccggccctctgcagcctcaaccacctcagatccagaacgggcctatgaacgggtgcgagaaagacagttcgtcaacggactctgctaacgagaaacctgctttgattccacgggagaagaaaattagcattctggaggaaccgagcaaggctctgagaggggtgacaggccccaatatcgaaaagtccgtaaaagaccttcagcggtgcactgtgtctctcacgcggtaccgggtgatgatttag

SEQ ID NO: 206842 - DNA, 1677 bp, synthetic construct
  misc_feature 1..1677: note = Description of Artificial Sequence: Synthetic coding sequence
  source 1..1677: mol_type = other DNA
atggccgagctgaacacccacgtgaacgtgaaggagaagatctacgctgtgcggtcggtggtccccaacaagtcgaataatgagatcgtgttggtcctccagcaattcgatttcaacgttgataaggccgtacaggcatttgtagacggcagtgccattcaggtacttaaagaatggaacatgactgggaagaaaaaaaacaataagcgcaagagaagcaagtccaagcaacatcagggtaacaaagacgccaaggacaaagttgaaagaccagaagctgggccacttcagccccagcccccccaaatccagaacggacctatgaacggctgtgagaaagattccagcagtaccgactctgctaatgagaagcccgccctcattcccagggaaaaaaaaatctcaatcctggaggagcctagcaaggcattacggggcgtgactgaaggcaaccgtctactgcagcaaaagctatcactggacggaaacccaaagcctatacacgggacaactgaacggtccgatggcctccagtggtccgcggaacaaccctgtaacccaagtaaacctaaagcgaagacctctccagtcaaatccaatacgcctgccgcccatttggaaatcaaaccagatgaattggcaaagaaacggggccctaacattgagaaaagcgtgaaggacctgcaacggtgtacagtctctctcacacggtaccgagtgatgatcaaagaggaggtggactcgtcggtgaagaagatcaaggcagccttcgctgagttgcataattgcattatcgataaggaggtgtcattaatggctgagatggataaagttaaagaggaggccatggaaatcctcacagctcgtcagaaaaaggctgaagagctgaagcgcctgacagacctagcaagtcaaatggctgagatgcagttggccgaacttagagcagaaatcaaacatttcgttagtgaacgaaaatacgacgaagagctggggaaggccgctcggtttagctgcgatattgaacagcttaaggcgcagataatgctttgcggcgaaatcacccaccccaaaaacaattacagtagtcgtactccttgttccagcctcttgccccttcttaatgcacacgccgctacaagcggtaaacagtccaactttagccgcaagagtagcacacataacaagccgtctgaaggcaaggccgcaaaccctaaaatggtctctagtctgcctagcaccgccgacccttcacaccagacaatgccagccaataagcagaacggttcatctaaccagcggcggagatttaatcctcagtatcataacaatcggcttaacggacctgccaagagccaggggagcgggaatgaggcagaaccactggggaagggaaatagtaggcacgagcacagacgtcagccccacaacgggtttcgcccaaaaaacaagggcggcgcgaagaaccaagaagccagcctggggatgaaaacaccggaggcgcccgctcactctgagaaacctcggcggcgacagcacgcagccgacacatccgaggcaagacccttccgtgggtctgtggggcgcgtgtcccagtgcaatctgtgccctacccggatcgaggtaagtacggacgccgcggttctgagcgtgccagccgtgactcttgtggcatag

SEQ ID NO: 206843 - DNA, 567 bp, synthetic construct
  misc_feature 1..567: note = Description of Artificial Sequence: Synthetic coding sequence
  source 1..567: mol_type = other DNA
atggccgagctgaacacccacgtgaacgtgaaggagaagatctacgctgtgagatctgtcgtacctaataaaagcaacaatgagatagtgctcgtcctgcagcagttcgacttcaacgtggataaggccgtgcaggcgttcgtcgatggctctgcaatccaagtacttaaggaatggaacatgacggggaaaaagaaaaataacaagcgcaaacgatctaaaagcaaacagcaccaaggcaataaagatgccaaagataaagttgaacgaccagaggccgggccccttcagccgcagccacctcaaatccagaacggccccatgaatggttgtgagaaagattcctcgagcacggactccgcgaacgagaagcctgctctcatccccagagagaaaaagatctccatcctggaagagccctcaaaggcgttgcgtggtgtgaccgaaggcaataggctgcttcagcagaagctctctctggatggaaaccctaaacccatccacgggactacagaaaggagtgacgggctgcagtggtccgctgaacagccgtgtaacccgtcgtag

SEQ ID NO: 206844 - DNA, 909 bp, synthetic construct
  misc_feature 1..909: note = Description of Artificial Sequence: Synthetic coding sequence
  source 1..909: mol_type = other DNA
atggagcccggccccgacggccccgccgccagcggccccgccgccatcagggaaggatggttccgtgagacctgctcactatggcctgggcaggccctcagcttgcaggtggaacagttacttcatcaccgccggtcacgttatcaagatattctcgtatttcggtccaagacctatggcaacgtcctcgtcctggacggcgtgattcagtgcacagagcgtgacgaattcagctatcaggagatgatcgccaatctgcccctgtgcagccaccccaatccacgaaaggtactcatcatcggaggtggggatggaggcgtgctcagggaagtggtcaaacatccctctgtggagagcgtcgtccaatgcgagattgacgaagatgtgatccaggtctcaaagaagtttctgcccggcatggctataggctatagctcaagcaagctaacattgcacgtcggggatggttttgagtttatgaagcaaaatcaggatgccttcgatgttatcattaccgattcttccgacccaatgggtcccgccgagagtctgttcaaggaatcctattatcagttgatgaaaacagccctcaaagaagatggggtactctgctgtcagggagagtgccaatggctgcatttagacctgatcaaggagatgcgtcagttttgccaaagcctgttcccggtcgtggcctacgcctactgcaccatccctacctaccctagtggtcagatcggttttatgctttgctccaagaatccttccacaaacttccaggaacctgtgcaacctctaacacagcagcaggtcgctcagatgcagcttaaatattacaattccgacgttcatagggccgcattcgtattgccagagtttgcacggaaggcgttgaacgatgtcagctag

SEQ ID NO: 206845 - DNA, 600 bp, synthetic construct
  misc_feature 1..600: note = Description of Artificial Sequence: Synthetic coding sequence
  source 1..600: mol_type = other DNA
gaggagccccccccccccaccgtgcaggtgcagggccccggcccccaacgcgaggagaaacagaaaactaagatggcaaaattcgtcatccggcccgctaccgccgctgattgctccgatatcttacgcctcattaaggagctggccaaatacgaatacatggaagaacaggtgatcctcaccgagaaggatcttctggaagacggattcggggagcaccccttttatcattgcctggtggcagaagttccaaaggaacactggacgcctgagggaaatccatccccatttcctgaggcccgggaaaccaaatgttactactttacttatgatccctggatcgggaaattgctctaccttgaggatttcttcgtcatgagcgattacaggggactgtggcatcggatcaggaactccgaggaaagtaaaccgggctgtaatgaagtgtctctggctgcttgcacctcttgggctgagtggaacgaaccaagcatcaacttctacaagcggcggggtgcctccgacttgtcttctgaagaggggtggaggctatttaaaatagacaaggaatacttactgaagatggccactgaggaatag

SEQ ID NO: 206846 - DNA, 453 bp, synthetic construct
  misc_feature 1..453: note = Description of Artificial Sequence: Synthetic coding sequence
  source 1..453: mol_type = other DNA
atggccaagttcgtgatccggcccgccaccgccgccgactgcagcgatatcctccggctgataaaagagcttgcaaaatacgaatatatggaggaacaggtaatcctgaccgaaaagggcaacagtaccgtcgccgggcggggcacctctgtccgatgtctgagcccctccccgcggccgttacctcccctgctgcccctgctcgccgacttgttggaagacgggttcggagagcatccattctatcattgtctggtggccgaagtgccaaaagagcactggactccagaaggaaacccatccccgttccccgaagctagagaaaccaagtgttacgtgcgtagcagcgtgggatgtgtcgagcctctgacaacccaggccgaggtgactgagaacttggataggaagaatagccagcaggttttcaaactgctcaggaagaagaaaaactag

SEQ ID NO: 206847 - DNA, 363 bp, synthetic construct
  misc_feature 1..363: note = Description of Artificial Sequence: Synthetic coding sequence
  source 1..363: mol_type = other DNA
atggccaagttcgtgatccggcccgccaccgccgccgactgcagcgacatcctgagactgatcaaagaactcgctaagtacgagtacatggaagagcaggtgatacttactgaaaaggatctgctcgaggacggatttggagagcatcctttctaccattgtctggtggccgaggtgcccaaagaacactggacccccgagggcaacccgagccctttcccagaggcccgcgagactaagtgctacgtgcgctcatctgttggatgcgtggaacctcttacaacgcaagcggaggtgacagagaacttggataggaagaatagccagcaggtttttaagctgctgcgcaagaagaaaaactag

SEQ ID NO: 206848 - DNA, 432 bp, synthetic construct
  misc_feature 1..432: note = Description of Artificial Sequence: Synthetic coding sequence
  source 1..432: mol_type = other DNA
atggccaagttcgtgatccggcccgccaccgccgccgactgcagcgacattctaagactaatcaaggagttagccaaatatgaatacatggaggagcaagtgatattaacagaaaagggccactctattgttggatttgctatgtactactttacttatgacccttggatcggcaaactcctctaccttgaggacttttttgtcatgtcagactataggggctttggtattggcagcgaaatcctgaagaaccttagccaagttgctatgcggtgcagatgctctagcatgcattttctcgtcgcggaatggaacgaaccttctatcaatttctataaaaggcggggggccagtgacttgagcagcgaagaagggtggcggctgtttaagattgataaggagtatctcctcaagatggccaccgaagagtag

SEQ ID NO: 206849 - DNA, 516 bp, synthetic construct
  misc_feature 1..516: note = Description of Artificial Sequence: Synthetic coding sequence
  source 1..516: mol_type = other DNA
atggccaagttcgtgatccggcccgccaccgccgccgactgcagcgacattctccgtctgattaaagagctggctaagtacgaatacatggaggaacaggtaatactcaccgagaaggatcttctcgaggacggatttggcgagcatcctttttaccattgtctcgtggccgaggtccccaaggagcactggaccccagaggggcactcgatagtgggctttgcgatgtattattttacctatgacccctggatcggtaaattgctgtatctagaggacttcttcgtgatgtccgattacaggggcttcggaatcgggtcagagatcctgaagaacctgagccaagttgcaatgcgttgccgttgcagctccatgcacttcctggtcgccgagtggaatgagccctcaataaatttctataaaaggcgcggtgctagtgacctgtctagcgaggagggctggcgcttgtttaaaatcgacaaagaatacctgctcaaaatggccacggaagagtag

SEQ ID NO: 206850 - DNA, 513 bp, synthetic construct
  misc_feature 1..513: note = Description of Artificial Sequence: Synthetic coding sequence
  source 1..513: mol_type = other DNA
atggccagcgtgcggatccgggaggccaaggagggcgactgcggcgatatcctcaggcttatccgcgagctagccgagttcgagaagctgtctgaccaagtgaagatctcggaagaagccctcagggccgacggattcggtgacaaccctttctaccattgcctggtagccgagatcctgcccgctcccggaaaactgcttggaccctgtgtcgtgggatacgggatttactacttcatatactctacctggaaaggaagaactatttacttagaagacatctacgtaatgcctgaatacagaggccagggcattggcagtaagatcataaaaaaagtagcggaggtggccctggacaaaggctgcagccagttcaggctcgcagtcctggactggaatcagcgtgccatggacttgtacaaggccctaggagcacaggatctcacagaggccgagggctggcacttcttctgttttcaaggcgaggcaactcgcaagcttgccggaaaatag

SEQ ID NO: 206851 - DNA, 750 bp, synthetic construct
  misc_feature 1..750: note = Description of Artificial Sequence: Synthetic coding sequence
  source 1..750: mol_type = other DNA
atgcccggccagcggatcgccagcctggcctacagcctgctgccctatggtgcggggattcccgcccccctaacgagacctcggcttccacgccgcccaccgagactgccccctccgcggagtctgagactctttcgcatccaggtgcggcgcccttttaaagggagtagctgtagactgaggggcccaggcaccctggtccccgactcaggggaccctgacggatttcgggcagatcccagaggacaggggggtcgcctctggaggtacccggaggcagacagcggcgaggactgccgccctgagctcgcggaatttgagaaattgtcagatcaagtgaagatctcagaggaagcactgagagccgacggcttcggcgataatcctttttatcactgtctcgtagcagaaattctgcccgctcccgggaaactgcttggcccctgcgtggtaggatatggaatctactacttcatttactcaacgtggaaaggccgaacaatttaccttgaagacatttatgtcatgccagagtatcgggggcaagggatcggctcaaagataataaagaaagtcgccgaagtcgccctcgacaaaggctgcagtcaattcaggctcgcagtattggactggaatcagcgggcgatggatctgtacaaagctctcggcgcccaggacctgaccgaggccgagggatggcactttttttgcttccagggggaggccacccgaaagctagcagggaagtag

SEQ ID NO: 206852 - DNA, 942 bp, synthetic construct
  misc_feature 1..942: note = Description of Artificial Sequence: Synthetic coding sequence
  source 1..942: mol_type = other DNA
atggccgccgcccggcacagcaccctggacttcatgctgggcgccaaggcagatggtgagacgatcttgaaagggctgcagagtatctttcaggaacagggcatggcggagtccgtgcacacatggcaagatcacggatacttagctacatacactaataaaaacggacgcctgccccccatcgtccgggggggtgctattgaccggtattggccaaccgcagacggccgcctggtcgagtatgatattgacgaggttgtgtatgacgaggactctccataccaaaacattaaaatcttgcacagtaagcagttcgggaacattctcatcctgtctggtgacgttaaccttgcggaatctgacctcgcctatacccgcgcgataatgggctctgggaaggaggactacactggcaaggatgttctgatccttggtggaggagacggaggcatactgtgcgagatcgttaagctgaagccaaaaatggtgacaatggtggaaattgaccaaatggtaattgatggctgcaagaagtatatgcgcaaaacttgtggtgatgtgctggataacttgaaaggcgattgttatcaggtgctgatagaggattgtattcctgtgctgaagcggtatgcaaaggaagggagagaatttgattatgtgatcaatgacctcactgcggttcctattagcacctcacccgaggaggattctacgtgggaatttttgaggctcattctggacctcagcatgaaggtgctgaagcaggacggcaaatacttcactcagggaaactgtgtgaacctgactgaggctctgagcctgtacgaggagcagctgggaagactttattgtccagtcgagtttagcaaggagattgtgtgcgtcccatcttatctggagttgtgggtgttttacaccgtttggaaaaaagccaagccatag

SEQ ID NO: 206853 - DNA, 1101 bp, synthetic construct
  misc_feature 1..1101: note = Description of Artificial Sequence: Synthetic coding sequence
  source 1..1101: mol_type = other DNA
atggccgccgcccggcacagcaccctggacttcatgctgggcgccaaagcggatggtgaaaccatcctcaaagggttacagagcatttttcaggaacaggggatggcggaaagcgtacacacttggcaagatcatgggtacctggcaacctacacaaacaaaaacggatcatttgccaaccttaggatttacccacatggattggttctcctggacctacagtcatatgacggggatgctcagggaaaggaagagatcgactcaattctaaacaaggttgaggagcgcatgaaggaactgtctcaggactcaacagggcgagtgaaaagactaccacccatcgtgaggggcggggccattgacaggtattggccaacagctgatggcagactcgtggagtatgatatcgacgaagtcgtctacgacgaggacagcccttaccagaacattaagatactgcactccaagcaatttgggaacatcctgatactcagtggggatgtgaatctggcagaatcggacctggcctacactcgggccatcatgggcagcggcaaggaagattacaccggcaaggatgtgctcattctcggggggggcgacggtgggatactctgcgaaatagtgaagctgaagccaaaaatggtgactatggttgagattgatcagatggttatcgatgggtgtaaaaagtatatgcgaaaaacctgtggcgacgtattggacaacctcaaaggcgattgctaccaggtcctcattgaggactgtatccctgtactgaaacggtacgctaaggagggaagagagtttgactatgttattaatgacctaaccgctgtccccatcagcacatcgcccgaagaggactccacctgggagtttctgcgactgattctggacctcagcatgaaggtcctgaagcaagatgggaagtattttacgcagggaaactgtgtaaacctgactgaagcattgagtctgtacgaggagcagctgggtagactgtattgccctgtcgagttcagcaaagaaattgtgtgtgtcccttcatatctggagttgtgggtcttctacacggtatggaaaaaggctaaaccttag

SEQ ID NO: 206854 - DNA, 828 bp, synthetic construct
  misc_feature 1..828: note = Description of Artificial Sequence: Synthetic coding sequence
  source 1..828: mol_type = other DNA
atgaaggagctgagccaggacagcaccggccgggtgaagcggctgccaccaattgtaaggggcggggctatcgacaggtattggccaacagcggacggcaggctagtggaatatgacatcgatgaagtcgtgtacgacgaggattccccttaccagaacattaaaatccttcattccaagcaattcggcaacatcctcattttatccggtgacgtaaatctcgctgagtcggaccttgcctatacccgggcaatcatgggatcagggaaggaggactacacaggaaaggatgtgctcatacttggcggcggggacggcgggatcctgtgcgagatcgtcaagctgaaacccaaaatggtaactatggtggagatcgatcagatggtaatagatgggtgtaaaaagtacatgcgcaagacctgcggcgatgtgctggacaatttgaaaggggactgctatcaggttctgatcgaggattgcatcccggtgttgaaacgctatgccaaagagggaagggagtttgactatgttattaatgacctcaccgcagttcctatttcaactagcccggaggaagacagcacttgggagttcctgaggttgatactggacttgtcaatgaaggttctgaagcaggatggaaagtacttcactcaggggaattgtgtgaacttaacggaagcactgagtctctatgaagaacagctggggagactttactgcccagtggagttttccaaggagatcgtctgtgtgcctagttacttagaacttttcctcctgcaattctggcgtgtccggtcgagcaaatgtgcactggagggatag

SEQ ID NO: 206855 - DNA, 936 bp, synthetic construct
  misc_feature 1..936: note = Description of Artificial Sequence: Synthetic coding sequence
  source 1..936: mol_type = other DNA
tgaggcggccgggccgaggccgccctgctgctggccccccggagcgtgccagcagcggcacgcggactccaggggcagtcccgagtacctgcaggcagggcagccctaccaggtcctggccgaccccccgctcttccaagaggcctcgccgcattcgccctaccactgggggagtcccccgggtgcagagcccgcgccgaccctccgtgggacgaaggctgtagagactgtggaggtgctaggcgtgatccccgaggcgagcccggcctcggtgcttgtgctgagcgcggctgtcccagagatttatttctgtttcttcaggcagctgatggggaaaccattctgaaggggctgcagtctatattccaagagcagggtatggccgagagtgtccatacttggcaggaccacgggtacctcgccacttacactaataaaaatggatcatttgctaaccttcggatctatcctcatggtctagtgctactcgacctacaatcctatgatggcgacgcccaaggaaaggaggaaatcgactccatccttaacaaagtggaagagcggatgaaagagttgagtcaagactcaaccgggcgggtcaagcgcttgccgccaattgttcgagggggggccattgaccgatactggccaacggcagatgggcgtctggtggagtatgatatcgacgaagtcgtgtacgatgaggattccccttaccagaatataaagattctgcatagcaagcagtttggaaacatattaatcttatccggcgatgtcaacctggccgaaagcgaccttgcctatactagggccatcatggggtctgggaaggaggattacaccggcaaagacgttctaatacttggcggaggggacgggggaatactctgcgaaatcgtaaaattgaagccaaaaatggtgaccatggtttag

SEQ ID NO: 206856 - DNA, 3801 bp, synthetic construct
  misc_feature 1..3801: note = Description of Artificial Sequence: Synthetic coding sequence
  source 1..3801: mol_type = other DNA
cgggaggccaccccccccctgcggggcctgcccgcccccccccggcacgcgcccttccctgctggtagatttgaaccacctaggaccaaacaaggtggccgcggcagccatacaccttgggtttacgtgatcaatgatctgggcatagaagagaaccttaaaaacgacgggaaacctaaatgtcaaacaggcggcaagagcaagagaaccatccagggcacacacaaaacaactaagcagcagagcactgccgtagactgtaagatcaccagctcaaccacaggggataaacattttgataaatctccaactaagacaaggcacccccgcaagattgatcttagagcccgatactgggccttccttttcgataacctgaggcgagctgtggatgaaatctatgtaacctgtgagagcgatcaatcagtcgtggaatgcaaggaagtgttgatgatgttggataactatgtcagagatttcaaggccttgatcgactggatacagcttcaagagaaacttgaaaaaacagacgcccagtctcgcccaacatccctggcttgggaagtcaagaagatgtcccccggccggcacgtgattcctagtccatccactgatcggatcaatgtgacatccaacgccagaagatccttgaacttcggtggctcgaccggtacagtacctgctccccgcttggcccctaccggcgttagctgggctgacaaagtgaaagctcatcacacaggctccaccgcatcatctgaaattactcccgcgcaatcatgtccacctatgactgtgcaaaaggcatcacgcaagaatgagcgaaaggacgcagaaggctgggagactgtacagaggggcagaccaatacgcagccgcagcactgccgtgatgcctaaagtgagcctagccaccgaagctactcggtccaaagacgactccgacaaggagaacgtctgcctcctcccagacgaaagtatacagaagggccagtttgtgggtgatggcacaagtaatacgatagagagtcatccaaaggattctctccattcctgtgatcaccccctggcagagaaaactcagtttacagtttccactttagacgatgtaaagaacagcggcagcatccgagataactatgtgagaacctctgaaatttccgcggttcatatcgacactgagtgtgtgtccgttatgctgcaggccggaacaccacctctacaagtgaatgaggagaaattccctgccgagaaggcacggattgaaaacgaaatggatccgtccgatattagcaacgtgagcgctgcaaatctcagtatggctgaagtgctcgccaagaaagaagagctggcggacaggttggagaaggcaaacgaggaggccatcgccagcgccatcgcagaggaagagcaactgacaagagagatcgaggccgaggaaaacaacgatatcaacatcgagactgacaatgactcagatttcagcgcctccatgggcagcggctcggtaagtttttgcggtatgtcaatggactggaacgatgttctagctgactacgaagccagggaatcctggcggcagaatacttcttggggcgacattgttgaagaagagcccgctcgaccacccgggcatggtattcacatgcatgagaagttgtcttcaccgagccgcaagcgcacgatcgcggagagcaaaaaaaagcatgaggagaagcaaatgaaggcccaacagctgagagagaagctgcgtgaggagaagacactgaagctccagaaacttttggaacgggagaaggacgtgagaaagtggaaggaggagctgctggaccagagaagacgcatgatggaggagaagctcttacatgctgaatttaaacgggaagttcaactccaggccatcgtaaaaaaggcccaggaggaggaggctaaggtgaacgagatagcctttattaacactctcgaagctcagaataaaagacacgatgttctcagcaagctgaaggaatatgaacagaggttaaatgaattacaggaggaaaggcaaagacggcaggaggaaaagcaagctagagacgaggccgtccaagagcgcaagagggcgctggaggcagaacgtcaagctagggtcgaagaactgctcatgaaaaggaaggagcaagaggcccgcattgaacagcaaagacaggaaaaggagaaggctcgtgaggatgccgcaagagaacgtgcacgtgacagagaggagcggctcgctgccctgaccgcagctcagcaagaggccatggaggaactccagaagaagatccagttgaaacatgatgagagcattagaaggcacatggaacaaatagagcagcggaaggagaaggcggcggagctgtctagcgggaggcacgcaaataccgattacgccccaaagctgaccccttatgagagaaagaagcagtgtagcctgtgtaatgtcttaatatctagcgaagtctacctgttcagccacgtgaaagggcgcaagcaccagcaagccgtgagagagaatacctcaattcaaggccgggagctgtctgatgaggaggtggagcatcttagccttaaaaagtatatcatcgatattgtggtcgagagcactgcgcccgcagaagcgttgaaagacggcgaggagaggcagaagaacaaaaaaaaagccaagaagataaaagctaggatgaatttcagggccaaggagtacgagtcccttatggagaccaaaaattctggaagcgactccccctacaaagctaaattgcaacgcctggccaaggatttactgaaacaggtccaggtccaggacagtgggagctgggcaaacaataaggtgagcgctctcgataggacactgggggaaatcactcgcatattggagaaggagaatgtggcagatcagattgcattccaggcggcaggcggtctcaccgccttagaacacatcctgcaggcggtagtgccagccacaaatgtaaatactgtgttgagaattcccccgaagagtctttgcaacgccattaacgtatataacctcacgtgtaacaactgctccgagaattgttcggatgtgctgtttagcaacaagattactttcctgatggacctcctgatccatcaactgacagtctacgttcctgatgaaaataatacgattctgggacggaacacgaacaagcaggtcttcgaggggctcactacaggacttctcaaagtgagtgctgtggtcctagggtgcctaattgctaatagaccagatggaaattgtcagcccgccacgccaaaaatccccactcaagaaatgaagaacaagccatcccagggcgacccatttaataacagggttcaggacctcatttcctacgtagtgaacatgggtctgattgacaaactttgtgcatgttttctgtctgtgcaggggcctgtcgatgaaaaccctaaaatggcgattttcctccagcatgcggcaggtctgctccacgcaatgtgtaccttatgcttcgccgtgacgggcagatcctattccatttttgacaataataggcaagatccgaccggtttgaccgccgcactgcaggccacggatctggctggggtactgcacatgctgtattgcgtgctctttcacgggacaatccttgaccctagcactgccagccccaaggagaattatacacagaataccatccaagtcgcgatccagtccctgagatttttcaactccttcgcagccctgcacctgcccgcctttcaggtgccttcgatcggcctgtacaggtgctag

SEQ ID NO: 206857 - DNA, 4203 bp, synthetic construct
  misc_feature 1..4203: note = Description of Artificial Sequence: Synthetic coding sequence
  source 1..4203: mol_type = other DNA
atgatggccagcttccagcggagcaacagccacgacaaggtgcggcggatcgtcgccgaggagggccgcacagcccgaaatctcattgcttggagtgttcctctggagagtaaggacgacgacggaaagcccaaatgccagactggtggcaaatctaagcgcacgattcaaggcacacacaaaacaaccaaacagtccactgctgtagactgtaaaatcaccagcagtaccacgggggataagcactttgacaaatcgcccaccaagacccgacacccaagaaagatcgacctgagggccaggtactgggcgtttctgtttgacaacctgcggagggccgtggacgagatatacgtcacttgcgaatccgaccagagcgttgtggaatgcaaggaggtgttgatgatgctggataattatgtccgcgatttcaaagcactgatagactggatccagctgcaagagaagttggagaaaacagatgctcaaagcagacccacctcgctcgcctgggaggtgaagaagatgtctcccggccgccatgtcatcccttctcccagcactgatcgcattaacgtaacttctaatgctcgtagaagtctcaacttcggtggctcgaccggaacagtgcctgcaccacgccttgcacctaccggagtgtcttgggctgacaaagtgaaagcccaccacactggctcgacagcgagttccgaaatcacaccagcgcagagctgccctccaatgacggtccagaaggcctcacgcaaaaacgagagaaaggacgctgagggatgggaaaccgtacaacgggggaggcccatccggagtcgctcaacggcagtgatgcccaaagtgagcctcgctacagaggctaccagaagcaaagacgactcagataaagagaacgtgtgcctcctgccggacgaatccatccagaaaggtcagttcgtcggcgacggcacctcaaacactattgagtcacatcccaaggactccctccactcctgtgatcatcctttggcggagaaaactcagtttaccgtaagcaccttggatgatgtcaagaactcaggaagcattagagacaactatgttcgcactagcgaaatttccgccgtccatatcgatacagagtgcgtgagtgtgatgctccaggcagggaccccacccctgcaagtaaatgaggaaaaattccccgccgaaaaggcaagaatcgagaacgaaatggatccgtccgacatttctaacagcatggccgaagttctggcaaaaaaggaagagctggctgatcggctggaaaaagccaacgaagaggccattgcctctgccattgctgaagaagagcaacttacgagggagatagaggccgaagagaacaatgacataaatattgaaacggacaacgattcagacttcagtgcttcaatggggtcaggatctgtcagcttctgtggtatgagtatggactggaacgatgtgctggcagactatgaagctcgagaaagctggcggcagaacaccagttggggggacatagtagaggaggaaccagcacgacctccgggtcacggcatccacatgcacgagaagctgtcctccccctctaggaagcgcaccatcgccgagagtaaaaagaagcacgaagagaaacaaatgaaggcccaacaactccgagaaaagctacgcgaggagaagactcttaagttacaaaagctgctcgagcgcgagaaggacgtgagaaaatggaaggaggaactgctggatcagcggagacggatgatggaggagaagctcctccatgccgaatttaaaagggaggtccaactgcaagcgattgtgaaaaaggcacaggaggaagaagcaaaggtaaacgaaatcgcctttatcaatacactggaggcgcaaaataagaggcacgacgttctctctaagttgaaggaatatgagcagcggttgaatgaactccaggaggaacgccaaaggaggcaggaggaaaagcaggcacgagatgaagcagtgcaggaacggaagagggcactggaggccgagcggcaggccagggtggaggagctcctcatgaaacgaaaagagcaggaagcgcgcatcgaacagcaacgtcaggagaaggaaaaagccagagaggacgctgccagagagagagctcgtgatagggaagaacggttagccgctctgaccgcagctcagcaggaagctatggaggaacttcaaaaaaaaatccagttaaagcacgatgagagcatcaggaggcatatggaacaaatcgagcagaggaaagagaaggcagccgagttgagcagcgggagacacgccaacacggactatgcgcccaaactgacaccctatgagcggaagaagcaatgttccctgtgcaatgtattgatttcatcagaggtctatctcttttcccacgtcaagggcaggaagcatcagcaagctgttcgcgaaaacacttccatccagggtcgtgagctgagcgatgaggaggtcgaacacctatctttgaaaaagtatattattgacatcgtggtcgagtcaactgccccagctgaggctctgaaggacggagaggagcgccagaaaaataaaaaaaaggctaagaagatcaaagcgcggatgaacttccgtgcaaaagagtacgagtccctgatggaaaccaagaactcggggagcgattcgccttacaaggccaagttacagaggctggctaaagatttactaaaacaggtccaggtgcaggattctggatcctgggcaaataataaagtcagcgccttagatcggacgctgggtgaaataacaagaatcctggagaaggagaatgtggcagaccaaatcgccttccaagccgctggcggcctaactgccctggagcacattctgcaggccgttgtgcctgctacaaacgtcaacaccgtgctgcgcatccctccaaaaagtctgtgcaatgcgataaatgtctacaacttgacgtgtaataactgtagtgagaactgctccgacgtgttgttctcgaacaagatcacatttttgatggacctcctcattcaccaactgacagtgtacgtgcctgacgaaaacaacacgattctcggccggaacacaaacaagcaagtctttgaggggttgaccaccggcctactgaaggtaagcgctgtcgtcctgggctgcctgatcgccaatagacctgacggtaactgccaacccgcaacccctaaaatccccacccaggagatgaagaataaaccatcccagggcgatccctttaataaccgagtccaggatctcatctcatacgtggtgaacatgggcttgattgataaactctgtgcctgctttttatcagttcagggcccggtggacgagaacccgaaaatggctatctttttgcaacatgccgccggactgctgcatgcaatgtgcaccctctgtttcgcagttacaggaaggtcatactctatcttcgacaacaatcgtcaagatcctaccggcctgacagctgccttgcaggcgacagacctggcaggtgtgctgcacatgctctattgtgtactattccacggcacaatcctggacccttccaccgcctcaccaaaagaaaattatactcagaataccatccaggttgccattcaatccctccgcttttttaatagttttgccgctctgcacttaccagccttccagagtatcgtcggtgctgagggcctgtctttggcctttcggcacatggcctcctctctgctggggcactgctcacaggttagctgtgagtccctacttcatgaggtgattgtgtgcgtgggctatttcactgttaatcaccctgacaatcaagtgatcgtacagtctgggcgacaccccacagtgctgcagaaactctgccaacttccatttcagtatttctctgacccacgcttgatcaaagtactgtttcctagcctgattgcggcgtgctacaacaatcaccaaaacaagattatcctggaacaagaaatgagttgcgttttattggccacctttattcaggacctcgcccaaacaccaggccaggcagagaatcagccctatcagccaaagggcaaatgtctcggcagccaggactatctggaacttgccaacaggttccctcagcaggcctgggaggaggcaaggcagttctttctaaaaaaggagaagaagtag

SEQ ID NO: 206858 - DNA, 3465 bp, synthetic construct
  misc_feature 1..3465: note = Description of Artificial Sequence: Synthetic coding sequence
  source 1..3465: mol_type = other DNA
atgaagaccaagtacatcttctgcaacatcaccgagcggaaggacgccgaaggttgggaaacagtacagcggggccggcccattagatctcggtccaccgccgtgatgcccaaagtatcattagctaccgaggcgacccgcagcaaggatgactcagacaaagaaaatgtctgtttgctccccgatgaatccatccagaaaggacagttcgtgggcgacggtacatctaatacaatagaaagtcatcctaaggactcacttcactcatgcgatcatccacttgcagagaagacacagttcacagtatcaaccttggatgatgtgaaaaatagtggctcgattagagataactacgtccggacctccgagatctcagcagtgcatatcgatactgaatgtgtgtcagtgatgctgcaggctgggacccccccgctgcaggtcaatgaggaaaagttccccgctgagaaagctaggatcgaaaacgagatggatccctccgacattagcaattcaatggcagaagttctggccaagaaggaggagctagcagatcgtctggaaaaggcaaacgaagaagccatcgcgagtgctatcgccgaagaggagcagctgacaagagaaattgaggctgaggaaaataacgacatcaatattgagacagacaacgatagtgactttagtgcttccatgggaagcggtagcgtgagcttctgcgggatgagtatggattggaacgacgtcctggctgattacgaggcccgtgagtcttggaggcagaacacaagttggggggacatcgtggaagaagagccggcccgcccacccggccacggcatccacatgcacgagaaattgtcctcgccctcacggaagcgtacgattgccgaaagcaagaaaaagcatgaggaaaagcagatgaaggcacagcagctgcgggagaagctccgtgaagaaaagactcttaaactgcagaaacttttggaaagagagaaggatgttcggaagtggaaggaggaacttttagaccaaaggagacgcatgatggaagaaaagctattgcacgccgagtttaaaagggaagtgcaattacaggccattgttaagaaagctcaagaagaagaggctaaagtgaacgagatcgcttttatcaatactttggaagcacagaacaagagacacgacgttttatctaagctgaaagagtacgagcagaggctcaacgaacttcaggaggaaagacagcggcgtcaggaagagaagcaggcccgagatgaggcagttcaggagcgaaaaagggctctcgaggctgaacgacaggcccgggtggaggaactgctgatgaaacgaaaggaacaggaggcccgcatcgagcagcagagacaagaaaaggaaaaggctagggaggatgccgcgagggagagggctagggatagggaggagcggctggcggcgcttaccgcagcccaacaggaggctatggaggaactgcagaagaagatccagctgaaacacgatgagagtataagaaggcacatggagcagatcgaacagcgcaaggagaaggccgccgagctaagctccggccggcatgcaaacactgattacgcaccgaagcttacaccttacgaaaggaaaaaacagtgctccctgtgtaacgtcctgatttcttcagaggtatacttattttcacacgtgaagggccgcaaacatcaacaagcagtccgcgaaaacacgtcgatccagggtcgggaactctcagacgaagaggtggaacacctcagcttgaagaaatatataatcgatatcgtagtggagagcacagctcctgcagaggccctcaaggacggagaggagaggcagaaaaataaaaagaaggcaaagaaaatcaaagccaggatgaatttcagagctaaggagtacgagagtctgatggaaaccaagaactccggaagcgacagtccttataaggccaaactgcagcgattggcaaaagatttgttgaaacaggtacaggtgcaagatagtggatcctgggccaacaataaggtaagcgccctggacaggactttaggggaaatcacgagaattctcgagaaggagaacgtcgctgaccagatagcctttcaggccgcagggggacttacagctctcgaacacatcttgcaggccgtcgtgccagccactaatgtaaatacagtgctgcgcataccccctaaatccctgtgcaatgcaattaacgtgtacaacctaacttgcaacaattgtagcgagaactgttccgatgtgctgttcagcaataaaatcacttttttaatggacctccttattcaccaactcacggtgtatgttcctgatgagaacaatacgatactggggcgtaacactaataagcaggtttttgaaggactaacaactggactgctcaaggtgtcagccgtcgttctcgggtgtctgatcgctaaccggccggatggcaattgccagcccgcaacgcccaagatccccactcaggaaatgaaaaataagccctctcaaggagatccattcaacaatagggtccaggatctcatatcttacgtagtcaatatgggtttaattgataagctatgtgcatgcttccttagtgttcaaggaccagtcgacgagaacccaaaaatggccatctttctgcaacacgcagctggccttcttcatgctatgtgcacactgtgcttcgccgttacaggcaggagctatagcatcttcgacaacaacaggcaggaccccaccggcctcactgcagctctccaggccacagatctagctggggttttgcacatgttgtattgtgtgctatttcacgggactatactcgatccttctaccgcttcccccaaagaaaattacacacagaacactattcaggtcgcaatccaaagccttcgctttttcaacagttttgctgcactgcacctcccagcatttcagtcaatcgtgggcgccgagggcctctcgctggcattccgccatatggcctcctccctgttgggacactgctcacaagtttcctgcgagtccttactccacgaagtcattgtgtgcgtgggctatttcactgtaaatcacccggacaatcaggtaatcgttcaatctgggaggcacccaactgttttgcagaagctgtgtcagctgcccttccaatacttctcagacccccgactcattaaagtgctttttccatctctcattgccgcgtgctacaacaatcaccagaataaaattattctggagcaggagatgtcctgtgtactgctcgccacttttattcaggacctggcccagacaccaggccaggcagaaaaccagccctaccaaccgaagggtaagtgtctagggtctcaggactatctggaactcgctaataggttccctcagcaggcttgggaagaggcgagacagttctttctgaagaaagagaaaaaatag

SEQ ID NO: 206859 - DNA, 4203 bp, synthetic construct
  misc_feature 1..4203: note = Description of Artificial Sequence: Synthetic coding sequence
  source 1..4203: mol_type = other DNA
atgatggccagcttccagcggagcaacagccacgacaaggtgcggcgcatcgtggctgaggaagggcgtactgccagaaatctgatcgcatggtccgtgcctttagagtctaaggatgacgatggaaagccaaaatgccagacagggggtaaaagcaagcgaacaattcagggaacacataaaaccaccaaacagtcaaccgctgtggattgtaagattacttcaagtaccaccggggacaagcattttgacaaaagcccaacgaaaacccgtcaccctcgaaaaattgacttgagggcaagatattgggctttcctgttcgacaatctgcgccgagctgtagacgaaatctacgtcacatgtgaatccgaccagtccgtcgttgaatgcaaggaggtgttgatgatgctggataattatgtgcgggacttcaaagccctgatcgactggatccaacttcaggaaaagctcgagaaaaccgatgcgcagtccaggcccactagcctggcgtgggaggttaaaaagatgagccctgggagacacgtcatcccttctccttccacggataggatcaacgtgacctcgaacgccaggagatcactaaatttcggtggttccacgggaaccgtgcccgcaccccgccttgccccaaccggcgtctcgtgggcggacaaagtcaaggctcatcataccgggtcgactgcgtcctccgaaatcactcccgcacagtcatgtccccccatgacagtgcagaaggcatcacgcaaaaacgagcgtaaggacgcggaaggttgggagaccgtgcagcgtgggcggcctataagaagccgctcgactgctgtgatgcccaaagtgtctcttgccacagaggctacaagatctaaagatgactccgataaggaaaatgtgtgccttttgcctgacgagtccatccagaaagggcagtttgtgggagacggcaccagcaatacaatcgagtcccatccaaaggactcactgcatagttgcgatcacccgctggccgagaaaacgcagttcacagtttctactctggatgacgtaaaaaatagcggaagtatcagggataattacgtcaggaccagtgagatttccgcagtgcatattgatacagaatgtgtgtcggttatgctccaagcaggcacacctcccctgcaggtcaacgaagagaaattccctgcggaaaaggcccggattgagaacgaaatggatccaagcgatatttccaatagtatggccgaagttttggcaaaaaaagaggagttggccgatcgtcttgaaaaagccaatgaggaagcaatcgcatcggccatcgccgaagaagagcagctcacaagagagatcgaagctgaagaaaacaatgacattaatatcgaaactgacaacgatagcgactttagcgcttcaatgggtagcggtagcgttagtttttgtggaatgtctatggattggaatgatgtgctcgcagactacgaggctcgcgagagctggaggcaaaacaccagttggggcgatatcgttgaggaagaacccgccaggccacctggacacggcattcacatgcatgagaaactttcctccccatcacgcaaacgcaccattgcggaatcaaagaaaaagcatgaggagaagcagatgaaggcacagcaactgcgcgaaaaactcagggaggagaaaacactgaagctgcagaaattgctcgagcgtgagaaggacgtcagaaagtggaaagaggaactattagaccagcggagacgcatgatggaggagaagctcctccacgcggagtttaagcgagaggtccagctccaggcaattgtgaaaaaggcccaagaggaagaagctaaagttaacgagatcgcattcattaacacacttgaagcacagaacaaaagacatgacgtcctgtctaagctcaaagaatatgaacagcgattgaacgaactacaggaggagaggcaacggcgacaggaggaaaagcaggcccgggatgaagctgtgcaggaacgcaagcgggcgctggaggccgaaaggcaggccagagtcgaggagctgctaatgaagaggaaagagcaagaagcacgcatcgagcagcagcggcaggaaaaggaaaaagcaagggaggatgctgccagagaaagagcccgagatcgagaagaacgactcgccgctctaacagccgcgcagcaagaggccatggaggaactgcagaagaaaatacagcttaagcacgatgaatctatacgccggcacatggagcagattgagcagcgcaaagagaaagcggctgaattgtccagcggccgtcatgccaataccgactatgcacccaagctgacaccctacgaaagaaaaaagcagtgcagtttgtgcaatgtgctcatatcttctgaggtctatctgttcagccacgtgaagggccgcaagcatcagcaagcggttagggaaaatacctcaatccaggggcgggagctttccgatgaggaggtggagcatctgtctcttaaaaagtacattattgacatcgttgttgagtcaacggcacctgcagaagccctgaaggacggcgaggagcgtcagaaaaacaagaagaaagccaaaaagatcaaagcccgcatgaatttccgcgctaaggagtacgaatctctaatggagacgaaaaattctgggtctgatagtccatataaagcaaagctgcagagactggccaaggatctgctgaaacaagtgcaggtccaggactcaggctcgtgggccaacaataaagtgtcagccctagaccggaccctgggtgagatcacccgcattctcgagaaagagaatgtcgccgatcagattgcttttcaggcggccggcggtcttacggctctggagcacattcttcaagctgtcgttccagcaacaaacgtgaatacagtcctgcggattccaccaaagtccctgtgtaacgccatcaatgtgtataatttaacctgcaataactgctcggaaaactgtagtgacgtgctcttttctaataaaatcacttttttaatggaccttctgatacatcagttaaccgtttacgtcccagacgagaataacaccatactcgggcgcaataccaacaagcaggttttcgagggccttaccactggcctgctgaaggtgagcgccgttgtgctgggttgcctcatagctaaccgaccggatgggaattgccagcctgctacaccaaaaatccccacacaggaaatgaaaaataagccatctcagggtgaccctttcaataatagggtccaggacctgatcagttatgtcgtgaacatgggcctaatcgacaaactgtgtgcctgtttcctgtccgtacagggacccgtggacgagaatcctaagatggcaatattcctacagcatgctgccggcctgttgcacgccatgtgtactctatgctttgctgtgacaggtcggtcctacagcatctttgacaacaatcggcaagatccaacaggactcaccgctgccctgcaagcaaccgatttggcgggagtcctgcacatgctgtactgtgttctctttcatggcactatcctcgaccctagtacagcctctcccaaggagaactatacacaaaatactattcaagtcgccatccagtcacttaggttcttcaatagtttcgctgccttgcacctgcctgcgttccagagtatcgttggcgcagagggtctcagcctcgcatttcggcacatggcgtcaagtctgctggggcactgcagccaggtgagctgcgaaagtcttctgcacgaagtgatcgtctgtgtggggtattttacagtgaatcatccagataatcaggtaatcgtccagtccggcaggcacccaacggtcttgcagaagctatgtcagctgcctttccagtatttctcagatcctaggttgattaaggtgttatttcccagcctgatcgccgcgtgctacaacaaccatcagaataagatcattctggaacaggagatgagctgcgttctactagctacctttatccaagatctggcccagacaccaggccaggctgagaatcaaccataccagcccaagggaaagtgtctgggctcacaagactatctggaactagcgaaccgattcccgcagcaagcctgggaggaagctaggcagtttttcttaaagaaggagaaaaaatag

SEQ ID NO: 206860 - DNA, 1233 bp, synthetic construct
  misc_feature 1..1233: note = Description of Artificial Sequence: Synthetic coding sequence
  source 1..1233: mol_type = other DNA
atgcaccggaagcacctgcaggagatccccgacctgagcagcaacgtcgctacctcgttcacatgggggtgggattccagtaagaccagcgagcttctttctggtatgggggtctcagccttagagaaagaggaacctgactcagagaatataccacaggaactgctgtccaacctcggccacccagaatccccccccaggaaaaggctgaagtccaagggatcagataaggacttcgttattgtcaggcgtcccaagctgaatcgcgagaatttcccaggcgtcagctgggactcactccctgatgagttgctgctggggattttctcttgtttgtgcctccccgagttgttaaaagtcagtggagtgtgcaagcgctggtatcggctcgcctctgatgaaagcctgtggcagactctggacctgaccgggaaaaatctccatccagacgtgacgggcaggcttcttagtcagggggtgattgccttcaggtgcccgcgcagtttcatggatcaaccactggcagagcacttttcgcctttccgcgtgcagcatatggatctgtcaaattctgttattgaggtgtcaactctgcatggcatattaagccaatgttcaaagctgcagaacctgtcattggagggcctccgcctctccgatccgatcgtgaatacattggctaagaatagcaacctggtgcgcctcaatctgtcagggtgttctggatttagcgagttcgcgttgcaaacactcttgtcatcctgttcccgcctggatgagctgaacttgtcttggtgttttgacttcacagagaaacacgttcaggtggccgtcgcccacgtaagcgagacgatcacccagctgaacctgagtggctataggaaaaatttgcaaaagtccgacttgtccactttggttcgcaggtgtccgaatctcgtgcaccttgacctctctgacagtgtcatgctgaagaatgattgtttccaggagttctttcagttgaattacctacagcacctgtctctgtcccgctgttatgacatcatcccagaaaccctactgctggtgacccgggccggcgtgaggatacgcctggattcagacatcggttgtcctcagacctatagaacaagcaagctaaaaagcagccataaactgttctgtcagcacgttcgggtgatctgcatattcgtgtgtgatttctacttctacagactggtgttgaaacaatag

SEQ ID NO: 206861 - DNA, 1275 bp, synthetic construct
  misc_feature 1..1275: note = Description of Artificial Sequence: Synthetic coding sequence
  source 1..1275: mol_type = other DNA
atgcaccggaagcacctgcaggagatccccgacctgagcagcaacgtcgcgacaagttttacctggggctgggacagcagcaagacatctgaattgctcagtggaatgggggtttcagccttggaaaaggaggaacctgactctgaaaacatacctcaggaattactgagtaatctgggtcaccccgagtccccgccacgcaaacggttgaaatctaaaggaagtgataaagactttgtgatagtccgacgccctaagttaaaccgggagaatttcccaggagtgtcgtgggactcactgccagacgagcttctgctgggcatctttagctgcctctgcctgccggagctacttaaagtgagtggcgtgtgcaaaagatggtacaggttggctagcgacgagtctctgtggcagaccttggatttgactggtaagaaccttcatcctgacgtcaccggaagattattgtcacaaggggtcatcgcctttagatgtccaaggtcctttatggaccagcctttagccgagcatttctccccctttcgcgtgcagcacatggatctgtccaattccgttattgaggtcagtactcttcacggcattctttctcaatgctcaaaactgcagaacctcagtctggagggattaaggctcagtgaccctattgtgaatacactggccaagaatagcaacctcgtgagattgaatttatccggttgctccggattttccgaattcgccctgcagacattgctgtcctcttgtagcagattagatgaacttaatttgtcttggtgcttcgatttcaccgaaaagcacgttcaggtagctgtcgcacacgtgagtgagacaatcacacaacttaacttgtcgggataccggaagaatctccagaagtcagacctgagcacacttgtccgtaggtgccccaacctcgttcacctagatcttagcgattcagtgatgctcaagaacgactgctttcaggaatttttccagctaaattacctgcagcacctcagcctgtccagatgctacgacataatccctgagactctcctggagctcggagaaattcctactttaaaaaccctccaggtattcgggatcgttcctgatggcaccctgcagctcctgaaggaggcactcccccacctgcagataaattgttctcattttacaaccatcgctaggcccaccattggcaataaaaagaaccaagagatctggggaatcaagtgtcgcctgaccctgcagaagcccagctgcctgtag

SEQ ID NO: 206862 - DNA, 1173 bp, synthetic construct
  misc_feature 1..1173: note = Description of Artificial Sequence: Synthetic coding sequence
  source 1..1173: mol_type = other DNA
atgcaccggaagcacctgcaggagaaggaggagcccgacagcgagaacatcccacaggaactgctgtcgaatctggggcatcctgagagccctccaaggaaaagactcaagtctaaaggcagcgataaggacttcgtcatcgtgaggcgaccaaagctgaatagagagaactttcccggggtaagctgggattcccttcctgatgagttgctattaggcatcttttcttgtttatgtttgcccgagctgttgaaagtcagcggcgtgtgtaagcgctggtatagactagcatcagacgagagcctctggcagacgcttgaccttactggcaagaacttgcacccggatgttaccggtcggctgctgagccaaggggtcatagcgtttcggtgtcctaggtcattcatggatcagcccttggctgagcacttttcccccttcagggttcagcacatggacttgtctaattccgtcatcgaagtctccaccttgcacgggatcctctcacagtgcagcaagttgcagaatcttagtctggagggtttgaggctgagtgacccaattgtgaacaccctggctaagaactccaatttggtgagactcaacctttctggctgcagcgggttcagcgagttcgctttacagactttgttgtctagttgttccagacttgatgaactgaatctctcatggtgctttgatttcaccgaaaagcatgtccaggtcgccgtcgcacatgtgtcagagactataactcagcttaatctgagtgggtaccgcaagaatctgcagaagagtgatctcagcacccttgtaagaaggtgtcccaacctggtacatcttgacctctcagacagcgtaatgctgaaaaacgactgctttcaggagtttttccagctgaactatctgcagcatctgagcctctccagatgctacgacataatacccgaaaccctccttgaactaggcgaaatacctaccctcaagaccttgcaggtgtttggtattgttcctgacgggaccctgcagctcctgaaggaggcactgccacacctgcagatcaactgtagtcacttcaccacaatcgccagacccaccattggaaacaagaagaatcaggagatatggggaatcaagtgtcgattgactctacagaaacccagttgtttatag

SEQ ID NO: 206863 - DNA, 633 bp, synthetic construct
  misc_feature 1..633: note = Description of Artificial Sequence: Synthetic coding sequence
  source 1..633: mol_type = other DNA
atggaccagcccctggccgagcacttcagcaccctggccaagaacagcaacctggttcggcttaacctgagcggctgtagtggcttttcagaattcgcgctgcagacattactgagttcttgcagccggctggacgaactgaaccttagctggtgtttcgatttcacagaaaaacacgtacaggtggcggtagcacatgtttccgagacaatcacccagttgaacttgtctggctatcgaaaaaacctgcaaaaatcagaccttagcacactcgtaaggcggtgtcccaacctggtgcatctggatttgtcagattcggtgatgctgaaaaacgattgcttccaagaattctttcaactcaactacctgcagcacctctcactgagccggtgttatgacattattccagaaacactgttggagcttggggaaatccccacacttaaaaccctgcaagtgttcggcattgtgcccgatggaacactgcaacttctgaaagaagcactaccacacctccagattaactgttcccactttactacgatcgctaggcctacgatcgggaataagaaaaatcaagagatttggggcattaaatgcaggctgaccttacagaagcctagttgtctctag

SEQ ID NO: 206864 - DNA, 1362 bp, synthetic construct
  misc_feature 1..1362: note = Description of Artificial Sequence: Synthetic coding sequence
  source 1..1362: mol_type = other DNA
atggccctggtgcgggccctggtgtgctgcctgctgaccgcctggcactgccgtagtgggctgggccttcccgtggcccctgcaggcgggaggaatcctcctccggccattggccagttttggcatgtcaccgaccttcaccttgatccaacctaccacataaccgatgatcacacgaaggtctgcgcaagtagcaaaggagcaaacgccagtaatcccggcccattcggtgacgtgctgtgcgacagcccctaccagctgatcctcagtgcctttgactttatcaagaactctgggcaggaagcctctttcatgatctggacgggagactcacctccccacgtgccggtgcccgagctgtctactgataccgtaatcaatgtcatcaccaacatgacaaccacaatccagtctctgttcccaaacctgcaagttttcccagccctgggaaatcacgactactggccgcaggatcagttacccgtcgtaacatccaaggtgtataacgccgtggctaatctatggaagccttggcttgatgaggaggctatctcgacattaaggaaaggaggcttctactcccaaaaggtcacaactaaccctaatctgcgaattatctcccttaatacaaacttgtattacggtcccaacataatgactcttaataaaaccgatcctgccaaccagttcgaatggctggaatccactctcaacaactcccagcaaaacaaggagaaggtctatataatcgcgcacgtccctgttgggtacctgccctcttctcagaatatcaccgcaatgcgtgaatactacaacgaaaagcttattgatattttccaaaaatatagtgatgtgattgccggccaattttacgggcacacgcatagggactccatcatggtgctgtccgacaagaagggatctcctgttaacagcctgtttgtcgcccctgcggttacgccagtgaaatcagtgctcgagaaacagacaaataaccctgggatccgcctgtttcaatacgacccaagagactacaaacttctcgacatgctacaatattatctgaacttaacagaggctaatctcaagggagaatcaatttggaaattggaatacattctcacacagacttatgatatcgaagacctgcagcccgagagcctgtacggtttagctaaacagtttactatcctggatagtaagcaattcatcaaatattataattatttttttgtaagctacgatagcagcgtgacatgcgacaagacgtgcaaggctttccagatatgcgctattatgaacctcgacaacatctcctatgctgactgtcttaaacagctttatattaagcataattattag

SEQ ID NO: 206865 - DNA, 969 bp, synthetic construct
  misc_feature 1..969: note = Description of Artificial Sequence: Synthetic coding sequence
  source 1..969: mol_type = other DNA
atgaccaccaccatccagagcctgttccccaacctgcaggtgttccccgccctggggaatcatgattattggccccaagatcagttaccagttgttacatcaaaggtgtataacgcagtcgctaatctatggaaaccctggctggacgaggaagcgatttctaccttacgaaaggggggtttttattcccagaaagtcactaccaacccaaaccttcgaatcatcagcctgaatactaacctgtattatgggcccaacattatgacgctgaacaagaccgacccagcaaaccaattcgagtggttggagtccaccctgaataacagccaacagaacaaggagaaggtctatattatcgctcatgtcccagttgggtacctgccctcaagccagaatattaccgcgatgcgcgagtactacaacgagaagctgatagacatttttcagaaatattccgatgtcattgccggacagttttacggacatacccatcgggatagcatcatggtattgtcagataagaagggttcaccagtaaacagcctgtttgtggcccctgcggtgacacccgtgaaaagcgtcctggaaaaacaaaccaataatccaggtatacgcttgttccaatacgacccacgggactacaagctgctggatatgctgcagtactacctcaatctcacagaggcaaatcttaaaggtgagtctatctggaaactggaatacattctgactcaaacgtacgacattgaagacctgcagccagaaagcctgtacggtctcgcaaagcagttcaccatccttgatagcaagcaattcattaagtactacaactatttctttgtgtcctatgatagtagcgttacatgcgacaagacttgtaaggctttccagatctgtgccatcatgaacctggacaacatcagctatgctgactgcctgaaacagctgtatatcaagcataattactag

SEQ ID NO: 206866 - DNA, 726 bp, synthetic construct
  misc_feature 1..726: note = Description of Artificial Sequence: Synthetic coding sequence
  source 1..726: mol_type = other DNA
atgaaggaggtggtgtactggagccccaagaaggtggccgactggcttctcgaaaatgcaatgcccgagtattgtgagcctttagaacattttacagggcaagacctgattaacctgacccaggaggattttaaaaaaccgccactttgtagggtgagctcagacaatgggcaacgcttactggacatgattgaaaccctcaaaatggaacatcacctagaggcacacaaaaatggccatgccaacggccaccttaatattggcgtggatataccaacccctgacggctctttcagtatcaaaattaagcctaatggtatgccgaatggatataggaaggaaatgattaagatcccaatgcccgagctggagaggtcacaataccctatggagtggggaaagactttcctggcgttcctttacgcactgtcctgttttgtattgactactgtcatgatatccgtagttcacgagcgggtgcctcctaaggaagtgcagccccccctgccagacactttcttcgaccactttaatagggtgcaatgggctttttccatttgcgaaattaatggaatgatcctggttggactgtggttgatccagtggttgctgctaaagtacaaggatgtggggaacgagtctagagtagtgatgattttcctctctatcgtacatcctgtgttgctgttgggatctattgccggcttcctgtcactaagcctatag

SEQ ID NO: 206867 - DNA, 1242 bp, synthetic construct
  misc_feature 1..1242: note = Description of Artificial Sequence: Synthetic coding sequence
  source 1..1242: mol_type = other DNA
atgaaggaggtggtgtactggagccccaagaaggtggccgactggcttctggagaatgcaatgcccgaatattgtgaacctctggagcacttcaccgggcaggatctgatcaacctgacgcaggaggactttaaaaaaccaccactctgtagggtctctagcgacaacggccagcgactgttggatatgatcgagacactaaaaatggaacaccacctggaggcccacaagaatggccacgctaatgggcatctgaacatcggcgtcgacatccccactccagatggttcgttctctatcaagatcaagcccaacggaatgcccaatggatatcgtaaggagatgattaagatacccatgcccgaactggagcgctctcagtacccaatggagtgggggaagacttttctagccttcctgtatgcactgagctgcttcgttctaaccacagtcatgatcagtgttgtccatgagcgagtgccacccaaagaggttcaaccaccgttgccagataccttctttgaccattttaaccgggtgcaatgggcatttagcatatgcgaaatcaacggaatgatcttggtgggcctctggcttattcaatggctcctgctaaaatacaaaagcatcattagtaggaggtttttctgcatcgtcgggacgctgtatctctacaggtgtataactatgtacgtcacaacactgcccgttcccgggatgcactttaactgctcgcctaaactttttggcgattgggaggctcagctgcgacgcattatgaagttaatcgccggcggcgggctgtctattacgggcagccacaatatgtgcggcgactacctgtattctggccatacggtgatgttgaccctgacctacctcttcattaaggagtattccccccgacgactctggtggtaccactggatttgctggctgctgagtgtggttggcatcttttgcatcctgctcgctcacgatcattatacagtcgacgtggtggtcgcctattatattacgactcgcttattctggtggtaccacaccatggctaaccagcaagtgctgaaggaggcctctcagatgaatctgttggcacgcgtctggtggtaccggcccttccagtatttcgagaaaaatgtccagggaatcgtacctaggtcataccattggccttttccttggcctgttgtgcacttgtccagacaagtcaaatattcgcggctggtgaacgacacctag

SEQ ID NO: 206868 - DNA, 642 bp, synthetic construct
  misc_feature 1..642: note = Description of Artificial Sequence: Synthetic coding sequence
  source 1..642: mol_type = other DNA
acctacatgtacatcagcaacaagagcatcatcagccggcggttcttctgcatcgtcggcacactctatctgtatcgctgcattaccatgtatgttactaccctgcccgtgcccggtatgcattttaattgcagcccgaagctttttggcgactgggaagctcagctacggaggattatgaagctgatagccggaggcggcctgtccattacagggtctcataacatgtgtggagactatctctactccggccatactgtgatgctgacactcacctacctgttcattaaggagtactcacctcgccggttgtggtggtaccactggatatgttggctgttaagtgtggttggcatattctgcatcctgctggcccatgatcattacactgtagacgtcgtcgttgcttattatattacgacaagactgttttggtggtatcacactatggctaaccaacaggttctgaaggaagcttcccaaatgaacctcctagcgagggtatggtggtataggcctttccagtactttgagaagaacgtccaggggattgtccctaggtcttaccactggccttttccttggccagtagtacacctgtctcggcaggtgaaatacagtcgcctcgtgaatgacacatag

SEQ ID NO: 206869 - DNA, 735 bp, synthetic construct
  misc_feature 1..735: note = Description of Artificial Sequence: Synthetic coding sequence
  source 1..735: mol_type = other DNA
atgggcggccggggcggcggcggccggagccggcagctgcccggcagattccgcgcccccgctgcccggtggccggggggtagatggctgccaggggctccgagaacagtgacttggtctatcatttctcgacggttcttctgcatcgtgggcactctgtacttatatcgctgcatcactatgtatgtcacaaccctgccagtacccggaatgcatttcaattgcagccctaagcttttcggtgactgggaggcccaactgagacgtattatgaagttgatcgccggaggggggctgtcgattaccggatcccacaatatgtgtggtgactacttgtatagcgggcatactgttatgctcacattgacttatctgtttatcaaagaatattctccacggcggctgtggtggtaccactggatctgttggctgctctcagtggttgggattttctgcatcctcctggcacacgatcactacactgtggatgttgttgtagcatattacatcaccacaaggctcttctggtggtaccatacaatggctaaccaacaggtacttaaggaagcctcccagatgaatcttcttgctcgcgtgtggtggtacagaccatttcaatattttgagaaaaacgtccagggaatcgttccaaggtcttatcattggccattcccttggcctgtcgtgcatctgtcacgtcaggtaaagtatagtcgacttgtaaacgatacctag

SEQ ID NO: 206870 - DNA, 1098 bp, synthetic construct
  misc_feature 1..1098: note = Description of Artificial Sequence: Synthetic coding sequence
  source 1..1098: mol_type = other DNA
atggacatcatcgagaccgccaagctggaggagcacctggagaaccaaccaagcgaccctacaaatacctatgccaggcctgcagaaccagtcgaagaagagaacaaaaacggaaacggaaaaccgaaatcgctgagttcaggcctgagaaagggcacaaaaaaatacccagactatatccagatcgctatgcccaccgaaagccgcaacaaattccccctggagtggtggaagacaggaatcgcattcatctatgccgtgtttaacctcgtactcaccacggtgatgattacagtagtccacgaaagggtacctccaaaagagctatccccgcccctccccgacaaattctttgactacatcgaccgcgttaaatgggccttcagcgtctcggaaataaatggcattatactggtgggtttgtggatcacgcagtggctgttcctgcgctacaagtccatagtgggcaggcgattctgctttattattggcacgctgtacctttatagatgtatcaccatgtacgttaccacactgccagttcctggcatgcacttccaatgtgctcctaaattgaatggtgactctcaggctaaagtgcagaggattctaaggcttatcagtggcgggggtttatcaatcaccgggtcccatatcttgtgcggggatttcctgttttctggccatacagtcacccttactctgacgtacttgttcatcaaagagtactccccccgtcacttttggtggtatcacttgatttgctggcttttaagcgccgccggaattatttgcatactggtggcccatgagcactacacaattgacgtgatcattgcatattacatcactactcgcctgttttggtggtaccacagtatggcaaatgagaagaacctgaaggtatcatcacaaactaactttttgtctcgagcatggtggtttcccatcttctacttttttgagaagaacgtgcagggttctataccatgctgtttcagctggcccttgtcttggcctcccggttgctttaagagctcttgcaaaaagtattcgagagtccaaaagattggggaggataacgagaagtctacctag

SEQ ID NO: 206871 - DNA, 1098 bp, synthetic construct
  misc_feature 1..1098: note = Description of Artificial Sequence: Synthetic coding sequence
  source 1..1098: mol_type = other DNA
atggacatcatcgagaccgccaagctggaggagcacctggagaaccagccctcagatccaaccaatacctatgcccggcccgctgagccggtggaggaagagaacaaaaacggaaatggtaagcctaagtccctgtccagtggccttagaaaggggactaaaaagtatcccgactacatccagatcgccatgcccactgagtcgcgaaataaattcccgctggagtggtggaaaacagggatcgcattcatctatgccgttttcaatctggtgctgactactgttatgatcaccgtggtgcatgagagggttcccccaaaggaactcagtccgcctctccctgataaatttttcgactacatcgaccgtgtgaagtgggcctttagtgtgtctgagattaatggcattatcctagtgggcttgtggattactcagtggctgtttctgaggtacaagtctattgtaggaaggagattttgttttatcatcggtactctgtacctttataggtgcattaccatgtacgtgaccactcttccagtgcctggcatgcacttccaatgcgctccaaaattaaacggagacagccaggccaaggtccagaggattctgcgccttatctctggcggagggttaagcataaccgggtctcatatcctgtgtggagacttccttttctcaggtcacactgtcacattaaccctcacttatctgttcatcaaggaatacagcccaaggcatttttggtggtaccacctgatctgttggttgctttcggccgcgggtataatttgcattctggtggcccacgagcactacacaattgacgtgataattgcttattacatcactacccgcctgttttggtggtaccactctatggctaacgagaagaacctgaaggtgtcgtcacagaccaacttccttagccgggcatggtggtttccgatattctattttttcgagaaaaatgttcagggaagcataccctgttgctttagttggcctttgtcttggcccccagggtgctttaaatcatcatgcaaaaagtacagtcgagtccagaaaataggggaagataacgagaagagtacatag

SEQ ID NO: 206872 - DNA, 1098 bp, synthetic construct
  misc_feature 1..1098: note = Description of Artificial Sequence: Synthetic coding sequence
  source 1..1098: mol_type = other DNA
atggacatcatcgagaccgccaagctggaggagcacctggagaaccagccttccgatcctacgaatacctacgccaggccagcagagcctgtagaagaggagaataagaacgggaatggcaaaccaaagagtctcagctccggacttcgcaaaggcacaaagaagtatccagattatatccagatcgcgatgccaacagagtctaggaacaagttccccttggagtggtggaagacggggatagcttttatctatgctgtatttaaccttgtgctaaccacagtcatgatcaccgtggtccacgagcgcgttccaccaaaagagctttcgccaccattgcccgacaaattctttgactacatcgaccgggtgaaatgggcattttccgtatctgaaataaacggaattatcttggtgggactctggatcacccagtggctcttcttgcgctacaagagtattgtgggtcgccgattttgtttcattattggtacactctacctgtataggtgtataactatgtacgtgacaaccctccccgttccaggcatgcattttcagtgtgcacctaaactgaacggtgattctcaggccaaagtccagcgcatcttgcgcctgatatccgggggtgggttgtccatcacaggttcacacatcctctgtggcgattttctgttcagcggccataccgttacactgacactgacctaccttttcatcaaagagtactcaccaaggcacttctggtggtaccatctgatttgttggctcctgtccgccgcgggtatcatttgcatactagtcgcacatgaacattatactatcgatgtgatcatcgcttactacattacgacccgactgttttggtggtatcattcgatggctaatgagaagaacttgaaagtcagttcacaaacaaattttctgagcagggcctggtggttccccattttttatttttttgaaaagaacgttcagggttcaatcccttgctgctttagttggccgctctcttggccccccggttgctttaaaagcagttgcaaaaaatattcgcgagtgcaaaaaataggcgaggataacgagaaaagcacatag

SEQ ID NO: 206873 - DNA, 135 bp, synthetic construct
  misc_feature 1..135: note = Description of Artificial Sequence: Synthetic coding sequence
  source 1..135: mol_type = other DNA
atggacatcatcgagaccgccaagctggaggagcacctggagaaccagccatctgacccaacaaacacgtatgcaagaccagccgaacctgtagaagaagagaataaaaatggcaacggcaaacccaagtcctag

SEQ ID NO: 206874 - DNA, 105 bp, synthetic construct
  misc_feature 1..105: note = Description of Artificial Sequence: Synthetic coding sequence
  source 1..105: mol_type = other DNA
atggacatcatcgagaccgccaagctggaggagcacctggagaaccagccctccgatccaacgaacacttacgctagacccgctgagcccgtagaagaagaatag

SEQ ID NO: 206875 - DNA, 1326 bp, synthetic construct
  misc_feature 1..1326: note = Description of Artificial Sequence: Synthetic coding sequence
  source 1..1326: mol_type = other DNA
atgagcctgcggcagcggctggcccagctggtgggccggctgcaggatcctcagaaggtggctagattccaacggctctgtggagtggaggccccccctaggcgctccgcagaccgccgagaagatgaaaaggccgaggcgcccctagcaggggatccacgtcttaggggtcggcaaccaggagcgccaggtgggccccagccgcccggatctgaccggaatcagtgccccgccaaacccgatggtggtggtgcccctaacggagtcaggaacgggctggccgccgagctggggcccgcaagcccgcggcgcgccggtgccttgagaaggaatagcttgactggggaagagggccaactggctcgggtgagcaattggcctctctactgtctgttctgctttggaactgaactgggcaatgaactgttttatattctttttttccccttctggatctggaatttggaccccctggtaggacgcagattggtggtcatctgggtgctggttatgtacctgggacagtgcaccaaagatataatcagatggcccaggccggcctcccctccagtggtcaagttggaagtattctacaattctgagtactccatgccaagcacacacgcaatgtccgggaccgctatcccaatcagcatggtgctgctgacctacggacgatggcaatatcctcttatttatggcttgattctgattccttgttggtgctcccttgtgtgcctgagtcgcatttacatgggcatgcactcgattctcgacataatcgcagggtttctctacacaatactgattctcgcagtcttctacccttttgtcgatctgatcgataactttaatcagactcacaagtatgcaccctttattatcattggcttgcacctagctctgggcatcttctccttcacgctggatacatggtctactagtcgcggggacacagctgagattcttgggtctggagctgggattgcttgcgggtcccatgtcacttataatatggggttggtactagatccctccctcgacaccttgcccctggccggccccccaattacggttactctgtttgggaaggctatcctccggattttaatcggcatggtgttcgttctgatcattcgcgatgttatgaagaagattactattcccctggcttgtaagatcttcaatatcccttgcgacgatattcgtaaggccagacagcacatggaagtggaactgccataccgttacataacctacggaatggtaggcttcagcatcacattcttcgtcccttacatcttcttctttatcggcattagttag

SEQ ID NO: 206876 - DNA, 1200 bp, synthetic construct
  misc_feature 1..1200: note = Description of Artificial Sequence: Synthetic coding sequence
  source 1..1200: mol_type = other DNA
atggccgagctgctgcggagcctgcaggacagccagctggtggccaggttccagaggcgttgcggcctcttccctgcccccgacgaaggaccccgtgagaacggcgccgaccccaccgagcgagcagcccgggtaccaggtgtggaacaccttcccgccgccaacggcaaaggaggcgaggccccagccaacggtctgaggcgcgccgcggcccccgaagcgtacgtgcagaaatacgtggtaaaaaattacttttactattacctctttcaattttcggccgcactgggccaggaggtgttctacatcactttcctgccatttacccattggaacattgacccctacctatctagaagactaatcattatctgggtcctggtgatgtacattgggcaagtggccaaggatgttctgaagtggccgcgcccgtcatccccccctgtggtcaagttagaaaaaagactcatcgctgaatacggcatgcccagcacacatgcaatggcagcgactgccattgccttcaccctgctgatttccactatggaccgctatcagtacccgtttgtactgggcctggttatggctgtagttttcagtaccctggtttgtctgagccgcctgtacaccggaatgcatacagtactcgacgtgctggggggagtcttaattactgccttgctcatagttttaacatatccagcatggactttcattgattgtcttgactctgcaagtcctctcttccccgtgtgtgtcatagtcgtgccattcttcctttgctacaactatccagtgtccgattattattctccaactcgggctgacacaacgactatactagctgcaggcgccggtgtgacaattggattctggatcaatcacttttttcagttggtgtccaagcctgcggagagcctgcctgtgatacagaacatcccacccctcactacttacatgctggttctaggcctgaccaagttcgcggtagggatcgtcctcatacttttggtgcgccagctggtgcagaacctatcattacaggtcctctattcctggtttaaggttgtgacaagaaataaggaggcccggcgaagactcgagatcgaagtgccttataagttcgtgacatatacctcggtgggaatttgtgccactaccttcgtgcccatgctgcaccgttttctgggcttgccctag

SEQ ID NO: 206877 - DNA, 1062 bp, synthetic construct
  misc_feature 1..1062: note = Description of Artificial Sequence: Synthetic coding sequence
  source 1..1062: mol_type = other DNA
atgggcagcctgtacagcgagtacctgaaccccaacaaggtgcaggagcattacaactataccaaggaaactctggaaactcaagagaccacctctcgccaggtggcttctgctttcattgtcattctctgttgtgcaattgtggtggaaaatctcctggtcttaattgccgtggctagaaacagcaagttccatagtgccatgtatttgttcttaggcaacttggctgcctctgatcttttagccggggtggcctttgtggccaataccctgctatcaggctccgttacactcaggctgacaccggtgcagtggtttgccagagagggctctgctttcattactcttagcgcatctgttttttccctcctcgcaattgccattgagagacacgtggcaatcgcaaaagtgaaactctacggcagcgacaagtcgtgtcggatgcttttactgattggtgctagctggttaatcagtctggtcttgggcggactgcccatacttgggtggaactgcctgggccatctggaggcgtgctccacagtcctgcccctctacgctaagcattacgtcctttgcgtcgtgacaattttctctataatcttactcgcaatcgtggcactgtatgtgagaatatactgcgtagtcaggtctagccacgccgacatggcagcaccccagactctggcactactcaaaaccgtcaccatcgttctgggcgtatttattgtctgctggctccccgccttttcaatcctattactcgattatgcttgcccagtccatagttgtcctatcttgtacaaggcccattacttttttgctgtaagcacccttaattcgctcttgaacccggtcatctacacctggcggtcgcgggatctgcggagggaggtgctgcggcctctgcagtgctggaggccaggcgtcggcgtccagggaagacggcgaggcggcacaccaggacaccatctgctacctttaaggtccagcagtagcctggagcggggcatgcacatgccgacctccccaacttttctcgaagggaatactgtggtgtag

SEQ ID NO: 206878 - DNA, 1137 bp, synthetic construct
  misc_feature 1..1137: note = Description of Artificial Sequence: Synthetic coding sequence
  source 1..1137: mol_type = other DNA
atggccaccgccctgcccccccggctgcagcccgtgcggggcaacgaaaccctgcgtgagcattatcagtatgttggtaagttggctggccggcttaaggaagcctctgaaggaagcactctgacaacagtcctgtttctcgttatctgtagcttcatcgtgcttgagaatctgatggttctaatagccatatggaaaaataataagtttcacaatcgcatgtatttttttatcggtaacctcgctttgtgtgacctcttggctggcattgcatataaggttaacatcctcatgtccgggaagaagaccttctcactgagtcctactgtctggtttctgcgggagggttcaatgtttgtggccctaggagcttctacctgttcgctgctggccattgctatcgaacgtcacttaacaatgattaaaatgcgtccctatgatgctaataagcggcatcgggttttcttacttattgggatgtgttggctgatcgcctttactctgggagcgttgcctatactgggttggaattgtttgcacaatttgcctgactgttctaccatactcccactgtactcaaaaaagtatattgccttttgcatttcaatcttcactgcgatccttgtaaccatcgtgatcctgtatgctagaatctactttctggtgaagtcatcctcgcggaaggtggcgaatcacaataatagcgaaagatcaatggcgcttctcaggacagtcgttatagttgtgtctgtgtttatcgcttgttggtcgcctctcttcattcttttcttaatagatgtggcttgcagagtgcaggcctgtcccatcctgttcaaggcccaatggttcatcgttctggctgtcttaaattccgccatgaatcctgttatctacaccctggcctcaaaggagatgagacgggcatttttccgcctggtctgtaactgcctggttaggggccgaggggccagggccagtcctatccagcctgcattggatccttcacgaagtaaatcatccagttcaaacaattcctcacacagcccaaaagttaaagaggacttaccccataccgccccttcgtcctgtatcatggacaaaaacgcagctctacaaaacggcattttctgtaactag

SEQ ID NO: 206879 - DNA, 1137 bp, synthetic construct
  misc_feature 1..1137: note = Description of Artificial Sequence: Synthetic coding sequence
  source 1..1137: mol_type = other DNA
atggccaccgccctgcccccccggctgcagcccgtgcggggcaacgaaacgttgagagaacactaccagtatgtcggcaaattggcgggcagattgaaagaggccagtgaggggagcacgttgactaccgtcctgttcctcgtgatttgctcgtttatcgtgctagagaatctgatggttctcattgctatatggaaaaataacaagttccataatcgcatgtattttttcattggaaatctcgctttatgcgatctcttggcagggatcgcctacaaagtgaacatcctcatgagcggcaagaaaacgtttagcttatctcccactgtatggtttcttcgcgaaggcagcatgtttgtggcgttgggcgctagtacatgctccctgcttgccattgccatcgagagacacctgactatgattaagatgcggccctatgacgccaacaagcgccaccgcgtgtttctgcttatcggcatgtgctggctcatcgctttcacactcggagcccttcccatactcggatggaactgtctccacaaccttcctgattgctccaccattctgcccctctacagtaagaaatacattgcattttgcatctcgattttcaccgctatcctggtcaccattgtgattttgtacgcccgcatctattttcttgttaaatcatctagccgcaaggtcgcaaaccacaataattcagagcgcagcatggctctccttcggaccgtcgtcattgtcgtgtccgtgttcattgcctgctggagccccctctttatcctctttttgatcgatgtggcttgccgggttcaagcttgtcccattctctttaaagcacagtggttcatcgtgcttgctgttctgaactctgccatgaaccctgttatttatacactggcgtccaaagaaatgaggagggccttttttcgactggtgtgcaactgtctggtacgaggacgcggtgcacgggcatcacccatccagcccgctttggacccaagtcgaagcaaatcttcctctagtaacaattcaagtcatagccccaaggtaaaagaagatctaccacatacagctcccagctcatgtatcatggataagaatgccgcgctgcagaacgggattttttgcaattag

SEQ ID NO: 206880 - DNA, 1155 bp, synthetic construct
  misc_feature 1..1155: note = Description of Artificial Sequence: Synthetic coding sequence
  source 1..1155: mol_type = other DNA
atgaacgccaccggcacccccgtggcccccgagagctgccagcagctagccgcgggtggccattcacgcctcatcgtactacattataaccattctggtcggctggctggaaggggaggacctgaagacgggggcctgggcgcactccggggcctcagtgtggctgctagctgcctcgtcgtgctggagaatctgcttgtgctggccgctataacctcccacatgcggtccaggcggtgggtttactactgtctggtgaacataacattgtccgatttgctgaccggcgctgcctatttggcaaacgtcctgcttagcggcgcccgcactttcaggctggcacctgcccagtggttcctcagggaggggttgctgtttactgcccttgccgccagcaccttctcactactgttcactgcaggagagaggtttgcaacaatggtgcgcccagtggccgaaagcggagccacgaaaactagccgagtttatggttttattggtctgtgttggctgttggcggccctgttagggatgctcccactgctcggatggaattgcctgtgcgcgtttgatagatgcagttcactcctgcctctgtactcaaaacggtacatccttttttgcctggtgatttttgctggggtcttagcaaccattatgggactgtacggcgccatattcaggctggtgcaggcctctggtcaaaaagcccctaggccagctgcgagacggaaggcccgcagattactcaaaactgtgctcatgatcctcctcgccttcctggtgtgctggggtccactcttcggactcctactggctgatgtgtttggaagcaatctctgggctcaggaatacctgagaggtatggattggatcctggctctggcagttctcaattccgccgtgaaccctattatatacagctttagatcgcgggaagtgtgccgggccgtgctgtcattcctatgctgtgggtgtctgcgcctgggtatgaggggacccggggattgcctggccagggcagttgaagctcactcaggtgcaagcacaactgatagctccctgcgccctcgggactcgtttcgcggctcccggtctctgtcctttaggatgcgggagcccttatcttctatttccagcgttcgcagcatctag

SEQ ID NO: 206881 - DNA, 1197 bp, synthetic construct
  misc_feature 1..1197: note = Description of Artificial Sequence: Synthetic coding sequence
  source 1..1197: mol_type = other DNA
atggagagcggcctgctgcggcccgcccccgtgagcgaggtgatcgttctccactacaactataccggcaaactgaggggagcaagatatcagccaggtgccggtctgcgcgcagatgccgtggtctgcttagccgtctgcgcctttattgtgctagagaacctagccgtgctcttggtactgggccgacatccacggtttcacgccccaatgttccttctcctgggcagcctgacactgagtgacctattggcaggagctgcttatgccgccaatatcctgctaagtggcccccttaccctgaagctctccccagcactttggtttgcgcgggaagggggagtgttcgtcgccctcacggcttccgtactgtcactgctcgctatcgccctggaaaggagcctgaccatggctagaagaggtccagctcctgtgagctcccgggggcgtaccctcgccatggctgccgcggcttggggcgtctccttgctgctgggcctcctgcctgcactcgggtggaattgtctgggacgcctggacgcttgcagcaccgtgctgcccctttatgcgaaagcttacgtccttttctgcgtgctggcatttgtcggtatcctcgcagccatatgcgctctgtacgcaaggatttactgccaggtgcgtgccaacgccagacggctgccggctcgcccggggaccgctggaacgactagcactagagctcgcagaaagccgcgctcactagcgctgctgcggacactctccgttgtgcttttggcattcgtcgcatgttgggggcctttatttctgctcctcctattggatgtagcgtgtccggccaggacctgccccgtgctgttgcaggcagatcccttccttgggctcgctatggctaacagcttgctgaaccctattatctacacattgacaaatcgagacttaaggcatgcactcctgcgcctcgtctgctgcggacggcatagctgtggacgggatccttcaggttctcagcagagtgctagcgccgccgaggctagcggcggcctgcgcagatgtctcccgccaggcttagatgggagcttctccggatcagagcgcagttctccccagcgggacggtttggacacaagcgggagtaccgggtcaccgggcgccccaacagccgcacgcaccctagtgagcgagccagcagccgactag

SEQ ID NO: 206882 - DNA, 933 bp, synthetic construct
  misc_feature 1..933: note = Description of Artificial Sequence: Synthetic coding sequence
  source 1..933: mol_type = other DNA
atggagagcggcctgctgcggcccgcccccgtgagcgaggtgatcgtcctccattacaactacaccgggaagttaaggggggccagatatcagcctggcgctggccttcgggccgatgctgtggtgtgcctggccgtttgtgccttcatcgttttggagaacttggcagtcttgcttgtgctgggaaggcatccgcgttttcacgcgccaatgtttctgctgctgggaagccttaccttgtctgacttgttggccggggccgcatatgcagcaaatattttgctgtccggtccactcacgttgaaactgtcaccagccctttggttcgcccgggaggggggggtgttcgttgctctgactgcctcagtcttgagcctcttagcgatcgctctggagaggtctctgacgatggctcggaggggcccagcaccagtctcttcgagaggtcgcactctggccatggccgccgccgcctggggagtgtcgttactgctgggactcctgcctgctctcggctggaactgtcttggcagactggatgcctgtagcactgtgctcccgctctacgccaaagcttatgttttattttgcgtcctggctttcgtggggattctggctgcaatttgtgccctttatgcactggcagggttggcggcccacgcccagagaggagctcctggtctttgtgggatgctgggaccccctcttcccgcagctgtggcacggaggggtgtgccgggcgcccatctgtcttgcaccccagcgggaaggagcctgcccgggaccggacacggacaattgacctccgaacctcaccatcttcatgcccaccagcctcgcccggcgcctagggcccctgcccccggactattacgcacaccgctgcttaggcagaggcccgagtggctgccagcagtgggcgaacgcggttag

SEQ ID NO: 206883 - DNA, 1197 bp, synthetic construct
  misc_feature 1..1197: note = Description of Artificial Sequence: Synthetic coding sequence
  source 1..1197: mol_type = other DNA
atggagagcggcctgctgcggcccgcccccgtgagcgaggtgatcgttcttcattataattacactgggaaacttcgcggggctcgctatcaacctggcgccggtctcagggcggatgccgtggtctgcttggcagtctgcgctttcatagtgctggagaacctggcagtcctgctggtacttggtaggcatcctaggtttcatgctcctatgttcctcctccttggctctctcactctgtccgatctcctcgcaggcgccgcttatgcagcgaacatcctgctttctggtcccctcactctgaaactgtctcccgccctgtggttcgctcgggagggtggagtcttcgtggctcttaccgcatccgtcctaagcctgcttgctatcgccctggaacgctccctcactatggcccgtagaggtcctgctcctgttagttctcgcggtcgaactttggctatggccgcagccgcttggggcgtgagtctgctcttggggctccttcccgcactgggctggaactgtttaggtaggctggatgcctgctcgacagttttgcctctgtacgcaaaggcctatgtgctgttctgtgtgctagcattcgttggcatccttgccgccatctgcgcattgtacgcgcgcatttactgccaggtgagagcaaatgctcgcaggttgcctgctaggccaggcacggcggggaccaccagcacgagggcccgtcgaaagccaagatcccttgctttactcagaactctaagtgtcgtgttactggccttcgtggcatgctgggggccactatttctgttgctgctgctcgacgtggcctgtcctgcgcgcacttgccccgtgctacttcaagccgatccattcctgggtctcgccatggccaattccctgctgaatcctatcatttacacactgaccaaccgcgaccttcgacatgctctactgcgactcgtgtgttgtgggagacattcttgtggacgtgatcccagtgggagccagcagtccgcttccgccgctgaggctagtggaggacttaggaggtgtctgccccctggtcttgacgggagtttcagcggctccgagagatccagcccccagagagacggactcgatacctccggatccacaggcagtcccggggcccccaccgctgctcggaccttggttagtgagcctgccgccgactag

SEQ ID NO: 206884 - DNA, 5016 bp, synthetic construct
  misc_feature 1..5016: note = Description of Artificial Sequence: Synthetic coding sequence
  source 1..5016: mol_type = other DNA
atggacggcaacagcctgctgagcgtgcccagcaacctggagagctccagaatgtacgatgtgcttgagcctcagcagggtagaggttgcggtagttccggatctggacccggcaattccattaccgcttgcaaaaaagtgctgcgcagcaatagtttgctcgaatctaccgactattggttgcaaaatcagaggatgccctgccaaatcggcttcgtggaggacaaatctgaaaattgtgccagtgtgtgtttcgtaaatctggatgttaataaagatgagtgcagtaccgagcacctgcaacagaagttggtgaacgtttccccggacctgccaaagctgatttcctccatgaatgtgcaacaacccaaggagaacgagattgtggtgttgtcagggctggcttccgggaatctacaggctgactttgaggtgagtcaatgtccatggctgcctgatatttgcctcgtacaatgcgccagagggaaccgccccaattctactaactgcatcatcttcgagattaacaagttccttattgggctagaactggtacaggagcggcagctgcacctcgaaaccaacatcttgaagctagaagatgatactaactgttccctatcaagcattgaggaagattttcttaccgccagtgagcacctcgaagaagagtccgaggtggacgaatcaagaaatgactacgaaaacataaacgtgagcgccaacgtacttgaatcaaagcaactcaaaggagccactcaggtggagtggaactgtaacaaagaaaaatggctgtacgctctagaggataagtacataaacaaataccctacccctctgattaagaccgaaaggtctcccgagaacctcacaaagaacacagctctccagtccctggatccttcagccaaaccctcccaatggaagcgggaagcggttgggaacggaaggcaggccacacactactatcactcggaggcctttaaaggccaaatggaaaagagccaggcactgtatatacctaaagatgcatatttttctatgatggacaaggatgtcccctccgcttgtgccgtagcggagcaacgctccaacctgaacccaggtgaccacgaagatacaagaaacgccctccctccaagacaagacggcgaggtgaccacaggaaagtatgcgacaaacctcgccgaaagtgttctgcaagatgcctttatccgactgtcccaatcccagtccactttgccacaggagagcgcagtgagcgtgagtgtgggttcaagccttctaccgtcctgttattccacaaaagataccgtggtgtccagaagttggaatgagctccccaagatcgtggtagtgcaatccccagatgggtctgacgccgcccctcagcctgggatttcaagttggcctgagatggaagtgtcagtcgaaacatccagtatcctgtcaggcgaaaacagttctagacagccccaatctgccttggaagtcgcactggcttgtgcagccactgtgatcggtaccatatcctccccccaggcaacagaacgcctcaaaatggagcaggtggtgtcaaacttcccgccagggagtagcggagcgcttcaaacacaggcacctcagggactgaaggagccctccatcaacgaatacagttttccatcagctctgtgcggcatgactcaggtagcgagtgctgttgctgtctgtggcctcggcgagagggaagaagtcacgtgctccgtggccccttctggctcattgcccccggctgccgaggcctctgaagcgatgccgcctttgtgcggcttggcttctatggaacttggaaaggaggccatagcaaaagggctgctcaaagaggccgccttggtcctgacacggccaaacacgtacagtagcatcggagatttcctcgatagtatgaacagacgtattatggagaccgccagtaagtcacagaccctttgctctgaaaatgtcgtgaggaatgaattggcccataccctttccaacgtcatcctgaggcactccatcgacgaagtccatcataaaaacatgattatcgatcccaacgataataggcatagttcggaaatcttggataccttgatggaaagtaccaatcagctcctactggacgtgatttgtttcacttttaaaaaaatgagccatatcgtgagattgggggagtgccctgccgtcttgtcaaaagagacaataagaagacgggagaccgagccgtcttgtcagccgagtgaccctggggcttctcaggcatggacaaaagctacagagagcagtagttcctccccactgtccaattcccacaacacaagcttagtgataaacaatcttgtcgacggcatgtactccaagcaagataaaggcggtgtcaggccgggcctcttcaagaatcccacactacagagtcagttaagccggagccacagggttcctgatagctcgacagcaaccacctcttccaaggagatctacctgaaaggcatcgccggtgaggacaccaaaagccctcaccacagcgagaacgagtgtagggcttcctcggaaggccagaggagccccacagtctctcagagtcggtccgggtctcaggaagctgaggaatccatccatcccaacacacaggagaagtataattgcgccacatcacggatcaacgaggtccaggtgaatctttcactgctgggcgatgacttgctgcttcctgcccagagcacacttcagaccaaacatcctgacatctactgtatcacagattttgccgaggagctcgctgatactgtggtttcaatggccaccgaaatagccgccatatgtctcgataactcaagcggtaagcaaccctggttctgtgcctggaagagggggagtgaattcctcatgacacccaacgttccatgtcggtccttaaagcggaagaaggaatcccagggctccggaacagccgtgcgtaagcacaagcctccgagactctcggagatcaagcggaaaacggacgagcatcccgaacttaaagagaagctgatgaatagggtcgtggacgagagcatgaatttggaggatgtgccggattcagtgaacctttttgcgaacgaggtggccgctaagataatgaatttgacggaattctcaatggttgatggcatgtggcaggcccagggataccctagaaataggctgttaagtggagaccgctggtctcgactgaaagcatcctcctgtgagtctatccctgaggaggattccgaggcaagagcgtacgtgaatagtctcggcctgatgagtacactgtcacagcctgttagtcgagccagttccgtgagcaagcagtcgagttgcgaaagtatcaccgacgagtttagccggtttatggtgaatcaaatggaaaatgaggggcggggattcgagcttctcctggactattacgccgggaaaaacgccagctctatcttaaactcagccatgcagcaagcttgccgcaagagtgatcacctctctgtccgcccgtcttgtccaagcaaacaatccagtacagagtccatcacagaagaattttatcgctatatgctgagggacattgaacgcgactctagagagagtgcttcttctagacgatcatctcaagactggacagcagggttgcttagtcctagtcttcgaagcccagtatgccatcggcaatcttccatgccagattcacgtagcccatgttcgcgactgacagtgaacgtgccaattaaagctaacagcctggatgggtttgcccagaactgccctcaggatttcctgagcgtgcagccggtctccagtgcctcatccagcggactttgcaagtcagactcctgcctgtacagacgagggggcacagatcatattacgaatatgttgatccatgagacgtgggcttcgtccatcgaggcactgatgcggaagaacaagatcatcgtggacgacgccgaggaggcagacacggaaccagtgtctggaggcagcccttcacaggcagagaagtgtgcaaaccgtctggctgctagccgaatgtgttctggaccaaccctcctggtccaggaaagccttgactgtcccaggaaggactctgtcactgagtgcaagcagcctcccgtgagcagtctttccaaaacagctagtctcacgaaccattctcctctggactccaaaaaagagaccagctcctgccaggacccagtgcctatcaatcacaagcggcgtagcttatgctctcgcgaggtgcctctgatacagatcgaaacagatcagcgcgaggcctgcgcaggcgaaccagaacctttcctgtcgaagtcctctttactcgaagaggcagaagggcactccaacgataagaacattcccgacgtggtgcgtggaggggacacagcagtgagcgcctgtcaaattcactccgactcactcgatacacgagacgtgcccgaggccgaggcatccacggaagcacgggcccccgacgaggccccaaatccacccagctcatctgaagaatccacaggcagttggacccagcttgccaacgaggaggataatccggacgatacctcgtctttcctccaactgagcgagagatctatgagcgagcttgttgaggaaaagaagattctcaagggtcagtctgagtccactgaagcccccgccagtggccctcccactgggactgcaagccctcagaggtcattactcgtgattaacttcgacctcgagccggagtgcccagatgcagagttgcgcgcaacccttcagtggatcgcagcatccgagctggggattcctacaatttatttcaaaaagagccaggaaaatcgtatagagaagtttctcgacgttgtgcagctggttcatcgaaagtcttggaaagtgggagatatattccatgctgttgttcagtactgtaagatgcacgaggagcagaaggatggtaggctgtcccttttcgactggctcctggagttaggctag

SEQ ID NO: 206885 - DNA, 5103 bp, synthetic construct
  misc_feature 1..5103: note = Description of Artificial Sequence: Synthetic coding sequence
  source 1..5103: mol_type = other DNA
atggacggcaacagcctgctgagcgtgcccagcaacctggagagctctcgaatgtacgacgtgctggaacctcagcagggacgcggctgcgggtcatcgggctctggcccgggaaacagcattaccgcctgcaagaaggtcttgagatcaaactcactgctcgagtcaacggactattggctgcaaaaccagagaatgccgtgtcaaatcggcttcgttgaggacaaaagcgaaaattgcgcttccgtctgtttcgttaatctcgacgtgaacaaggacgagtgcagtaccgagcatttgcagcaaaagcttgtgaacgtgtcgccagacctgcccaagctgatcagctcaatgaatgtacagcagccgaaagaaaatgagattgtggtgttgtccggtctggcgtccggcaatctgcaggccgactttgaagtgtcgcagtgtccgtggctacccgacatctgcctggttcagtgcgcccggggcaacagaccgaatagcacaaactgcatcattttcgagatcaataagtttctcatagggctggaactggtgcaagagaggcagttgcatctggagacaaatattctgaaattggaagacgataccaactgttcgctctccagtattgaagaggactttctgacagctagcgagcacctggaggaagagtcagaagtggacgagagtcgtaatgattacgagaatattaacgtgtctgctaacgtgctggagtcaaaacagcttaagggagcgacccaggtggagtggaactgcaataaagagaaatggttgtacgctttagaagataaatacataaataagtatcctacgccgctgattaaaaccgaacggtctccagagaatctaaccaaaaatactgccttgcagagcctggacccatccgctaagccctcccagtggaaaagggaagcggtcggcaatgggaggcaagcgacccactattatcactcggaggcgtttaaaggtcagatggagaaatcacaggccctgtacattcctaaagacgcgtacttttcgatgatggataaagatgtcccttctgcctgcgccgtagcagaacaacggtcgaatctcaaccccggcgaccatgaggacacacgtaacgctctcccaccgaggcaggatggagaggtgacaaccggaaagtacgctactaacctggcagaaagcgtgctgcaagacgcttttataagactcagtcagtcacagagcaccttgccccaagaaagcgcagtatcagtgtctgtcggaagttccctgctacctagctgctactccactaaggacacagttgtgagcaggtcatggaacgaactccccaaaatcgttgtggtgcagagcccagatggctctgacgctgcgcctcagccagggatcagctcctggcccgagatggaagtcagcgtggaaacatcgtcaattctgagcggtgagaactccagtagacagccccagagtgccctggaggtggccctcgcttgcgcggctacagtgattggcaccatatctagtccccaggcaactgaacgactcaagatggagcaggtcgtttccaatttccctcctggctcttccggcgctttgcagactcaggcgccccagggactcaaggaaccgtcaattaatgaatactcttttccgtcagccctgtgtggcatgacacaggttgcctctgctgtggccgtctgtggcctgggcgagagggaggaggtaacgtgttctgtggcccctagcggatccctgccaccagctgctgaggccagcgaggcaatgccgcccctctgcggactggccagtatggagctaggaaaggaggcaatagcaaagggtttattgaaggaggctgccctggtccttactcgccctaacacgtatagctcgataggagatttcctggattctatgaatagacgtattatggagacggcttctaagagtcagacgctgtgttcagagaacgtggtccgaaatgagctggcccataccctttccaatgttattctgcgccacagtatcgacgaggtgcaccataaaaatatgattatcgacccgaatgacaatcgacattccagtgagatattggatactttgatggagagcacaaaccagctgctgctggatgtgatctgctttaccttcaagaagatgagccatatcgtccgacttggcgaatgtccagcggttctgagtaaagaaactattagaaggagagaaaccgaaccaagctgccaaccctcagacccaggcgcatctcaggcctggaccaaggccacagagtctagtagctcctctccacttagcaatagtcataacacatccttggtcattaacaacctagtggacggtatgtactccaagcaggataagggcggagttagacctggccttttcaagaacccgaccctacagtcccagttgagccgctctcatcgagtccccgactcttccactgctacaacaagctcaaaggagatctacctgaaaggtatcgccggggaggatacgaagtctcctcaccattccgaaaacgagtgcagagcatcgtccgagggacaaaggagtcctactgtgagtcagtcacgaagcggctcacaggaggcggaggagagtattcacccaaacacccaggagaaatacaattgcgcaaccagccgtattaacgaggttcaggtgaatctgtctctactgggagatgacctactcctgccagcccagagtacactccaaactaaacaccccgatatttattgtataaccgacttcgcggaagagcttgccgacactgtcgtgtcgatggccacggaaattgctgcgatttgtctagacaacagttccgggaaacaaccatggttctgtgcgtggaaacggggttcagaatttttgatgacacctaacgttccctgtcgttctctaaaaagaaaaaaggagagccaagggagcgggactgccgtcaggaaacacaagccaccaaggctcagcgagatcaaaaggaagacggacgagcaccctgagctaaaggagaagctcatgaatcgcgttgtggatgagtccatgaacttagaagatgtcccggatagtgtcaatctattcgcaaatgaggtcgccgccaagatcatgaacctcaccgagtttagcatggtggatggcatgtggcaggcgcaggggtacccccgcaatcgcctgctgtccggggaccggtggtccagactgaaagcctcttcctgcgagagcattccagaggaggattctgaggcgagagcctatgtcaactccctgggactgatgtccacgctgtctcagcccgtgagccgcgcttcctccgtctcaaagcagagctcctgtgaatccatcacagacgagttctcacggtttatggtgaaccagatggaaaacgaggggagagggttcgaactcctgcttgactactatgcgggcaaaaatgcaagctccattcttaactctgctatgcaacaggcctgccgaaagagcgaccacttgagcgtgaggccctcttgtcccagtaagcagagtagcacagaatcaattacagaggagttttacagatacatgctacgcgatatagaacgtgattctagggaatcagcctctagccgacgctcatcccaggattggacagcaggattgctgtcccctagcttacgatctcctgtatgccatcgacagtctagcatgccagactctcggagcccctgctctcgccttactgttaacgtgccgatcaaggcaaactccttagatgggtttgcccagaactgtcctcaagactttttgtccgtccagcccgtttcttccgcctccagcagcggattatgcaagagtgactcgtgcctgtatagaagaggtgggaccgatcacatcacgaatatgctcatccacgaaacatgggcctcttctatcgaagcactcatgagaaagaacaaaatcattgtggacgacgcagaggaagcggatacagaaccagttagcggcggtagcccgtctcaggctgaaaagtgtgctaacaggctagctgcctcaagaatgtgttctgggccgaccctactcgtgcaggagtcactggactgcccacgcaaggactccgttactgaatgcaaacaaccaccggtgagcagcctgagtaaaaccgctagtcttaccaaccacagccccctggatagtaaaaaggagacctcttcatgtcaggatccagtcccgatcaaccataagcgcaggtccctgtgttccagggaagttcctctaatacaaattgagaccgatcagagggaggcttgcgctggagaacctgagcctttcctgtctaaaagctccctcctcgaagaggccgagggtcatagcaatgacaaaaatatccctgacgtggtacgcggcggcgataccgctgtgagtgcatgtcagattcatagtgacagtcttgacacccgggacgtgcccgaggccgaggcatcaacagaagctcgtgcgccagacgaagcacctaatccaccctccagctcagaggaatccactggtagttggacccagctggcgaatgaggaagataatcctgacgacacatcttctttcctccagttgagcgaaaggagcatgtccaacgggaactcaagtgccacctccagcctgggcattatggatctggacatatatcaggaaagcatgccaagctctcccatgattaacgagctcgtcgaggagaagaaaatccttaagggccaaagtgagtccacggaagcaccggcatccggccctcccaccggcacagcatcaccccagcgaagcctgctggtcataaattttgatctcgagcctgagtgtcctgatgccgaacttcgagcgacactgcaatggatcgccgcctctgagctgggaatccccaccatttattttaagaaatctcaggagaatcgcatagagaaatttttagatgtggtgcagctcgttcaccgtaaatcatggaaagtgggagacatctttcacgccgtcgtccagtactgcaagatgcacgaagaacaaaaagatggcagactctcgctgttcgactggctgctggagctgggctag

SEQ ID NO: 206886 - DNA, 789 bp, synthetic construct
  misc_feature 1..789: note = Description of Artificial Sequence: Synthetic coding sequence
  source 1..789: mol_type = other DNA
atgctggccctggaggccgcccagctggacggcccccacttcagctgcctctatccggacggggtgttctatgatctggattcctgcaagcattccagttaccctgacagtgagggcgctcccgattcactgtgggattggacagtcgctcctcccgttccagcaacaccttatgaggctttcgacccggccgctgcagcattcagccaccctcaggcagctcagttatgttatgagcctccaacctattcacctgctggaaatctggagctggctccttctctagaggccccgggtccagggctgcccgcctaccccacagagaacttcgcgagccagacactggtgccccccgcctacgcaccatatccttcacctgtgctgtctgaagaagaagacttgccactagactctcctgctctggaagtgtccgactcagaatccgacgaggccctcgtggccggaccagaagggaaaggctccgaagccggaacacggaaaaagctgcggctttatcagtttctgctcggcttgttgacgaggggagatatgcgagagtgcgtgtggtgggttgagcccggcgcaggggtcttccagttctcctcaaaacataaggaacttttggctcgccggtggggccaacagaaaggaaatcggaagagaatgacataccaaaagctggcacgcgccctgcgcaactacgccaaaacaggagagattcggaaagtgaagcgaaagttgacatatcagttcgattccgctttactgccagctgtacgccgtgcatag

SEQ ID NO: 206887 - DNA, 516 bp, synthetic construct
  misc_feature 1..516: note = Description of Artificial Sequence: Synthetic coding sequence
  source 1..516: mol_type = other DNA
atggccagcagcatgacctggaccgccgccagcatccccgccaccttaattcagcgaggattgctgaccctggtgccaccagcctacgccccatatccttcaccagttctgagtgaagaggaagatctgccccttgattctccggccttggaggtgtcagacagcgaatccgacgaggctttggtggctggtcccgaggggaaaggcagcgaggccgggacacgaaaaaagttacgcctgtaccagttcctgctcgggctgctgacccgcggcgacatgcgggaatgcgtatggtgggtggaaccaggcgcgggcgtttttcagttcagctccaagcataaagagctgctcgcacgacgatggggacagcagaagggcaaccggaaaagaatgacctaccagaagttggcccgagctttgcgaaactatgctaagaccggggagattcgcaaagtgaagcgaaaattgacttatcagttcgacagcgcactgttacctgccgtgcgaagggcctag

SEQ ID NO: 206888 - DNA, 747 bp, synthetic construct
  misc_feature 1..747: note = Description of Artificial Sequence: Synthetic coding sequence
  source 1..747: mol_type = other DNA
atgacctgcgtggagcaggacaagctgggccaggccttcgaggacgcctttgaggtgcttcgtcagcactcaaccggagatttgcagtattctccggattacaggaattatcttgcactgattaaccaccggccgcatgtgaagggcaactcaagttgttatggtgtcttacctaccgaggagccagtttacaattggagaacggtcattaattcagccgcagacttttacttcgagggaaatatccatcaatcacttcagaatatcactgaaaaccaactggtgcagccaaccctgctacagcagaaagggggaaagggaagaaaaaaactcagacttttcgagtacctacacgaatcactgtacaatcccgagatggcctcttgtatccagtgggtagataaaacaaagggaatattccagtttgtgtctaagaataaagagaagcttgccgagctatgggggaaaagaaagggcaaccggaagacgatgacataccagaaaatggccagagccttgcgcaactacggccggtctggcgaaatcactaagattaggagaaagctgacttaccagttctccgaagctatactccaacgtttaagcccgagctacttcttaggtaaagaaatcttctacagccagtgtgtgcagcccgaccaagagtacctgagtttgaataattggaatgcaaattacaactacacatatgcaaattatcacgagcttaaccaccacgactgttag

SEQ ID NO: 206889 - DNA, 747 bp, synthetic construct
  misc_feature 1..747: note = Description of Artificial Sequence: Synthetic coding sequence
  source 1..747: mol_type = other DNA
atgacctgcgtggagcaggacaagctgggccaggccttcgaggacgcctttgaagtactaaggcaacattccaccggggacttgcaatatagccctgattaccgcaactatctggcattgataaatcataggcctcacgtcaaggggaatagctcatgttacggagtgttacctactgaagaacctgtgtacaactggaggaccgtgattaattctgccgctgatttttattttgagggcaatatccatcagagtcttcaaaatatcactgaaaaccagctggtacagcccacattattacagcaaaaaggaggaaagggaaggaaaaagctgcggttgttcgagtacttacatgaaagcctttataaccctgaaatggcctcgtgtattcagtgggtagacaagaccaaaggtatttttcagttcgtgtcaaaaaacaaagaaaaactcgcagaactgtggggcaaacggaaagggaacaggaaaaccatgacctatcaaaagatggcacgagccctgcggaactatggtaggagtggtgagatcactaaaatcagacggaagctaacttatcagtttagcgaagcaattctgcagcggctctcaccatcgtactttttgggaaaagaaatcttctactcccaatgtgtacagcccgaccaggagtatctgtcactcaataattggaacgccaactataactacacatatgctaattatcatgagttaaaccaccacgactgttag

SEQ ID NO: 206890 - DNA, 2568 bp, synthetic construct
  misc_feature 1..2568: note = Description of Artificial Sequence: Synthetic coding sequence
  source 1..2568: mol_type = other DNA
atgagcttcgtgcgggtgaaccggtgcggcccccgggtgggcgtgcgcaaaacgcccaaagttaaaaagaaaaaaacatctgtaaagcaggagtgggacaataccgtgacagatctgacggtccatagggctactccagaggacctagtgcgacggcatgagatccacaagagcaaaaacagagccttggtgcattgggagctccaggaaaaagctctgaagcgcaagtggcggaaacaaaagcccgaaaccctgaacctggaaaaacgacggttgtcgatcatgaaagagatcctgtccgaccagtatcaaatgcaggatgtactcgagaagtctgatcacctaattgctgccgcgaaggaactctttccccggaggcggacaggatttcccaatgtaaccgtcgctccagatagtagccaaggccccatagtggttaaccaggaccccattactcagagtattttcaatgaaagtgtcattgagcctcaggccctgaacgatgtggacggggaagaggagggcacagtgaattcccagtccggagaaagcgaaaacgaaaacgagctggataactctctcaattcgcagtcgaatacgaatacagacagatttctacagcaattgactgaagaaaatttcgaactgatcagtaagctctggactgatatacagcaaaagattgcaacacaatcccagatcaccccccccggtaccccctctagcgctctgagcagcggggaacaaagagcagccctgaacgccaccaatgctgtcaaacgtctgcagactagactgcagccagaagagtcgactgagactttggactcatcctacgtcgtgggccacgtgttaaactcccgaaagcaaaagcagctccttaacaaagttaagcgtaaacctaacctccacgcacttagcaagcctaagaaaaacatcagttcaggcagtaccacgtctgcagatttacctaaccgcactaacagtaacctggatgtcctaaagcacatgattcatgaggtggaacacgaaatggaagagtacgagcgctggaccggaagggaggtaaaggggctgcagtcgtctcaaggattaactggattcaccctgtcactggtgagcagtttgtgcaggctagtgcgttatctcaaggaatctgaaatccagctccgaaaagaggtcgaaacgagacagcagctggaacaggtgctgggggaccatagagagttaattgacgcactgacggccgaaatcctgaggttgcgggaagaaaacgccgcaactcaggcgcgtttgcagcaatacatggtcacaactgacgaacaactgattagtttgacccatgccattaaaaattgccccgtgatcaacaataggcaggagattcaggcctctgaatccggggctacaggccggagagtaatggacagccccgagagacccgtcgtgaacgcaaatgttagtgttccactgatgtttcgtgaggaagtagcagagtttcctcaggaggagctgccagtcaagctctcccaggtccctgacccccccgataacatgaatctagccaagaatttccctgcccacatatttgagccagccgtccttctcacccctccaaggcagaagtcaaacctcaagttctctcctctgcaggatgttctgcgccgcacagttcagaccaggccagccccccggctaccccccactgttgagattatcgaaaaggagcagaattgggaagagaagacactacccattgacactgacatacagaattcatccgaagagaatagactcttcacccagcgttggagagtaagccatatgggcgaggatctcgagaacaagacccaggcccctttcgttaatctgtctcaacctctgtgtaacagccatagcaatactcaacaaagccggtctcccacgtttagtgaggaattgcccgtactaggtgatggacagcagctcaggacaaacgagtcgctgatacaacgcaaagacataatgacgcggattgctgacctgacgctgcaaaatagcgccattaaggctcatatgaataacatcatagaacctcgcggggagcaaggagatggcctgcgcgaactcaataagcaggaatccgcctccgatatgacaagcacttttcctgtcgctcagtctctgacccccggtagcatggaagaacggattgcagaactcaaccgccagtccatggaagccagaggcaaactgctccagttgatcgaacagcaaaagcttgtgggtttaaacctttcccctcccatgtcgcctgtccagcttcccctgcgagcttggacagagggcgctaagaggactattgaggtctcgattccgggagcagaggccccagaaagttccaaatgcagtacagtctctccagtgagtggtatcaacacacggcgtagctctggggcaaccgggaattcatgtagtcccctgaatgccacctcaggtagcggtaggttcacccctctgaacccacgcgcaaaaatcgaaaagcagaatgaggaaggatggtttgccttatctacccatgtgtcttag

SEQ ID NO: 206891 - DNA, 483 bp, synthetic construct
  misc_feature 1..483: note = Description of Artificial Sequence: Synthetic coding sequence
  source 1..483: mol_type = other DNA
atgagcttcgtgcgggtgaaccggtgcggcccccgggtgggcgtgaggaagacccccaaggtgaaaaaaaaaaagactagcgtcaagcaggaatgggataacacagtaaccgacctcacagtgcaccgcgcaaccccggaggatcttgtgcggagacacgaaatccacaaaagcaagaatagggcactggttcactgggagcttcaggaaaaagcgctcaaacggaaatggagaaaacaaaagccagagacgcttaacttggagaagcgcaggttaagcatcatgaaagagattctgagcgatcaatatcagatgcaagacgtgcttgaaaagtccgatcatttgatagccgctgccaaagagctttttcccagaaggagaacaggattcccgaacgtcacagtggccccagactcatctcaaggacccatcgtggtgaatcaagaccccattactcagtcaattttcaatgaatcagtctag

SEQ ID NO: 206892 - DNA, 522 bp, synthetic construct
  misc_feature 1..522: note = Description of Artificial Sequence: Synthetic coding sequence
  source 1..522: mol_type = other DNA
atgagcttcgtgcgggtgaaccggtgcggcccccgggtgggcgtgcggaagactcccaaagtcaagaaaaaaaaaacatctgtgaaacaagaatgggataacactgtaaccgaccttaccgttcaccgggctacgcctgaagacctggtgcgcaggcatgagatccataagagcaaaaatagagctctggtgcactgggaactgcaagagaaggcgttgaagcggaagtggcgaaagcagaaacccgagaccctgaacctcgaaaagagaagactgtcgatcatgaaggagattctgtctgaccagtatcagatgcaagacgtcttagagaaaagcgaccatctcatcgcggcagctaaggagttgttccccagacgcaggacgggttttcctaacgtgaccgtcgcccccgattctagccaggggccgatcgtggtgaatcaggacccaataacacagagtatttttaatgaatctgtaatcgaaccacaggcgctgaatgacgtcgacggagaggaatag

SEQ ID NO: 206893 - DNA, 60 bp, synthetic construct
  misc_feature 1..60: note = Description of Artificial Sequence: Synthetic coding sequence
  source 1..60: mol_type = other DNA
atgagcttcgtgcgggtgaaccggtgcggcccccgggtgggcgtgcggaaaaccccttag

SEQ ID NO: 206894 - DNA, 789 bp, synthetic construct
  misc_feature 1..789: note = Description of Artificial Sequence: Synthetic coding sequence
  source 1..789: mol_type = other DNA
atgaagacccccttcggcaagacccccggccagcggagccgggccgacgctggtcacgccggcgtcagtgccaacatgatgaaaaagcgcacatctcataaaaagcacaggagcagtgtagggccctcaaagcccgtgagccagccacgtcgtaacattgttggttgccgcattcagcatggatggaaagaaggaaatgggcccgtcacccaatggaagggaaccgttctggaccaggtgcctgtgaacccatctctttacctgataaaatacgacggattcgactgcgtgtatggacttgagctgaacaaggacgaacgggtctcggccctagaggtcctcccggaccgagtagccacaagtcgcatatctgacgcccatttagccgacaccatgattgggaaggcagtggagcacatgttcgaaactgaagatggttccaaagacgaatggaggggcatggtcctcgctcgggctccagtcatgaacacctggttctacatcacttatgagaaggacccagtactgtacatgtaccaactactggatgattacaaggaaggcgacctgcgaataatgccggattctaacgatagcccccccgctgaacgagaacccggggaagtcgtggacagcctagttgggaagcaggttgagtatgccaaggaggacggcagcaagaggactggaatggtgatccaccaagtcgaggccaagccaagcgtgtacttcattaaatttgacgacgactttcatatttacgtgtacgatcttgtaaagacaagctag

SEQ ID NO: 206895 - DNA, 789 bp, synthetic construct
  misc_feature 1..789: note = Description of Artificial Sequence: Synthetic coding sequence
  source 1..789: mol_type = other DNA
atgaagacccccttcggcaagacccccggccagcggagccgggccgatgccggacatgcaggggtcagtgctaacatgatgaaaaaaagaacgtcacacaaaaagcatcggtctagcgttggtccctcaaagccagtctctcagcccagacgcaatattgtggggtgtcgcatccagcatggttggaaagagggcaacggccccgttactcagtggaaaggcaccgttctggaccaggttcctgtgaatccgagcttgtatcttattaaatacgacggcttcgactgtgtttatgggttggaactgaataaggatgagcgcgttagcgcgctagaggttttgccagatcgagtggcaactagccggataagcgatgctcacttagccgataccatgattgggaaagctgttgaacacatgttcgagacagaggacggctcaaaagatgaatggaggggcatggtcctggcacgcgcccccgttatgaatacctggttctatatcacctatgaaaaagatcccgtgctgtacatgtaccaactcctcgacgactataaagaaggcgacctcaggatcatgccagactcaaacgattcaccccccgctgagagggagcccggagaggtggtggattcactcgtgggcaagcaggtcgagtacgccaaagaagatgggtccaagcgcactggcatggtgatccatcaggtggaggctaagccctctgtttatttcatcaagtttgacgatgattttcatatctatgtgtacgacctcgtaaagacttcctag

SEQ ID NO: 206896 - DNA, 1587 bp, synthetic construct
  misc_feature 1..1587: note = Description of Artificial Sequence: Synthetic coding sequence
  source 1..1587: mol_type = other DNA
atggccggcagcgacaccgcccccttcctgagccaggccgacgaccccgatgatggccccgtcccaggaacacccggattgcctggcagtacaggaaaccctaaatcagaggagcccgaagtgccggaccaggagggcttgcagcgcatcacggggctgtcgccgggtagatcggccctgatcgtggcagtgttatgctacattaatcttcttaactatatggacaggttcactgtggccggggtgctgccggacatcgaacagttctttaatatcggagacagcagtagcggactcatccagacggtcttcatttcctcctatatggtgctagctcctgtgttcggttacttgggggacagatataataggaagtatctgatgtgtgggggcatagcgttctggtcacttgttactctcgggagctctttcattcccggggaacatttctggttgctgctcctgaccaggggcttggtgggagtgggggaagcttcatatagcacaattgcaccaacgctgatagccgatctctttgtggccgaccagcgctcacgcatgcttagcattttctacttcgccattcccgtgggaagtggcctcggatacattgctggctccaaggtcaaagacatggccggcgattggcactgggctctgcgagttacacccggcctaggcgtcgtcgctgttctcttgctctttttagttgtgagggaacctcccaggggggcggtcgagagacacagcgacttgccacccctgaaccctacaagctggtgggccgacctaagagccctggcccgaaacccttcttttgtcttgagttccttgggctttacagccgtcgcttttgtaaccggtagtctcgcgttgtgggctccagcgttcctcctgagatcccgcgtagtgcttggagaaactccaccctgcttgccaggagactcctgtagtagctctgacagcttgatcttcggcctcataacatgcctgaccggcgtattgggagtggggttaggtgtggagatctccaggcggctgcggcattctaaccctagggcagatcctctggtttgcgcgacagggctcctaggttccgcgccctttctgttcctcagtctggcttgcgctagaggttctatcgtcgccacatacatatttatcttcatcggcgaaacgctactttcaatgaattgggctattgtcgcggacattctgctttacgtcgtgattcctacccggaggagtaccgccgaggctttccagattgtcctgtcacacctgcttggcgacgccggctccccttatctgattggcctgatttccgacaggttgcgccggaattggccgcctagcttcctgagtgaattcagggccttgcaattcagcctgatgttgtgtgcattcgtcggggcactcggtggtgcagccttcctgggtactgccatctttattgaagcagaccgaaggcgagctcagctgcatgtgcagggccttcttcacgaggctggatccaccgatgatagaattgtcgttccccagcgggggcgatctactagggtcccagtcgcgtcagtattgatctag

SEQ ID NO: 206897 - DNA, 1368 bp, synthetic construct
  misc_feature 1..1368: note = Description of Artificial Sequence: Synthetic coding sequence
  source 1..1368: mol_type = other DNA
atggaccggttcaccgtggccggcgtgctgcccgacatcgagcagttcttcaatataggggacagcagttccggactaatccagacagtgtttatctcctcctatatggtcttggcaccagtcttcggctatttgggcgatcgctacaatcgaaaatacctaatgtgtggcggcatcgccttctggtctctcgtcactctgggatcatctttcattcccggagagcatttttggcttctgctcctgacgagaggcctggtcggggtgggagaggcctcttactcaacaatcgctccaacgcttatcgcggatcttttcgtggccgatcagcgctccagaatgctgtccatattttatttcgcaatccctgttggctctggcttgggttatatcgcaggttccaaggtgaaggatatggccggtgattggcattgggcactcagggtgacccctggacttggcgttgtggcggtactgttgctgttcctcgttgtgcgagaaccgcctaggggcgccgtcgagcgccactcagacctcccccccctgaatccaacatcttggtgggcggatcttcgtgctttggccaggaatcccagcttcgtgctgtcttctctgggctttactgccgttgcttttgtgacaggcagtctggccctgtgggcccctgctttcctgctaaggagtagagtggtgctgggtgagacccctccctgcctgcccggcgattcttgttcttcctccgattcactgatttttggcttaataacatgtctcactggcgtgctcggtgtaggcctcggggtggaaatatcccggcgcttgcgtcattctaacccccgcgccgaccccctggtgtgcgccactggtctgctgggatccgccccgttcctgttcctgtcactggcttgtgccagaggctccattgtagccacatacatattcatatttatcggcgaaaccctcctgagtatgaattgggcaatagttgccgatatcctattgtacgtggtaatacctacaagacggagtacggccgaggcgtttcagatcgtgctgtctcatctacttggagacgccggttccccctaccttatcggcctgatcagcgatcgattgagacgcaactggcctccctccttccttagcgagtttcgtgccctgcagttctcgctgatgctgtgtgcattcgtgggggcactaggtggggctgcatttctcggaacagctatctttatcgaagctgataggaggcgggcacagcttcacgtccaagggttgctgcacgaagccggttctaccgatgaccgcatagtggtccctcagaggggtcggtccactagagtcccagtcgcttcagtcctgatctag

SEQ ID NO: 206898 - DNA, 1431 bp, synthetic construct
  misc_feature 1..1431: note = Description of Artificial Sequence: Synthetic coding sequence
  source 1..1431: mol_type = other DNA
atggccggcagcgacaccgcccccttcctgagccaggccgacgacccagacgacggtcctgtgccagggactccaggcctccctggaagtactggaaaccctaagtcagaggagccagaggtgcccgatcaggagggtctgcagcgtatcaccggcctgtccccgggaagaagcgctctgatcgttgccgtgctgtgctacatcaacctgctgaactatatggatagatttaccgtggctggcgtgctgcccgacatcgagcagtttttcaatatcggggacagcagctccggcctgatacagacagtgttcatcagttcttatatggtcctagcacctgttttcggatacctcggcgaccgttacaacagaaagtacctcatgtgcggaggcatcgcattttggtcactggtgacgctgggaagctcctttatacccggggaacatttttggttattgctgctaaccagagggctggtgggagtcggcgaggcctcatattccacaattgccccgaccctgatcgcagacctgttcgtagccgatcagcgcagccgtatgctgagtatcttttattttgctattcccgtggggagcgggctggggtacatcgctggatccaaggtgaaagatatggccggggactggcattgggctttgcgcgtcacgcctgggcttggcgtggtggccgtccttttgctgttcttagtagtccgggagcctccccgaggagccgtcgaacggcatagcgacctgccgcctctgaatcctacctcctggtgggctgaccttcgcgctctggcccgcaacctgatctttggtctcataacttgcctaacgggcgtactgggcgtaggccttggagtggaaatctctcgtaggctgcggcattctaatccccgggccgatcctttggtgtgcgcaaccgggctcctggggagcgccccttttctcttcctgtcacttgcctgcgccagggggagcatcgtcgccacatacatattcatttttattggagagacactactgtctatgaactgggccattgtagccgatattctgctctatgtagtgatccccacaagacgaagcactgcagaagcgttccagatcgttctgtctcacctcctgggcgacgccgggagcccgtacctgatcggcttgatatcagatcgcttgaggaggaattggccaccaagttttttgtccgaatttagggcactacaattctctctcatgttgtgtgcatttgtcggcgcattaggaggggcagccttcctgggcacagccatcttcattgaggccgacaggcggcgtgctcagctgcatgtccagggcttgctacacgaagccggaagtaccgatgacaggattgtggttcctcagagggggagaagcactcgcgtgcccgttgccagtgtcctgatttag

SEQ ID NO: 206899 - DNA, 1365 bp, synthetic construct
  misc_feature 1..1365: note = Description of Artificial Sequence: Synthetic coding sequence
  source 1..1365: mol_type = other DNA
atggccggcagcgacaccgcccccttcctgagccaggccgacgaccctgatgacggacccgtgcctggaacaccaggactccctggctcaactggaaacccaaagtcggaggagcccgaagtgccagatcaggaggggctacagagaatcaccggactgtctccaggacgtagcgccctgatcgtggcagttctctgttatataaatttattgaactacatggatcgtttcaccgttgctgtctttattagctcctacatggtgttggcacccgtctttggttacttaggggataggtacaataggaagtacctaatgtgcggcggtatcgcattctggagtcttgtgacactgggctctagcttcattcctggagagcacttttggctgttactactgactcgggggcttgtcggggtgggagaagcatcctactccacgattgccccgacattgattgccgatttattcgtggcggaccagcggagtagaatgctttccatcttctactttgccattcctgtgggctccggtttgggctacatcgccggatcaaaagttaaggacatggcgggagattggcactgggccttgcgagtgacacccgggcttggagtggtggccgtactgctactgttcctcgtggtgcgtgagccacctcgcggagccgtggagagacatagtgatctccctccccttaacccgacatcctggtgggctgacctgagggccctggcccggaacctgattttcggtctcatcacttgtctgactggtgtcctgggtgtgggcctgggggttgagatctccagacgactaagacactccaatcctcgggctgaccctttggtatgtgccaccggccttctgggctcagccccttttctgttcctttcccttgcttgcgcgcgggggagcatcgtggcgacatacatttttatattcattggggaaaccctactctctatgaactgggccatagtagccgacattctgctgtacgtggtgattcctacccgtcggagcaccgctgaggcctttcaaattgtattgagtcacctgttgggcgacgcagggtccccctatcttatcggcctgatctcagacaggcttcggcgcaattggccacctagcttccttagcgaatttcgtgctctgcagttttccctaatgctatgcgcattcgtgggggctcttggaggagccgctttcctaggcacagcaatctttatcgaggcagacaggaggagagcccagctacacgtacaagggttactgcatgaagccggaagtactgatgaccgcattgtcgtgccccagaggggacggtccaccagagtgcccgtggcctcagttcttatttag

SEQ ID NO: 206900 - DNA, 1650 bp, synthetic construct
  misc_feature 1..1650: note = Description of Artificial Sequence: Synthetic coding sequence
  source 1..1650: mol_type = other DNA
atgatgtgcctggagtgcgccagcgccgccgccggcggcgccgaggaagaggaggccgatgcggaacgaaggcgaagaaggcggggtgcccagcggggggccggcgggtctggatgttgtggcgccagaggcgcgggcggcgctggggtcagcgctgcaggagacgaggtgcaaactctaagtgggagtgtgagacgggcacctaccggccccccaggcacccccggcacacctgggtgtgccgccaccgccaagggccccggcgcacagcaaccaaaacccgcctccctggggcgaggtcgaggcgccgctgcagccattctgagcttgggtaatgtactcaactatctagacaggtacaccgtggccggggttctgctagatatacagcagcattttggtgtcaaagaccgcggagcagggttgctgcagtccgtgttcatctgctcattcatggtggctgcccccatttttgggtacttgggtgacagattcaaccggaaggtgatcttatcatgcggcatttttttctggagtgccgtgacattcagttcgtcatttatcccacaacagtatttctggctcttagttttatcgagaggactggttggcatcggtgaggcctcttatagcacaatcgcacctacgatcatcggggatctgttcaccaagaatacccgcactcttatgttaagcgttttctactttgccattccactgggctcagggctgggatacattactggttcaagcgtgaagcaggccgcgggggactggcattgggcgctgcgggtgagtcccgttctgggaatgattactgggacgctgatactaatcttggtcccggcaaccaagagagggcacgcagaccagttgggagaccaactgaaagcacgcacgtcatggctccgggacatgaaggccctcatacgcaacaggtcgtacgtgtttagcagtctggcaaccagcgctgtcagctttgctactggggcactggggatgtggatccctctctacctccaccgagcccaggtcgtccagaaaactgcagagacatgtaatagccctccttgcggagccaaggattctctgatcttcggggcaataacctgctttacaggctttttaggagtggtgaccggagctggggccacccggtggtgtcggctgaaaactcaacgggctgatccactggtttgcgccgtgggaatgctgggatccgctatcttcatttgtctcatttttgtcgccgctaagagctctattgttggggcttatatctgcatctttgtgggggagactctgctgttcagcaattgggccatcacagccgatatcctgatgtatgtggtgattcctactagaagggccactgcagttgccctccagtccttcacgagtcaccttctaggtgacgctgggagcccatatctgatcggttttatttccgatctgatcaggcagtcaacaaaggacagccccttgtgggaatttttatctcttggttacgcgttgatgctgtgcccgttcgttgtggtgttgggcgggatgtttttcctggcaaccgcccttttttttgtttctgaccgcgccagagccgagcagcaggtgaatcagctagcaatgccgccggcatctgtgaaagtttag

SEQ ID NO: 206901 - DNA, 1158 bp, synthetic construct
  misc_feature 1..1158: note = Description of Artificial Sequence: Synthetic coding sequence
  source 1..1158: mol_type = other DNA
atgctggtgtgcttccggctgtacagctggctgttcttcctgagccggggaatcgtgggaactggtagcgctagttactcaactatcgcgccaacggtgctaggcgatttgttcgtgcgggaccaacgtacaagagtgctggccgtattttacatctttatccccgtgggaagtgggctcggctatgttctcggctctgcagtcactatgctaacgggtaactggagatgggcgctccgcgtgatgccctgcctggaagcggtcgccctcatcctgctgattctcttagtccctgatccacctagaggtgccgccgagacccagggagagggcgctgtgggcggttttaggtcgtcctggtgcgaagacgtcaggtacctcggaaagaattggagtttcgtttggtccaccctgggagtgaccgcgatggctttcgtgacaggggccttgggcttctgggctccaaaatttctccttgaggccagggttgtgcacggcctgcagccaccctgtttccaggagccatgctcaaaccccgattctctcatctttggtgccctgacgattatgacaggcgtaatcggagttattctaggcgccgaggccgcccggcgatataagaaggtgatcccgggcgctgagcctttaatctgcgcgtcatctctgcttgccaccgcaccatgtctgtacctcgccctggtgttggcgccgactacactcctggcttcttacgtgttcctcgggctgggagaattgctgctgagctgcaactgggccgtggtggcagacattctgctctccgttgtggtaccacgctgcaggggtactgcagaggcccttcagattactgttggccacattctgggagatgcaggcagcccatacctcaccggccttatttcaagtgtgttaagagcacgccggcctgattcttatctccagagattccgatcgctgcaacagagtttcctttgctgcgcgtttgttatcgcactcggtggaggctgttttctgctcactgccctctacttggaacgggacgagactcgggcctggcaaccggttacaggcacccctgattccaacgatgttgactccaatgatctcgagagacagggcctgctctccggggcaggtgcttccacagaggaaccctag

SEQ ID NO: 206902 - DNA, 1539 bp, synthetic construct
  misc_feature 1..1539: note = Description of Artificial Sequence: Synthetic coding sequence
  source 1..1539: mol_type = other DNA
atggccggcggcatgagcgccgagtgccccgagcccggccccggcgggctccagggccagtctcccggtccgggtcgtcaatgcccgcctcccatcactcctaccagttggtcactgcctccttggcgagcctatgtcgcagctgccgtgctgtgttatataaatcttttgaattacatgaactggttcatcatcgcgggcgtgctcctcgatatccaagaagtttttcagatctcggacaatcatgctggactgctgcagaccgtgtttgtgtcctgtttgctgctgagcgcccctgtcttcgggtatcttggcgataggcactcgaggaaagctactatgtcatttggcatcctgttgtggagtggagcagggctttcttcatccttcatttcccccagatatagctggctcttcttcctgtcgcgtggcattgtgggcaccggatccgcttcatattcgacgatcgccccaacagtcctgggtgacctgttcgtccgcgaccaacgaactcgtgttctggctgtgttctatatttttatacctgttggatccggccttggctatgtgctcggctcagcggttacgatgctgacaggaaactggaggtgggccctgagggtgatgccctgtctggaagctgttgctctcattctattgattctcctggtaccagacccccctaggggggcggcagagacccagggtgagggtgccgtgggaggttttcggtcaagctggtgtgaagacgtccggtatctgggcaaaaattggtcatttgtctggtccacgctcggcgtgacagctatggctttcgtcacaggagccctgggcttttgggctcccaagttcttgctggaggcccgggttgtccatggcctccagccaccgtgtttccaggaaccgtgttccaatcccgactccctcatttttggtgccctgacgattatgactggagtgattggcgtcatcctcggggccgaggccgcccggcgatacaaaaaggtgattcccggggctgaacctctgatctgcgcctcttccctcctcgccacagccccctgcctgtacttagcgttggtcttggcccccaccaccctgctggcttcttacgtgtttctgggactgggcgagctgctgttatcgtgtaattgggcagtggtagccgatatactgctgtccgtggtcgttccccgatgccgcggcacagcagaggcactgcagatcaccgtaggacacatcttgggcgatgccggttccccataccttaccggtcttatttcctccgtgttacgggcaagaaggccggatagctatcttcagcggttccgcagcctgcagcagagcttcttgtgctgtgcttttgtgatcgcactcggtgggggatgcttccttctgaccgccctgtacctggagagagatgaaacaagagcttggcaaccagtcaccgggaccccggatagcaatgatgttgattccaatgatcttgagagacaaggactgctgtccggagcaggagctagcaccgaggagccatag

SEQ ID NO: 206903 - DNA, 249 bp, synthetic construct
  misc_feature 1..249: note = Description of Artificial Sequence: Synthetic coding sequence
  source 1..249: mol_type = other DNA
atgggccagaccgccctggccggcggcagcagcagcacccccaccccacaggcactctatcctgacctttcatgtccggaaggactggaggagctattaagcgcgcctccccccgacctgggcgcccagagacggcacggctggaaccccaaagattgcagtgaaaacatcgaggtgaaggaaggcggcctgtattttgaacgacggccggtggcccagtcgactgatggagctcgaggaaagcgctag

SEQ ID NO: 206904 - DNA, 792 bp, synthetic construct
  misc_feature 1..792: note = Description of Artificial Sequence: Synthetic coding sequence
  source 1..792: mol_type = other DNA
atgggccagaccgccctggccggcggcagcagcagcacccccacccctcaagccctctacccagacctgtcctgccctgaggggctcgaggagttattatcggctcccccacccgacctcggcgcccagcgcagacacggctggaatccaaaggattgctcggagaacatcgaggttaaggagggtggcttgtactttgaacgaaggcccgtggcacagtcgacagatggcgcaagggggaagcggggatactcacggggattacacgcctgggaaatttcctggcccttggagcagcggggcacgcacgctgttgtcggcgttgctactgctttggccccactgcagacagaccattatgcggcgctcttgggcagcaacagcgagagttggggatgggatattggaagggggaaattgtatcaccagtctaaaggcccaggagctccgcagtatcccgccggtacgcagggagaacaactggaggtccccgaaagattgcttgtcgtccttgacatggaagaagggaccttgggctacgctatcggggggacctatctgggccccgcctttagaggtctcaaaggtcgcacactttacccagccgtgtcagccgtctggggacaatgtcaggtgcggatccggtaccttggtgaacggagggcagaaccacactcactgctgcacctgtccagactctgtgtgcgacataatctgggagatactcgacttggccaggtatccgctctacctctgccccccgccatgaagcggtacctgttgtatcagtag

SEQ ID NO: 206905 - DNA, 792 bp, synthetic construct
  misc_feature 1..792: note = Description of Artificial Sequence: Synthetic coding sequence
  source 1..792: mol_type = other DNA
atgggccagaccgccctggccggcggcagcagcagcacccccacccctcaggcactgtaccctgacctaagctgtcccgagggcctcgaggagctgctgtctgcccctccgcctgacctcggagcccagcgtcggcacggctggaaccccaaggactgctcggaaaacatcgaggtaaaggaaggtggtttgtacttcgaacggcgaccggttgcacaaagcactgatggagccaggggcaagcggggctattcaagaggcctgcacgcgtgggagatctcttggcccctggaacagcgggggacacacgctgttgtgggggtagcaacagcattggcacccctgcagaccgaccactacgccgcgctcctgggttctaattctgagtcctggggttgggatatcggacggggaaaactgtatcatcagtctaaaggtcccggcgcccctcagtatccagctggaactcagggggagcaacttgaggtcccagaaaggctgttggttgtgctggacatggaagagggcaccctcggttacgccatcggcgggacatatttgggccctgccttccgagggttgaaaggacgtacgctatatccagctgtgtctgccgtttgggggcagtgtcaagttaggattcggtacctgggtgagcgtagggcggagccccattcattgttacatctgtctcgcctatgcgtaaggcataacctgggtgacacccgactcggccaggtgtcggccttgccacttccccccgcaatgaaaaggtatcttctttatcaatag

SEQ ID NO: 206906 - DNA, 1068 bp, synthetic construct
  misc_feature 1..1068: note = Description of Artificial Sequence: Synthetic coding sequence
  source 1..1068: mol_type = other DNA
atggcccggcggccccggaacagccgggcctggcacttcgtgctgagtgccgcacgcagggacgccgatgctcgggcagtcgccttagcaggttccaccaattggggctatgacagcgacgggcagcattctgatagcgatagcgatcctgagtattccacattgcctccgtctataccctccgccgtccctgtcaccggggagtcattctgcgattgtgcagggcaaagcgaagcatccttttgttcatccttacacagcgcccaccgcggccgagattgtcgatgcggagaagaggacgagtactttgactgggtttgggacgatcttaataagagcagtgcaaccctactgtcctgtgacaatcgtaaggtgagcttccacatggaatacagctgcggcaccgcggccatcagggggacgaaggaactaggggaagggcagcacttttgggaaatcaagatgacaagccctgtatacggcacagacatgatggtcgggatcggtacttcagatgtagacttggacaagtatcgacacaccttctgctcattactcggcagggacgaggatagctgggggctttcctacacaggtctgttgcaccacaagggcgataaaacaagtttctctagtaggttcggccagggcagtataatcggtgttcatctcgacacatggcatggcactctaacattcttcaaaaaccggaaatgtatcggagtggcggcgaccaaactgcaaaataaaagattctatcctatggtgtgctccactgcggccaggtcctccatgaaggtgacacggagctgtgccagcgccacttcacttcagtatctctgttgccatcgcctgaggcagcttcgtccggactcaggtgacaccttagagggcctgccactgcccccgggcttaaagcaggtgttgcacaacaaactcggatgggtgctaagcatgtcctgctcccggcgcaaagcgcctgtaagtgacccccaggcagccacgagtgcccatcccagctctcgcgagccacgtccgtgccagagaaaaaggtgcaggagaacatag

SEQ ID NO: 206907 - DNA, 480 bp, synthetic construct
  misc_feature 1..480: note = Description of Artificial Sequence: Synthetic coding sequence
  source 1..480: mol_type = other DNA
atggagtacagctgcggcaccgccgccatccggggcaccaaggagcttggcgaaggacaacacttctgggagattaagatgacatcccctgtatacggtaccctgacattcttcaaaaacaggaagtgcattggtgtagccgcaaccaaactccagaataaaaggttttacccgatggtctgtagcaccgcagcccgttcttccatgaaagttacccgtagctgtgctagcgccacgagcctacagtacctctgctgtcaccgcctcaggcaactgagacccgactctggcgatacactagagggtctgcctctcccccccggtctcaagcaggtgttgcacaataaactgggatgggttctgagtatgagttgctcccgccggaaggcccctgtgtctgatccccaagccgctacctcagcacaccctagttctcgagagccgcgtccatgccagcggaagcggtgtaggcggacttag

SEQ ID NO: 206908 - DNA, 1068 bp, synthetic construct
  misc_feature 1..1068: note = Description of Artificial Sequence: Synthetic coding sequence
  source 1..1068: mol_type = other DNA
atggcccggcggccccggaacagccgggcctggcacttcgtgctgagcgctgcgcggcgtgatgcagacgcccgtgccgtggcactcgctggatctaccaactggggatacgattccgatggacagcactccgattctgactctgatccagagtattcaacactgccaccctccattccctctgctgttcctgttaccggcgagtccttctgcgactgtgcaggacaaagcgaggcgagcttttgctcctccctccattcggcccatcggggacgggactgcagatgtggcgaggaggacgaatactttgactgggtctgggacgacctaaacaagagtagtgccaccctgctctcgtgtgacaaccggaaggtcagcttccacatggaatactcttgcgggactgccgcaatacgcggtactaaggagctgggggagggtcagcacttctgggaaatcaaaatgacaagtcccgtatatggcactgacatgatggtgggcattggcacttctgatgtggacctcgacaaatataggcacacattttgcagcctccttggccgggacgaggattcctggggattgtcctatacgggcttgctgcatcacaaaggagacaagaccagcttttcttccaggtttggccaaggcagtattattggagttcacctcgatacatggcatggaacactgacattcttcaaaaaccggaagtgcattggagtggctgctacaaaactgcagaataaaagattctaccccatggtctgtagcacagccgctcggtctagcatgaaggtgacaagatcgtgtgcaagtgccaccagcctgcagtacttgtgctgtcatcgtctgcgtcagttaagacccgacagcggcgatacactcgaaggtcttccattaccacccggattgaaacaggtcctgcacaacaagcttgggtgggtcctgtcaatgtcatgctcccggcggaaggctccagtaagcgatcctcaggccgccacttcagcccatccttcttctcgagagccgaggccatgtcagaggaaacgttgtagaagaacctag

SEQ ID NO: 206909 - DNA, 822 bp, synthetic construct
  misc_feature 1..822: note = Description of Artificial Sequence: Synthetic coding sequence
  source 1..822: mol_type = other DNA
atgggccagaagctgagcggcagcctgaagagcgtggaggtgcgggaaccagccctgcgtccggcaaagcgagagctgaggggcgccgaacccggtcgtccagcgcggctggaccagctcctggacatgccagccgctgggctggcagtgcagctgaggcatgcatggaatcccgaagaccggtcccttaacgtgtttgtcaaagacgacgatagactgacatttcaccgacaccctgtggcacaaagtaccgatggaattagaggaaaggtgggccacgctcggggcttgcacgcttggcagattaattggccagccaggcagcgtgggacgcacgccgtggtgggagtagctaccgcaagggctccgttacactccgttggctatactgccttggttggctctgacgctgaatcttggggctgggacctggggcgcagtcgcctgtaccatgacggtaaaaaccagccgggggtggcttatcctgcattcctgggtccagatgaggccttcgctcttcctgacagtttattagtggtactggatatggacgagggaactctgagttttatcgtggatggccagtacctgggggtggcgtttcgcggccttaaaggcaagaaactctatcccgtcgtatcagccgtgtggggtcactgcgaagttactatgcgatatattaacggtctggatcctgagccactcccactgatggacctatgcagacggagtatcagatcggccctagggagacaaagactccaggacatatcttccctccctctccctcagtctttaaagaattatttgcaatatcagtag

SEQ ID NO: 206910 - DNA, 1908 bp, synthetic construct
  misc_feature 1..1908: note = Description of Artificial Sequence: Synthetic coding sequence
  source 1..1908: mol_type = other DNA
atggccagcagcggcatggccgacagcgccaaccacctgcccttctttttcggcaacattacaagggaggaggccgaagattatcttgttcaggggggcatgtccgatggactgtatctgttgcgtcagagcaggaactacctcggtggattcgcattgtccgtggcccacgggcgcaaggctcatcactataccattgaacgcgagttaaatggaacatacgctattgccgggggcaggacacatgcttcccctgccgacctgtgtcattaccacagtcaagagtctgatggccttgtctgtctgcttaagaagccctttaaccgcccccagggcgtccagcctaagacaggacccttcgaagacctcaaggaaaacctaatccgcgagtacgtcaaacagacctggaaccttcaggggcaggcgttggaacaagctatcatcagtcagaagccccagttggagaagctgatcgcaactaccgcccacgagaaaatgccgtggttccatggtaagatctcccgtgaagaatcggagcagatcgtgctgatcggaagtaagacaaacgggaagttcctcatcagggcacgggacaacaatggttcctatgcattatgtttgctccatgaggggaaagtgcttcactatcgcattgataaagacaagacaggtaagctgtctatcccggaaggcaaaaagttcgataccctctggcagttggtcgaacattacagctacaaggctgatggactcttgcgcgtgctcacagtcccttgtcagaaaatcggcacacagggaaacgttaacttcgggggacgaccgcagctcccaggaagccaccccgctacatggagcgcaggagggattatcagcagaattaagtcatacagctttccgaaacctgggcatcggaagagtagtcctgcccagggaaaccgccaggaatctaccgtctcgtttaatccatacgaaccagaattggctccgtgggcagctgataaaggacctcagagggaagccctccccatggatactgaggtatatgaaagtccttatgccgatcctgaggagattcggcccaaggaggtctacctggatcgaaaactgctgactctggaagacaaggagctagggtctggaaacttcggtaccgtaaaaaagggttattatcagatgaagaaggtggttaagaccgtggcagttaagattctcaagaacgaggccaacgacccggcattaaaggatgagcttctcgccgaagccaatgtgatgcagcagctcgataacccatacatagtgcgcatgatcggtatctgtgaagctgagtcctggatgctcgtgatggaaatggccgaactggggcccctgaataagtacctgcagcagaataggcacgttaaggacaagaatataattgagctggtccaccaggtgtcaatggggatgaaatacttggaggaaagcaattttgtgcatcgcgatctggctgctcgcaacgttctactcgtgactcagcattacgcgaaaatatctgactttggcctttctaaggccctcagggctgacgaaaactactataaggcacaaacacacggcaaatggccagtcaagtggtacgccccggagtgcattaactattataaattctcttctaagagcgatgtgtggagcttcggagtactaatgtgggaggctttctcctacggacagaaaccttaccggggcatgaaggggtccgaggtcaccgcaatgctggagaaaggcgagcgcatgggctgccctgctgggtgtcctcgggaaatgtacgacctaatgaacctctgctggacatacgacgtggagaatagacctgggttcgccgctgtggagctgagattgagaaactattattacgatgtggtgaactag

SEQ ID NO: 206911 - DNA, 1839 bp, synthetic construct
  misc_feature 1..1839: note = Description of Artificial Sequence: Synthetic coding sequence
  source 1..1839: mol_type = other DNA
atggccagcagcggcatggccgacagcgccaaccacctgcccttctttttcgggaacataactcgcgaggaagccgaggattatcttgtgcaaggcggcatgtccgacggcctgtacctgttgagacaaagccgaaactatttgggaggctttgctcttagcgttgcccacgggagaaaggcccatcactatacaatagaaagggagctcaatggaacctatgccattgctgggggccgaacgcatgcatctcctgccgatctgtgccactaccactcccaagaaagtgacggcctggtttgcctgctgaaaaagccctttaaccgacctcaaggcgtgcaacctaagactgggcccttcgaggacctcaaagagaacttgattcgcgaatacgtgaagcagacttggaaccttcaaggccaggccctggagcaggcgataatctcacaaaaaccacagctggagaagctgattgccacaaccgctcacgaaaaaatgccttggtttcacggcaagattagcagggaggaatctgagcaaatagtactgatcggctccaagaccaacggaaagtttctgatcagggcccgggataacaacggaagctatgcactgtgtttgctgcacgagggtaaggtgttacattatcgcatagacaaggacaaaaccggaaaactctccattcccgaaggcaagaaattcgacactctgtggcagcttgtagagcattacagttataaagctgatggtcttctgagagtactcactgttccgtgtcagaaaatcggtacacagggcaacgtgaacttcggaggccgaccccagctccccggatcacaccccgctagcagtccggcccagggtaataggcaggaatctactgtgtcttttaacccatacgagcctgagcttgccccgtgggctgcagacaaaggcccccaacgggaggcactgccaatggatacagaggtttatgagtctccatatgcagatcccgaggagattagacccaaggaggtgtacctcgacagaaagctgctgacactcgaggacaaagagcttgggagtgggaattttggtacagtgaaaaagggctactaccagatgaaaaaggtggttaagaccgttgcggtgaaaatactgaaaaacgaagctaatgatcctgccttgaaggacgagctgttggcagaggcaaacgtgatgcaacagctggacaacccatatattgtgcggatgatcggaatctgtgaagctgaatcttggatgctggttatggagatggccgagctcggtccgctgaacaaatacttgcaacagaaccgacatgtcaaggataagaacatcatagagctggttcatcaggtatctatgggtatgaagtacttagaggagtcaaattttgtgcatagggatcttgccgcccgcaacgtcctcttagtgacacagcactatgccaaaattagcgatttcggactatctaaagccttacgagctgatgaaaactattacaaagcacagactcatggaaaatggcctgttaaatggtacgcccccgaatgtattaactattataaattcagcagtaaaagtgacgtttggtcattcggagtactgatgtgggaagccttcagctatggccagaagccctaccgagggatgaaagggtctgaggtcacagccatgctggagaaaggtgagaggatgggctgtccagctggatgccctcgcgagatgtacgatctcatgaacttgtgctggacctacgatgtagagaatcggcctgggttcgccgccgttgagcttcgacttaggaactactactacgacgtggttaactag

SEQ ID NO: 206912 - DNA, 1839 bp, synthetic construct
  misc_feature 1..1839: note = Description of Artificial Sequence: Synthetic coding sequence
  source 1..1839: mol_type = other DNA
atggccagcagcggcatggccgacagcgccaaccacctgcccttcttctttggtaacataactcgggaggaggcagaggattaccttgtgcaaggggggatgagcgacgggctctatttacttaggcaatcccggaactatctgggtggcttcgccctcagtgtcgctcatggccgaaaagctcaccattacactatcgaacgggagttaaatggaacctatgctatcgcagggggccggacccatgctagccccgctgatctgtgtcattatcatagccaggaatccgatggcttggtgtgtctgttgaagaagccttttaatagaccgcagggcgtccagcccaaaaccgggccgttcgaggatctgaaagaaaatttgattcgcgagtacgttaaacagacatggaatcttcagggccaggctctggaacaggctattatatctcagaaaccgcaactcgaaaaattgattgctaccacagcccacgagaaaatgccctggtttcatggtaaaatttccagagaggagagcgagcaaatcgttcttatcggaagcaaaactaacggtaagtttctgattagagccagagataacaatgggtcctacgccttgtgccttctgcatgagggcaaagtgctgcattacaggatcgataaagacaaaacagggaagctgtctatcccagaaggcaagaagtttgacacactctggcagttggtggagcattactcatacaaagcggatggcctgctgagggtgctcaccgtgccgtgccagaaaatcgggactcaaggtaatgtaaattttgggggacgccctcagctgccaggatctcatcccgctagttcacctgcacagggcaacaggcaggaaagcacagtgtcattcaacccttacgaaccagagctggctccttgggcggctgataaggggcctcagcgcgaggcgctgcccatggataccgaggtgtatgaatccccttatgccgatcccgaagagattagaccgaaggaagtgtatctcgatcgcaagctcctcacactggaggacaaggaactcggctcaggcaattttgggaccgtaaaaaaaggatattatcagatgaaaaaggtggtcaaaactgtcgcagttaagatcctgaagaatgaggcaaacgacccagcactcaaagatgagcttctggccgaggccaacgtgatgcagcaactggataatccctacatcgtgagaatgatcggcatctgcgaggccgagtcttggatgcttgtgatggagatggccgagctcggcccattgaacaagtatcttcagcagaataggcatgtcaaagacaaaaacattattgaacttgtccaccaggtgtctatgggaatgaagtatctggaagaatccaacttcgtgcatcgggaccttgctgccagaaatgtgctgctggtgactcagcactatgctaaaatttccgattttgggctttcaaaggcattgcgggccgatgagaactactacaaggcccagactcacggtaagtggcccgtgaaatggtatgcaccagagtgcattaattattataagttctccagcaagagcgacgtttggagctttggcgtgctcatgtgggaggccttctcttacgggcagaaaccatacagaggcatgaagggctctgaagtgacagcaatgttagaaaagggcgaacggatggggtgccctgcggggtgccctagggagatgtatgacttgatgaacctatgttggacttatgatgtcgagaacaggcctggttttgctgctgttgagttgcgcctcaggaactactactatgacgtggtcaattag

SEQ ID NO: 206913 - DNA, 1908 bp, synthetic construct
  misc_feature 1..1908: note = Description of Artificial Sequence: Synthetic coding sequence
  source 1..1908: mol_type = other DNA
atggccagcagcggcatggccgacagcgccaaccacctgcccttctttttcggaaacatcacccgcgaagaagctgaagactacctcgttcagggtggcatgtccgacgggctgtatctgctgcggcaatctcgaaattatttaggtggcttcgcactctccgtagctcacgggcggaaagcccatcattatacgattgagagagagctcaatggcacatacgcgatagcaggtggccggactcatgcatccccagcagatctttgtcactatcactcacaagagagtgatggcctggtctgtttgctaaagaagcccttcaacaggccgcagggtgtacagcctaagaccggcccttttgaggacttaaaagagaacttaattcgcgagtatgtcaaacagacttggaatttgcagggccaagcattggaacaagctatcatttcgcaaaaaccccagctggagaaactgatagcaactacagcccacgagaagatgccgtggttccatggaaaaatctcacgggaggagagcgaacagatcgtgttaataggaagtaaaacaaatggcaaattcctaattagagcccgggacaataatggcagctacgccttatgcctgctacacgaaggcaaggtgctccactacaggatcgataaggataagacaggtaaactgagtatccctgagggcaaaaagttcgataccctgtggcagctggtcgaacattattcctacaaggccgatggtttacttagggttctgactgttccctgtcagaagattgggactcaagggaatgtcaatttcgggggtagaccccagttgcccggctcccatccggccacctggtccgctgggggcatcatctcccggatcaagtcttacagttttcccaaaccaggccaccgtaagtcaagtcctgcacagggcaatcgacaggagtctactgtgtccttcaacccttatgagcctgagctcgctccgtgggcggcggataagggtcctcagcgggaggcgctgccgatggacaccgaagtgtacgagtccccttatgccgaccctgaggagatccggccaaaggaggtatatcttgatcgaaaactgcttacactggaagacaaggagctgggtagcggcaacttcggcaccgttaagaagggctactaccagatgaagaaggtggtgaagacagttgccgtgaagatcctgaaaaatgaagcaaatgacccggccctcaaggacgaattgctggccgaggcaaacgttatgcagcagctagacaacccgtatatcgtgagaatgattggtatctgcgaggccgaatcatggatgttggtgatggagatggcggagctgggtccgttaaacaaatacctgcagcagaacagacacgtgaaggataaaaacattattgagctggtccaccaggtgagcatgggtatgaaatacctagaggagtccaactttgtccatcgagacctcgccgccagaaacgtgctgcttgtgacgcaacactatgctaaaatatctgacttcggcctgtccaaggccctacgggcggatgagaactattacaaggcccagactcatgggaaatggccagtaaaatggtatgcccccgagtgcatcaattactataaattctcgtctaagagcgacgtgtggagctttggcgtcctgatgtgggaagcgttctcctacggccaaaaaccctaccgcggcatgaaggggtctgaagtgaccgcaatgctggagaagggtgagcgcatgggatgccctgcgggctgcccaagggagatgtacgatcttatgaacctctgctggacttatgacgttgagaatcgacctgggtttgccgccgttgagctaaggttgagaaattactactatgacgttgtcaattag

SEQ ID NO: 206914 - DNA, 990 bp, synthetic construct
  misc_feature 1..990: note = Description of Artificial Sequence: Synthetic coding sequence
  source 1..990: mol_type = other DNA
atggtgagcaagagccggtggaagctgctggccatgctggccctggttttggtggtcatggtttggtatagcataagccgcgaggactccttctattttcccatcccggagaaaaaggagccctgtctgcaaggagaggcggagtcgaaagcctccaagctatttggtaactattcaagagaccagcccatcttcctgcgactcgaggattatttctgggtgaagacacccagcgcctacgaattgccttacggcacaaagggttccgaggacctcctcctcagagtacttgccattacatcttcatcaatccccaaaaatattcagtctctccgctgtcggaggtgcgttgtggtggggaatggccaccggttgcgaaacagctctttaggggacgcaattaacaagtacgatgttgtcatccggttgaataatgcccctgttgcaggctacgagggagatgtcggcagcaagacgacaatgcgcctgttctatcccgaatccgctcactttgatcctaaggtagaaaacaaccctgacacccttcttgtgctggtggccttcaaagccatggacttccattggattgagactattctcagcgacaagaagagggtgcgcaagggcttctggaaacagcctccactaatctgggatgtcaatcctaaacagattagaattcttaaccccttctttatggaaatcgctgccgacaagctgcttagcttacccatgcagcagccgaggaagatcaagcagaaacccaccactggtttgttggcaattaccctggcactgcacctgtgtgacctcgtgcacatcgccggattcggttacccagacgcctataacaagaaacagacaatccactactatgaacagataactctgaaaagcatggctgggagcgggcataatgtgagtcaagaagcgttagcaatcaagagaatgctggagatgggggccatcaagaacctgacatcgttctag

SEQ ID NO: 206915 - DNA, 1917 bp, synthetic construct
  misc_feature 1..1917: note = Description of Artificial Sequence: Synthetic coding sequence
  source 1..1917: mol_type = other DNA
atggccaccggcgccaacgccacccccctggacttccccagcaagaagcggaagcgcagtcggtggaaccaggatacgatggagcagaaaaccgtgatccccggaatgccgacagtgatacctcctgggctgaccagagagcaagagagggcgtacatcgtccagctgcagatagaggatctgactaggaagttaagaaccggggacctcggcataccccctaatcctgaggaccggtcccccagccccgaaccaatctacaatagcgagggaaagagactgaacaccagggaatttcggactcgcaagaagttggaggaagagcggcacaatctgataaccgagatggtggccctgaaccctgacttcaaaccgcctgccgactacaagcctcccgctacccgggtgtcagataaggtgatgatcccccaagatgaataccctgaaatcaattttgtgggcttgctaattggcccccggggaaacacgctgaaaaacatcgagaaggagtgcaacgcgaagattatgatccgcggaaagggctctgtgaaagaggggaaggtgggccgaaaagacggccagatgctgcctggagaggacgaacctctacacgccctcgtgaccgccaacacaatggagaacgtcaagaaggccgtggagcagattaggaacatactgaaacagggcatcgagactcccgaggatcagaatgaccttaggaaaatgcagctgcgtgaacttgcaagactcaatggcaccttacgagaagatgacaaccgcattttgagaccatggcagtcatcggagacacgatccatcacaaacaccaccgtgtgtacaaaatgtggcggcgcaggccatatagcctccgactgtaaatttcagagacccggggaccctcagtctgcccaggataaagcacgcatggacaaggagtacctttccctgatggcggagctcggcgaagctcccgtgcccgcttctgtaggcagcaccagcggcccagcaactacccctctagctagcgctccaaggcccgcggcacctgccaacaatcccccacccccctccctgatgtccacaactcaaagccggccgccctggatgaacagcggaccttcagagagcagaccttatcacggaatgcacggtggtggcccaggcgggcccggcggggggcctcactcatttccgcatcctttaccctccctgaccggcggacacggaggtcacccaatgcagcacaaccccaatggccccccacccccatggatgcagccgcctcccccccctatgaaccagggtcctcatccaccaggtcatcatggcccacccccaatggatcagtacctgggttctacccctgtgggaagcggggtttaccggttacaccagggaaaagggatgatgcctccccccccaatggggatgatgccccctccccctccacctccatcaggacagcccccgccccccccttctggacctctgcctccatggcagcagcaacagcaacaaccccctccccccccaccccccagcagctccatggcgtcctccacgcccttgccatggcagcagaataccacgaccactacgacttctgccggaaccggctctattcccccctggcagcaacagcaggcagctgccgcagcatctccgggcgcgccgcagatgcagggcaacccaactatggtacccctgccccccggcgtgcagccacccctcccacctggagctcccccacctcccccaccaccacctcctggctcggccggtatgatgattccacctcgggggggtgacggcccctcccacgagtcagaggactttccaagacccctggtaaccctacccggccgacagccccagcagcgtccttggtggactggctggttcggaaaagcagcctag

SEQ ID NO: 206916 - DNA, 1920 bp, synthetic construct
  misc_feature 1..1920: note = Description of Artificial Sequence: Synthetic coding sequence
  source 1..1920: mol_type = other DNA
atggccaccggcgccaacgccacccccctggacttccccagcaagaaaaggaagagatccaggtggaatcaggatacgatggaacaaaaaactgtgatacccgggatgcccaccgttattccacctggactgacaagggagcaggaacgggcctatatcgtccagctgcagatcgaggacctcacccgtaagctccgtacaggggatttaggcatccctcctaatcctgaggaccggtccccaagcccagaacccatttacaactccgaaggaaaacggctgaatactcgcgaatttcggacacggaagaagctcgaagaggagcgacacaatctgattacagagatggtggctctcaatcccgacttcaagcccccagcggactataagccacctgctactcgagtttctgacaaagtgatgatcccccaggatgaataccctgagatcaatttcgtgggcctactgatcggtccgcgcggtaacaccttgaagaacatagaaaaggagtgcaacgcaaagatcatgatcaggggtaaggggagcgtaaaagaggggaaagtcggtagaaaggacggacaaatgctcccaggggaagatgagcctctacatgctctggttacagccaataccatggagaatgtgaagaaagccgtggagcaaatcagaaatatcctcaagcaagggatcgagacacccgaagaccagaacgatctccgcaaaatgcagctgcgcgagctggcacggttgaatgggacactaagggaagacgataaccgaatacttcgcccctggcagtctagtgaaactaggtccattaccaatacaactgtttgcaccaaatgcgggggtgcaggccacatcgcgtcggactgcaaatttcagcgaccgggcgacccccagtcagctcaggataaagctaggatggataaagagtacttgtcgcttatggcggagttgggtgaggctcccgtgcctgcttccgtaggctctacaagtggacctgcaactacaccactggccagcgcgccaagaccagccgcacctgccaacaacccacctcccccctcactgatgagtaccacgcagtcccggcctccttggatgaacagtgggccttcagagagccggccctatcacggaatgcatggaggcggccctggcggccccggaggcgggccacattcttttccacatccgctcccaagcttgaccggcggacacggcggacatccaatgcagcataacccgaacggtccccctcccccctggatgcagccacctcctccccctatgaatcagggaccacatccccctggccatcacggaccccctcctatggaccagtacctcggctctacccccgtcggatctggcgtgtatcgcttgcatcagggtaaaggaatgatgccccctcccccaatgggaatgatgccgccacctccaccaccgcccagcggacagcctcctcctcccccgagtggaccactgccaccttggcaacagcagcagcaacagccacccccacctccacccccttcgtccagtatggctagctcaacccctctgccctggcagcagaatactaccacgacaaccaccagtgccggaaccggttctattcccccatggcagcagcaacaggcggccgctgcagcttctcctggagccccacaaatgcaaggcaatccaaccatggtccctctcccccccggagttcagcctcctctgccaccaggcgcacctcccccacccccccccccccctccgggtagcgctggaatgatgtacgccccccccccacccccacctccacctatggacccgtcgaattttgtgactatgatgggcatgggcgtggcgggtatgcccccatttggcatgccaccggctcccccccctccccccccacagaactag

SEQ ID NO: 206917 - DNA, 1716 bp, synthetic construct
  misc_feature 1..1716: note = Description of Artificial Sequence: Synthetic coding sequence
  source 1..1716: mol_type = other DNA
atggccaccggcgccaacgccacccccctggacttccccagcaagaaacggaagaggtcccggtggaaccaggatacaatggagcaaaagacagtcatccctggaatgcccacggtgatccctcccgggctgacacgggaacaagagagagcttatatcgtgcaactccagatcgaggatctgacccgaaagctccggactggcgacctcggcatccctccaaatcctgaagacaggagtccctccccagaacccatctataactctgaagggaagcgactaaatacaagggagtttcggactaggaagaagctagaggaagaaagacataaccttattaccgagatggtggccctcaatcctgatttcaagccccctgctgattataaaccacctgcaacccgcgtctcagacaaggtgatgattccacaagatgagtatcccgaaattaacttcgtaggccttctgatcggaccgcgaggtaatactctaaagaacatcgaaaaggagtgtaacgccaagattatgattcgcgggaaggggagcgtgaaggagggtaaggtgggaaggaaggacggtcaaatgctcccgggagaggacgaacctttgcatgcgctcgttacggccaacactatggaaaatgtgaaaaaggcagttgagcagattcggaatatcctgaagcagggtatagaaaccccggaagaccagaacgatctgagaaaaatgcagctgagagagctagccaggctgaacggcacactgagagaagatgataaccgcatcctgcgtccatggcagtccagtgaaacacgttccatcacaaacaccacagtctgcacgaagtgtgggggtgcaggccacattgctagcgattgcaagtttcagcgacctggagacccccaatctgctcaggataaggcccgcatggataaagagtacctttctttgatggccgagttgggagaagccccggttcctgcctccgtgggatccacaagtgggccggcaacaacaccactagcctcagctcccagacctgcagcaccggcaaacaatcctcccccccccagcttgatgtccacgactcagtcgagaccaccatggatgaattctggccccagtgaatcacggccttatcatggcatgcatggcgggggtcccggtggaccagggggtgggccccactctttcccccatccactgccatcactaacagggggacacggaggccaccccatgcagcacaaccccaacggcccccctcctccatggatgcagcctccgcccccaccaatgaaccaaggaccgcatccccccggtcaccacggaccccccccaatgggtaagagcgtgcccgggaaatatgcatgcggactctgggggctcagtcctgcttcgcgcaagagatacgacgccgccaccacgtacggccacgatgcagcagccgccgccgccagccagtgggccgccccaacaccttccttgtggtcttcctcacccatggcgacaaccgcagccgctgcctccgcaacaccctctgcccagcagcagtatgggtttcagtacccactagccatggcagcaaaaatcccccccagggggggtgatggcccatctcacgagagcgaggatttcccgcgtccgttagtgaccctgccaggcaggcagcctcagcaacgaccctggtggacggggtggtttgggaaagcggcctag

SEQ ID NO: 206918 - DNA, 1302 bp, synthetic construct
  misc_feature 1..1302: note = Description of Artificial Sequence: Synthetic coding sequence
  source 1..1302: mol_type = other DNA
atggtggccctgaaccccgacttcaagccccccgccgactacaagcccccggcgacccgggtttccgacaaagttatgattcctcaggatgaataccctgagatcaatttcgtaggcctgctgatcggcccacggggtaatacattgaaaaacatagagaaggagtgtaacgcaaaaatcatgatccggggtaaaggatccgtcaaagagggaaaagtcggtcggaaagatgggcagatgctacctggagaagacgaacctctgcatgccctggtcacagctaatactatggagaacgtcaaaaaggcggtagaacaaattaggaatatcctgaagcaaggcatcgagacacccgaagatcagaacgacctaaggaagatgcagctaagagaactcgctagactgaacggaacactccgcgaagacgataacaggattttacggccctggcagagttccgaaactcgctctatcaccaatacaactgtctgcaccaaatgtggcggcgccggccatatcgcatctgactgcaaattccagcggcccggagacccacaaagtgctcaggataaggcacggatggacaaggagtacctttcactgatggctgagctgggcgaggctcctgtacctgccagcgtggggtccacatccggtccggcaacaacccctctggcaagcgccccgcggccagcagctcccgcaaacaatccacctcccccatccctgatgtccacaacccagtcacggccaccatggatgaattcaggtccctcagagtccaggccgtaccatgggatgcacggagggggcccggggggccctgggggagggccacactcgtttccacaccccttaccttccctgacaggaggccatggtggacacccgatgcagcacaatcccaacgggccaccgcccccatggatgcaacctccaccaccgccaatgaatcagggtccccacccaccaggccatcatggccctcccccaatggaccaatatcttgggtctaccccagtagggtcaggtgtttatcgcctgcaccaaggaaaaggcatgatgcctcccccccccatgggaatgatgcccccgccacccccccctccttccgggcagccacctcccccaccgagcggccccttgccgccttggcagcagcagcaacagcaacctccgccacctccccccccttcaagcagtatggcctcctcgacgcctctgccttggcaacagagatccctgcccgctgctgcaatggcacgagccatgagggttaggactttccgggcccactggtag

SEQ ID NO: 206919 - DNA, 2022 bp, synthetic construct
  misc_feature 1..2022: note = Description of Artificial Sequence: Synthetic coding sequence
  source 1..2022: mol_type = other DNA
atggccaccggcgccaacgccacccccctgggcaagctgggcccccctggactgcctccgctcccaggcccgaagggcggctttgagccgggcccacctccagcaccgggacctggagccggcctacttgcaccagggccgcccccccctccaccagtcggatccatgggtgcactgacagccgctttccccttcgcagcgcttcctcctcctccgccaccaccccctccccctccacctcagcagccacctccgcccccacctcctcctagtcccggtgctagctatccaccaccccagcccccaccccccccacctctttaccagcgagtctcaccccctcaaccgcccccgcctcaacccccgcgtaaggaccagcagccaggacccgccggtggaggcggcgattttccctccaagaaaaggaaaaggtcaagatggaaccaagacaccatggagcagaagaccgttatcccaggcatgcctacagtgatcccacccgggctgactagggaacaggaaagggcatacattgtgcagctgcagatcgaagatcttacaagaaagctgagaaccggcgatctcggtatacctcccaaccccgaagacagaagcccatctcccgaacccatctataattcggagggaaaaaggttgaatacacgtgagtttcgtacacgtaagaagttggaggaagagcgacacaaccttatcaccgagatggtggctcttaaccccgactttaagccacctgctgattataagccacccgcaacgcgagttagcgataaggtaatgataccccaggacgagtacccagagataaactttgtgggcctgttgatcggcccacgcggaaacacactcaagaatatcgagaaggaatgcaacgctaaaattatgatacggggaaagggctctgtgaaagaaggaaaggtgggccgcaaggatggccagatgctcccaggtgaagacgaaccactgcacgcacttgtgacagccaacacgatggagaacgtcaagaaagctgtggaacaaatacgcaatatactgaagcaggggatagaaacgcctgaagaccagaatgatttaagaaagatgcaactgcgagagctggcccgcctgaacggaactctgcgggaggatgataaccgaatcctgcggccctggcagtcatcagagaccagaagtatcaccaataccaccgtgtgcacaaagtgtggtggcgccgggcatattgcctcagattgtaagttccagaggcccggtgatccccaatcagcccaagataaagcaaggatggacaaagagtacctcagtctcatggctgagttaggagaggcacctgtcccagcttctgtgggctcgactagcgggccagctaccacacctctggcttctgctccgcgcccagccgctccggccaataaccctccccccccatcattaatgagcaccacacagtctcgtcccccctggatgaattccggtccaagcgaaagtcggccttatcatggcatgcatggcggtgggccgggcgggccaggaggcggaccacacagttttcctcacccgctcccttcgttgactggaggccatgggggccaccctatgcaacacaacccgaacggtccccccccaccatggatgcaacccccacctcctccaatgaaccagggtccccatccacccgggcaccacggaccgccaccgatggaccagtacctggggtctacaccggtcggatctggtgtttaccggctccatcaggggaagggcatgatgcctccccctcccatgggcatgatgcctcccccgccccctccacccagtggacaaccgccaccccctccctccggtccgctgcccccctggcagcagcaacagcaacagccgccccccccaccccccccaagctcatccatggcctctagcactcccctgccgtggcaacagcgttccctgccagcagctgctatggcacgcgcgatgcgtgtaaggacattccgggctcactggtag

SEQ ID NO: 206920 - DNA, 1842 bp, synthetic construct
  misc_feature 1..1842: note = Description of Artificial Sequence: Synthetic coding sequence
  source 1..1842: mol_type = other DNA
atggagcagaagaccgtgatccccggcatgcccaccgtgatcccccccggactgacaagggagcaggagcgggcctacatcgtccagctccagatagaagacctaacgagaaagctgcgcactggtgatttgggaatccctccgaaccctgaggatcggagccctagccccgagcctatctataactccgaaggaaagcggctgaacactcgggaatttaggactagaaaaaagcttgaggaagagagacacaacctcattaccgaaatggtggctctcaatcctgacttcaaaccaccggccgattataagccaccagctactagagtgtccgacaaggtcatgattccacaggacgagtacccagagattaacttcgtgggcttacttatcggccctaggggcaatactctgaaaaacatcgaaaaggagtgcaacgcaaaaatcatgatcagggggaagggctcagtgaaagagggaaaggtgggtaggaaggatggtcagatgctgcctggggaagatgagcccctgcatgccttagtcacggctaatacaatggagaacgttaaaaaggccgtagagcagattaggaatattctgaagcagggaattgaaacccccgaggaccagaacgatctccgtaagatgcagctgcgtgagctggcacgactcaatggtactctccgagaagacgacaaccggattctgaggccgtggcaatcttcagagacgcggtccattacaaatacgacagtgtgtacaaaatgcgggggagcagggcatattgccagtgactgtaagttccagaggcctggcgaccctcagtccgctcaagataaggcgcgcatggataaagaatacctcagtcttatggcagaattaggcgaggcgccagttccagcgagtgtgggaagcacaagtgggccagcgaccactccactggcatctgccccccggcctgcggcccctgccaataatcccccaccaccgtccctcatgtctaccactcagtctcggcccccttggatgaattccgggccttctgagtcgcgtccgtaccatggcatgcacggcggaggcccaggcggcccaggtggcggcccacatagttttccgcatcctctgccctccctgacaggtggccacggtggacaccctatgcagcacaatcccaatggacctccaccgccctggatgcagccgcctccacccccaatgaaccaggggcctcatcctccagggcatcacggcccacctccaatggaccaatatctgggatccactcccgtcggctctggggtctaccgattgcatcagggaaaggggatgatgccccccccccccatgggtatgatgcctcctccaccccctccaccgtcgggccagccccctcccccaccaagtgggccgcttccaccttggcagcagcaacagcagcagccccctccccctcccccaccatcatctagcatggccagcagtactccgttgccctggcagcaaaacactaccactacaactacgagcgccgggactggctccattccaccatggcagcagcagcaagcagctgctgccgcctcaccaggggccccacagatgcaaggcaatcccaccatggtaccgctgccacctggagttcagccccccctgccacccggcgcaccaccaccccccccacctccacctcctggcagtgcagggatgatgtatgcgcctcctcctccaccgccgccgccaatggatccatctaatttcgtgaccatgatgggcatgggcgtggccgggatgccgccattcggaatgccacctgccccgccacctcctcccccccagaattag

SEQ ID NO: 206921 - DNA, 1527 bp, synthetic construct
  misc_feature 1..1527: note = Description of Artificial Sequence: Synthetic coding sequence
  source 1..1527: mol_type = other DNA
atggccaagagcaacggcgagaacggcccccgggcccccgccgccggcgagagtttgtctggcactcgggaatccttagcccagggacctgatgccgcaacgaccgacgagctgagtagccttggtagtgattccgaggccaatggcttcgccgagcggcgcattgataaatttgggttcatcgtcggaagtcagggtgctgaaggggcattggaggaagtaccccttgaggttctgcgtcagcgtgaaagcaagtggctggacatgctgaacaactgggacaagtggatggccaaaaaacacaagaagatcagactgagatgccagaaagggatcccccctagcctgaggggtcgtgcttggcagtacctctccgggggaaaagtaaagctgcagcagaacccaggcaagtttgacgaattggatatgagcccgggtgaccccaaatggctagatgtcatagaaagggacttacaccgccaattcccctttcacgaaatgttcgtgagtcgcggggggcacggacagcaagatttattcagagtcctgaaagcatacaccctgtacaggcccgaagaaggctactgtcaagcccaagcgccaatagctgccgtgttgcttatgcacatgccggccgagcaggccttctggtgtcttgtccagatttgcgagaagtacctgccggggtattacagtgaaaagctggaggctattcagctggatggtgagatactcttctctcttcttcagaaagtgtcgccagtggcccataagcatttgtcaagacagaaaatcgatcccctcttgtacatgaccgaatggttcatgtgtgcattttccaggaccctcccctggagtagtgttctgcgcgtctgggacatgtttttctgtgagggcgtgaagatcatttttagggttggactcgtcctgctcaagcacgccctgggctcccctgagaaagttaaagcctgccaggggcagtatgaaactatcgaacgcttgcgttcgttatctcccaaaattatgcaagaggctttcctagtgcaggaagtggttgaattaccagttactgaacgccagattgagcgggaacacctgattcaactccggaggtggcaggagacgcggggcgaattgcagtgtcggagcccaccccggttgcatggagctaaggctattctggatgctgagccggggcccaggcctgcgttgcagccttccccgagtattagactgcccttagacgctccactgcccggatccaaagccaaacctaagcctcccaagcaggcccagaaagagcagaggaaacagatgaaaggacgaggtcagctcgagaagcccccagcccccaatcaggctatggtcgtggcagctgcaggggatgcatgcccacctcagcatgtcccgccgaaagactctgcgcctaaagattcagctcctcaagatttggccccccaagtgtccgcccatcacaggtcacaagaaagtctcaccagccaagaatctgaggatacctacctttag

SEQ ID NO: 206922 - DNA, 2187 bp, synthetic construct
  misc_feature 1..2187: note = Description of Artificial Sequence: Synthetic coding sequence
  source 1..2187: mol_type = other DNA
atgcccgccggccccgtgcaggccgtgcccccccccccccccgtgccaaccgaacctaaacaacccaccgaggaggaggctagttccaaggaggattcagcaccatcaaagcccgtggtcggaattatttaccccccacccgaagtgcggaatatcgtggacaagaccgcatcgttcgttgcacgcaatggtcccgagtttgaagcgagaattagacagaacgaaattaacaatcctaagttcaattttctgaatccaaatgatccatatcacgcatactatcggcataaggtgtccgagtttaaggaaggcaaagctcagtttgtagctagaaatggccgccagtttttaacccaactgatgcagaaggagcagcgaaattaccagttcgattttctgcgcccacaacattccttgttcaattactttaccaagctggtggaacaatacaccaaaattctgatccccccaaagggcctgttcagtaagttgaagaaggaggccgagaacccaagagaagtcctcgaccaggtatgctaccgagtggagtgggctaaatttcaagaacgcgaaaggaagaaggaagaggaggaaaaggaaaaagaaagagtggcctacgcacaaattgactggcacgatttcgtggtcgtcgagacagttgacttccagcctaatgagcagggcaactttccgcccccaaccacgcctgaggagctaggcgcaagaatcctgattcaggagcgttatgaaaagtttggggagtccgaggaagtggaaatggaggtggaatccgacgaggaggatgacaaacaagaaaaagctgaggaacccccctcgcagttggaccaggatactcaggtgcaggacatggatgagggaagtgatgacgaagaggaagggcaaaaagttccgccacccccagaaacgcccatgcctcctccgttgccccctacccctgatcaagtgatcgtgcgcaaagattacgatcctaaggcatcaaagccattgcccccagcaccagctccagatgagtacttagtgtcgcccatcactggggagaaaattcccgcaagcaagatgcaggagcatatgagaatcggactgctggacccacggtggctggagcagcgagataggtcaatccgtgagaagcagtccgacgacgaggtatacgccccagggctggacattgagtcctctctgaagcagctggccgaacggaggactgacatctttggagtggaggagaccgcaatcggaaagaagatcggggaagaagagattcagaagccagaggaaaaagttacatgggacggacattccggtagcatggctaggacccagcaagccgctcaggccaatatcacgctgcaggagcagattgaggccatccataaagccaagggtctcgttcccgaggatgatactaaagaaaagatcggccccagtaaaccaaatgaaatcccccagcagcctcccccaccaagctcggccaccaacatcccatccagtgcccctcccatcacttccgtgcccagacccccgactatgcctcctcccgtgaggacaactgtggtgagtgctgttccagtgatgcctagaccaccgatggccagcgtggtcaggctgcccccaggatctgtaattgcacctatgcctccaatcattcacgcccccaggatcaacgttgtgccaatgcctccaagcgcgcctccaatcatggcccctcgccctccgccaatgatcgtgccaacagcgtttgttccggccccccctgtcgcccctgttcctgcacccgctcccatgccaccagtgcacccaccccccccgatggaggatgaaccaactagtaaaaagttgaaaactgaggactcgctgatgccagaggaggagtttcttagacgcaacaagggccctgtttccattaaagtccaggttccaaatatgcaagacaaaacggagtggaagttgaacggccaggtgctggtgttcacactgcccctgacggatcaggtgtccgtgattaaggtgaagattcatgaagctaccgggatgccagccggcaagcagaagcttcagtacgaaggaatcttcattaaagatagcaattcacttgcttactacaatatggctaatggagctgtaattcacctggcattgaaggaaagaggaggccggaagaagtag

SEQ ID NO: 206923 - DNA, 2073 bp, synthetic construct
  misc_feature 1..2073: note = Description of Artificial Sequence: Synthetic coding sequence
  source 1..2073: mol_type = other DNA
atgaccctgaccatgcccaccaccgccatccccaaggtgatgcagcagcagcagcagactacccagcaacagctgcctcagaaagtgcaagctcaggtgatccaggagacgatcgtgcccaaagaacctccaccagagtttgaatttattgccgacccgccttcaatatcagcattcgacctagatgtcgtgaaactcaccgcacagttcgtggcccggaacggcaggcaattcctcactcagcttatgcagaaagagcagcggaactatcagtttgatttccttcgtcctcaacacagcctcttcaattactttactaagttggttgaacagtacactaagattcttattcctccaaaaggattattttctaaacttaagaaagaggccgagaatccccgagaggttcttgatcaggtttgttatcgcgtggaatgggctaagttccaggagcgagaaagaaagaaggaggaggaagagaaggagaaagaacgggttgcttatgctcaaatagattggcacgattttgtcgtggtagaaaccgtggattttcagcctaatgaacagggtaatttcccgcccccaacaacgcctgaagagctgggggctcgcatcctgattcaagagagatacgagaagtttggagagtcagaggaggtcgagatggaagtggagtcagatgaagaagacgataaacaggaaaaggctgaggaaccgccctcacagttagaccaagacacccaagtgcaggacatggacgaaggttccgacgatgaagaggagggtcaaaaagtgcctcctccaccagagactcccatgcctcctcctctcccacctacaccagaccaggtcattgtgagaaaggactacgacccgaaggcttccaaaccactcccccccgcaccagcccccgacgagtacctggtgtcacccataacaggtgaaaaaatccctgcttctaaaatgcaggagcacatgaggattggtctcctggatccgcggtggctggaacaacgtgacaggagcattcgggaaaaacagtctgacgatgaggtgtatgcaccaggactggatattgaatcatccctgaagcagcttgcggaacgccgcacagacattttcggggttgaggagacggctatcgggaagaagattggtgaggaagagatccagaaacccgaagagaaagtcacgtgggatgggcattcgggctcgatggcacggacccagcaagcggcccaggccaacattacacttcaggaacaaattgaagctatccacaaggccaagggactggttcctgaagacgatacaaaggagaagattggccctagtaaacccaatgaaatcccccagcaacccccccctcccagttctgccacgaacatcccatcttctgctcctcctattacttcggtccctaggcctcctactatgccacctccggtcagaacaaccgttgtgagcgcagtaccagtgatgccacgaccgcctatggccagtgtcgtcaggctgccgcccggatcagtgatcgccccgatgccccccataattcacgccccaaggatcaatgtggtacctatgcccccttccgctccccccatcatggcacctaggccccctcctatgatcgtccccaccgctttcgtccccgcacctcctgtggcaccagtgcccgcccccgctcccatgcctcctgtgcatcccccaccaccaatggaagatgagccaacctccaagaagctgaaaacagaagatagcctgatgcctgaagaagaattcctcagacggaataaaggcccagtgtcgattaaggttcaggtgccgaatatgcaggacaagaccgaatggaagctgaacggacaagtgctggtcttcacactacctttgactgaccaggtttccgtcatcaaggttaaaattcatgaagccacagggatgccggctggcaaacagaagctccagtatgagggaatctttatcaaagactccaactcgttggcttactataatatggccaacggtgctgtcatccacttggctctgaaagaaagaggcggccgaaaaaagtag

SEQ ID NO: 206924 - DNA, 900 bp, synthetic construct
  misc_feature 1..900: note = Description of Artificial Sequence: Synthetic coding sequence
  source 1..900: mol_type = other DNA
atggacctgagcgagctggagcgggacaacaccggccggtgccggctttcttcaccagtccctgccgtctgccgaaaggaaccctgcgtgttgggagtggatgaggcgggcagaggacctgttctggggcccatggtgtatgcaatctgttactgcccccttcctcgcctggctgacctcgaagctctgaaggtcgctgacagcaaaacgctcctggagagcgagagggagagacttttcgccaagatggaggacacagacttcgtagggtgggcactggacgtactgagccccaacttgatctctacatccatgctaggccgggtgaaatacaacctcaacagcctgagccacgacaccgccaccggccttatacagtatgctctcgatcaaggagtaaacgttactcaggtgttcgttgataccgtcggaatgcctgaaacctatcaggcgaggctgcagcagtccttccctgggattgaggttaccgtgaaagcaaaggcagacgctctctacccagtggtgtctgccgcctcgatttgcgccaaagtggcccgggatcaggcagtaaaaaagtggcagttcgtcgagaaactccaggaccttgacacagactatggatcaggttaccctaacgacccaaagactaaggcctggctaaaggaacatgttgaacccgtctttgggtttccccagtttgtgagattttcatggcgtaccgctcagactatcttagaaaaggaggcggaggatgttatctgggaagattcagcttctgagaatcaggaaggcctgcggaagatcacatcttactttctcaacgagggctctcaagcaagaccgagatcttctcaccggtatttcctggaacgcggattggagtcagcgacaagcctctag

SEQ ID NO: 206925 - DNA, 3915 bp, synthetic construct
  misc_feature 1..3915: note = Description of Artificial Sequence: Synthetic coding sequence
  source 1..3915: mol_type = other DNA
atggccaagatcgccaagacccacgaggacatcgaggcccagatcagagagatacagggcaagaaagcggccctagatgaagcccaaggggtgggactcgacagcacaggctactacgatcaggagatatacggaggcagtgattccaggtttgcaggctacgttacttccatcgctgccacagagctggaggacgacgatgatgattactcgagtagcaccagtctgctcggacagaaaaaacccggttaccacgctcctgttgctttgcttaacgacatcccccagtctaccgagcagtatgacccgttcgcagaacatcggccccccaagatcgcagacagggaggatgagtacaaaaagcaccgccggaccatgataatttcgcctgagcggctggacccctttgcagatggtggaaaaacccccgatcctaaaatgaacgccaggacctacatggatgtcatgcgagagcaacacctgactaaggaggaacgtgagatccgtcagcaattggccgagaaagcgaaagccggcgaactcaaagtagttaacggcgccgccgccagtcagccacccagcaagcgtaagagacgctgggaccagaccgccgaccagacacccggggcaacacccaagaaactgagtagttgggaccaggccgagacacccgggcatacccccagtctccgctgggacgaaaccccgggtcgcgctaaggggagtgaaacacctggagccacacccggatccaagatttgggacccaacgccaagccacacgccggccggggccgccacacctggcaggggcgacacacctggtcatgctacaccaggacacggaggagcgacatcaagcgcccggaaaaatagatgggacgaaactccaaagactgagagagacacacccggtcacggttccggctgggccgaaactccccgcaccgacaggggtggggattccattggcgagacccctaccccgggcgcatcgaagagaaagtcgcgatgggatgaaacgccagccagtcagatgggtggatcaacacctgtccttacacccgggaaaacaccgattggaacccctgcaatgaacatggctacaccgaccccaggacatatcatgtcgatgactcctgagcagcttcaagcctggaggtgggagagagaaatagatgaacggaatcggccactatccgacgaggaactcgatgcaatgtttcccgaaggctacaaagtcctgccgccgcctgctggctacgtgcctattaggacaccagccagaaagctgaccgctacgcctacacctctcggtgggatgacagggttccatatgcaaactgaggatcggactatgaagtccgttaatgatcagccatcaggaaatctcccatttctgaagccagacgatattcagtatttcgataagctgttagttgatgtggatgaatccaccctgtctccagaagaacagaaagagaggaaaattatgaagctgctacttaagataaaaaatggtacaccgcctatgcgtaaggcagcacttagacagatcactgacaaggctagggagttcggcgctgggcccctgttcaaccagatactgcctttgcttatgtcccccacacttgaagatcaagagcggcacctgctcgtaaaggtgattgataggatcttgtataagctcgatgatctcgtcaggccttacgtacataagattctggtagtcattgaaccactcctgattgatgaggactactatgcaagggtggagggacgtgaaattatttccaatcttgccaaagctgctgggctcgctactatgatttctactatgcgcccggacattgacaatatggatgagtacgttagaaataccaccgcaagggccttcgccgtggttgcgtccgcgctgggaattcctagtctcctcccgtttttgaaggctgtgtgtaaatccaagaagagttggcaagctagacacactggaattaagatcgtgcagcagattgctatcctgatgggctgcgctattcttccacacctgcggtccctcgtggagattatcgagcacggtctggtggatgaacagcagaaagtgcggacaatatctgcactcgcgatcgctgccctcgcagaagccgcgactccatacgggattgaatcatttgattctgtcttgaagccactgtggaaaggtatcagacagcatcgagggaaagggcttgcagcattcctcaaggcaattggctacctcattcccttgatggacgctgagtacgccaattattatactcgcgaggtgatgctcattctcattcgtgagtttcagtccccagatgaggaaatgaagaagattgtattaaaggtggtgaaacagtgttgcgggacagatggagtggaggctaactatattaaaaccgaaatcctgcccccattctttaaacacttctggcagcatcgcatggcactcgaccggaggaattaccgacagcttgtcgacacaacagtggagcttgcgaacaaagtgggagcagccgaaatcattagtcgtatcgtcgacgacctcaaagacgaagcagagcagtatagaaagatggtaatggaaaccatcgaaaaaattatgggcaacctcggcgcagcagatattgatcacaagcttgaagaacagctgattgatggcatcttatatgcatttcaggaacagactaccgaagatagtgtcatgttaaatggtttcgggacagtcgtcaatgctctgggcaagagggtgaagccgtatctgccccaaatctgcgggaccgtcctgtggcgtctgaataacaaaagcgcgaaggttcggcaacaggccgcagacctcatctctcggaccgctgtggtgatgaagacctgtcaggaagaaaagctgatggggcatctgggcgtggtactctacgagtatctcggcgaggagtaccccgaggtgttaggctctatactaggggcccttaaagcgatcgtcaatgttatagggatgcacaagatgacccctcctataaaagacctgctgccacgactgacacccatcttaaagaacaggcatgagaaggtgcaagagaactgcattgacctggtgggtaggatcgccgatcggggcgccgaatatgtatcagctagagagtggatgcggatttgcttcgaacttctcgaactgctcaaagcgcataaaaaggccatccgaagggccacagtaaatacgtttggctacatcgcaaaagccataggccctcatgacgtgctcgccacactgctgaataacctgaaggtgcaagagcgccagaatagggtgtgcaccacggtggcaatagccatcgtcgctgaaacctgtagtccattcaccgttctcccagccctcatgaatgagtatagagtgccagaactgaatgtgcagaatggagtgttgaagagtcttagctttctcttcgagtacataggagagatgggaaaagactatatctacgctgtgacgccactgctcgaagatgctctcatggacagggatctcgtccaccgccaaaccgcctccgctgtggtacaacatatgagcctgggtgtgtacgggtttggttgtgaagactctctaaaccatctcctgaattacgtctggcctaatgtttttgagaccagcccacacgtcatccaagccgtcatgggggccctggaggggctgcgagtcgcaatcgggccatgtagaatgctgcagtattgcctccaagggctattccaccccgcccggaaggtccgagatgtctattggaagatctacaactccatttatattggcagccaggacgcccttatcgcacattacccaaggatatataatgacgacaagaacacttacatcagatatgaactggactacattctctag

SEQ ID NO: 206926 - DNA, 435 bp, synthetic construct
  misc_feature 1..435: note = Description of Artificial Sequence: Synthetic coding sequence
  source 1..435: mol_type = other DNA
atggccaagatcgccaagacccacgaggacatcgaggcccagatccgagagatccaaggcaaaaaggccgcgctggacgaagcccagggagtcggcctcgacagtacagggtattacgatcaggagatctacggaggaagcgattctagattcgcggggtacgttacatcaattgctgctaccgagctcgaggacgacgatgacgactactcatcctcgacatctctgctgggccagaaaaagcccggttaccacgcacccgtggctctgctgaatgatattccacagagcacagagcagtacgatccattcgctgagcatcggccaccaaagatcgccgatcgggaagatgaatataagaagcaccggagaaccatgatcattagccccgagcgcctcgatccgttcgcggacggcttttactcagccgcctag

SEQ ID NO: 206927 - DNA, 435 bp, synthetic construct
  misc_feature 1..435: note = Description of Artificial Sequence: Synthetic coding sequence
  source 1..435: mol_type = other DNA
atggccaagatcgccaagacccacgaggacatcgaggcccagatcagagaaattcagggtaaaaaagccgcgctggatgaggcccaaggtgttgggctggactctaccgggtactacgatcaagagatctacggcggttccgatagccggttcgcagggtatgtgacttctatagcagccaccgaactggaagacgatgacgatgactattcttccagtactagtttactaggccagaagaagcccgggtaccacgcccctgtggctttgctgaacgatataccccagtcaaccgaacagtacgatccatttgccgagcatagacctcctaaaattgccgatcgagaggacgaatacaaaaaacatcgtcgtaccatgattattagtccggaaaggctcgaccctttcgcagacggcttttatagtgctgcctag

SEQ ID NO: 206928 - DNA, 2688 bp, synthetic construct
  misc_feature 1..2688: note = Description of Artificial Sequence: Synthetic coding sequence
  source 1..2688: mol_type = other DNA
atggccaccgagcaccccgagccccccaaggccgagctgcagctgccccctccaccgccaccaggccactatggggcttgggccgcccaggaacttcaagccaagttggcagaaattggggcccccattcagggaaatcgggaggagctggtggagagactgcagagctatacgaggcagactggaatcgtgctaaatcggcccgttttgaggggcgaagatggagataaggccgctccgccaccaatgagcgctcagctaccaggaatcccaatgccaccgccgcctctgggattgccccctcttcagcctccacctccccccccgccgccccctccaggtctgggcctgggttttccaatggctcaccctcctaatttagggcctcctccccctcttcgtgtcggtgaacccgtggccttgagtgaggaagaacggcttaagctggcacagcagcaagccgccctcctgatgcagcaggaggagagggccaaacagcagggcgaccattccctgaaggaacacgaattgttggaacagcaaaagcgtgcggcggttctcctggagcaggaacggcagcaggagatcgcgaagatggggactcccgttccccggccgccccaggacatggggcagattggagttcgcacgcccctgggccccagagtagcggccccggttggacccgtcggcccaacccccaccgttcttcctatgggggcaccagttccaagaccccgtggaccaccccccccgcccggcgatgaaaatcgcgagatggacgatccttctgttggtcccaagattccacaggctttagaaaaaattctccagctcaaggaaagccgtcaggaggaaatgaacagtcagcaggaggaagaggagatggagaccgacgctagaagttccttagggcagtccgcttcagagacagaggaggacacggtttcggttagtaaaaaagaaaagaacaggaagaggcgcaacagaaaaaagaagaagaagccccagagggtgcggggagtgtctagcgaaagctccggcgatagagagaaagatagcacccgtagtagaggatctgattcccccgctgccgacgtggagatcgagtacgtgacggaagagccggaaatttacgaacctaactttatcttcttcaagcggatcttcgaggccttcaagctgaccgacgatgtgaagaaagagaaagaaaaagagcctgaaaaattggacaagcttgaaaactcagctgctcctaagaaaaaggggttcgaagaggagcacaaggactccgacgatgacagcagcgacgacgagcaggagaaaaagcctgaagctcccaagctctcaaaaaaaaagctacggaggatgaatcgatttacggttgctgaactcaagcagcttgtagcacgacccgatgttgtggagatgcatgatgtcacagcacaagacccgaagttgcttgttcatcttaaggctacacgcaatagcgtccccgtgccccgacattggtgctttaaaagaaagtacttgcagggaaagcgcgggattgaaaagcctcctttcgagctccctgatttcattaaacgcactggtatccaagagatgcgcgaggccctgcaagagaaggaggagcagaagacgatgaagtcaaagatgagagaaaaggtgcgccctaagatggggaaaatcgacattgactatcagaagttgcacgacgcgttttttaagtggcaaacaaagcctaagctgaccatccacggcgatttgtactacgagggtaaggaatttgagacccgtctgaaggagaaaaaacccggcgatttgtccgacgagctgcgaatttctttgggcatgcctgtggggccaaatgcgcacaaggtaccaccaccatggctgatcgcaatgcagcgatatgggccacctccctcttacccaaatcttaagatcccggggctgaacagcccgattcccgaaagctgtagcttcggatatcacgctggggggtggggcaaacccccagtggacgaaacggggaaaccactgtatggagatgtgttcggaaccaacgctgccgagttccagaccaagacggaggaagaagagatcgaccggacaccatggggagagctggaacccagcgatgaggagagtagcgaggaggaggaagaggaggagagtgacgaagacaagccagacgagactggatttataactccggccgactccggcctgatcactccgggcgggttctcctccgtgcccgccgggatggaaacccctgaactcatcgaattgagaaaaaagaaaatcgaggaagcgatggatggcagtgagacgcctcagctcttcaccgtccttccagaaaagcgaacagcaaccgtgggcggggcgatgatgggttcgacacatatctatgacatgtctaccgtgatgtcccgcaaaggacctgcacccgagctgcagggtgtggaggtagcactcgcaccagaggagctggagctcgacccaatggccatgacccagaagtacgaggagcatgtgcgggagcaacaggctcaggtggagaaagaggacttcagcgacatggtggccgagcacgccgcaaaacagaaacagaaaaagcggaaggctcagcctcaggatagtcgcggtggctccaaaaagtataaggagttcaagttctag

SEQ ID NO: 206929 - DNA, 2400 bp, synthetic construct
  misc_feature 1..2400: note = Description of Artificial Sequence: Synthetic coding sequence
  source 1..2400: mol_type = other DNA
gccaagatggccaccgagcaccccgagccccccaaggccgagctgcagctgcctccccctccaccccctggccactatggcgcatgggccgctcaggaactccaggccaagctggcagaaatcggcgcacctatccagggcaatagggaagagctcgtggaacggttgcagagctataccagacagacaggaatcgttctgaatcgccccgtcttgcggggagaggatggcgacaaagctgcaccaccaccaatgagtgcgcagctcccaggcattcccatgcccccacccccccttgggctcccccctcttcagccacctcctccgccccctccgccccctccaggtcttggactggggttccccatggcccacccccctaacctggggcccccaccgcccctgcgggtgggcgaaccagtggctctatctgaggaagagaggcttaaactcgcccagcagcaggccgcactactgatgcagcaagaggaacgtgccaaacaaggggaccattccctgaaggagcacgagctgcttgaacagcagaagcgggcagccgtcctgctggaacaggagcgtcagcaagaggaagaggagatggagactgatgcgcgttcctcgctgggccagagtgctagtgaaaccgaggaggacactgtcagcgtcagcaaaaaggagaagaatagaaagcgccgtaaccggaaaaagaaaaagaagccccagcgcgtgcgaggcgtatcaagcgaatctagtggagatcgtgaaaaagacagcaccaggagcagagggtccgacagccccgccgctgacgttgaaattgaatacgtgacagaggaacctgaaatttatgagcctaacttcattttcttcaaacgtattttcgaggccttcaagctcaccgatgacgtgaagaaggagaaggaaaaggaaccagagaaactcgacaagctcgagaactcagctgcccccaagaaaaagggctttgaggaggaacataaggactccgatgacgactcctccgacgatgagcaggaaaaaaagccggaggccccaaagctctccaagaaaaagttgcggagaatgaatcggtttaccgtcgccgaactaaaacaactggtcgcaagacccgacgtcgtggaaatgcacgacgtcacagcccaggatcccaagttattggtacatctgaaggccacgcgcaactctgtgccagtgccacgtcattggtgtttcaaaaggaaatatctgcaggggaagagaggaatcgagaagcctcccttcgagcttcccgattttatcaagagaacaggtatccaggagatgcgtgaagcactgcaggagaaagaggagcagaaaacaatgaagtccaaaatgcgcgagaaggtaagacccaagatggggaaaatagacatcgattaccagaaactgcacgatgcgttcttcaagtggcagactaagcccaaactgactatccatggcgacttgtattacgagggtaaggagtttgagaccagattgaaagagaagaagccaggagatctgagtgacgagcttaggatttccttaggcatgccggtggggccaaatgctcacaaagtgcctccaccatggctgatcgccatgcagaggtatgggccacctccaagctaccccaacctcaagattcccggcctcaacagccctatcccagaatcttgttcttttggctatcatgctggaggttggggtaagccccctgtggacgagacaggcaagccactctacggggatgtcttcggtactaacgccgccgagtttcagactaagaccgaagaagaggaaattgatagaacaccatggggagagctggagcctagtgacgaagagtcttctgaggaagaggaggaggaggagagcgacgaagacaagcctgacgagacaggtttcatcacaccagctgatagcggccttattacacccggcggcttcagtagtgtccctgccggtatggaaactcctgagctcattgaattacggaagaagaagatcgaagaggctatggatggcagtgagaccccccagctgttcactgttctgccggaaaagaggacagctacagtcggcggggcaatgatgggttctactcacatctatgacatgagcactgtaatgagccggaaaggccctgctcccgaactgcagggcgtggaggtagctctggcacccgaggaattggagctcgatcctatggccatgactcagaaatacgaagaacacgtgcgcgaacaacaagcccaggtcgaaaaggaggacttttccgacatggtcgctgagcacgcggcaaagcagaagcagaaaaaaaggaaagcccagccccaagacagtcgtggcggttcaaagaagtacaaggaatttaaattttag

SEQ ID NO: 206930 - DNA, 3654 bp, synthetic construct
  misc_feature 1..3654: note = Description of Artificial Sequence: Synthetic coding sequence
  source 1..3654: mol_type = other DNA
atgttcctgtacaacctgaccctgcagcgggccaccggcatcagcttcgcgattcacggtaatttcagtggaaccaagcagcaggagatcgttgtcagccgaggcaagatcctggaactgttgaggcccgacccaaacaccggcaaggtccacaccctgcttaccgttgaagtgtttggagtgatcagaagtctcatggctttccggttgacaggcggtaccaaggattatattgttgtgggatccgattctggccgaattgtgattcttgaataccagccgtcgaagaacatgtttgaaaaaatccaccaggagacgttcggaaaaagcggctgcagacgcatcgttcccggtcagtttcttgctgttgatccgaaagggcgcgcggttatgatctcagccattgagaaacaaaaactagtctatatactgaatagagacgccgccgccagacttacaatatccagtccgctggaggcacacaaggccaacaccttggtctaccacgttgttggggttgatgtgggattcgagaatccgatgttcgcatgcttggagatggactatgaagaggctgacaatgatcctaccggcgaagcagcagccaatacacaacagaccctgaccttttacgaactggatctgggattgaaccacgtcgtccgcaaatatagcgaaccactagaggagcacggaaatttcctgattaccgtacccggcgggagcgacggacccagtggcgttctcatctgtagtgagaattacataacctataagaatttcggtgaccaacccgacatcaggtgcccaataccgcgacgtcggaatgatctagacgatcccgaaagaggcatgatttttgtatgctcggccacgcataagacaaagtccatgtttttcttccttgcacaaaccgagcaaggggatattttcaaaattaccctcgaaacagatgaggatatggtgactgaaatccggcttaagtatttcgacaccgtacccgtagcagctgctatgtgcgtcctaaagactggtttcctctttgtcgcatctgagtttggcaatcattatctctatcaaatagctcacttaggggacgacgatgaggaacccgagttctcttctgccatgcccttggaagagggcgatacattcttctttcagccgcggcctctgaaaaatctggtgctagtggatgagctggacagccttagtccaattttattctgtcaaattgccgaccttgctaatgaagatactcctcagctttatgtggcttgcggccggggcccaaggagcagcctgcgagtcctcagacacggactggaggtgtctgaaatggcagtctcagagttgcccgggaatcctaacgccgtttggaccgtgcgtaggcacatcgaagacgagttcgacgcttacatcatagtgtcgttcgtcaatgctacccttgttctgtccatcggcgaaacagtcgaggaggtgacagattccggcttccttggcaccacacccaccctctcatgttctctgctaggcgatgatgcactggtccaggtttaccctgatggcataagacacattagagctgacaaaagggtaaatgagtggaaaacgcctggaaaaaagactattgtgaagtgtgctgtgaatcagaggcaggtggtaattgccctaacaggaggtgagctggtgtacttcgagatggatccctcgggacagttaaacgagtataccgaacgcaaggaaatgagtgccgacgtggtttgtatgagtttggccaacgtacccccaggggagcaaaggtcccgcttcttagccgtcggattggtggacaacactgtgcgaatcatcagcctggatccttccgattgtctgcagccactgagcatgcaggctctgccagcccagccggaaagcttatgcatcgtcgagatgggtggaactgaaaagcaggatgagcttggagaacgaggctcaatcggcttcctgtacctgaatatcggattgcagaacggtgttctgctccgtaccgtcctggaccctgtgactggcgacctttctgatacccgtaccaggtacttgggatcacgacccgtcaagttattcagggtgcggatgcaagggcaggaggctgtgctggccatgtcgagtaggtcttggctgtcttatagctaccagtccagatttcatctaacccccctgtcctatgaaacgctcgaattcgcgtccgggttcgcatccgaacagtgtcccgaaggtatcgtggccatcagcaccaacacgttacggattctggcccttgagaagctgggcgccgtcttcaatcaggttgctttccccctccagtatactccaagaaagtttgtgatccatccagaaagcaataatttgattattattgagacagatcacaatgcttatacggaagccacaaaggctcaaaggaagcagcaaatggccgaggagatggtggaggcagccggggaagacgaacgtgagcttgcagcagagatggctgcggcctttctaaatgagaatctaccagaatcaattttcggagccccaaaagctggtaacggccagtgggcgtctgtcatcagggtgatgaatccaatccaaggaaacaccttagatctggtacagctcgaacaaaacgaggctgccttctctgtagccgtttgccgttttagtaatactggtgaggactggtacgtgttggtcggagtggcgaaggacctgatcctgaaccctaggtccgttgccggcggctttgtgtatacctacaaacttgtgaacaatggcgagaagcttgaattcctccacaagacccccgtcgaggaggtgccagccgcaatcgctccatttcaggggcgtgttctcattggggtcggcaagctgctgcgtgtgtacgatcttggaaaaaagaagttactgcgcaaatgcgaaaacaagcatatcgccaactatatttccggcatccagaccattggccacagggttatcgtcagcgacgtgcaagagtcttttatttgggtcagatacaagcgcaatgagaaccagctcattattttcgcagatgacacataccctcggtgggtgacaacagcatcccttcttgattatgacaccgtggccggtgctgataaatttgggaacatttgcgtcgtgcggctaccgccaaacactaacgatgaagtggacgaggatcctaccggcaataaggccttgtgggatcggggtttactcaatggcgcttcacagaaggccgaagtgattatgaattatcacgtaggggagacggtcctcagtctacagaagacaactttgatccctggaggttccgagagccttgtatacacaactttgagtgggggtatcggcattctcgttccattcaccagccacgaggaccacgatttttttcagcacgtggagatgcacctcaggagcgaacacccgcccctctgcggcagagatcacttaagctttaggagttattacttccccgtcaagaacgttatagacggtgacttgtgtgagcagtttaacagcatggagcctaacaaacaaaaaaatgtgtcggaggaactagatcggacccctcccgaagtttccaagaaactggaagacatcagaacacgctatgctttttag

SEQ ID NO: 206931 - DNA, 828 bp, synthetic construct
  misc_feature 1..828: note = Description of Artificial Sequence: Synthetic coding sequence
  source 1..828: mol_type = other DNA
atgttcctgtacaacctgaccctgcagcgggccaccggcatcagctttgccatccatggaaactttagtggcaccaaacagcaagagatcgtcgtcagtaggggaaaaattttggaactgctacgccctgatcccaataccgggaaggttcataccctgcttactgttgaagtgttcggagttattcgaagccttatggctttcagacttaccggcggtactaaagattacattgtggtgggcagcgattccggacgcatagtgatactcgaataccagcccagcaagaacatgttcgagaagatacaccaggaaacttttggtaagagtggatgcaggagaatcgttccgggccagtttctggccgtggaccccaaaggcagggctgtgatgatctctgccattgaaaagcagaagctggtgtacattctgaatagggacgcagcggcacggcttaccatctcatcaccattggaggcccacaaggccaataccttagtctatcacgtggtaggagttgatgttggattcgagaaccctatgtttgcttgcctcgagatggactacgaggaggcagacaatgatcctaccggtgaggctgctgctaacacccagcagacgttaaccttctacgaactggacttaggtctcaaccacgtggttcggaaatacagtgaacctctagaggaacatgggaatttcctcataaccgttcctggaggctctgacggtccctctggagttcttaacctgtcccccccttttcctaaggccatacccgctctgatctgtctcgactccccagtgtatttctgtacacacccctag

SEQ ID NO: 206932 - DNA, 1275 bp, synthetic construct
  misc_feature 1..1275: note = Description of Artificial Sequence: Synthetic coding sequence
  source 1..1275: mol_type = other DNA
atggccgccggccccatcagcgagcggaaccaggacgccaccgtgtacgttgggggcctggatgagaaggtgtccgaacctttactgtgggaactgtttttgcaagccggacctgttgtcaatacacatatgccgaaggacagagtgaccggacaacatcaaggctatggctttgtggagttcttatccgaagaagatgccgactatgccattaaaataatgaatatgattaagttgtatggaaagccaatcagggttaacaaagcttctgcccacaacaagaacctcgacgtcggggcaaacatctttattgggaacctggaccctgagatcgacgagaaactgctctacgacaccttctccgcattcggggtgattttgcagaccccaaagattatgcgcgaccccgacaccggtaattcaaagggatatgcctttattaacttcgccagcttcgatgccagtgatgcagcaatcgaagctatgaatgggcagtacctgtgcaaccggccaatcaccgttagctacgcatttaagaaggactccaagggagaacggcatggatccgccgccgaaaggctgctcgccgcacagaatcctcttagtcaggccgaccggccgcaccaactgtttgcagacgcccccccacccccctctgctcccaatccagtagtgagttccttgggatctggcctgccaccccctggcatgcctccacctggatctttccccccccccgttcccccacctggagccctgccccccggcattcctcccgctatgcccccgcctccaatgcctcccggagccgccggtcatgggcctcccagcgcaggcactcctggagccgggcaccccgggcatggccatagtcacccccatccctttcctcccggcggaatgccccacccgggaatgtcacaaatgcaactggctcaccatggacctcacgggttggggcacccccacgcagggccgcctggtagtggaggccagcccccgcctcggccaccgcctggtatgccacatcctggccctccgcctatgggcatgccaccaaggggtcccccattcgggagccccatgggccatccggggccaatgcctccccatgggatgaggggtccacccccgcttatgccaccacacggttacactggcccgccccgtccccccccttacggctaccagaggggccccctgccccctccaagacctaccccgaggccacctgtgcccccaaggggccccctgcgtgggccgttaccgcaatag

SEQ ID NO: 206933 - DNA, 573 bp, synthetic construct
  misc_feature 1..573: note = Description of Artificial Sequence: Synthetic coding sequence
  source 1..573: mol_type = other DNA
atgcccaaggaccgggtgaccggccagcaccagggctacggcttcgtggagttcctgtctgaagaggatgcagattacgccatcaagattatgaacatgattaagctgtacggaaaacccatcagagtgaataaggcttccgcacacaacaagaatctggacgtgggagccaatatcttcatcggcaatctcgatcccgagatagacgagaagctgctgtacgatacattcagtgccttcggggtaattctccaaactcccaagatcatgagggatcctgacacaggtaattcgaagggatatgcctttataaacttcgcgagcttcgatgcaagtgacgccgcgatagaagccatgaacggccagtacctgtgtaatcggcccattactgtatcttacgcattcaagaaggactctaagggtgagcgccacggatctgctgctgagcgtctgttggctgcgcagaaccccctcagccaagctgacaggccgcaccagctcttcgccgatgctcccccaccaccctctgccccaaaccccgttgtttcgagtctaggatcaggactgccttag

SEQ ID NO: 206934 - DNA, 2124 bp, synthetic construct
  misc_feature 1..2124: note = Description of Artificial Sequence: Synthetic coding sequence
  source 1..2124: mol_type = other DNA
atgagccgggaccggttccggagccggggcggcggcggcggcggcttccatagaagaggcggcggaggcgggagaggcgggctgcatgactttcgtagcccccctcccgggatgggactgaatcagaatcgcggtccgatggggccaggccctggacagtccggcccaaagccacctatccccccccctccccctcatcagcaacagcaacagccccctccccaacaacccccacctcaacaacctcctcctcatcagccgccaccccacccccagccacatcaacagcagcaaccaccgcctcccccacaggacagtagcaagcccgtggtggctcagggtccgggaccagcccccggcgtgggctcagcccctcccgcctcttcgtccgccccaccagcgacccccccaacctcaggtgccccccctgggtccggcccgggacctacaccaacccctccccctgcggtaacatccgctcctccaggcgcccccccccctaccccaccttcatctggggtacctaccacaccaccacaggcaggcgggcctcctccacctcctgccgcagtgccaggccctgggcccggcccgaaacagggacctggccccgggggacccaaaggcggcaagatgcctggaggacctaaacccgggggaggcccagggctgtccacccccggcgggcaccccaagcctccgcaccgcggggggggtgagccccggggcggaaggcagcaccacccgccctatcatcaacagcatcaccagggcccacccccgggaggccctggcggacgatcggaggagaagatctctgattccgaggggtttaaagccaatctcagcctgttaagaaggcctggtgagaagacttacacacagaggtgtcgcctctttgtggggaacctgccagctgacattacggaagatgaatttaaacggctgttcgcaaaatatggagaacctggcgaggttttcataaacaagggaaaggggttcggcttcatcaagttggagagccgcgctctcgctgaaatcgccaaggctgagctggacgacacgcccatgagaggtagacagttgcgcgtgcggttcgctacccacgccgccgcactgagcgtacgaaacctcagtccctacgtatcaaatgagcttctggaggaagctttttctcagtttggccccatcgagcgggctgtggtgattgtagacgatcgcggaaggagtacaggtaaaggaattgtcgagtttgcctcaaagcctgcagcgcgcaaagcattcgagcgctgctcagagggggttttcctgctgacaactacaccacggcccgtgatcgtggagcctctcgaacagctcgatgacgaagacgggctgcctgaaaagctggcgcagaaaaatccaatgtaccagaaagagagagagactcctccccgctttgcacagcacggcacattcgagtatgagtattcgcaaagatggaagtccttagacgagatggagaaacagcagagggagcaggtggagaagaacatgaaggacgccaaggacaaactggaatcggaaatggaagatgcataccatgagcaccaggctaacttgctgcgccaggaccttatgcgccgccaggaagagttacgccgcatggaagagctgcataaccaggaaatgcagaagaggaaggagatgcagctgagacaggaagaggaacgacggcggcgcgaggaagagatgatgataaggcagcgggaaatggaagaacaaatgagacgccagagagaggagagttactccagaatgggttatatggaccccagggagcgcgacatgcgcatgggtgggggcggcgctatgaatatgggagatccgtacggatctggcggtcagaaattcccaccactgggaggtggggggggtatcggttatgaagccaacccaggagtcccgccggccaccatgtcaggctccatgatgggctccgatatgcggaccgaaaggtttggccagggcggcgctggccccgtggggggtcagggacccaggggtatgggtccaggcaccccagcaggctacggccgagggagggaagagtacgagggaccgaacaaaaagccgcgtttttag

SEQ ID NO: 206935 - DNA, 1875 bp, synthetic construct
  misc_feature 1..1875: note = Description of Artificial Sequence: Synthetic coding sequence
  source 1..1875: mol_type = other DNA
atgaacagcggcggcggcttcggcctgggcctgggcttcggcctgacacccacaagcgttattcaggtgactaatctgtcttcagcggtcacctccgaacagatgaggactctgttttctttcctgggagaaatagaagagctgagactgtatccaccagataacgcgccattggccttttcctccaaagtatgttacgtgaagttccgcgacccctcaagtgtgggcgtggcccagcatctcactaacaccgtctttatcgatcgagctctgattgtcgtgccttgtgctgaggggaagatcccagaagaaagcaaagctctaagcctgctggcccctgctccaaccatgacatctctgatgccgggtgctggcttgttaccgataccaacgcccaatcctctcacgactctcggcgtttccctgtctagtctgggagccatcccagctgcagccctcgatcccaatattgccacattaggcgaaattccccagcccccacttatgggaaacgtggacccaagcaaaatcgatgaaatccggcggacggtgtacgttggtaacctcaactcccagaccactacagcagaccagttactggaatttttcaagcaggtcggagaagtgaaattcgtgcgtatggctggagacgagacccaacccaccaggtttgcatttgtcgagttcgctgatcagaattctgtccccagggcattggcattcaacggtgtcatgttcggcgatcgccccctgaaaataaaccactccaataatgctattgtcaaaccccctgagatgacaccccaggccgccgctaaggaactcgaggaggtaatgaagcgcgtgcgtgaggcccaatcttttatatcagctgctatcgagcccgagtctggcaagtctaatgaacgcaagggcggtagatcacggagtcatacccggtcgaagtcccgctcctcctcaaagtcccattctcgccgcaaaaggtcacagtctaagcataggtcaaggtcgcataacaggagtagaagccgtcagaaagatcggcgaagatccaagtcaccccataagaaaaggtcaaagtcacgggagcgacgcaagagtcggagcaggagtcactcccgggataaacgaaaggacaccagggagaaaatcaaagagaaggagagagtgaaagagaaagaccgagagaaagaacgggagcgcgagaaagagcgcgagaaggaaaaagaaaggggcaaaaacaaggacagagataaagaaagggagaaggatagggagaaggataaggagaaggatagggagcgggaacgggaaaaagaacacgagaaggaccgcgataaggaaaaggagaaggagcaagataaggaaaaggagagggagaaggatcggagtaaggaaatcgatgaaaaaaggaagaaagataagaagtctcgtaccccacctagaagttataatgccagtaggcgatctcgctcatcctcgcgggagcggcgccgtaggcgcagtcgcagcagctcaaggagccctaggacgtcaaagaccataaagagaaagtcatctcggagtccatcaccccggtcccggaacaagaaggataaaaagagggagaaggaacgggatcacatttcggaacgtcgggagcgggagcggtccacttcaatgagaaaaagcagtaacgaccgagacggaaaagaaaaactcgagaaaaattcaacatccctgaaagaaaaagaacacaacaaagagcctgattcctcagtgtccaaggaggtggacgataaagatgcccctcggaccgaggaaaataaaatacagcataacggaaattgccagctcaatgaggaaaatctgtcgactaagactgaggcggtctag

SEQ ID NO: 206936 - DNA, 1527 bp, synthetic construct
  misc_feature 1..1527: note = Description of Artificial Sequence: Synthetic coding sequence
  source 1..1527: mol_type = other DNA
atgaccagcctgatgcccggcgccggcctgctgcccatccccacccctaaccctttaaccactctaggcgtttcactgtcatctcttggggccatccccgctgctgcattggatcccaacattgccacactaggagagatcccccagccccccttaatgggaaacgtggacccctcaaaaatcgatgagattaggcggaccgtgtatgtgggtaacctgaacagccagacaactacagcagaccagcttctggaattcttcaaacaagttggggaagtcaaattcgtacggatggcaggtgacgaaacccaacccacccggtttgccttcgtagagtttgcagaccagaattcggtgcctcgggcactagcttttaacggagtgatgtttggtgacaggccgcttaagataaatcacagcaataacgctatagtgaaaccaccggagatgacaccccaggccgcggccaaagaattagaagaagtgatgaagcgtgtccgcgaggctcagagctttatctccgccgctattgagccagaatcaggaaaatctaatgaaaggaaaggcggtcggagccgctcacataccagaagtaagtcacggagctcttctaaaagccatagccgcaggaagaggtcacagtccaaacaccggtcccggagtcacaatcgaagccgctcaagacagaaggacagaaggcgatccaaatctccgcacaagaagagatctaaatcccgtgagaggagaaaatctcggtcacgctcacattcacgtgacaaacggaaggatacacgggaaaaaatcaaggaaaaggaaagagtcaaggaaaaggaccgggagaaagagcgggagcgcgagaaagaacgcgaaaaggagaaagaacggggtaaaaacaaggatcgcgacaaggagcgggagaaagaccgcgaaaaggacaaggaaaaggacagagaaagggagcgcgaaaaagagcacgaaaaggaccgcgataaggagaaagagaaagaacaagacaaagagaaggagagggagaaggacagaagtaaagagattgatgagaagcgtaaaaaggataagaagtcgagaacccctccccgatcctacaacgccagtaggagaagtcggagttccagccgcgagcgaagacgaagacgttctaggagctcctctcggtcacctaggacttctaaaaccattaagaggaagtcgtctcggagcccatccccgcggagccgcaacaaaaaagacaagaagagggagaaggaacgagatcatatttcggaacggagggaaagggaaaggtctacaagcatgaggaagtcaagcaatgatagagatggcaaagagaaactggaaaagaactccacatcactgaaggagaaggagcacaataaggagccagacagctccgtaagcaaggaagtggatgacaaagacgctccacggacagaggaaaacaagatccaacacaatggaaactgccaactaaatgaggaaaacttaagcaccaagactgaggcagtatag

SEQ ID NO: 206937 - DNA, 231 bp, synthetic construct
  misc_feature 1..231: note = Description of Artificial Sequence: Synthetic coding sequence
  source 1..231: mol_type = other DNA
atgaccagcctgatgcccggcgccggcctgctgcccatccccacccccaatccactgaccacactgggtgtctcactgagctctctgggcgctattccagccgccgccctagatcccaacattgccaccctgggtgagataccccagcctccactgatgggaaatgttgatcccagtaaaatcgatgagataaggagaactgtgtacgtaggaaacctgaatagccagtag

SEQ ID NO: 206938 - DNA, 1545 bp, synthetic construct
  misc_feature 1..1545: note = Description of Artificial Sequence: Synthetic coding sequence
  source 1..1545: mol_type = other DNA
atgaacagcggcggcggcttcggcctgggcctgggcttcggcctgacccccacaagtgtaatccaggttactaatctatcctccgcagtaactagtgagcaaatgaggacattgttctcctttctgggggaaattgaagaacttcggctctatcctccagacaatgcgcccttggcatttagctcaaaagtgtgttacgtcaagtttagagatcctagctcagtgggggtggcccagcaccttacaaatacggtgtttatcgaccgggcgttgatcgtagtgccatgtgccgaagggaagatccccgaggaaagtaaggccctttctttactcgccccagccccaacaatgacctctctcatgcctggggccggcttactgcccattcccacccccaaccctctgaccaccctgggggtcagtctctcatctctgggagccatacccgccgccgcattagatcccaacatcgcaaccctcggcgaaataccacaaccccctctcatgggaaatgtggatccttcaaagattgacgagatccgacgaacagtttatgtgggcaacctgaattcccagactaccactgctgaccagctcctggagtttttcaagcaggtgggtgaagtaaagttcgtccggatggcaggagacgaaacccagccaaccaggttcgcattcgtcgagttcgctgatcagaacagcgtgccacgcgctttggccttcaacggcgtgatgttcggtgaccgccccctaaaaatcaatcacagcaataatgccatagtgaaaccacccgagatgacaccacaggctgcagcaaaagaactggaagaggtcatgaagagggtcagagaggcacagtcttttatttccgccgctatcgaacccgaatcaggaaaaagtaatgagcggaagggtgggaggtctcggtctcacacgagatctaagagccgctcttcttccaagtctcattccagacggaagcggtctcagagtaagcatcgttctcgctctcacaatcgctctagatcacggcagaaagataggagaagatctaaatcaccacacaaaaagcgatctaaatctcgcgagaggcggaagtcgagatcgcgctcccacagccgagataagcgcaaagacacacgggaaaaaatcaaggagaaggagcgcgtgaaagagaaggacagggagaaagaacgggaacgggaaaaggaaagagaaaaggagaaggagagaggcaaaaataaagatagggataaagagagggaaaaagatagagagaaggacaaggagaaagaccgggagagagaacgggagaaagaacatgagaaagaccgagacaaagagaaggaaaaagagcaggacaaggaaaaggagcgtgagaaggatagatccaaggaaattgatgaaaaaagaaagaaagacaagaacccagaacatcaccccggtgtaactatgcacagagaagatctggttgtccctgccgggaagggcgttggcggcggggccggtgtcttaccagatcggcaggagcaccaaaagccttag

SEQ ID NO: 206939 - DNA, 213 bp, synthetic construct
  misc_feature 1..213: note = Description of Artificial Sequence: Synthetic coding sequence
  source 1..213: mol_type = other DNA
atgagcgagaagaagcagcccgtggacctgggcctgctggaggaggacgatgagttcgaggagttccccgccgaggactgggctggcctcgacgaagatgaggacgcgcacgtgtgggaggacaattgggacgacgacaatgttgaggacgacttctcaaaccagctgagggcagagctggagaagcacggctacaaaatggagacctcttag

SEQ ID NO: 206940 - DNA, 1077 bp, synthetic construct
  misc_feature 1..1077: note = Description of Artificial Sequence: Synthetic coding sequence
  source 1..1077: mol_type = other DNA
atggccttcgcccccatgggccccgaggccagcttcttcgacgtgctggacagacaccgcgagagtctcctggccgccttgcgaagaggtggtagagaacccccgacaggaggatcccgtctcgcaagccgctttgaagatagcgtgggcctgcaaatggtgtctcattgtactacacgaaagatcaagagcgactcccctaagtctgcccagaagttctccctgatcctcaagatcttatcaatgatctataaactggtgcagtctaacacatatgccacgaagcgcgatatctattacaccgacagccagttgtttggcaatcagacggtggtggacaacatcataaacgacatctcgtgcatgcttaaagtgagtcgtagatcactgcatattctctccacatcgaaaggtctaattgcaggaaatctccgttacattgaggaagacggaacaaaggtgaattgcacttgcggcgcaacagctgttgctgtcccttccaatatccaaggaatcagaaatctcgtgaccgatgcaaagttcgtgctgatagtggagaaagatgccacattccagcggctgctggatgacaacttctgtaataagctgagtccttgtattatgattacaggaaaaggagtgccagacctgaatacaaggctgctggtgaagaaattatgggacactttccatgttcctgttttcacgttggttgacgcagatccccatggaatagagatcatgtgcatctacaaatatggatccatgtctatgtcctttgaggcacaccacctaacagtcccagccattcgctggctgggtttattgccttccgacctcaaacgactgaacgttccaaaggacagtttgattccactcacaaagagggaccagatgaagctagatagtattctccgcaggccatacgtaacttgccaacccttttggcgaaaagagatggagatcatggcggacagcaagatgaaggccgaaattcaagctttaaccttcctgagcagcgactacctgtctcgagtttatttacctaacaagctaaagtttgggggatggatctag

SEQ ID NO: 206941 - DNA, 1065 bp, synthetic construct
  misc_feature 1..1065: note = Description of Artificial Sequence: Synthetic coding sequence
  source 1..1065: mol_type = other DNA
atggccttcgcccccatgggccccgaggccagcttcttcgacgtgctagatcgacacagggaatccctgttggcagccttgaggaggggtggtcgggaacctcctactggaggatctcggctggcctctcggttcgaagacagtgttggactacaaatggtctctcactgtacaaccaggaagatcaagtcggacagtccaaagtctgcacagaagttctcccttattttgaagatcctgagtatgatctataagctggtacagagcaacacctacgccacaaagcgggatatctactacaccgacagtcagcttttcggcaaccaaactgtggtcgataacatcataaacgacatctcctgcatgctgaaggtcagcagacgtagtttgcatatcctatcgacatctaagggtctgatagcaggtaacctccggtacatcgaggaggacgggaccaaggttaactgcacatgcggcgctaccgcggtagccgtgcctagcaacatacaggggattcgcaacgcaaagttcgttttaattgtggaaaaagatgctactttccagcgccttctcgacgataacttttgcaacaagctctctccatgcattatgatcacagggaagggggtgcctgatttgaacactcgacttctcgtgaagaagctctgggatacctttcacgtgccagtgttcactttagtcgatgctgaccctcacggcatagagataatgtgcatctataagtatggctccatgtctatgtccttcgaggcccaccatctaacagtgccagcaatccggtggctgggcctccttccaagtgatctgaaacggcttaatgtgccaaaagactccctgattcccctcactaagagggaccagatgaagctagacagtattttgcggagaccctatgtaacatgccagcccttttggcggaaagagatggaaatcatggcagacagcaagatgaaggccgagatacaggccctaaccttccttagcagcgattacctcagcagagtctacctgcctaacaagctcaaattcggaggctggatatag

SEQ ID NO: 206942 - DNA, 1191 bp, synthetic construct
  misc_feature 1..1191: note = Description of Artificial Sequence: Synthetic coding sequence
  source 1..1191: mol_type = other DNA
atggccttcgcccccatgggccccgaggccagcttcttcgacgtgctggataggcatagagagagcctgttggccgctctgcggcgcggcggcagagaaccccccacagggggaagccgacttgcatccagttctgaagttctcgccagtatagaaaacataatacaggacattatcacatctctggctaggaacgaagctcctgcatttactatcgataacagaagcagctgggaaaacattaagtttgaggacagcgtggggttgcagatggtttcgcattgcaccacccggaaaatcaagagcgatagtcccaagtcggctcagaaattctccctcatactcaagattctctctatgatttacaagcttgtacaaagcaatacgtacgccaccaagcgcgacatttattacactgatagtcagcttttcggcaatcaaactgtggtggacaatattattaacgacatcagctgcatgctcaaggtgtctagacgttctctccacattctatcaaccagtaaaggactgatcgctgggaacttgaggtacatcgaggaggatggaacgaaagtgaattgtacttgtggggccactgcggtggcagtgccatcaaacattcagggaatccgaaaccttgttacagatgccaagttcgtgctgatcgtcgaaaaggacgccacgttccagcggctgttggacgacaacttttgcaacaagcttagtccatgcatcatgatcactggaaagggagttcccgacctcaacactcggctcctggtgaaaaaactgtgggacacatttcatgtccccgtctttaccctggttgacgctgacccacatggcattgaaataatgtgtatatacaaatacggcagtatgagtatgagttttgaggctcaccatctgacggtgcctgcaatccggtggcttgggctcctgccttccgacctgaagcgactgaacgttcccaaggactcgctcatcccccttactaaaagggaccagatgaagctcgattcaatccttcggcggccttacgtgacctgtcaaccattctggcggaaggagatggaaatcatggccgattccaagatgaaggccgaaattcaagctctgacctttctgagttctgactacctgagccgtgtttaccttcctaacaaactgaagtttggcgggtggatttag

SEQ ID NO: 206943 - DNA, 813 bp, synthetic construct
  misc_feature 1..813: note = Description of Artificial Sequence: Synthetic coding sequence
  source 1..813: mol_type = other DNA
ctgctggccgccctgcggcggggcggccgggagccccccaccggcggttctcgactggctagcagttcagaagtgctcgcatcgatcgagaacataatccaggatatcataacttctctggcgaggaatgaggccccagccttcaccatcgacaaccgatcgagctgggagaatattaaattcgaggacagtgtcggattacaaatggtatcacattgtacaaccagaaaaatcaaaagcgactcccccaagtccgctcagaagttctccctcatcttgaagatcctgagcatgatctacaagctagtccagagtaatacctacgcaactaagcgagatatttactacactgacagccagttattcggtaatcagaccgtagtggacaacatcatcaatgatatatcttgcatgcttaaagtgagccgccgatccctgcacatattgtctaccagtaagggattgatcgccgggaatttgcgttatatcgaggaggacggcacaaaagtaaactgcacatgtggggcaacagccgtggccgtgccttctaacatacaaggcattaggataactgacgctaagttcgtgctcattgtagaaaaggacgcaacatttcagcgactgctggatgataacttctgcaataagctttcaccatgcattatgatcaccgggaagggcgtgcccgacctaaatacccgactcctcgtgaagaagctctgggatactttccacgtacctgtctttacactagtggatgcagacccccacggaatagagatcatgtgtatctataagtacggaagcatgtag

SEQ ID NO: 206944 - DNA, 996 bp, synthetic construct
  misc_feature 1..996: note = Description of Artificial Sequence: Synthetic coding sequence
  source 1..996: mol_type = other DNA
atggagaaccccagccccgccgccgccctgggcaaggccctgtgcgccctgttgctcgccactctgggggctgctgggcagccactcgggggtgaatccatatgtagtgcacgcgccctggctaaatatagtattacatttactggcaaatggtctcagacggccttccccaaacagtaccctctgttcagaccacccgcccagtggagttctctcctcggtgctgcccacagttccgattatagcatgtggaggaagaaccagtacgtcagcaacggcctgcgcgactttgctgagcgcggagaggcttgggccctgatgaaggagatcgaagcagccggggaggccttacaaagcgtacacgcagttttctcagcccctgccgttccatctggaaccggacagacttccgcagaattggaggtccagcgtcgccacagcctggtttctttcgttgtcagaatcgtaccctcgcccgattggttcgttggtgttgattccctcgacctgtgcgatggagaccggtggagagagcaggccgctctggacttatatccatatgatgcaggaaccgattccggcttcacgttctcatcccccaactttgccaccattccccaggacaccgtcacggaaatcacttcttcttccccttcgcaccctgcaaactcattctactatcctcgactcaaagcccttccccccattgcccgagttactctggttaggttgagacagtcccctcgggccttcataccacctgcacctgtcctcccgtcccgcgacaacgagatcgtcgattccgcttccgtgcccgagactcccttggactgcgaggtgtctttgtggtcttcctggggcctgtgcggggggcattgcggtcggcttggcaccaagtcacgtactagatacgtgcgggtccagcccgcaaacaacgggtctccatgcccagaacttgaggaagaggccgagtgcgtaccagataactgtgtttag

SEQ ID NO: 206945 - DNA, 996 bp, synthetic construct
  misc_feature 1..996: note = Description of Artificial Sequence: Synthetic coding sequence
  source 1..996: mol_type = other DNA
atggagaaccccagccccgccgccgccctgggcaaggccctgtgcgctctgctactcgccacattgggagctgccggacagcccctcggtggggaatcaatttgcagtgctcgtgccttagcaaagtacagtataacgttcacaggaaagtggtcccagacggcatttccaaagcagtaccccctgttcaggccacccgcccagtggtcatccctgctaggcgccgcccactcctctgattactcgatgtggagaaagaaccagtacgtttccaatgggctgcgagattttgccgagcggggtgaagcctgggcccttatgaaagagattgaagctgccggggaagccttgcagagcgtgcatgccgtgttttcagcccccgccgttccttccggcaccggccagacatctgcagaattggaggtgcagcggaggcatagtttggtgagtttcgtcgtccgcattgtgccctcccctgactggttcgtcggcgtcgacagcctagacctttgcgatggggaccgatggagggagcaggccgctctggacctgtacccctatgatgcaggaacagattctgggtttacttttagtagtccaaattttgccaccattccccaggacacggtcactgaaattacctcctccagcccctcccatcctgctaactctttttattaccctcgcttgaaggccctgccacctatcgcaagagtaacattggtgcgcctacgacaatcacccagggcattcataccacccgctcccgtgctgccaagtagagacaacgagatagtagactctgctagtgtgccagagaccccactggactgtgaggtaagcctgtggagctcatgggggctatgcggaggtcactgtggaaggttgggcacaaagtcaaggacgagatatgtccgtgtccagccggccaacaacgggagcccttgccccgagctggaagaggaagccgagtgtgtgcccgataactgtgtgtag

SEQ ID NO: 206946 - DNA, 186 bp, synthetic construct
  misc_feature 1..186: note = Description of Artificial Sequence: Synthetic coding sequence
  source 1..186: mol_type = other DNA
atggagaaccccagccccgccgccgccctgggcaaggccctgtgcgctctccttctggcaaccctgggagccgctggtcagcccctaggcggagagtccatttgcagcgcgagggctctggccaagtacagtattacctttacaggtaaatggagccaaaccgcatttcccaaacaatatccctag

SEQ ID NO: 206947 - DNA, 327 bp, synthetic construct
  misc_feature 1..327: note = Description of Artificial Sequence: Synthetic coding sequence
  source 1..327: mol_type = other DNA
atggagaaccccagccccgccgccgccctgggcaaggccctgtgcgctttactgctggccaccttgggcgccgcaggccagccgctggggggcgaatcaatttgcagcgcccgcgcactcgccaaatatagcataacctttacagggaagtggagccagaccgccttccccaagcagtaccccttatttagaccacctgctcagtggtcttcactgctcggggcagcacactcctctgattattcgatgtggaggaaaaaccagtacgtttcaaacggcctcagggatttcgccgaacgcggggaggcctgggcattgatgaaatag

SEQ ID NO: 206948 - DNA, 54 bp, synthetic construct
  misc_feature 1..54: note = Description of Artificial Sequence: Synthetic coding sequence
  source 1..54: mol_type = other DNA
atggagaaccccagccccgccgccgccctgggcaaggccctgtgcgctttgtag

SEQ ID NO: 206949 - DNA, 27 bp, synthetic construct
  misc_feature 1..27: note = Description of Artificial Sequence: Synthetic coding sequence
  source 1..27: mol_type = other DNA
atggagaaccccagccccgccgcctag

SEQ ID NO: 206950 - DNA, 51 bp, synthetic construct; identical to SEQ ID NO: 100756
  misc_feature 1..51: note = Description of Artificial Sequence: Synthetic coding sequence
  source 1..51: mol_type = other DNA

SEQ ID NO: 206951 - DNA, 75 bp, synthetic construct
  misc_feature 1..75: note = Description of Artificial Sequence: Synthetic coding sequence
  source 1..75: mol_type = other DNA
atggagaaccccagccccgccgccgccctgggcaaggccctgtgcgccctgctgcttgctaccttgggtgcgtag

SEQ ID NO: 206952 - DNA, 195 bp, synthetic construct
  misc_feature 1..195: note = Description of Artificial Sequence: Synthetic coding sequence
  source 1..195: mol_type = other DNA
atggagaaccccagccccgccgccgccctgggcaaggccctgtgcgcgttacttctggcaacattgggggcagccggtcagcctcttggcggcgaaagcatatgtagcgcgagggcactggctaaatactcaatcacctttacagggaagtggtcccaaaccgccttcccaaaacagtatcctttattccgctag

SEQ ID NO: 206953 - DNA, 960 bp, synthetic construct
  misc_feature 1..960: note = Description of Artificial Sequence: Synthetic coding sequence
  source 1..960: mol_type = other DNA
atggacccccagaaccagcacggcagcggcagcagcctggtggtgatccaacaaccgtcccttgattctcgacagcgattggactacgagcgcgaaatacagcctactgccatcctgagcttggaccagatcaaggccattcgcggcagcaacgaatacaccgagggcccttctgtggtgaaaaggccagcgccgcggaccgcccccagacaggaaaaacacgaaagaacgcatgagatcatacctatcaacgttaataataattatgagcatagacacacctcccacctgggccacgccgtcctcccttctaacgccaggggaccaattttaagccgcagcacatctacaggatcagccgcctcctcagggagcaattcaagtgcctccagtgaacaaggcctcttggggcgatccccacctacccgcccagttcccggccaccgctcggaacgcgccattagaactcaacctaagcaactaattgtggatgacttgaaggggtcactgaaagaagatctaacacagcataagttcatttgtgagcaatgtggaaaatgcaagtgcggggagtgcacggcgccaaggactctgcctagttgtctggcttgcaatcggcaatgtctgtgctccgctgaatccatggtggaatatggaacttgcatgtgcttagtcaaagggatcttctaccattgctccaacgatgacgaaggcgatagctactcggataatccgtgcagctgcagccagtcccattgttgtagtcggtatctctgcatgggagccatgtcgctgttcctgccttgcctgctttgctaccctccagccaaaggctgtcttaaactttgccggaggtgttacgactggatacataggcccgggtgtcggtgcaaaaatagtaacactgtctactgtaaactcgagagttgcccaagtcgaggccaggggaaaccttcttag

SEQ ID NO: 206954 - DNA, 960 bp, synthetic construct
  misc_feature 1..960: note = Description of Artificial Sequence: Synthetic coding sequence
  source 1..960: mol_type = other DNA
atggacccccagaaccagcacggcagcggcagcagcctggtggtgatccagcaaccctccctggactcgcgacagcgactggattacgaaagggagatccaaccaaccgccatactgagtcttgaccaaatcaaagccatacgcggctctaatgaatacaccgagggtccaagcgtcgtgaaacgcccagctccacgaactgcccctcgtcaggagaagcacgagagaactcatgaaataatccctatcaacgtgaacaacaattacgaacacagacacacatcccacctgggacacgccgtgcttcccagcaatgccagagggccaatcctgtctaggtctaccagtactggatcagctgcctcgtcaggatcaaactcctctgcgagcagtgagcaggggttgctcgggcgtagccctcctaccagacccgtgccaggacatcgatccgagagggccatcaggactcaacctaagcagttaattgttgacgatttaaagggttctctcaaagaggacctgacacagcacaaatttatttgcgagcagtgcggcaagtgcaaatgtggagaatgcaccgcccctcgcacactgccttcttgccttgcgtgcaacaggcagtgtctttgtagcgctgagagtatggtggagtacggtacctgcatgtgccttgtgaagggcatcttttatcattgctctaatgatgatgagggagactcatatagtgataacccctgctcatgctcccagagtcactgctgctctcggtatttgtgcatgggggctatgagccttttcctgccctgtctcctgtgctatccgccagccaagggttgtctaaaactctgcaggcggtgttatgattggatccatcgtccagggtgcaggtgcaagaattccaataccgtgtattgcaagttggagagttgtcccagcaggggtcaggggaagccgtcatag

SEQ ID NO: 206955 - DNA, 204 bp, synthetic construct
  misc_feature 1..204: note = Description of Artificial Sequence: Synthetic coding sequence
  source 1..204: mol_type = other DNA
atggacccccagaaccagcacggcagcggcagcagcctggtggtgattcaacagccttcactagatagtcggcagcgtttggactatgagcgggagattcagcccaccgccatactgtcactggaccagattaaggcaataaggggatccaacgagtacaccgagggcccctctgtggttaaaagacccgccccccggacgtag

SEQ ID NO: 206956 - DNA, 630 bp, synthetic construct
  misc_feature 1..630: note = Description of Artificial Sequence: Synthetic coding sequence
  source 1..630: mol_type = other DNA
atggacccccagaaccagcacggcagcggcagcagcctggtggtgattcagcaacctagtctggattcacgccagcgcttggattatgaaagagagattcaacccactgctatcctgtcccttgaccagatcaaagccatccgcgggagcaatgagtatacggaagggccttccgtggtgaagcgacctgctcctcgcacagcacccagacaagagaaacatgagcgcacgcatgagatcatcccgatcaacgtaaataataactacgagcataggcacaccagccatctcggccacgccgttttgccgtctaatgcccgaggaccaatcctgtcccgcagtactagtaccgggtccgcggcgtcttccggttccaattcctctgccagctccgagcaggggttactgggtcggagcccccccaccagacccgtgcccggacatcgctccgagcgtgccatccgcacgcaacctaagcaactgatcgtggacgacctcaagggctctctcaaggaagacctgacccagcacaaatttatttgtgaacagtgcggcaagtgcaagtgtggggagtgtactgcccctaggacactgcctagctgcctcgcctgtaatcgacagtgtttatag

SEQ ID NO: 206957 - DNA, 108 bp, synthetic construct
  misc_feature 1..108: note = Description of Artificial Sequence: Synthetic coding sequence
  source 1..108: mol_type = other DNA
atggacccccagaaccagcacggcagcggcagcagcctggtggtgattcagcagcccagcctcgactcgaggcagaggttagattacgagcgagaaatccagccatag

SEQ ID NO: 206958 - DNA, 948 bp, synthetic construct
  misc_feature 1..948: note = Description of Artificial Sequence: Synthetic coding sequence
  source 1..948: mol_type = other DNA
atggaggcccgggcccagagcggcaacggcagccagcccctgctgcagacccccagagacggcggacgccagaggggtgagcctgaccctcgggacgcactgacacagcaggtgcacgtgttgtcactggaccagatacgcgctatacgaaatactaacgaatatacagagggacctaccgttgttccccggccggggctgaagcctgccccccgtccaagtacacagcataagcacgaaagactgcatggcctgcctgaacatcggcagccacctcgactccagcacagtcaggtacacagttcagccagggctccccttagtcggtccatctccacagtgagctcaggtagtcggagttccacacggacctcgacgagctcgtccagctctgagcaaaggctgctcgggagcagtttctcctctgggcctgtggccgacggcatcattagggttcaacccaagagcgagctgaaacccggagagttgaagccgctgtcgaaagaggatcttggcctccacgcatatcgatgtgaggactgtggaaagtgcaaatgtaaggagtgtacttatccccgccctcttccttctgactggatttgtgataagcagtgtctgtgtagcgctcagaatgtcatcgactatggaacatgtgtttgttgcgtgaagggtctattttaccattgttctaacgatgatgaggataattgtgctgataacccctgttcctgttctcaatctcattgctgtacacgctggtccgccatgggcgtgatgtccctttttctcccttgcctgtggtgttaccttcctgccaaagggtgcctgaaactatgccagggctgttacgaccgcgtcaatcgccccggctgccgatgtaagaactcaaacactgtctgttgcaaagtaccaaccgttccaccccggaacttcgagaaaccgacatag

SEQ ID NO: 206959 - DNA, 948 bp, synthetic construct
  misc_feature 1..948: note = Description of Artificial Sequence: Synthetic coding sequence
  source 1..948: mol_type = other DNA
atggaggcccgggcccagagcggcaacggcagccagcccctgctgcaaacccctagggatggcggacgccaaaggggagagccagatcctcgtgacgctctaactcagcaggtgcacgtgttgagcttagaccaaattcgagcaataaggaatacgaacgagtatacagagggacctacagtggttcccaggcccggactcaaaccagctccgaggccatcaacccaacacaagcatgaacgtctgcatggccttcctgagcaccgccagcctcctagacttcagcacagccaggtgcattcaagtgcccgcgctcccctgagtcggtccatcagcacggtctcctctgggtctcgaagcagtaccaggacctccacatcttcaagcagttcggaacaaaggttacttggaagttcctttagttccggcccggtagccgacggcattatccgggtccagcccaaatcggaacttaagccgggcgaattgaagcctctgagtaaggaggatctggggctgcatgcataccgctgcgaggactgcggaaagtgtaagtgtaaggagtgtacctaccctcgacctctgcctagcgactggatctgcgataagcagtgcttatgtagcgcccagaacgtgatcgactatggcacctgtgtttgttgtgttaagggcctgttttaccactgctccaacgacgacgaggacaactgtgcagacaacccttgttcttgcagccagtcccactgttgtactcgttggtctgcgatgggcgtcatgagcttgtttcttccctgtctctggtgctacttaccagccaaagggtgcctgaaactttgccagggatgttacgatcgtgttaacagaccaggatgcagatgtaagaatagcaatacagtgtgctgtaaagttcccactgttccacctagaaattttgagaagcccacatag

SEQ ID NO: 206960 - DNA, 948 bp, synthetic construct
  misc_feature 1..948: note = Description of Artificial Sequence: Synthetic coding sequence
  source 1..948: mol_type = other DNA
atggaggcccgggcccagagcggcaacggcagccagcccctgctgcagacaccacgtgacggcgggagacagagaggagagcccgatccacgggatgccctgacgcagcaggtccacgtgctttccctcgaccagatcagagccatcaggaacaccaacgaatacactgaggggcctacagtggtgccccggcccggcttaaagccggcacctaggccaagcacccagcataagcatgagcgcttgcacggcctcccagaacacaggcagccgccccgtctccagcattcccaggtgcactcatcagctcgtgccccactttctagaagtatttcaactgtctcaagcgggagcagatccagcacaaggacctcaactagctcatcctcctcggaacagcgacttctaggcagctcattctctagcggtcctgtcgcagatggcatcattcgcgtgcagcctaagtccgaactcaaacccggtgagttgaagcctctctctaaggaagacctgggtctgcacgcctatcgatgcgaagactgtggcaaatgtaagtgtaaagagtgtacttatcctcgacccctgccttcagactggatttgcgacaaacagtgcctctgcagtgcacagaacgtgatcgactacggaacctgtgtatgctgcgtcaaaggcctcttttaccactgcagtaatgatgatgaggacaattgtgccgacaacccctgttcctgtagccagagccattgctgcacgagatggtccgcaatgggcgtcatgagtctttttctcccgtgtctctggtgctacctccctgcaaagggttgcttaaaactatgccaaggatgttatgacagggtcaaccgacctggatgcagatgtaagaactctaacactgtttgctgtaaggttccaactgttcctcccaggaacttcgagaaaccgacatag

SEQ ID NO: 206961 - DNA, 1062 bp, synthetic construct
  misc_feature 1..1062: note = Description of Artificial Sequence: Synthetic coding sequence
  source 1..1062: mol_type = other DNA
atggaggcccgggcccagagcggcaacggcagccagcccctgctgcaaactccaagagatggcggccgtcagcgaggtgaacccgatccacgcgatgccctcacccaacaggtccacgtgctgtctcttgatcaaattagggcgataaggaatacaaacgagtacactgaggggccaactgtggtgcctaggcccggacttaaaccagcccccaggccatcaacacagcacaagcacgaaaggttacatggcttacccgagcaccggcagccgcccaggcttcagcacagccaggttcactcaagtgctcgcgctcctttgtcccgatccatttctacagtgagcagcggatctaggtcctccacccggacttccacttcctcttccagtagcgagcagcgtcttttaggcagcagttttagctccggccccgttgccgatggcattattagagttcagccaaaatccgagctcaagcccggagaactgaaaccgttgagtaaggaggatctcggcctccatgcctacaggtgtgaggattgtggcaagtgtaaatgtaaggaatgcacttatcctcggcctttaccctcagattggatttgtgataaacaatgtctgtgctctgcacagaacgtaatcgactatggaacatgtgtctgctgcgtcaagggactgttttatcattgcagcaatgacgacgaggacaattgtgccgacaacccatgctcgtgcagccagtcacattgttgcacccggtggtcagctatgggcgtgatgagtctgttccttccatgcttgtggtgttaccttccggcgaaaggctgcctgaagctgtgtcagggctgttacgaccgggtcaaccgcccgggctgtcgatgcaagaactcaaataccgtgtgttgtaaagtgccaacagttccaccccgtactctgaaaaaccaacacagtattatcaaccaggagtattattctaacgaggactttttctttctattcctgatccacatttgtaatcagctgaattcgtacaatctaggtacagttaaccgtaaggtaggctag

SEQ ID NO: 206962 - DNA, 867 bp, synthetic construct
  misc_feature 1..867: note = Description of Artificial Sequence: Synthetic coding sequence
  source 1..867: mol_type = other DNA
atggacgccgccgtgaccgacgacttccagcagatcctgcccatcgaacagctgcgctccactcacgcttctaacgactacgtggagaggcccccagcaccatgtaagcaggctctctccagtccctccttaattgttcagacacacaaaagtgactggtctctggcaaccatgcccacctctctgccgcgcagtctcagccaatgtcatcagctgcaaccgctcccccagcatctgagtcaaagcagtatagccagtagcatgtcgcacagcactacggccagtgatcagaggttgctcgcatccatcactccctctccttcggggcagtctatcatccgtactcaaccaggcgccggcgttcatccaaaggcagatggggccctcaagggcgaggctgagcagtctgccggacacccctctgagcatctgttcatttgcgaggagtgtgggcggtgcaagtgtgtgccttgcactgccgctcggccacttccctcatgttggctatgtaaccagaggtgcctgtgttcagcagaaagcctgctggattacgggacatgtttatgttgtgtcaaaggcctgttctaccactgtagtaccgacgacgaggacaactgcgctgatgagccttgtagttgcggaccctccagctgtttcgtccggtgggctgccatgtcgttgatcagcctatttctgccatgcctgtgttgctatttgccgacccgcggctgtcttcatctgtgtcagcaaggctatgatagcctccggcggcccggctgccgttgcaaaaggcatactaacaccgtgtgccgcaagattagctctggaagtgctccctttcccaaagcgcaggagaaatccgtgtag

SEQ ID NO: 206963 - DNA, 378 bp, synthetic construct
  misc_feature 1..378: note = Description of Artificial Sequence: Synthetic coding sequence
  source 1..378: mol_type = other DNA
atggacgccgccgtgaccgacgacttccagcagatcctgcccatcgagcagctgcgaagtacacatgcatctaacgattacgtggagagacccccagctccctgtaagcaggctctgagctcgcctagtctcattgtgcagacccataagagtgattggtcgcttgcaactatgcccacaagcctgcctcggtccctctcccaatgccaccagcttcagcccctgcctcagcacctcagccagagctcgattgctagcagcatgagtcacagtaccacagctagctctaccacagccccgctgatgatgaaaactacggtcctcatgtcccccgccctcgttggcttagtgctggccctgagcgctggccagccttag

SEQ ID NO: 206964 - DNA, 969 bp, synthetic construct
  misc_feature 1..969: note = Description of Artificial Sequence: Synthetic coding sequence
  source 1..969: mol_type = other DNA
atgctgagccccctgcccaccggccccctggaggcctgcttcagcgtccagagtaggaccagctcaccgatggagcctccgattccccagagcgccccgctcaccccaaacagcgtcatggttcagcccctgcttgacagcaggatgtctcactccaggttgcaacaccctttgaccatcttgccaatagatcaggtgaagacctcacacgtagaaaacgactacattgataatccgtccctggccttgacgaccggtcctaaacgcactcgcgggggggctcctgagctagctcctactccagccagatgcgaccaggacgtgacccaccactggatttcttttagcgggcgcccttcctctgtaagcagttcctcctctacgtcttctgaccagagactcttggaccatatggcccctccgccagtcgcggaccaggcttctccccgggcggtgagaattcagccaaaggtggtgcattgtcagccacttgatctgaaaggccccgctgtgccgccagaactcgataaacatttcctactgtgcgaagcgtgcggaaagtgtaaatgcaaagagtgcgcttcacctcgcactttaccctcctgctgggtgtgtaatcaggagtgcctttgctctgcgcagaccctggttaactacggcacctgtatgtgcctggtccaggggatcttctatcattgcactaacgaagacgacgagggctcctgcgctgaccacccgtgctcttgcagtaggagcaactgttgtgctcggtggtcattcatgggagccctctcggtggttctgccttgcttgctgtgctaccttcctgcaactggctgcgtgaagctggcacagcgcggctatgaccgcctgaggcgaccagggtgtagatgcaagcatactaattcggtgatatgtaaagctgcctctggagatgcgaaaacgtctaggcccgataaaccattttag

SEQ ID NO: 206965 - DNA, 321 bp, synthetic construct
  misc_feature 1..321: note = Description of Artificial Sequence: Synthetic coding sequence
  source 1..321: mol_type = other DNA
atggagccccccatcccccagagcgcccccctgacccccaacagcgttatggttcagccactcctggattcacgcatgtcacatagtaggcttcagcatccccttacaattctgccaatcgaccaagtgaagacctctcatgtcgaaaacgactacatagataacccgtctctggccctgactacagggccaaagcgcacacgaggaggggcacctgaactcgcacctactcccgcaagatgtgatcaagacgtgacgcaccactggatctcattttctggacggccgtgctccgctacatgtctgcctcccgccgcctag

SEQ ID NO: 206966 - DNA, 900 bp, synthetic construct
  misc_feature 1..900: note = Description of Artificial Sequence: Synthetic coding sequence
  source 1..900: mol_type = other DNA
atggagccccccatcccccagagcgcccccctgacccccaacagcgttatggtgcaacctctcctggatagccggatgagtcactcccgtctgcagcaccctcttacaatcctgccgatcgatcaggttaagacgtcgcatgtcgaaaatgattacatcgataatccatcccttgcccttaccacaggtccaaagcgcacacggggaggcgccccagagctagctccaaccccagcacgatgcgaccaggatgtgactcatcactggatcagtttctctggacgccctagctctgtgagcagctccagctctacttcgagtgaccagcgcttactggaccatatggctccaccacccgtcgctgatcaggctagcccccgcgctgtcaggatccaacctaaagtggtccattgtcagcctctggacttgaagggcccagccgtccctcctgaactagacaagcactttctgttgtgcgaagcttgcggaaaatgcaagtgtaaggaatgtgcatccccccgcacccttcctagttgttgggtgtgcaaccaggagtgtctgtgttccgcacagactttggttaattacggcacgtgtatgtgtctggtgcaaggtattttctatcattgcacgaacgaagatgatgaggggtcgtgtgccgaccatccttgctcttgctcccgcagcaactgttgtgcacgctggagtttcatgggagcactgtccgtggttctcccttgtttactgtgttacctccctgcgactgggtgcgtgaagctggctcagagaggatatgatcggttacggaggccaggatgccgatgcaagcacaccaacagcgttatctgtaaggccgcttcaggggatgccaagactagtcggccagataagcccttttag

SEQ ID NO: 206967 - DNA, 153 bp, synthetic construct
  misc_feature 1..153: note = Description of Artificial Sequence: Synthetic coding sequence
  source 1..153: mol_type = other DNA
atggagccccccatcccccagagcgcccccctgacccccaacagcgtcatggtgcagccacttctggactcaaggatgagccactcccgactgcaacatccgctgacaattctgcccatcgatcaagtgaagacatcacatgttgagaattag

SEQ ID NO: 206968 - DNA, 1335 bp, synthetic construct
  misc_feature 1..1335: note = Description of Artificial Sequence: Synthetic coding sequence
  source 1..1335: mol_type = other DNA
atgagcgaggagaccgccaccagcgacaacgacaacagctacgcccgagtgcgtgcagtggtgatgacgagagacgacagttctggtgggtggttgcccctcggaggctctgggctttccagtgtgacagtgttcaaagtgcctcaccaagaggaaaacgggtgcgcagatttttttattagaggggagaggcttcgtgacaaaatggtggtcctcgagtgtatgctcaagaaggacttgatttacaacaaagtcacaccaactttccatcactggaaaatcgacgataagaaattcgggttgacttttcaaagcccagctgatgcacgggcattcgaccgcggtattagacgggcgatcgaggacatcagtcagggctgccccgagtctaaaaatgaagcagaaggggctgatgacctgcaagctaatgaagaagacagttcttcttccctggtgaaggaccacctcttccagcaagaaacagttgtgacatccgagccctatcgctcttcaaacatcagaccctctcccttcgaagacttgaacgctaggcgagtttatatgcagtcacaagcaaaccagataacattcggtcaaccaggattggacatccaatccagatctatggagtacgtgcagcggcaaatttccaaggagtgtgggtctttgaagtcgcagaatcgcgtgcccttgaaatccatcagacacgtgtctttccaagatgaagacgagatagtccggatcaatccgcgcgacatcctcatcaggcgctatgccgactaccggcaccccgacatgtggaaaaatgacctggagagggatgacgcagactctagtatacagttctccaagccagactcaaagaagagtgactacctttattcttgtggcgacgaaacaaagctctcttctcccaaagacagcgtggtttttaagacacagccatcctcactcaaaattaagaagagcaaacgcaggaaagaggatggcgagagatctaggtgtgtgtattgccaggagcgcttcaaccatgaggagaacgtgcgcggcaaatgccaggacgctcctgatcccatcaaacgctgtatctaccaggtcagctgcatgttgtgtgctgaatcgatgctgtatcattgtatgagtgattctgagggggattttagtgacccttgcagttgcgacaccagtgatgataagttttgcctgcgctggcttgctttggtagcactgagctttatcgtaccctgtatgtgctgttatgttcccttaagaatgtgccatagatgcggggaagcctgtggctgctgtggtgggaaacacaaagccgccggttag

SEQ ID NO: 206969 - DNA, 1257 bp, synthetic construct
  misc_feature 1..1257: note = Description of Artificial Sequence: Synthetic coding sequence
  source 1..1257: mol_type = other DNA
atgaccgaggagacccaccccgacgacgacagctacatcgtgcgggtcaaggctgttgtgatgacccgggatgattcctccggcggctggttcccacaggaagggggtggaataagccgggtgggggtgtgtaaagtcatgcaccctgagggcaacggccgctccggttttttaatacatggtgagcgtcagaaagataaattggtcgtactcgagtgttatgttcgtaaagaccttgtgtacaccaaagctaatccaacctttcatcactggaaggttgataataggaagttcggactgaccttccagtcaccggctgacgcccgggccttcgatagaggcgtgagaaaggcaatcgaggacctgatcgagggatccacaacaagctcaagtacgatccataacgaagcagaactaggcgatgacgatgtgtttacaaccgccacagacagttcctccaactcaagccagaagcgcgaacaaccgacgcggaccattagcagcccaacctcatgtgaacatcggagaatctacaccctgggacatctccacgattcatatccaaccgaccattaccaccttgaccagcccatgcctcgcccatatcgtcaggtctcgttccccgacgacgacgaggaaatagtccgcatcaatccacgagaaaaaatttggatgacaggttatgaggactatcgacatgcccctgtcagggggaagtatcccgacccttcagaggacgcagactcttcctatgttcgcttcgctaagggtgaagtccccaagcatgattataattacccatatgtggattcttcagactttgggttgggagaggatcctaaaggtagaggggggtcagtgataaagacacaacctagtcgcggcaaatcccgcaggaggaaagaggacggagaacggagcagatgcgtgtactgcagggatatgttcaatcacgaagagaacagaaggggccactgccaggacgcccctgatagtgtcagaacgtgcatacgacgcgtgagctgtatgtggtgcgctgactccatgctgtaccactgcatgagcgaccccgagggcgattacaccgacccatgcagctgcgatacctccgacgagaagttctgcttgcggtggatggccctgatcgctttgtcatttttagctccatgcatgtgctgttacctgccattgcgcgcctgctatcactgcggagttatgtgcaggtgttgcggaggtaagcacaaggccgccgcctag

SEQ ID NO: 206970 - DNA, 351 bp, synthetic construct
  misc_feature 1..351: note = Description of Artificial Sequence: Synthetic coding sequence
  source 1..351: mol_type = other DNA
atgaccgaggagacccaccccgacgacgacagctacatcgtgcgggtgaaagccgtggtcatgacccgggacgacagctccggaggttggttcccccaggaagggggcggcatttccagagttggtgtgtgtaaggtgatgcatcctgaaggtaacggacggtccggcttcctcattcatggggaacgacaaaaggacaaactcgtcgttcttgaatgctatgtccgtaaggaccttgtatacactaaggctaaccccactttccaccattggaaggtggataaccgtaagtttggtttgacattccagagtcccgctgacgccagggcgttcgatcgtggagtgaggtag

SEQ ID NO: 206971 - DNA, 1248 bp, synthetic construct
  misc_feature 1..1248: note = Description of Artificial Sequence: Synthetic coding sequence
  source 1..1248: mol_type = other DNA
atggccagccccggcagcgacagctacatcgtgcgggtgaaggccgtcgtgatgaccagggatgactctagtggggggtggttccctcaggaggggggcggcatctcgagggtgggagtctgcaaagtgatgcatcccgaaggcaatggccgctccggcttcctgatccatggggaacggcaaaaagataagctggtcgtgttggaatgttacgttcggaaggacttagtgtataccaaagccaatcccacctttcaccattggaaagtggacaatcggaagtttggactgacattccaatcacccgcagatgcgcgtgcctttgaccggggggttcgcaaggctatcgaagatctgatagagggttcaactacttctagcagcactattcataatgaggctgaactgggcgatgatgatgtttttacaacagcaactgacagttcctccaacagttcacagaaacgcgaacaacccacgcgcactattagcagtcccacgagctgtgaacaccgaagaatctacaccctcgggcatttgcatgattcttaccccactgaccactatcacctcgaccagccgatgccacgaccatatcgccaagtttccttcccagatgatgacgaggagattgtgcgcattaacccccgtgagaaaatttggatgactggctacgaggattatcgtcacgccccagtccggggtaaatatccagacccctctgaggacgcggattcgtcatatgtgagattcgccaaaggggaggtccctaaacacgactataattatccctatgtggattcaagcgacttcggattgggggaggatccaaagggccgaggggggtcagttattaagacacaacctagcagggggaaaagcagacgccgtaaggaggatggcgaaaggtccagatgcgtctattgccgggacatgttcaaccatgaagagaatagaaggggccactgtcaagatgctccagatagcgtgcgcacctgcatccgacgtgtctcctgcatgtggtgtgcagacagcatgctctaccattgcatgtctgatccggagggcgactatactgacccatgctcctgtgatacttccgatgagaagttctgtctgcgctggatggccctcatagcgttatctttcctggccccctgtatgtgttgttacctgcctttgcgagcatgctatcattgcggtgtcatgtgccggtgctgcggaggtaagcacaaagcagccgcctag

SEQ ID NO: 206972 - DNA, 1233 bp, synthetic construct
  misc_feature 1..1233: note = Description of Artificial Sequence: Synthetic coding sequence
  source 1..1233: mol_type = other DNA
atggtgcgggtgcgggccgtggtgatggcccgggacgacagcagcgggggatggttgcccgtgggggggggcggactgtcccaggttagcgtgtgccgggtccgaggagcgcgacctgagggaggggcgcgacagggtcattacgtcatccatggcgagcgcttgcgggaccagaaaactacactggagtgtaccttgaagcccgggctggtgtataacaaagtaaacccgattttccaccactggagcctgggcgactgtaagttcggactcacctttcaatcgccagcagaggctgacgaatttcaaaaatccttgctggccgccttggccgccttgggtcgtggctcactgacaccgagtagctccagtagctcctccagccctagtcaggatacagccgagaccccttgtcccctgacgagtcacgtggacagcgatagcagtagcagccattctcgccaggaaactccacctagtgcagctgccgcaccaattattacaatggaaagcgcttcaggcttcggccctaccacccctcctcagcgacggaggagcagcgcacaatcatatccccccctgctgccttttaccggtataccagaaccttctgaaccgcttgctggcgccggcggactggggtggggcgggcgcggctacgaagactacagacgatccggaccacccgctccactcgcgctgtctacctgcgtagtccgttttgctaaaaccggcgccctgcggggcgccgccttgggcccgccagctgccctgcctgcccccttaacagaagcggctccacccgcacctcctgctaggccaccccctggtccaggcccttcctccgctccagccaaggctagtccagaggccgaagaagcagctagatgtgtgcattgtcgggccctattcagacgcagggcggacggcaggggggggcgatgcgcagaagcacccgaccccggaaggttgttggtccgacggctgtcatgcttgtggtgcgctgaaagccttctctaccattgcctctctgacgcagaaggtgacttctcagacccctgtgcatgtgagcctggacatccaaggcctgccgccagatgggcagcactggcggcccttagcctggctgtcccttgtctctgctgttatgcacctcttagagcttgtcattgggtagccgcccgatgcggttgtgccggctgcggcggcagacacgaagaggccgccagatag

SEQ ID NO: 206973 - DNA, 459 bp, synthetic construct
  misc_feature 1..459: note = Description of Artificial Sequence: Synthetic coding sequence
  source 1..459: mol_type = other DNA
atggtgcgggtgcgggccgtggtgatggcccgggacgacagcagcggcggctggttacctgtgggtggtggcggcctgtcacaggtgtcagtatgccgagtaaggggcgctcgaccagaaggcggtgccagacaaggccactacgtgatccacggggaaaggctacgggatcaaaaaacaactctcgaatgtacactcaagcccgggctcgtgtacaataaggtcaacccaattttccaccattggagcctaggcgattgcaagttcggactgacgttccagagcccagccgaagcagacgagttccagaaatcgctgctggcggccctggcggcactgggcagaggtagcttgactccttccagtagtagctcttcatcaagtccatctcaggatacagccgaaaccccatgcccactgactttaagccaatattttcggcatatgctatgtccatag

SEQ ID NO: 206974 - DNA, 1725 bp, synthetic construct
  misc_feature 1..1725: note = Description of Artificial Sequence: Synthetic coding sequence
  source 1..1725: mol_type = other DNA
atgtggaccttcctgggcatcgccaccttcacctacttctacaagaagttcggcgactttatcacgctagcaaaccgggaggtgttactatgtgtcctcgtcttcttgtctttagggcttgtgctttcttacaggtgtagacaccgaaatggtggcctgctgggaaggcagcaatcagggagtcaattcgccctgttttctgatattttgtccgggctccccttcatcgggtttttttgggcgaaatcacctccagagagcgaaaacaaggagcagctggaagctaggagacggaggaaaggtactaacatttcagaaactagtctgatcggcaccgcagcttgcacctccacctctagccagaatgaccccgaggtgattattgtcggagccggtgtgctcgggtccgccctggctgctgtgctgagtcgcgatggccggaaggttactgttatcgagagagacttgaaggagccagaccgcatcgtcggggagtttctgcagccaggcgggtatcacgtcctgaaggacctcggcctgggcgatactgtggagggtctagatgcccaggtggttaatgggtatatgattcatgatcaggaaagtaagtcggaggtccagatcccctatcctctgagcgagaacaatcaggtgcagagcggccgcgcctttcaccacggaagatttatcatgtcactgagaaaagctgcgatggcagaacccaacgccaagttcattgagggggttgttctacagctgctcgaggaggatgacgtggttatgggcgtacagtataaggacaaggagactggcgacatcaaggagttgcacgcacccctgacagtagtggctgatggactctttagtaagttcagaaagagcttagtgtcaaataaggtgagtgtatccagccatttcgtcggcttcttgatgaagaacgccccgcagttcaaggccaatcatgcagagctgattctggccaatccttcaccagtcctgatttatcagatttcttcctccgagacaagggttctagttgacatccgaggagaaatgcctcgcaaccttcgggaatatatggtggaaaaaatctaccctcaaatccccgatcacctgaaggaaccatttctggaagctaccgataacagccacctacggtcaatgcccgcctcttttctgcctccaagttcagtgaaaaagcgcggcgtactcctgctgggagatgcgtacaacatgcggcacccactcaccggcgggggtatgacagtggctttcaaagacattaaactctggcggaagctgctcaagggaattcccgacctctatgacgacgcggccattttcgaggccaagaagtctttttactgggctaggaaaacatctcactccttcgttgtgaatatcttggctcaagctttgtacgaactgtttagcgcgacagatgacagcctgcaccaactccgaaaagcgtgttttctgtattttaagctgggaggcgagtgtgttgccggcccagtgggtctgctgtctgttctctctcctaatcctctggtactgatcggacattttttcgccgtcgctatctacgccgtgtacttttgcttcaagtccgagccatggatcaccaaaccgcgggccctgctgtcctctggcgcagtgctgtacaaagcctgttccgtgatctttcctctaatctactctgagatgaaatacatggtccactag

SEQ ID NO: 206975 - DNA, 1440 bp, synthetic construct
  misc_feature 1..1440: note = Description of Artificial Sequence: Synthetic coding sequence
  source 1..1440: mol_type = other DNA
atgctgcggcggaagggcaccaacatcagcgagaccagcctgatcggcacggctgcctgcacttccacgagtagccagaatgatcctgaggtaatcattgtgggagctggggttctcggcagcgccttagccgccgttctgtcacgggacgggagaaaagtgactgtcatagagagagacctgaaagaacctgatcggattgtaggggaatttctgcaacctgggggctaccatgtgttaaaagacctcgggctcggtgatacagtggagggactggatgcccaggtcgtcaatggttacatgatacacgaccaggagagcaagagcgaggtccagattccttatcccctctctgaaaataatcaggtgcagtcaggacgcgcatttcaccacggacggttcatcatgagcttgcgcaaagcagccatggcggagccgaatgcaaagtttatcgagggggtggtgctccagttactggaggaggacgatgtcgtcatgggcgtgcaatacaaggacaaggaaaccggcgatataaaagagcttcacgcaccactaaccgtcgtggctgacggcctgtttagtaaatttcgtaagagcctcgtgagcaacaaggtgagcgtttccagtcattttgtggggttcttgatgaaaaacgcccctcagtttaaagccaaccatgctgagctcattctagccaatccatctcctgtcctgatttaccagatctcatcctccgagactcgggttcttgtggacatccgcggtgaaatgccacggaatttgcgcgagtacatggtggaaaagatttacccacaaatcccggaccatcttaaagagccattcctggaggctactgacaactcccacctgcgaagcatgcccgcaagcttcctcccaccatccagcgtgaaaaagaggggagtccttcttctcggcgacgcctacaacatgcgacacccccttaccgggggagggatgaccgtggctttcaaggatatcaaactgtggcgcaaactccttaagggcattcctgacctctacgatgacgctgccattttcgaagccaaaaagagtttttactgggctaggaaaacttcccattcctttgtggttaatattctggcccaagctctatacgaactgttctccgcgaccgatgattctttacaccagctcaggaaagcttgctttctgtactttaaattgggaggagagtgtgtagccggccccgttgggctgctgtcagtgctgagtccgaatccactagtgcttattggacacttcttcgcggtggctatctatgccgtgtacttttgtttcaagtcagagccctggattacaaagccacgggccctgctgtccagcggggcggtcctgtacaaggcctgctcagtcattttcccgcttatttactctgagatgaaatatatggtacattag

SEQ ID NO: 206976 - DNA, 1140 bp, synthetic construct
  misc_feature 1..1140: note = Description of Artificial Sequence: Synthetic coding sequence
  source 1..1140: mol_type = other DNA
atgatccacgaccaggagagcaagagcgaggtgcagatcccctacccactatcagaaaacaaccaggtgcagtctggcagagcctttcaccacggccggttcatcatgtctcttcgcaaggctgctatggccgaaccgaacgcaaagtttattgaaggggtggtcctccaactcctggaggaagacgacgtggtaatgggggtgcagtacaaggacaaggaaacaggagatatcaaagaactgcacgctcctctgacagtggtcgccgacggccttttctctaaattcaggaagagcctcgtgagtaataaagtctccgtcagctcacactttgtgggtttcctcatgaaaaacgctccccagttcaaggccaatcacgccgaattaatattggcaaacccttctcctgtgctgatttaccagatttcttctagcgagactcgggtcctcgtcgatatacgtggggaaatgcctaggaacttaagggagtacatggtggagaagatctatccacagatacccgaccatctgaaggagccatttttggaggctaccgacaactcacacctgcgcagcatgccagcctcttttctgcctccctctagcgttaaaaagaggggagtgttactgctcggagatgcctacaatatgcggcatcctctgacagggggcgggatgacagtcgcatttaaggacatcaaactctggcgtaaacttctcaagggaatacccgacctgtacgacgatgccgccatctttgaggccaagaagtccttctattgggcaagaaaaacctcgcactcatttgtcgttaatatacttgcccaagctttatacgagcttttttcagcgactgacgatagcctgcaccagctgagaaaggcatgtttcttatatttcaagctgggtggagaatgtgtggctggtcctgtgggtctgttatccgtgttatcccccaacccactcgtactcataggccacttttttgcggtagctatttacgccgtgtatttctgtttcaaatcagagccctggattacgaagcctagagctctactttcgtccggagcagtgctctacaaggcttgcagcgtgatctttccacttatctactctgaaatgaagtatatggtccactag

SEQ ID NO: 206977 - DNA, 822 bp, synthetic construct
  misc_feature 1..822: note = Description of Artificial Sequence: Synthetic coding sequence
  source 1..822: mol_type = other DNA
atgaagaagacccagacctggatcctgacctgcatctacctgcagctgctattgttcaacccactcgtgaaaacagagggcatctgtaggaaccgcgttactaataacgtgaaggatgtgactaaactggttgcaaatctgccgaaggattacatgatcactttgaaatatgtgcccgggatggacgtgcttccgtctcactgctggattagcgaaatggtggtgcagttatccgattccttgactgacttgcttgataaattcagcaacatcagcgaaggcctttccaactacagcatcatcgacaaactggtgaatatcgttgatgacctggtggaatgcgtgaaggagaattccagcaaggacctcaaaaaaagttttaagtccccagagcccagactttttactccagaggaattctttaggatcttcaataggtcgattgatgcttttaaagacttcgtggtcgcatcagaaacaagcgactgtgttgtatcctcaaccctgtctccagaaaaggactcgcgtgtgagcgtgacaaagccatttatgctgccacccgtagccgcttcctccttacgcaatgacagcagcagctctaaccgaaaggccaaaaaccctcctggggacagttccctgcattgggccgccatggccctccccgctttatttagtcttataatcggattcgccttcggggcgctgtactggaaaaagcggcagccctccctgacaagagctgttgagaatattcagataaatgaggaggataatgagatcagcatgcttcaagagaaagaaagagagttccaagaggtttag

SEQ ID NO: 206978 - DNA, 2100 bp, synthetic construct
  misc_feature 1..2100: note = Description of Artificial Sequence: Synthetic coding sequence
  source 1..2100: mol_type = other DNA
atgcggctgcggcggctgggccagggcggccggtgctaccggggcctgtggccgctcagacacactagaccctggtctagtcccggagaatacgaatgggagtacgacgaggaagaggaaaaaaatcagcttgaaattgagcggctggaggagcagctgagcattaacgtttacgattacaactgtcatgtggatctgattaggctcctccgccttgagggagagctgaccaaagttcggatggcgcggcaaaaaatgagcgagattttccccctgactgaggagctctggctcgaatggttacatgacgagatctccatggctcaagacgggcttgatcgagaacatgtgtacgatctgttcgagaaagccgtaaaggactatatttgtcctaatatctggctggagtatggccagtatagcgtgggtggcatcggccaaaaaggaggactggaaaaggtccgtagtgttttcgagagagctctctcatccgttggcctgcacatgactaaaggcctcgccctttgggaagcttacagggagttcgagtctgccattgtcgaggccgcaaggctcgagaaggtgcattccttgtttcgccgacagctggcgatccctctgtacgatatggaggcgactttcgcagaatacgaggaatggtccgaggacccaatacctgagtcagtgatccagaattacaacaaggccttgcagcagctcgagaagtacaaaccctatgaggaggccctcttgcaggctgaggccccacggctggctgaatatcaggcttacattgacttcgaaatgaaaattggcgatcccgcgcggatccagctcattttcgagcgggcgctggtggagaactgcctcgtgcccgacctgtggattagatactcccagtacctggatcgccaactgaaggtgaaagacttagtgctatcggtgcataatagggctattcggaattgcccctggacagttgctctctggtcccggtacttactggcgatggagaggcatggagtggatcatcaggttatttccgttaccttcgagaaagctttgaatgccggctttatccaggctactgactacgtggagatctggcaggcctacctggactatctccggcgccgcgtggactttaagcaggacagttctaaagagcttgaagaactccgggctgcgttcacacgagccctggagtatctgaagcaagaggtggaggagcgctttaacgagagtggcgatccatcatgtgtgatcatgcaaaactgggcaagaatagaggctcgcctttgcaataacatgcagaaggctcgggagctttgggattccattatgacgaggggcaatgctaaatacgcaaatatgtggctggagtattataacctggagagagcccacggcgacacacagcattgccgtaaggctctgcaccgagctgtccagtgcacttccgactaccctgaacacgtgtgcgaggtgctgttaaccatggaacgcacagagggaagtctggaggattgggatattgcagttcaaaagacagaaacgcggctggcgagggtcaacgaacagaggatgaaagctgctgagaaggaggctgcccttgttcagcaggaggaagaaaaggctgagcagcgcaagagagcacgagccgagaagaaagcactgaagaaaaagaaaaagatccggggtccagagaaaaggggcgcggacgaagacgacgagaaggagtggggagatgatgaagaggcgtttcaaactcaaaaaggccgtgaacaacatccatgtagctggaggaacacgaagtgccggtcatccagtagggctcgctgggaaatgtgctgccggcgctgcggcgctccattcgaggcagaaggagaaggctcacttcctgaggagggtcatgcacagggagccgccagacagcaacagggacagcaccacaggttgtgtcagcaacccgcactccaacatgctggagctggccacgaggcacaggcaacattgagaggcctgtgggggggaggccccgacccaacacatttgcagcaaccctgggggtttcccagattgcttttgcgcggagtgtag

SEQ ID NO: 206979 - DNA, 2784 bp, synthetic construct
  misc_feature 1..2784: note = Description of Artificial Sequence: Synthetic coding sequence
  source 1..2784: mol_type = other DNA
atggccaccgccgccgagaccagcgccagcgagcccgaggccgagagcaaggcaggcccgaaagccgatggagaggaggacgaggtgaaggctgcccggacacgccgcaaagttctgtctcgtgccgtcgcagctgctacctacaagacaatgggccccgcttgggatcagcaggaggagggggtctctgagtcggacggcgatgaatacgccatggcttcttcagctgaaagctcccctggggagtacgaatgggaatacgatgaggaagaggagaaaaatcagctcgaaatcgagcgcttggaagaacaattgtcgatcaacgtatacgattacaactgccatgtggacctcatccgcttactgagacttgagggggaattgacgaaagttagaatggcccgacagaagatgagcgaaatcttccctctgactgaggagctgtggctggagtggctgcacgacgagatcagtatggcgcaggacgggttagaccgggagcatgtatatgaccttttcgagaaagccgtgaaggattacatctgtcctaatatatggctggagtacggtcagtacagcgttgggggcatcgggcagaaaggagggctcgagaaggtcaggtcggtcttcgagcgcgctcttagctctgtaggcctccatatgacaaagggcctcgccctttgggaagcatacagagagttcgagagcgcaatcgtggaggctgccaggctcgagaaggtgcacagcctgttcagacggcaactcgctatacctctctacgacatggaggccacttttgctgaatatgaggagtggagtgaggatcctatccctgagtccgtgattcagaattataacaaagccctgcaacagttggaaaaatacaaaccatacgaagaggcgttgttgcaggctgaagcacctcggttggccgaataccaggcctacatcgatttcgaaatgaagataggcgatccagcgcggatccagcttatcttcgagcgcgctctcgtcgaaaattgtcttgtgcctgacttatggatccgctatagtcagtatttggaccgccagttaaaagtgaaagatctagtgctttctgtgcataatagagcgattcgaaattgcccatggacggtggccctgtggtctcggtacctgctggcgatggaaagacacggagtggaccaccaggtcatctcagacagctccaaggagctggaggagttgagggcagcctttacgcgcgctttggaatatctgaaacaagaggttgaggagaggttcaatgagagtggagatccctcatgtgtgatcatgcagaactgggccaggattgaggcacggttgtgcaataacatgcagaaggccagggagttgtgggattcgatcatgacccgtggtaacgctaagtacgcaaatatgtggttagaatattacaacttggaaagagcccatggtgatactcagcactgtagaaaggccctccatcgagcagtgcagtgtacctcagactatcccgaacacgtttgcgaggtgctgctgaccatggagcgaactgagggtagcctggaggattgggacattgccgtccaaaaaacagagacccggctggccagggtgaacgagcagcggatgaaggccgctgagaaagaggccgcgctcgttcaacaggaggaagagaaagcagagcaaaggaaaagggcgcgcgccgagaaaaaagctctgaaaaagaaaaagaaaatccgagggcccgagaagcggggcgcagacgaggacgatgagaaagagtggggcgatgatgaagaggagcagccgagtaagcggaggagggtagagaacagcattccagccgccggtgaaacacagaacgtggaggtggccgccgggccagctggaaagtgtgctgccgtggacgtggaaccaccatccaaacagaaagagaaagcagccagtctcaaaagggatatgccaaaggtgctccatgattcaagcaaagactcaattactgtttttgtttcaaatttaccatactccatgcaggagcctgatactaagctgcggccactgtttgaggcttgtggggaggtggtgcagataaggccaatcttttcgaaccgcggcgacttccgaggatattgctacgtcgagtttaaggaagagaaaagcgccctgcaggctctcgaaatggaccgtaaaagcgtggaagggcggcccatgttcgtgagcccttgcgtggataagtctaagaaccccgatttcaaggtatttcggtactctacttctttagagaaacataaactctttatttctggactgccattttcttgcacaaaggaggagttagaagaaatatgcaaagctcatggaacagtgaaggacttgcggctggtcactaatcgggctggaaagccaaaaggactcgcatatgtagagtatgaaaacgaatcgcaggcttctcaagccgttatgaaaatggacggcatgacaatcaaggagaatattattaaagtcgcaatatctaatcccccccaacgcaaggtgcccgagaaaccagagactcgaaaagcccccggcggcccaatgttgcttccccagacatatggtgctagaggtaaaggacggacccagttaagcctcttgccacgtgccctgcagcgtcccagtgccgctgcccctcaggctgaaaatggtcctgcagctgctcctgcagtggccgcgcctgcagcaactgaggcccctaaaatgagcaacgccgactttgccaaactctttctcaggaagtag

SEQ ID NO: 206980 - DNA, 1587 bp, synthetic construct
  misc_feature 1..1587: note = Description of Artificial Sequence: Synthetic coding sequence
  source 1..1587: mol_type = other DNA
atggagcggcacggcgtggaccaccaggtgatcagcgacagcagcaaagagcttgaagagttgcgggcagcctttacccgcgctctggagtacctaaagcaagaagtagaagaaaggttcaacgagagcggggacccaagctgcgtgattatgcagaactgggcccggatcgaggccaggctgtgcaacaacatgcaaaaggctagagagttgtgggattctattatgacccgtggcaacgccaaatacgccaatatgtggctggagtactacaatctggagcgggctcacggggatacacaacattgccgaaaagcactgcatcgtgccgtccagtgtacaagcgattatcccgagcacgtctgtgaggtcctgctcaccatggaacgcacagagggaagcttggaggactgggacatcgccgtgcagaaaacggaaacccgactggcgcgggtaaatgaacagcggatgaaagcggcagaaaaggaggccgccttagtccaacaggaggaagaaaaagctgaacagcggaaaagagctagggcagagaagaaggccctgaagaaaaagaagaaaatccgggggcccgagaagaggggcgcggatgaagacgatgagaaggaatggggggacgatgaagaagaacaaccctccaagcgtagacgcgttgaaaactccatccctgccgccggcgagacgcagaacgtcgaggttgcggcgggcccagctggcaaatgcgcggcagttgacgtggagcctccctcaaagcaaaaggagaaggccgcttctctaaagagagatatgccaaaagttctgcacgacagttctaaagactccatgcaagagccagacacaaagttgcgccccctgtttgaggcttgcggggaagtggtgcagatccgccccattttttctaataggggagactttaggggctactgctatgtggaattcaaggaagaaaagtctgctctccaggcactggagatggatcgaaagtctgtcgagggccggcccatgttcgtgtcaccgtgtgtcgataagagcaagaatcctgattttaaggtgttccggtactctacaagcctggaaaaacataagctgttcattagcgggcttccatttagttgtactaaggaagaactcgaggaaatctgtaaagcccatggcaccgtgaaggatctgcgactggttaccaatcgagcaggcaagcccaaaggactagcgtatgtagaatacgagaacgaatcccaggcaagccaggcggtgatgaaaatggatggcatgactattaaggagaacattatcaaagtcgccatctctaatccaccgcagaggaaggtaccggaaaagcctgaaactcggaaggccccaggcggccccatgctgctcccacagacgtacggggctcgtggcaagggacgcactcagctgtcgttgttaccacgcgcattgcagcggccctctgcggccgctccacaggccgaaaacggccccgccgccgccccagcggtggccgctcccgcagcaacagaagcccctaagatgtccaacgcagatttcgcaaagctattcttgagaaagtag

SEQ ID NO: 206981 - DNA, 390 bp, synthetic construct
  misc_feature 1..390: note = Description of Artificial Sequence: Synthetic coding sequence
  source 1..390: mol_type = other DNA
atggccaccgccgccgagaccagcgccagcgagcccgaggccgagtctaaggctggtccaaaagccgatggtgaggaggacgaagtgaaggccgccaggaccagaagaaaggtccttagccgggcggtcgccgccgcaacttacaagacaatggggcctgcgtgggaccagcaagaggaaggagtgtcagaaagcgacggcgatgagtatgcgatggcgtcaagtgccgaatctagccctggcgagtatgagtgggaatacgacgaagaagaggagaagaatcagctggaaattgaacggcttgaagagcaggtcggaccaggagtggggtcgggccatctgcccgtattccaggtgctgggatcgccatgcccaggtccaccgccctag

SEQ ID NO: 206982 - DNA, 330 bp, synthetic construct
  misc_feature 1..330: note = Description of Artificial Sequence: Synthetic coding sequence
  source 1..330: mol_type = other DNA
atggccgccagcgccgcccggggcgccgccgccctgcggcggagcataaaccaacccgtggcattcgtgcgccggatcccgtggaccgcagcatcttcacagctgaaggagcacttcgcccagtttggtcatgtgagacgttgtatccttcctttcgataaagagacagggttccataggggcctcggttgggttcagttttcgtctgaggagggcctgcggaacgcccttcagcaggaaaaccatatcattgatggtgtcaaggtgcaagtccatacaagaagacctaaactcccacaaacttctgacgatgagaagaaagacttctag

SEQ ID NO: 206983 - DNA, 894 bp, synthetic construct
  misc_feature 1..894: note = Description of Artificial Sequence: Synthetic coding sequence
  source 1..894: mol_type = other DNA
atggccaagtggctgaacaagtacttcagcctgggcaacagcaagacaaagtcccctccacagcctcctcggcccgactacagagaacagcgcagaaggggtgaaagaccctctcagccaccccaggctgtgccacaagcctcatcagcagccagcgcctcctgcggaccagccaccgcttcttgcttttcagcttcatctgggtcactaccagacgacagtggttctactagcgatcttattcgagcatatagggctcagaaggaacgcgattttgaagatccctataacggtccaggttctagcttgcgcaagcttcgggcaatgtgtaggctggattattgcggaggatccggcgagcctggtggcgttcagcgagcctttagtgctagctctgctagcggcgcagccggttgctgttgcgcgagttctggggccggggccgccgcatcaagctccagctccagtgggtcaccgcacctataccggtcgagcagtgaacgaagacctgccacgccggcggaagttcgctacatctcacctaaacaccgtctcatcaaggtggaaagcgctgctgggggcggtgccggtgatcccctcggcggggcctgtgcgggagggcggacatggtctcctaccgcttgcggcggcaagaagctcctgaacaagtgtgctgcgtccgctgcagaagagtcaggggccggaaaaaaggataaagtcacgatagcggatgattatagtgacccattcgatgctaaaaacgatctgaaatcgaaagccggcaagggggagtccgccggctatatggagccttatgaggcccagaggatcatgaccgggctgcaggaagcctggaggcattcccccagtggatgctttccggtgggcccctag

SEQ ID NO: 206984 - DNA, 1530 bp, synthetic construct
  misc_feature 1..1530: note = Description of Artificial Sequence: Synthetic coding sequence
  source 1..1530: mol_type = other DNA
atggccaagtggctgaacaagtacttcagcctgggcaacagcaagactaaatcacctcctcagccccctcggcccgattatcgtgagcaacgcaggcgcggtgaacgcccaagccaacctccccaggcagtcccccaggccagtagtgctgcctctgcaagttgcgggcctgctacagccagttgcttctcagcttccagcggatcactgccggacgattctggctcaacttccgacctcattagggcttacagagctcagaaagagagagactttgaggacccctacaatggccctggtagctcactccgaaagttgcgggccatgtgccgtctggactattgtggcggcagcggagaacccggaggcgttcagagggctttcagcgctagttccgcatccggggctgccgggtgctgctgcgcgtcttcaggggccggcgctgccgcttcctcgtcctcttctagcggcagtcctcatctgtatagatccagttctgagcgacgacctgcaactccagctgaagtgaggtatatctccccgaaacatcgcctgattaaagtggagtccgccgcaggggggggtgccggcgaccccttgggaggggcatgtgcaggtgggagaacctggagccctaccgcgtgcgggggaaagaagctcctcaataagtgcgccgctagtgccgcagaagaaagtggcgctggaaagaaagacaaagttactattgctgacgattactccgatccgttcgacgctaagaacgatctgaagtcaaaggccggaaaaggcgaaagcgccggctacatggagccctatgaggcccagaggatcatgaccgagttccagcgccaggaatccgtcagatcccagcacaaaggcatacagctctacgataccccatacgagccggaaggccagtccgtcgacagcgatagtgaatccacagtgagtccccggctccgagagagtaaactgccccaggacgacgaccggcccgctgatgagtacgaccagccatgggaatggaacagagtgacaattccagcacttgccgcacaatttaatggaaatgaaaaacgacagtcatcacccagcccctcccgggacaggcggcggcagctgagagcccctggaggaggattcaagcctataaagcacgggtcaccagagttttgtggtatccttggcgagcgggtcgaccccgctgtccccctggagaaacaaatctggtaccatggcgcaatatccagaggtgatgccgaaaaccttctacgtctctgcaaggaatgttcctatctggtgaggaactcccagacaagcaagcacgattatagcttgtccctgaggagcaatcagggttttatgcatatgaaattagccaaaacgaaggagaagtatgtgctcggacagaacagcccacccttcgactctgtgccggaggtgatacattattacaccacccggaaactgcctatcaagggcgccgaacacctcagcttgctttaccctgtggctgtgaggactctgtag

SEQ ID NO: 206985 - DNA, 1080 bp, synthetic construct
  misc_feature 1..1080: note = Description of Artificial Sequence: Synthetic coding sequence
  source 1..1080: mol_type = other DNA
atgcaggccgccgccctgcccgaggagatccggtggctgctggaggacgcagaggagtttctggcagaaggactgaggaatgagaatctgagcgccgttgcccgggatcaccgggaccacattctaagaggttttcagcagattaaagcaagatactattgggattttcagccacaagggggtgacattggtcaggatagctcagacgacaatcattctgggaccctcggactgagccttacgtcggatgccccatttcttagtgattaccaggatgaaggaatggaggacattgtcaagggagctcaagagctggacaacgtcatcaagcaaggctacctcgaaaaaaaaagcaaggaccactcctttttcggatctgagtggcaaaagcgatggtgtgtggtgtcacgggggcttttttactactatgccaacgaaaagtccaaacagccaaaaggtaccttcttgatcaaaggttacggggtgcgaatggctccccatctgcgccgtgacagtaaaaaagagagctgttttgaactgacatctcaggacaggcgatcctacgaatttactgccacttccccagccgaggcacgcgactgggtggatcagatttcattcttgctgaaggatctgtcctcgcttactattccctatgaggaagacgaggaagaagaagaaaaggaggaaacctacgacgacatagacggctttgactctccttcctgtggcagccagtgtaggccaactattctgcccggcagtgtgggcattaaagagcctacggaagagaaagaagaagaggatatctacgaggtcttacccgacgaggaacacgacttggaagaggacgagtcagggacgcgcaggaagggtgtcgactatgctagctattatcaaggattatgggactgccacggggaccagccagatgaactctcattccagcgcggcgacctcatcaggattctgtccaaggagtacaacatgtatggttggtgggtgggtgagctcaatagtttggtgggcattgttcctaaggagtatctgaccaccgcctttgaggtcgaggagagatag

SEQ ID NO: 206986 - DNA, 831 bp, synthetic construct
  misc_feature 1..831: note = Description of Artificial Sequence: Synthetic coding sequence
  source 1..831: mol_type = other DNA
atgggcaacagcatgaagagcacccccgcccccgccgagcggcccttacctaaccctgaaggcctggactcagactttctggccgtcctttctgactatccaagtcccgatatctctccccccatattcaggcggggtgagaagttgagagtgatttccgacgaaggtggctggtggaaagcaatatccctaagcacgggaagggagagctacattccaggcatatgcgtcgccagagtgtaccatggatggctatttgaggggctaggccgcgataaagctgaagaattactccagttgcctgacactaaggtgggaagcttcatgattcgggaatctgagaccaagaagggattctacagtctgtctgtcaggcacaggcaggtgaagcactaccgcatttttcgcctgccgaataactggtactacattagtccacgactgacttttcaatgccttgaggatctcgttaatcactactccgaggtcgctgacggtctgtgttgtgtgctcactaccccatgtctgacccagagtacggccgctcccgcagttcgcgcatcctcatcaccggtaaccctgaggcagaaaacagtggactggcggcgagtgtctcgccttcaggaggacccagagggaactgaaaatcctctgggagttgacgaatccctgttctcgtatggacttcgcgagtccattgccagctacctgagccttacatctgaggataataccagttttgaccgcaagaagaaatctatttctctgatgtacggcggctctaagaggaaatctagtttttttagttcccccccttattttgaggactag

SEQ ID NO: 206987 - DNA, 882 bp, synthetic construct
  misc_feature 1..882: note = Description of Artificial Sequence: Synthetic coding sequence
  source 1..882: mol_type = other DNA
atgctgcaccggctgtgggccagccccgccgcccccggcaagaagaaagaaatgggcaacagcatgaagtccacccccgcacccgctgagcgcccgttgccaaaccctgaggggctggactccgattttctggctgtactcagcgactatcccagtcctgatatttctccacctatctttcgccgtggcgagaagctgcgggtaatcagcgatgagggcggctggtggaaggcgatctcactgtcaacaggccgggagtcatacatccctgggatttgcgtggcccgggtgtatcacggatggttgtttgaggggctcggacgagataaggccgaagagttgctgcagctgccagacaccaaggttggcagtttcatgatacgcgagagcgagacaaagaaagggttttactcactgagcgtgcgacaccgccaggttaagcattaccgcatttttagattgcctaacaactggtactatatctctccaagactgacctttcaatgtctcgaggacctcgtgaatcactatagcgaagtcgcagatggcttgtgctgcgtactgaccaccccatgtctaacccaaagtactgcggctcccgctgtgagagcctccagtagtcccgtgaccttgagacagaagactgtcgattggcgtagggtctctcgcctgcaggaggaccccgaaggaaccgagaacccactcggtgttgatgagagcctttttagctacggattgcgggaatccatcgctagctacctatccctaaccagtgaggataatacatcctttgaccgaaagaaaaagagcatctcattaatgtacggcggaagcaaacgcaaatcatcttttttttcttctccaccttactttgaggactag

SEQ ID NO: 206988 - DNA, 951 bp, synthetic construct
  misc_feature 1..951: note = Description of Artificial Sequence: Synthetic coding sequence
  source 1..951: mol_type = other DNA
atgctgagcaagctgggccacagccccctgggcggcctgcgggccaggctgacatttccagtatgccttctttaccacaggctgtgggcctcccctgcagcacccggcaagaagaaagagatgggcaattcaatgaaaagcactcctgccccagctgaaaggccactccctaacccggaaggtctggattcggattttctggcagtgctgtctgactacccctcacctgatatttctccgccaattttcaggaggggagagaaactgcgggtgatcagtgacgaaggcggctggtggaaggctatcagcctttcaacaggtagggagtcttatatacctggcatttgtgtggcccgggtttaccatgggtggctgttcgagggccttgggcgggacaaagcggaggaactgctgcagcttccggacacaaaggtggggtcattcatgattcgggagtctgaaacaaagaaggggttctatagcctttccgtgagacatagacaggttaaacactaccgcatattcagactgcctaacaattggtactacattagcccaagactcacattccaatgtctggaagatctcgtcaatcattatagcgaggtagcagacggactgtgctgcgtgcttactacaccatgcctaacgcaaagcaccgcggcccccgctgtgagagcatcatcgtcacctgtaacactgcgacaaaaaaccgtggattggaggcgggtgagtcggctgcaggaggatcccgaagggaccgagaatcctctgggagtggacgagtccctcttctcctatgggttgcgggaatctattgcttcctatctgtcacttaccagtgaggacaatacatccttcgaccgcaaaaagaagagcatttccttaatgtatgggggaagcaagagaaaatcaagttttttctctagccccccgtactttgaggactag

SEQ ID NO: 206989 - DNA, 276 bp, synthetic construct
  misc_feature 1..276: note = Description of Artificial Sequence: Synthetic coding sequence
  source 1..276: mol_type = other DNA
atgggcaacagcatgaagagcacccccgcccccgccgagcggcccctgcccaatcctgaggggttggactccgacttccttgcagttctttctgattatccctcacctgacatatcccctcccatttttcgacgtggggagaaactgcgtgtgatcagcgacgagggagggtggtggaaggctatctctttgtccaccggtagggaatcttacatcccaggtatttgtgtcgctagggtgtaccacgggtggttattcgaagggctgggcaggtag

SEQ ID NO: 206990 - DNA, 45 bp, synthetic construct
  misc_feature 1..45: note = Description of Artificial Sequence: Synthetic coding sequence
  source 1..45: mol_type = other DNA
atgggcaacagcatgaagagcacccccgcccccgccgagcggtag

SEQ ID NO: 206991 - DNA, 150 bp, synthetic construct
  misc_feature 1..150: note = Description of Artificial Sequence: Synthetic coding sequence
  source 1..150: mol_type = other DNA
atgggcaacagcatgaagagcacccccgcccccgccgagcggcccttgcccaaccccgaggggctggactcagattttctagccgtgctaagtgattatcccagtcccgatatcagtcctccaatcttcaggaggggagagaagctctag

SEQ ID NO: 206992 - DNA, 477 bp, synthetic construct
  misc_feature 1..477: note = Description of Artificial Sequence: Synthetic coding sequence
  source 1..477: mol_type = other DNA
atgggcaacagcatgaagagcacccccgcccccgccgagcggcccctgccaaaccctgaaggacttgatagcgactttcttgcggtgctgagcgattacccgagcccagacatttctcccccaatcttccgccggggggaaaagctccgtgtcatttcagatgaaggtgggtggtggaaggccatcagtctgagcacaggccgggaatcttatataccaggtatctgcgttgcgcgcgtgtatcatggctggctatttgagggactaggccgggataaggcagaggagttactgcaacttcccgatactaaggtgggatcatttatgatccgagagtcggagacaaagaaaggcttttactctctaagtgtcaggcataggcaggtaaagcattaccgcatatttagactacctaacaactggtattacatctctccgagattaacatttcagtgcctcgaggacctggttaattag

SEQ ID NO: 206993 - DNA, 123 bp, synthetic construct
  misc_feature 1..123: note = Description of Artificial Sequence: Synthetic coding sequence
  source 1..123: mol_type = other DNA
atgggcaacagcatgaagagcacccccgcccccgccgagcggcccctccccaatcccgagggcttggactctgactttttggcagttctgtctgattacccttctcccgacatctcaccttag

SEQ ID NO: 206994 - DNA, 786 bp, synthetic construct
  misc_feature 1..786: note = Description of Artificial Sequence: Synthetic coding sequence
  source 1..786: mol_type = other DNA
atgggcagcctgcccagccggcggaagagcctgcccagccccagcttgtctagcagcgtgcaagggcagggacctgtaaccatggaagccgagcggtccaaagcaacggctgtcgccctgggctcctttcccgccggcggaccggctgagctctccttacgtctgggagagcctctgacgattgtgtcggaggacggcgattggtggactgtcctgagtgaggtctctggacgggaatacaacatcccctccgtccatgtagctaaggtgtctcacgggtggctctacgaaggtctgtccagggaaaaggccgaggaactcctcctgctgcccggcaaccccggtggagcctttctgatccgcgagtctcagacccgtcgaggctcctactcattgagcgtcagactgagccggcccgcttcatgggaccgcatccgccactatcggatccactgtcttgataatggttggctgtacatctccccgagattgacattcccatcactccaggctctggtggaccactacagtgagctggctgatgatatctgttgcctcctcaaggagccgtgtgttctgcagagggccgggcccctcccgggcaaggacatcccactcccggtcactgtgcaacggacaccattaaactggaaggaattagattcctctcttctgttttccgaggccgcgacgggtgaggagtccctgctgagcgaaggactgcgagagtccctcagtttctacatttcattgaacgacgaggcagtgagcctagatgatgcctag

SEQ ID NO: 206995 - DNA, 633 bp, synthetic construct
  misc_feature 1..633: note = Description of Artificial Sequence: Synthetic coding sequence
  source 1..633: mol_type = other DNA
atgggcagcctgcccagccggcggaagagcctgcccagccccagcctgagcagctctgtgcagggtcaggggccggtgacgatggaggctgagaggtccaaagccacagccgtcgccctgggaagctttccagccggggggccagcggagttgagtctgaggctgggagaaccccttacaattgtgtccgaagacggcgactggtggactgtgttgtcagaggtctctgggcgtgagtataatattccaagtgtgcacgtcgccaaggtgagtcacggctggctgtatgaagggctgagcagggagaaggcagaggaactcctgttactcccgggaaaccccgggggcgctttcctaatccgggagagccagactcggcgcggatcatactcactgagcgtgcgcctttcccgaccagcctcatgggatagaattagacactaccggattcactgtctggacaatgggtggctgtacatatcgcctcgtttgactttcccttctttacaggctctggtggaccattattctgaaggttggcctgctccctggcaggggtacacacctacctgcgattgtgccgaggacacaactcaactcgagcgcgctggtcagctgccaccagtattttag

SEQ ID NO: 206996 - DNA, 3840 bp, synthetic construct
  misc_feature 1..3840: note = Description of Artificial Sequence: Synthetic coding sequence
  source 1..3840: mol_type = other DNA
atgaccctgaccgagcggctgcgggagaagatcagccgggccttctacaaccacgggctgctatgcgcatcttacccaattcccatcattctgttcacagggttttgcatcctagcatgctgctatcccctcttaaaactccccctgcccggtactggacccgttgagtttacaacacccgttaaagactacagtccacctccagtggattctgatagaaagcagggggagcctacagaacagccagagtggtatgtcggggcgccggtggcatatgtgcagcagatttttgtcaagtccagtgtgtttccctggcataaaaatctgttagccgttgacgtcttcaggagccctttgtcgcgagccttccagctggtcgaggagatcagaaaccacgtgctgagggacagtagcgggattagatccctggaagagttgtgtctgcaggtgaccgacctcctgccagggttacgaaaactgcgaaatcttctcccagagcatggctgcctcttacttagtcccggtaatttctggcaaaatgattgggagagattccacgccgacccagacattatcggcacaattcaccagcatgaacctaaaacattgcagaccagcgcaaccctcaaggatttgttgttcggggtcccaggaaaatactctggagtatctctctatactagaaagagaatggtcagctatacgatcaccctcgtgtttcaacattatcatgcaaagttcctagggagcttgcgcgcccgccttatgctgttgcacccttcacctaattgttcattaagggccgagtccctcgtgcatgtacatttcaaggaggaaataggcgtcgctgaactaattcccctcgtgactacctatatcattctgtttgcatacatctactttagtacacgcaagatcgatatggtcaaatctaaatggggcctcgcgctggcggctgtcgttacagtcctgtcatccctcctgatgagcgtcggcttgtgtacactttttgggctgaccccaaccttgaatggcggagagatcttcccgtatctggtggtggtgattggcttggagaatgtgctggtcctgactaaatcagttgtgtcgacccccgtggatttggaagtgaaattacggatcgcgcaaggcctgtcttcggaaagctggtctatcatgaaaaatatggctactgagctgggtatcattctcatcgggtatttcactttagtcccggcaattcaggaattctgcctgtttgctgtggtaggattggtgtctgacttctttctgcagatgctcttcttcaccaccgttctttccatagacatccgccgcatggagctagccgacctgaataaacggctgcccccagaggcgtgtctgcctagcgcgaaaccagttggtcagcccacaaggtatgagagacagctagccgtaaggccgagcacccctcatacaataactttacagcctagctcctttcggaacttacgactaccaaaacgcctaagagtcgtgtatttcctggctcggactcgcctggctcaaaggctcatcatggcggggacagtggtgtggatcggcatcctggtctataccgacccggcgggactgagaaattatttagccgcccaagtcacagagcaatcaccgctgggggaaggcgcgctcgcaccaatgccggtcccctcaggcatgctcccccctagccaccccgaccctgcctttagtatttttcccccagacgcgcctaaattgcccgaaaaccagacgtcaccaggtgaaagccccgagcgaggcggcccggcggaggtggtacatgattcgcccgtcccagaggtgacttggggaccggaagatgaggagctttggaggaagttgtcgtttagacactggccaacgctgttctcttactataatatcaccctggctaagagatacatttctttactcccagtgattccggtgactctgcggttgaatccaagggaggcattagagggtagacatccgcaggatggccgcagtgcttggccgcctccaggcccgataccagctggtcactgggaagcaggcccaaaaggaccaggtggagtgcaggcccacggcgatgtaaccttatacaaagttgcagctctggggctcgcaacgggcattgtcctcgtgctgctcctgctgtgcctttatcgcgtgctatgcccccggaactatggccaactcgggggcggccctgggaggcggaggagaggcgaactgccatgcgatgactacgggtacgctcctcctgagactgagatagttcctttggtgctgaggggacacctgatggatatcgaatgcctagcgtcagacggcatgttattagtcagttgttgccttgcaggacacgtgtgtgtctgggacgcacagacgggggattgtctcactaggataccacgcccaggacggcaacgtagggattcaggcgtgggcagcggactcgaggcccaggaaagctgggagaggctgagcgacggtggcaaagccggacccgaggaaccaggggactcccccccacttcgtcaccgcccccgaggccctcccccaccctcccttttcggcgaccaacccgatctgacctgtctcatagacacgaatttttctgcccagccccgtagctcacagcctactcagcccgaaccccgacaccgagcagtgtgtgggcgctctcgagacagtcccggctacgatttttcatgtctcgtgcagcgcgtgtaccaggaggaaggccttgccgctgtctgtacgcctgccttgcgaccaccttcaccaggtccagtattgtcacaagctcccgaagatgaggggggtagcccagagaaaggctccccttccttagcctgggcaccgtctgccgaaggtagcatttggtcccttgagctccagggaaatttaatcgttgtgggccgaagtagcggaagacttgaggtgtgggacgccatagagggcgtactgtgttgctcaagcgaggaagtctcctctggaattaccgccctggtgtttcttgataaaaggattgttgcggcccgtctgaatggatcactcgattttttttccctggagacccacacggccctgagccccctgcagttcagaggaacacctggcaggggtagttccccggcgagcccggtgtacagttctagtgacacagtggcttgccatctcacccatactgtaccctgtgcacaccagaaaccgattactgctttaaaagcagcagctggcaggctagtaaccggctcacaggaccataccctgcgcgtattcagactggaagacagctgctgcctgtttacattacagggtcacagtggggccatcaccactgtatacatcgaccaaacaatggtcctggctagcggaggccaggacggcgcaatctgcttgtgggatgtgttgacggggtctcgcgtcagtcatgtctttgctcacaggggcgacgtgacaagcttaacctgtactacctcctgtgtgatttcttcaggcctagacgacctgatcagtatttgggatcggtctaccggcattaagttttactccattcagcaggatctgggatgtggcgcctctttgggagtcattagcgataatttactcgtgacgggcggacagggctgcgtgagcttctgggatcttaactatggtgatctgctgcagaccgtgtatttggggaaaaattccgaggcccagcctgcgagacagatcctggtcctggataatgctgctatcgtttgcaatttcggcagtgaactgagcctggtttacgttccgtccgtgttggagaaattagattag

SEQ ID NO: 206997 - DNA, 2316 bp, synthetic construct
  misc_feature 1..2316: note = Description of Artificial Sequence: Synthetic coding sequence
  source 1..2316: mol_type = other DNA
atgaccctgaccgagcggctgcgggagaagatcagccgggccttctacaatcacggcctgctgtgcgcctcataccctatccccatcatactttttaccgggttttgcattttggcctgctgttaccccctcctgaaactgccactccccggcacaggccctgtcgaatttacgacccctgtcaaagattactctcccccccccgtggactctgaccgcaaacagggtgaacccactgagcaacctgagtggtacgtcggagcaccagtagcctacgtccaacaaattttcgtcaagtcctccgtgtttccctggcataagaacctgctggccgtagacgtgttccgctctcctctatccagggccttccaacttgttgaagagatccgaaaccacgttctgagggatagtagcggcatccgaagccttgaggagctttgtttgcaagtgactgaccttctacctggcttaaggaagcttaggaatctgctacctgagcacgggtgtctactgctatctcctggcaatttctggcagaatgactgggaaaggttccatgccgaccccgatataatcggtaccatccatcagcacgagcccaagacattacagacctcagccacactgaaagacctgctgtttggagttcccggcaagtactcaggggtctctctgtatactcgcaaaagaatggtgagttacaccatcaccctggtctttcagcactatcatgccaagtttctagggagcctgcgcgcaagactcatgctgcttcatccttcccctaattgctcccttcgcgccgagagcttggtgcatgtgcacttcaaagaagagataggcgttgccgagctgatcccactggtgacaacttacatcattctttttgcatacatctatttttctacacgcaagatcgatatggtgaagtcaaaatggggtcttgctctcgctgctgtggtgacggtgttgagtagtttgctgatgtcagtcgggctctgtaccctgtttggcctgactccaacactgaatgggggggagatctttccatatcttgtggtggtcatcggactcgaaaacgtgctggtactaacaaaatcagtcgtgtccactcctgtcgacctggaggtgaaattgagaattgctcaggggctgtcaagcgaatcatggtcaatcatgaagaacatggcaacagagctcgggatcattctgattgggtattttactctggtcccagctatacaggagttttgtctgttcgcagtggtaggcctggtatcagatttttttctgcaaatgctgtttttcacaacagtgctcagcatcgatatcaggcgaatggagctcgctgacctgaacaaacgactacctccagaagcttgtcttccatccgctaaaccagtcggccaacctactcgttatgagcgaagctcaggccgtttggaagtgtgggatgccatcgaaggcgtgctgtgctgctcttccgaggaagtgagctcgggaattactgcactagtttttctggataaacgcatcgtggccgcgcggctgaacggatctcttgacttcttctccctggagacccataccgccttgtctcccctgcagttcagggggactcccggccgaggcagctccccagctagtccagtctattccagttctgacactgttgcttgtcacctgacacataccgttccctgtgctcaccagaagcctataaccgcgctcaaagcagcggccggacggctggtgacagggagtcaggaccacactctgcgcgtattccgactcgaggactcgtgctgtctgtttaccttgcaagggcacagcggggccatcaccaccgtttacattgatcaaaccatggtccttgccagtggcggacaagacggcgccatctgtctgtgggatgtactgactgggtcgcgggtctcccacgtgtttgcccatcgcggcgacgtcacctctctgacatgtacaacgagctgtgtcatttcctcggggctggatgatctcatttctatttgggatagatcaactggcattaagttctactctatccaacaagatttgggatgcggggcttcgctgggcgtaatctctgataaccttctggttacgggtgggcagggctgcgtgagcttctgggatctgaattatggagacctactgcagacagtttatttaggcaaaaactctgaagctcagccagctcgacagatcctcgtgttagataacgctgcgatagtgtgtaacttcggctcagagctctcactggtttacgtacctagcgtactggagaagctggactag

SEQ ID NO: 206998 - DNA, 2718 bp, synthetic construct
  misc_feature 1..2718: note = Description of Artificial Sequence: Synthetic coding sequence
  source 1..2718: mol_type = other DNA
atgaccctgaccgagcggctgcgggagaagatcagccgggccttctataaccatgggctgttatgtgcctcttacccaatcccaattattctaattggctatttcaccctggttccagctattcaggaattctgcttgttcgctgtggttgggcttgtctctgacttttttctccaaatgctgttcttcacgactgttctgtcaatcgacatcagacggatggaacttgccgacctcaacaagcggcttccaccggaggcctgtttgccttctgcaaaacctgtcgggcagcctacacgttacgagcgccagcttgctgtccgtccctcaacgcctcacacgattacactgcagccttctagttttcgcaatctccgcttacctaaacggctgcgagtcgtttattttcttgctcgcaccagactagctcaacgactgatcatggctggcactgttgtctggattggtattctggtgtacacggatcctgcaggactccgaaattacttagcagctcaggttaccgaacaatcccctttgggagagggggctctggcaccaatgcccgtgcccagcgggatgctcccaccaagtcaccctgaccccgctttcagtattttccccccagacgcccctaagctgccagaaaatcaaacaagccctggcgaaagccccgaaagaggcggccccgctgaagtagtacacgactctcccgtcccagaggtgacgtggggaccagaggacgaagagctctggagaaagctcagtttcagacactggcctaccttgttttcctattacaatatcaccttggccaaacggtacataagcttgctccctgtgattcccgtaaccctacgtttaaacccccgggaggcactggagggcaggcatccccaggatggcagaagtgcttggccacctcctggtccgatccccgctggccactgggaggccggtcctaaaggtcccggaggagtgcaggcccacggcgacgttaccctgtataaggtagcagctctcgggctggctacaggaattgtgctggtgctgttacttctgtgtttatacagagtactgtgccctcgcaactatgggcagctgggcggaggacccgggagacgcagaagaggcgaactgccgtgcgacgactatggttacgctcctccggaaaccgagattgtcccactggtgttgagaggtcatctcatggacattgaatgtctcgccagcgatggtatgctgctagtgtcttgctgcctagccggacacgtctgcgtgtgggatgcgcagactggcgactgtctgactcgcataccaaggcctgggcagaggcgggacagcggcgttggcagtggcctggaggcccaggaaagttgggaacggttgtcagacggaggcaaggcggggccagaggagccaggggacagtccacctctgcgccaccgaccacgcgggcctcctcctccatccctcttcggtgatcaaccagacctaacatgcctgattgataccaatttttccgcccagccaaggagttcacagcctacacagcccgagccacgccacagagccgtgtgcggccgctccagagattccccaggctacgacttctcttgcctggtacagcgagtgtatcaggaagaggggctggctgctgtgtgtacacccgctctccgccctcccagccctgggccagtccttagccaagcccccgaggatgaaggtggaagccccgagaaaggtagcccctccctcgcgtgggccccctctgcagagggcagcatctggtcactggagctccaaggaaacctaatagtggttggcaggagctccggtaggctcgaagtgtgggacgctattgagggagtcctatgctgttccagtgaagaggtctctagtgggattacagccttagtcttcctcgataagcggatcgtcgccgcaaggctcaacggctccttagactttttttccttggagactcatactgccctgagcccattgcagttcagagggactccaggaagaggaagcagtcccgcaagccctgtgtactccagctctgacaccgtagcgtgccatctgactcacactgttccatgcgcgcaccaaaaacccatcacagctctgaaagctgccgctggccgactggtcaccggatctcaagaccacacattacgagttttcagattggaagacagttgttgcctttttacgttacagggccactctggcgccattaccactgtctatattgatcagaccatggtgctagcctctggaggtcaggacggcgcaatttgcctgtgggatgtcctgaccggctcgcgcgtgtcacacgtgttcgcgcacagaggcgacgtaaccagtttaacatgcaccacgtcttgcgtaatctcctccggactggacgacctgatatctatctgggacaggtcgactggcatcaagttctacagcatccagcaggacctcggctgcggagctagtctgggcgtcatttctgacaacctgctggttacaggcggtcaggggtgtgtgtcattttgggatctgaactacggggatctgctgcaaactgtctatctcggaaaaaactccgaagcccagcccgcaaggcagatcctagtcttagacaacgccgcaatcgtttgtaatttcggctctgagctgagtctggtatatgtgcctagcgttctggagaagcttgattag

SEQ ID NO: 206999 - DNA, 1059 bp, synthetic construct
  misc_feature 1..1059: note = Description of Artificial Sequence: Synthetic coding sequence
  source 1..1059: mol_type = other DNA
atggtgaagagcaagtggggcctggccctggccgccgtggtgaccgttttatcttccctcttaatgtcagtgggattgtgcactctgttcggactcaccccaactctgaacggcggggagatctttccctatctagtcgtagttattggactggaaaatgtgcttgtactcacgaagtccgttgtctctacccctgtggacctagaagtcaaactgagaattgcgcagggattgtctagtgagtcctggtcaatcatgaaaaatatggccaccgaactcggcattatcctcatcggctacttcaccctggtgccggccatccaggagttttgtctctttgctgtcgtggggttggtgtccgacttctttctgcagatgctttttttcactaccgtgctgtctatagatatccgtcggatggaactcgctgacctgaacaagcgactgccccccgaggcgtgtctgccttcagcgaagccagtcggtcaaccgacacgatatgagcggcagctagcagtcaggccctctaccccccacaccatcacgctgcagccaagcagctttcggaatttgcgcctacctaagagactacgcgtcgtgtactttcttgcccctactggcgctcacacctgctgggccttagggtccaggactcagggaccgcgatggggagctggaccttggcgacgtcatgcagtacagggcggtggagcaggtcctggacaccgacatcggctgggagccgccgccgcgctccccctcccacgcgccatgcctgctcagctcagagccgcaggctggtgggctcgcgctgcagaagcgaggggcgcagcactccggaggcttagactttgtgctacacgagatggagaccgcgcggcttgtgctgcgagaccaccccacggtcaccgggttccgggccagcggcgccacgccgccggtgagctcctgccgggaaggccaagacttagggtgggtcgggccgatcgggggctgccaaacgcacattccgcaccccgacaggcagcacccggacaatggcgggggcagagagcctag

SEQ ID NO: 207000 - DNA, 411 bp, synthetic construct
  misc_feature 1..411: note = Description of Artificial Sequence: Synthetic coding sequence
  source 1..411: mol_type = other DNA
atgaccctgaccgagcggctgcgggagaagatcagccgggccttctataatcacgggcttctgtgtgccagctatcctatccctatcatcctgtttacagggttttgcattctcgcttgttgttatccactcctcaagttgcctcttccaggcacggggccggtggagttcactacgcccgtgaaagattactcaccaccaccggtagacagtgataggaaacagggggagcctacagaacaacccgaatggtacgtcggagcccccgtggcctatgtgcagcagatcttcgtcaaatcctcagtttttccttggcacaagaacctgctggcagtggatgtctttcgctctccccttagcagagcgtttcagcttgtggaagagatcaggaaccacgtccttagagattag

SEQ ID NO: 207001 - DNA, 3072 bp, synthetic construct
  misc_feature 1..3072: note = Description of Artificial Sequence: Synthetic coding sequence
  source 1..3072: mol_type = other DNA
atgctgctgcaccccagccccaactgcagcctgcgggccgagagcctagtgcatgtgcatttcaaggaggaaattggggtggccgaacttatccccctcgttactacctatattatcctgtttgcatatatatactttagcacccggaagatcgatatggtgaaaagcaagtgggggcttgctttagccgccgtggtgacagtactgagctcactactgatgtctgtggggctgtgcactttattcggactgactcctaccctgaatggaggtgagatttttccataccttgtcgtggtgatcggactggaaaacgtgctggtcctaaccaagagtgtggtctccactcccgtggacctcgaggtgaagttacgcatcgcccaggggctgagttctgaatcttggtctattatgaaaaatatggcaaccgagttgggtatcatccttattggctactttacactagtccctgcgatccaggagttctgcttatttgccgtggttggtctggtaagtgatttttttttgcagatgttgtttttcacaacggtgctctccattgatattcggcgcatggaactcgccgaccttaacaaacgcctgccacccgaagcgtgtctgcctagcgctaagcctgtagggcagcctactaggtacgagaggcaactggcggttcggcccagtactcctcataccatcaccctgcagccttcaagttttagaaatttacgcttgcccaagcgactaagagtggtgtactttttggctcgcacccgcctggcacagcgacttatcatggctggcaccgtggtctggatagggatactcgtgtatacagaccctgcaggactgcgcaactatctggcagcccaggtaacagaacagagccctctaggggagggagctttggcacccatgccagtgccaagtggaatgctacctccgagtcaccccgaccctgccttctcaatattcccccctgacgccccaaagctgcccgagaatcagacctcgccgggcgagtcccccgagcgtggcgggcccgcagaagtcgtgcatgacagccctgtgcccgaggtcacatggggccctgaggatgaggaactatggcgcaagctcagctttcggcactggcctaccctgttctcctactataatatcactctggccaaacgctatatcagcctgttgcctgtaattccagtcactctccggctcaaccccagggaggctctggaaggtcgccacccccaagacggtcgcagtgcctggcccccacccgggccaattcccgctgggcactgggaagcgggaccaaaggggccaggcggagttcaggcccacggggacgtgaccctctacaaagtggctgccttggggctcgccacaggaatcgtgcttgtgctgctcctgctgtgtctataccgagtgctgtgcccccgcaattacggtcagctcgggggcggacctggaagaagacgccggggagaactgccatgcgacgactatggatacgcccctccagaaactgagatcgtgcctctggtcctacgtgggcacttaatggatatcgaatgtctggcctccgatggaatgttgctggtcagctgttgtcttgctggtcatgtctgcgtttgggatgcccagacaggggattgcctgactcgaatcccacgtcccggacaacgtcgagattctggcgtgggctcgggcctcgaggcacaggaaagctgggagcggttgagcgatggcggtaaagccggacctgaagagcccggtgactccccccccctcaggcaccggcctaggggccccccccctcctagtctttttggggaccagcctgatctcacatgccttatcgatacgaacttctcagctcaacccagatcatcccaaccaacccagccggagccccgacatcgcgccgtatgcggacgaagccgcgattcccctggttacgacttctcatgtctcgtgcagcgagtctatcaggaagagggtctcgccgctgtgtgtacgcccgccctgaggcccccatcacctggacccgttctctcgcaagctcctgaggatgaagggggctcccccgagaaagggtctccatctctcgcatgggctccatcagccgaggggagcatctggagccttgaactgcagggtaacttgatcgttgtcggtcgttcttctggccggcttgaagtctgggacgccattgaaggagtgttatgctgttcttcagaagaagtgtctagtggaataactgccttggtcttcctggacaaacggattgtggccgcccgccttaacggatccctagacttctttagcctggaaacccataccgctctctccccgctgcaattccgggggacacccgggaggggatctagtcccgccagcccggtgtactcatccagcgatactgttgcatgccacctgacccatactgtgccatgcgcgcaccagaagcctatcactgctctcaaagcagctgctggccggctggtgaccgggtcacaggaccacaccttaagagtctttcgcctggaggactcgtgctgcctgtttactctccaggggcatagcggagctatcacgaccgtttatatcgatcaaaccatggtcctggcctctgggggtcaggatggggccatctgtctctgggatgtgctgactggctccagagtctcgcatgtgttcgcacataggggggatgtcacgtccttgacatgcacaaccagctgtgtgatcagtagcggtctggacgaccttattagcatttgggataggagtacgggcatcaaattttatagtatccagcaggatctaggttgtggcgcaagtcttggggttatttccgataatttactggtgaccgggggacagggatgtgtgtcattctgggacctgaactatggagacctgctgcagaccgtgtatctcggaaaaaattctgaagctcagcccgcaagacagatcctggtgctcgacaatgccgcaatcgtgtgcaatttcggatcggagctttctctcgtgtacgtacccagtgtgctggagaaactcgactag

SEQ ID NO: 207002 - DNA, 267 bp, synthetic construct
  misc_feature 1..267: note = Description of Artificial Sequence: Synthetic coding sequence
  source 1..267: mol_type = other DNA
atgaccctgaccgagcggctgcgggagaagatcagccgggccttctacaatcatgggctgctgtgcgcttcctaccctattccaattatcctgttcactggattctgtatactggcttgttgttatccgcttctaaagctccctttgcccggaacaggccctgtggagttcaccacccctgtcaaggattactcaccaccaccagttgactctgacaggaagcaaggtgaaccaacggaacaacccgaatgggtgggaactcgatag

SEQ ID NO: 207003 - DNA, 399 bp, synthetic construct
  misc_feature 1..399: note = Description of Artificial Sequence: Synthetic coding sequence
  source 1..399: mol_type = other DNA
atgaccctgaccgagcggctgcgggagaagatcagccgggccttctataaccacggacttttgtgcgcttcataccctattcccatcatattgtttactggcttctgtatactggcctgttgttaccccttgctgaaactcccgctgccagggactggacccgtggagttcacaacccccgtgaaggattactccccccctccagttgactcagataggaaacagggtgaacccaccgaacagcctgaatggtacgtcggggcaccagtggcctatgtgcagcaaattttcgtgaagtcaagcgtgttcccatggcacaaaaatttgctagccgtggatgttttccgctctcctctttcacgcgcatttcagctcgtcgaagagatcagaaatcactag

SEQ ID NO: 207004 - DNA, 2661 bp, synthetic construct
  misc_feature 1..2661: note = Description of Artificial Sequence: Synthetic coding sequence
  source 1..2661: mol_type = other DNA
atgaagaacatggccaccgagctgggcatcatcctgatcggctacttcacgctagtgcccgctatccaggagttctgcctgtttgctgtggttggcctggtcagcgacttttttcttcagatgctgttctttactacagtattatcgatcgacatcagacggatggaattagctgacctgaacaagcgcctgccacccgaagcctgtctaccatccgcaaaaccagttggccagcccaccaggtatgagcggcagctcgctgtgagaccgtccacaccccataccatcacactccagcctagtagcttcagaaatctgcgcctgccaaaacgactcagagttgtgtacttcctcgcccgtactagacttgctcagaggctaattatggctggcactgtggtgtggatagggatcctggtctacaccgaccctgcaggcctccgcaactacttggccgcacaagtgaccgaacaatccccacttggtgaaggggccctcgcccccatgccggtgccaagtggtatgttacccccatcccacccggacccggccttttctatttttccccccgacgcacctaagctacccgagaatcagacctcacccggcgagtccccagaaaggggaggcccggctgaagttgtgcacgattcccctgtgcctgaggtgacatgggggccagaggacgaggagctgtggaggaagctgagtttccggcattggcccaccttgttcagttactataacattacgctggctaagaggtacattagtctattgcccgtcatcccggtcacactaagactaaatcctcgtgaggccctggaaggtagacaccctcaagacggccggtccgcctggccccccccaggtccaatccccgcgggtcattgggaggcaggtccaaagggaccaggcggggtacaggctcacggggacgtcaccctctataaagtcgctgcactgggactggccacaggcatcgttctggtcctcctcctactgtgcttatatcgcgtcctgtgccctaggaattacggccagcttggtgggggccccggccggcgccgcagaggcgagttgccttgtgatgactatgggtacgcaccccctgaaacagagatcgtgcctctcgtgctgagaggtcatttgatggacatcgagtgtttagccagcgatggcatgctgctcgtgagttgttgcctggcggggcacgtgtgcgtctgggacgctcagaccggagattgcctgactaggattccccggccaggacaaaggagggatagcggcgttggcagcggactggaggcgcaggaatcttgggagaggctaagcgacggaggtaaagcaggaccggaagagccgggggacagcccgcctctgaggcacagaccaaggggacccccacctccctcgctatttggagaccaacccgacttgacctgtcttatcgacacgaatttttctgcacagccacgttcctcccagccgacacagcccgaaccccgacaccgagccgtttgtgggcgctcacgtgattccccaggttatgacttcagttgcttagtacaaagagtgtatcaggaggaggggctggcagccgtgtgcacgccagctctccgaccccccagcccagggcctgtgttatcacaggcgcccgaagacgaggggggctcgcctgagaagggcagtccgagtctcgcatgggccccctcagccgagggttccatctggtctctggagctccagggcaatctgatagtcgtgggtcgaagttctggccgcctagaggtatgggatgccatcgagggagtgctgtgttgtagcagtgaagaagtcagtagtggaatcacggccctggtgttcctggacaaaagaattgtggctgcaaggcttaatggatcattggacttcttcagtctggagactcatactgcactgagccctctccagttccgtggtacacccgggagaggtagttctcctgcttcccctgtctactcctcgtctgacactgtggcgtgccacttaacccacaccgttccctgcgcccaccagaagccgattaccgccctcaaagccgcagcaggaagactggtcacagggagccaggaccatacgctgcgcgtcttccggctggaggattcttgctgcttgttcactcttcaggggcactccggggccatcacaactgtctacatcgatcaaaccatggtacttgcgtcaggagggcaggatggagcaatttgcctgtgggatgtcctaaccggttcccgtgtgtcacacgtattcgctcaccgcggcgatgtcaccagtctgacgtgtaccaccagctgcgttattagtagtggcctcgatgacctgatttccatttgggacagatcaacaggcatcaaattttactcaatccagcaggacctaggctgcggagccagcttaggggttatctccgataaccttctagtgacaggggggcaagggtgtgtgtctttctgggatctaaactatggcgacctgttgcagaccgtttatctggggaagaatagtgaagcgcagcctgcgagacagattctggtgctcgataacgccgccatcgtgtgtaacttcggaagtgagctctccctagtgtacgtgccctccgtgctcgaaaaactggactag

SEQ ID NO: 207005 - DNA, 792 bp, synthetic construct
  misc_feature 1..792: note = Description of Artificial Sequence: Synthetic coding sequence
  source 1..792: mol_type = other DNA
atgctgctggcctgggtgcaggccttcctggtgagcaacatgctgcttgctgaagcctatgggtcaggcggatgcttttgggacaatggtcatttataccgggaggatcagacctcgcctgctccagggctgaggtgtctcaactggttagacgcccagtctggactggcgtcagcgccagttagtggagccgggaaccacagctattgccgcaacccagacgaagacccccgggggccctggtgctatgtttccggcgaggccggcgtgccggaaaagaggccctgcgaagatcttcgctgccccgaaaccaccagtcaggccctccccgccttcactaccgagatccaggaagcttcagagggccccggagcagatgaggtccaggtgttcgcccctgcaaatgccctcccggcacgtagcgaggccgctgctgtacagcctgtaattggaatctcccaacgagtgcggatgaactcaaaagagaagaaggatctcggaaccctagggtatgttcttggcatcactatgatggtcatcatcatagccatcggtgccggtattatcctgggatatagctacaaaagggggaaggacctgaaagagcagcacgaccaaaaggtttgtgagcgcgagatgcaaagaatcacactccccctgtctgcatttaccaaccctacttgtgaaatcgtcgacgaaaagactgttgtcgtgcatacatcacagacaccggtcgatccacaagaaggcacaacaccactgatgggacaggctggtacacctggtgcctag

SEQ ID NO: 207006 - DNA, 1176 bp, synthetic construct
  misc_feature 1..1176: note = Description of Artificial Sequence: Synthetic coding sequence
  source 1..1176: mol_type = other DNA
atgtacagcatgatgatggagaccgacctgcacagccccggcggcgcacaagccccaacgaatcttagcggacccgccggggcagggggagggggcggaggaggaggcggcggtggtggcgggggcggggcgaaagcaaaccaagatcgagttaagagacccatgaatgcattcatggtgtggagtcgcgggcagagaaggaaaatggcgcaggaaaaccctaaaatgcacaatagcgaaatatctaaacggcttggtgcagaatggaaagtgatgagcgaggctgagaaaagaccatttattgatgaagcaaagaggctgcgagccctgcatatgaaggagcacccagattataaatacagacccaggcgcaaaaccaaaacactgctcaaaaaggataaatattccctggcgggtggacttcttgcggcgggtgctggtggagggggcgctgccgtggctatgggggtaggggtgggcgtaggcgccgccgccgttggtcagagactcgaatccccgggtggtgctgccggagggggatacgcccatgttaatggctgggctaacggggcataccccggcagtgtggcagccgccgcagcagctgctgcgatgatgcaggaggcccaattggcatatggccagcaccctggagccggaggcgcacaccctcacgctcaccccgcccatccccatcctcaccaccctcatgcccacccacacaatcctcagccaatgcaccgctacgacatgggggccttgcaatacagcccgatttcaaactcccagggatatatgtcagcttcaccgagtggctatggaggcctgccatatggcgccgcggctgcagctgccgcggcagctggcggagctcatcagaactcagctgtggccgctgccgctgctgcagcggctgcctcctccggggccctgggcgcacttggatctttggtgaagagtgagccatccggctcacccccagccccagctcattcccgggccccgtgtcctggggaccttcgggaaatgatcagcatgtacctcccagctggcgaagggggcgatcctgccgctgcggccgccgctgccgcccagagtagattgcattctctgccccagcactaccagggggcaggggccggtgtgaacggaaccgtgccgctcactcatatatag

SEQ ID NO: 207007 - DNA, 1326 bp, synthetic construct
  misc_feature 1..1326: note = Description of Artificial Sequence: Synthetic coding sequence
  source 1..1326: mol_type = other DNA
atggtgcagcaggccgagagcctggaggccgagagcaacctgcccagagaagcattagataccgaggaaggcgagttcatggcttgtagcccagtggccctggacgagtccgatcccgactggtgtaagacagcaagcggccatatcaagcggcccatgaatgcatttatggtgtggagcaaaattgaacgaagaaagatcatggagcaaagtccagacatgcacaacgctgagatcagtaaaagactcgggaagcgctggaagatgcttaaagactccgagaagatccccttcatacgggaagccgagagactgagactgaaacacatggcggattaccccgattataagtaccgcccccgcaagaaacccaagatggatcctagtgctaagccatccgcatcccagtcccctgagaagtctgcggcaggtgggggcggcggatcggccggcggcggagccggcggggccaagacgtctaaagggtcttccaagaaatgcggcaaacttaaagcacccgcagcggctggcgcgaaggcgggagccggcaaggcagctcagagtggtgattacggcggggctggtgatgactatgtccttggctcactgcgggtcagcgggtctggcggggggggtgccggcaaaactgtcaaatgtgtgtttctggacgaggacgatgacgacgacgacgacgacgatgaactccagctgcagattaagcaggagcctgacgaggaggatgaggagcccccccaccagcagcttctccagccacccggacagcagccgtctcagctgctgaggcggtacaatgtcgctaaagtgcccgcttccccaacactgagcagctcagccgaaagccctgagggggcttctttatacgatgaggtccgagccggggcaacatccggcgctgggggtgggtcccgactttactactcttttaaaaacataactaaacagcatccaccacccctagctcagcctgccttgtcccctgcctcttccaggtccgtcagcacaagcagtagctcatccagcggcagcagctccgggtcttcgggtgaagatgctgacgatttaatgttcgacctctcgctgaacttttctcagtctgctcattctgcgagcgaacagcagctcggcggcggagccgccgctggaaacctgtccctcagtctggtcgacaaggacttggatagtttctcagaaggcagtcttggctctcattttgagttccctgactattgcacgccagaattaagcgaaatgatagcaggcgactggctcgaagcaaacttcagcgatcttgtgttcacatattag

SEQ ID NO: 207008 - DNA, 948 bp, synthetic construct
  misc_feature 1..948: note = Description of Artificial Sequence: Synthetic coding sequence
  source 1..948: mol_type = other DNA
atggtgcagcagcggggcgcccgggccaagcgggacggcggccccccaccgcccggccctggaccggccgaagaaggagcccgggagcctgggtggtgtaaaacacctagtggccatatcaaaagacctatgaatgcattcatggtgtggtcccagcacgaacgacgaaagatcatggatcaatggccagacatgcacaacgctgaaatctccaaacgcttaggaagaagatggcagctcctccaggacagcgagaagattccattcgtgcgcgaggcggagaggttgagattaaagcatatggctgactatccagattacaagtacagacccaggaagaagagcaagggcgcaccagcgaaagcacggccgagaccccctggaggcagtggcgggggatcgagactgaagccaggaccacagctgcccggacggggagggcgcagagcggccggcgggcctctcggaggcggagcagcagccccagaggacgacgatgaggatgacgacgaggagctgctagaggtgagattggtagaaacaccggggagagagctgtggcgcatggtccctgccggcagggccgcaagaggccaggccgaacgagcccagggaccgtcaggggagggggctgctgccgcagctgcagcttcacccactcctagcgaggacgaggagcctgaggaagaggaagaagaagccgccgccgccgaggaaggggaagaagagaccgtagcttcaggcgaggagtccctaggcttcctctcgaggctcccccccgggccagcaggtttggattgctctgctctggatagagacccggacctgcagcccccctccggaacatcccacttcgagttccctgactattgtacacccgaagtgacggagatgatcgcaggtgattggaggccctcttctatagccgatctggtattcacatactag

SEQ ID NO: 207009 - DNA, 948 bp, synthetic construct
  misc_feature 1..948: note = Description of Artificial Sequence: Synthetic coding sequence
  source 1..948: mol_type = other DNA
atggtgcagcagcggggcgcccgggccaagcgggacggcggccccccacctccggggcccggaccagccgaggaaggggctcgcgagccaggctggtgcaagaccccatctggccacatcaaacggcctatgaacgcttttatggtgtggtctcagcacgagagaaggaagattatggaccagtggcctgacatgcacaacgctgagatctccaagaggcttggcaggcgctggcaactgcttcaggattccgaaaagattcctttcgtcagagaagccgagcggctccgacttaagcatatggccgattatcccgactataaatacagacctcgcaagaagtctaaaggagccccagccaaagcaagaccacgcccacctggaggtagcggcggcggctcgcgactgaaacccggacctcagttgccagggagaggtggccgacgggctgccggaggtcccctgggggggggtgcagccgcccctgaggacgacgatgaggatgacgacgaggaactcctggaagtgagactggttgaaacaccaggccgtgaactgtggcgtatggtgccagctggtagagctgccagaggtcaggccgagagagcccagggaccaagcggagagggcgcagcagccgctgcagcagcatctcccactccatctgaggacgaggagcccgaagaagaggaagaggaagcagccgccgcagaagaaggcgaggaggaaaccgtcgctagtggtgaagagtcacttggcttcctaagtaggctgccaccgggcccagcaggactggattgctcagctctcgatagggatcccgacctacagccaccttccggcactagccactttgaatttcccgattattgcaccccagaggtgaccgaaatgatcgccggtgactggagaccatcctcaattgcagatctcgtgtttacatactag

SEQ ID NO: 207010 - DNA, 1869 bp, synthetic construct
  misc_feature 1..1869: note = Description of Artificial Sequence: Synthetic coding sequence
  source 1..1869: mol_type = other DNA
atgagcatgcggagccccatcagcgcccagctggccctggacggcgtcgggacgatggtgaactgcacaatcaaatccgaggagaaaaaggaaccttgccatgaggccccccagggctccgcaacggctgccgaaccccagccaggagaccctgcccgcgcctctcaagacagtgcagacccccaggcccccgcccaggggaatttcagaggcagctgggattgctcaagtccggaaggtaacgggtcacctgagcctaagcgacctggagtctccgaggcagcttccggaagccaggagaagctagatttcaatcggaatttgaaagaggtcgtgccagccatcgagaaactgctgtcgagcgactggaaagagagattcttagggagaaactccatggaagccaaagatgtcaaaggcacccaggaatctctggccgagaaggagctgcagttattggtgatgattcaccagttgtccaccttgagggaccagctgttaacggcacattctgaacagaaaaacatggctgcaatgttgttcgagaagcagcaacagcagatggagttggctcggcagcagcaagagcagatagccaagcaacagcagcagctcatccagcaacaacacaaaatcaatctcctgcaacagcagatccagcaggtgaatatgccttatgtcatgatcccagcttttccgccaagccatcagcccttgccagtaactcccgactcacagctcgctctaccaatccagccaattccttgcaaaccagtggagtaccctttgcagctattacacagtcccccagctcccgtcgtgaagcgccccggcgctatggcgacacaccaccccctccaagaaccgagccagccactcaatctgactgcgaagccaaaagcaccagagcttcccaacacgtcgtcttctcctagcctgaagatgtcaagctgtgtcccacggcctcctagccacggaggccctacgcgagatctccagtcttcccctcccagtttgcctctaggtttcctgggagaaggcgacgctgttacaaaggcaattcaggacgctaggcagctactgcatagtcatagcggtgctctggacgggtccccaaatacaccgttccggaaagacctgatctcactcgactctagccccgcgaaagagaggctagaggatggatgtgtgcaccccctagaagaagctatgttgtcttgcgacatggacgggtccaggcatttcccagagagtcgtaattcatcccatattaaaaggccgatgaacgccttcatggtatgggcaaaggacgagcggcggaaaatcctgcaggccttccccgatatgcacaatagttctatatctaagatcctcggatcaagatggaaaagtatgacaaaccaggaaaagcagccatattacgaggagcaggcgcgcctgtccagacaacacctcgaaaagtatcccgattacaagtataagccccgcccaaaaaggacttgcatcgttgagggcaagcgcctccgggtaggcgagtacaaggcgctcatgcgtacacggcgccaagatgctcgccagagctatgttattccacctcaagccggccaggtgcaaatgagctcctctgacgtcctctatccacgggctgccgggatgccactggctcagccactggtagagcactatgtgccgcggtcgctggacccaaatatgcctgtgattgtcaatacctgttccctgagggaggagggcgaggggactgatgatcggcactccgtggccgacggcgaaatgtaccgatattctgaagacgaagacagcgagggggaggaaaagagtgacggagagctagtagttcttaccgactag

SEQ ID NO: 207011 - DNA, 174 bp, synthetic construct
  misc_feature 1..174: note = Description of Artificial Sequence: Synthetic coding sequence
  source 1..174: mol_type = other DNA
atgagcatgcggagccccatcagcgcccagctggccctggacggcgtaggtacgatggtgaactgcactatcaagagcgaggagaaaaaggagccttgtcacgaagcaccacagggcagtgccactgcagccgagccccagccgggggacccagcaagagctagccaggattag

SEQ ID NO: 207012 - DNA, 543 bp, synthetic construct
  misc_feature 1..543: note = Description of Artificial Sequence: Synthetic coding sequence
  source 1..543: mol_type = other DNA
atgagcatgcggagccccatcagcgcccagctggccctggacggcgtcggaactatggttaattgcacaatcaaatccgaggagaaaaaagagccctgtcacgaagcccctcaaggatctgccaccgctgccgaacctcaaccaggcgatcccgctcgggcaagtcaggacagcgctgacccacaagctcctgcgcagggaaacttccgggggtcctgggattgttcttcccctgaaggaaatggatcccctgagcccaaacgcccgggcgtttcagaggccgcctcagggagccaagagaagctggatttcaataggaatctcaaagaagtggtccccgctattgagaaactgctgtctagcgactggaaggaaagattcctggggcggaattctatggaggccaaggatgtcaaagggactcaggagtcattggccgaaaaggaactccaactgttagtcatgatccaccaacttagtacactcagagaccagcttctgactgcccattcggagcagaagaatatggccgccatgctatag

SEQ ID NO: 207013 - DNA, 723 bp, synthetic construct
  misc_feature 1..723: note = Description of Artificial Sequence: Synthetic coding sequence
  source 1..723: mol_type = other DNA
atgagcaagcccagcgaccacatcaagcggcccatgaacgccttcatggtatggtcacgcggccagcggcgtaaaatggctcaggaaaatcctaaaatgcataactccgaaatcagtaagagattaggtgcggaatggaagctgttgtcagaggccgagaagcgtccctatattgatgaggccaaaagacttagagcccagcatatgaaagagcaccccgattacaagtacagaccccgaagaaaaccaaaaaatctgctgaagaaagatagatacgtttttccactaccttatctcggggacaccgaccctttgaaggccgccggacttcctgtcggtgcttctgacggactacttagcgcaccagagaaggcgcgcgcattcctgccgcctgcctcagcaccctactccctgcttgatcccgcacagttcagctcatccgccatacaaaagatgggagaggtaccccacacactggccaccggcgccctcccctatgcctctactttaggatatcagaacggcgcctttggtagtttgtcatgtccgtctcagcacacgcatactcatccttctccaacaaacccaggttacgtcgtcccatgtaattgtacggcgtggtccgcaagcacgttgcagcctccggtggcttatatactcttccctgggatgacaaaaacaggcattgatccctactcaagcgcccatgctacagccatgtag

SEQ ID NO: 207014 - DNA, 702 bp, synthetic construct
  misc_feature 1..702: note = Description of Artificial Sequence: Synthetic coding sequence
  source 1..702: mol_type = other DNA
atggccctgcccggcagcagccaggaccaggcctggagcctggagccccctgccgcaacagccgcagcgagtagtagctccggcccacaggaacgtgaaggcgctggtagtcccgccgcacctggtactctcccactggaaaaagtcaagagaccgatgaacgcttttatggtttggagcagtgcccagaggagacagatggcgcagcagaatccgaaaatgcacaactctgagattagcaagcgtctgggtgcgcagtggaaactgctagatgaggatgaaaagcgcccctttgtagaggaggcgaaaaggctgcgggcgaggcatctgcgtgactatccggactacaaataccgccctcgacgcaaagccaaatcctccggggcagggccgtccaggtgcggccagggtcggggtaacctggcctccggagggccactctgggggccaggatacgccactactcagccctcacgaggcttcggttaccgccctccatcatattctactgcgtacttgcccggaagctatggcagtagccactgtaagctcgaagctccatccccttgtagcctgccccaaagcgatcctcgcttacagggggagctactcccgacttatacgcactacctgcctcctggtagtcccaccccttacaatccccctctcgcaggcgcccctatgcccctcacacacctctag

SEQ ID NO: 207015 - DNA, 702 bp, synthetic construct
  misc_feature 1..702: note = Description of Artificial Sequence: Synthetic coding sequence
  source 1..702: mol_type = other DNA
atggccctgcccggcagcagccaggaccaggcctggagcctggagcctccagccgccacagctgccgcttcctcttcttcagggccccaagaaagggagggggccggctcacctgctgccccaggcacactaccccttgaaaaagtcaaaagacctatgaatgctttcatggtttggtcctcagcccagcggaggcagatggcacaacagaatcccaagatgcataattcggaaattagcaaaaggctgggagcacaatggaagttgctggacgaggacgagaagaggccgtttgtagaggaggctaagcggctcagagccagacaccttagagactaccccgactacaagtatagaccacgccgcaaagccaaatcttcaggggccggtccctcccgttgcggccagggcaggggcaacctagcatcagggggcccattgtggggcccaggatacgcaaccacacagccatctaggggatttggatataggccacccagctactccacagcctacctcccaggctcctatggctcgtcccactgcaaattggaagcacctagtccatgtagtcttccgcaatctgaccctcggctccaaggtgagctgctgcccacatatactcactatctgccccccgggagtcccaccccttacaatcctccccttgctggagcaccaatgcctctgacacacttatag

SEQ ID NO: 207016 - DNA, 1245 bp, synthetic construct
  misc_feature 1..1245: note = Description of Artificial Sequence: Synthetic coding sequence
  source 1..1245: mol_type = other DNA
atgagcagccccgacgccggctacgccagcgacgaccagagccagacccagagtgcactgcccgcagtgatggcaggactcggaccctgtccatgggcagaatcactgagtcctatcggcgacatgaaggtgaaaggagaggcaccggcaaattcaggcgcacctgcaggggcagcaggccgcgccaagggcgaaagccggatcaggcggccgatgaacgctttcatggtctgggccaaggacgagaggaagaggctagcacagcagaatcccgatctgcataacgcagaactgagcaaaatgctgggcaagtcctggaaagcactgaccttggcagaaaagcgccccttcgtggaggaggcagaacgcctgagggtgcagcacatgcaggatcatcctaattacaagtatcgcccaagaaggagaaagcaagtgaagcggctgaagagggtagaaggcgggttcctgcacggactcgcagagccacaggccgctgccctcggccccgaaggggggcgggtggccatggatggtctcggcttgcagttccccgagcaggggtttcctgcagggccccccttgttaccgccacacatgggtggccactatcgcgattgccagagcctgggcgcccctcccctagacgggtatccgttgcctacacccgacacctcccccctcgacggagttgaccctgatccggcatttttcgcggctcctatgcccggggattgccctgccgcaggaacctattcatacgcccaggtgtccgattacgcggggccccctgagccacccgccgggcctatgcacccacgcttgggccctgagcccgctggccccagcatccctggtctgctggcccccccttctgccctgcatgtttactacggcgccatgggctcacctggcgccgggggaggacgcgggtttcagatgcagccccagcaccagcaccagcaccagcaccagcaccatccaccggggcccggacagccgtcgcctccaccagaagcactaccatgtagagacgggactgacccttctcagccagctgaactgctcggcgaagtggataggactgagtttgagcagtacttacacttcgtgtgtaaacccgagatgggccttccttatcaggggcacgattccggtgtgaacctgcctgattcccacggcgctatcagttctgtggtttccgacgcgtcttcggccgtctactactgcaactacccagacgtttag

SEQ ID NO: 207017 - DNA, 1155 bp, synthetic construct
  misc_feature 1..1155: note = Description of Artificial Sequence: Synthetic coding sequence
  source 1..1155: mol_type = other DNA
atgcagcggagcccccccggctacggcgcccaggacgacccccccgcccggcgcgactgtgcatgggcacccggccacggagctgcagcagataccagagggctcgccgccgggcccgcagccttagccgcacctgccgctccagctagccctccaagtccccaacggtcgccgcccaggtcccccgagcccggaagatacggtctgtcccctgctggaagaggagagagacaggccgccgatgaatcacggatccgtcgcccaatgaacgcattcatggtatgggctaaagacgagcgtaagcgcctggcacagcaaaaccctgatttacacaacgccgttttgtctaagatgcttggaaaagcatggaaagaacttaacgcagccgaaaagcgacccttcgtagaggaggccgagcggttaagggtgcagcacctgcgtgaccatcccaactacaagtatcggccccgaagaaagaagcaagcgcggaaggccaggcggcttgagcccggtctgctgcttcccggactggcccctccacagcctccacccgaacccttcccggcagcttctggctcagccagagcttttagagagctgccgccactgggcgcagaattcgatggcttaggacttcctactcccgaacggtcaccactcgacggattggagcctggagaagcagccttcttccctcccccagcagcaccggaagattgcgcactgcggcccttccgggctccttatgcaccaactgaattgagccgggacccaggaggatgctatggggcgccgcttgccgaggcgctgcgaaccgcacctcctgccgcacccctggccggcctctactatggaacactggggaccccaggtccatatccaggtcccctgtccccaccaccagaggcccccccattggaatctgctgaacctctgggtcctgccgctgatctgtgggcagacgtggatctcacagagtttgatcagtacctgaattgctcaagaacccgacccgatgcgccggggcttccctaccacgtggccctcgcaaaacttggtcctcgagcaatgagttgccctgaagagagtagcttgatcagcgcactgtcggacgctagttctgccgtgtactactctgcttgtatcagtgggtag

SEQ ID NO: 207018 - DNA, 831 bp, synthetic construct
  misc_feature 1..831: note = Description of Artificial Sequence: Synthetic coding sequence
  source 1..831: mol_type = other DNA
atgagcaagcccgtggaccacgtgaagcggcccatgaacgccttcatggtctggtcaagggcgcaacggcggaagatggctcaggaaaatccaaagatgcacaactccgagatcagtaagcggctcggggctgaatggaagctgcttaccgagagcgagaagcgcccttttatcgacgaagctaagaggctccgtgcgatgcacatgaaggagcacccagactacaagtacagacctaggagaaagccgaaaaccctgctaaagaaagacaaattcgcatttccggtgccctacggtttgggaggagtggcagatgctgagcatcccgccctcaaggcaggagccggtctgcacgccggggccggaggcgggctggtccccgaatcattgcttgctaatccagagaaggccgccgccgcggctgcggctgctgctgccagagtgtttttcccgcagtcagcggccgccgccgcggctgcagccgctgcagcggcagcgggcagcccatactcactcctcgacctcggatcaaaaatggccgaaatttcatccagcagcagcgggctcccttacgcttcctctctggggtacccgacagccggggccggagccttccacggggcagccgcagcagctgcagcagccgctgccgccgccgggggccacacccacagccatccttcacctggtaacccaggatacatgataccttgcaactgcagcgcatggccctctccgggtttgcagccccccctcgcttacatcctgttgccaggtatggggaagccacagctggacccctaccctgccgcatatgcagcagcgctctag

SEQ ID NO: 207019 - DNA, 1341 bp, synthetic construct
  misc_feature 1..1341: note = Description of Artificial Sequence: Synthetic coding sequence
  source 1..1341: mol_type = other DNA
atgcggcccgtgcgggagaacagcagcggcgcccggagcccccgggtgccagctgatctggcacgatccatcttaatatctctgcccttccctccagatagcctcgcacaccgccctccatcgtctgctccaacggaaagtcaaggactgttcacagtggccgcgcccgcccccggagcaccttctccacccgccactctggcccacctcttacctgcccctgctatgtacagcttactcgagactgagctcaaaaacccagtggggacgccgactcaggccgcaggaaccggcggcccagccgccccagggggggctgggaaatcgtctgcaaatgctgccggtggcgcaaatagcgggggaggcagttcaggcggggcctcaggaggcggtgggggtactgaccaggatagagtgaagaggcccatgaatgcgttcatggtgtggtctcggggacagcgcaggaaaatggctctggagaaccctaaaatgcacaactcggagatctctaagagactgggtgccgattggaaactccttacggatgcagagaaaaggccatttattgatgaagcaaaacggttgcgtgccgtgcacatgaaggagtaccctgactacaaataccggccaagacgcaaaaccaagactctcctgaaaaaagacaagtattctctgccttctggtctgttgccccccggggctgcggcggcggcagcagcagccgccgccgcagctgcggccgctagtagccctgtaggggtcggccagcggcttgatacctatactcatgtcaacggctgggcaaacggggcatactcattggtacaagagcagttgggctacgcccaacctccttcaatgtcctctcctccccctccccctgcactcccaccgatgcatcgttacgacatggcagggctccagtatagccccatgatgcccccaggcgcccagtcctatatgaacgtcgctgctgctgcagcagcggcgagcggttacggaggaatggcaccatctgctactgcagctgcagcggctgcctacggtcaacagcctgctaccgccgccgccgccgcagcagccgccgccgcgatgtccctcgggcccatggggagtgtcgtgaaaagcgagccgtcatcaccgccccctgccattgctagccactctcagcgcgcctgccttggtgacctgcgcgacatgattagtatgtatctccctcctggcggggacgcagcagacgccgctagccccctgcctgggggtcggctccacggagtccatcaacactatcagggtgccgggaccgctgtaaacgggacagtccctctgacacatatctag

SEQ ID NO: 207020 - DNA, 2253 bp, synthetic construct
  misc_feature 1..2253: note = Description of Artificial Sequence: Synthetic coding sequence
  source 1..2253: mol_type = other DNA
atgagcagcaagcggcccgccagcccctacggcgaggccgacggcgaggtcgcgatggttacatcaagacagaaggtcgaagaggaggagagtgatggattacctgccttccatcttcccttacatgtgagttttcccaataagccccattctgaggaattccagcctgtttctctcctcacacaagagacatgcggtcacagaacgcctacttctcagcataacactatggaagtagatggtaacaaggttatgtctagcttcgcaccgcacaatagctcaacctctccccaaaaggccgaggaaggcggcaggcagtctggggaatccctgtcctccaccgctttagggacccctgagaggaggaaaggatcccttgctgatgtcgttgacaccctcaagcagaggaaaatggaggaactaattaaaaatgaaccagaagagaccccctccattgagaaacttctaagcaaggattggaaggataagcttctagcaatgggaagtggcaacttcggagaaatcaaaggaacccccgagtctctggccgaaaaggaaagacagctcatgggcatgattaaccaattgacttctttacgagaacagcttctcgccgctcatgacgaacaaaaaaagcttgctgcatctcaaattgagaagcagcggcaacaaatggagctggccaaacagcagcaggagcaaattgctcgtcagcagcagcagctgttacagcaacagcataaaattaacctgttacagcagcagatccaagtgcaaggacagctcccccccctgatgatcccagtcttcccgccagaccagaggacactggctgcagccgcgcagcagggattccttctgccccccggcttctcctataaggccggttgcagtgacccatatcccgtccagctgatccctaccaccatggctgcagccgccgctgcaacccctggactgggccccctccagctgcagcagttgtacgctgcccagttagctgctatgcaggtaagccccgggggtaaactccccggtatcccccagggcaatctgggagctgcagtgtctcccacttctattcacacagacaaatcaaccaactctccacccccgaagagcaaggatgaggtagcccaaccactgaatctgtcagcaaagccaaagacaagtgacggaaagtcaccaacgtcaccaacaagtcctcatatgcccgctctgaggatcaattcgggggcgggccctctgaaagcttcggttcctgctgcgctagcatctcccagcgctcgggtgagcaccatcggctacttaaacgaccatgatgccgtcactaaagccattcaggaggctcgccaaatgaaggagcaactgcgacgggagcaacaggtgctcgacggcaaggtagccgtcgttaatagtttgggccttaacaattgcaggacggaaaaagaaaagacaacgctggagtcccttacacagcagctggccgtgaaacaaaacgaagaaggcaagttctcccatgctatgatggatttcaatctatctggcgatagcgacgggagtgcgggcgtgagtgagtcccgtatctatcgggagagccggggacggggatcgaacgaaccccacatcaagaggccaatgaacgcctttatggtctgggccaaagacgagagacgaaaaatactgcaagccttcccggacatgcacaactccaatatctccaaaatcttgggctcaagatggaaggccatgacaaatctggagaaacagccctattacgaagaacaggccagactgtcaaagcagcatctcgaaaagtaccccgattacaaatacaagcctcgccccaagcggacctgcctcgtggacggcaaaaagcttagaattggagagtacaaggcaatcatgcgcaaccggcgacaggagatgcggcagtacttcaacgtcgggcagcaggcccagattcctatagccacggctggggtagtctatcccggcgctatagctatggccgggatgccttccccacatttaccctccgagcactcttctgtctcatctagcccggagccagggatgccggttattcaaagcacatacggagtcaagggagaggagccacacatcaaagaggagatacaggccgaagacatcaatggagagatctacgatgagtacgacgaagaggaggatgatcctgatgtcgattatgggagcgattctgaaaaccacatagcaggtcaagccaactag

SEQ ID NO: 207021 - DNA, 1929 bp, synthetic construct
  misc_feature 1..1929: note = Description of Artificial Sequence: Synthetic coding sequence
  source 1..1929: mol_type = other DNA
atgagcagcaagcggcccgccagcccctacggcgaggccgacggcgaagtcgcaatggtgactagtagacagaaggtagaagaggaggagtctgacgggcttccagccttccacttgcccctacacgtgagcttcccgaataagccccactctgaagagttccaacctgtgtcccttttgactcaggaaacatgcgggcacaggactcccacttctcagcacaacacaatggaggtggatgggaacaaagtgatgtccagcttcgcacctcataatagctccacaagtccccagaaggctgaggaggggggccggcagtctggggagtctctttcgagtaccgcactaggcaccccagaacgcaggaagggcagcctggccgacgtcgttgataccctcaaacagcgtaagatggaagagttgattaagaatgagccagaggagacaccaagcattgagaaactgctgtcaaaggattggaaggataagctactggctatgggatctggaaatttcggagaaattaaagggacacctgagtccctggccgagaaagaaagacagttaatggggatgatcaatcagcttacctctcttagagagcagttgttagcagcgcacgacgaacagaagaaactcgccgccagccaaatagagaaacaaaggcagcagatggagctcgcaaaacagcagcaggaacagatcgcgcgtcaacagcagcagctgttacagcagcagcacaaaattaatctgttgcagcagcagatccaggttcagggtcagctaccgcctctgatgattcccgtgtttcctcccgaccaacgcacattagctgctgccgcccagcaaggatttttactgccccccggctttagctacaaagccggctgttcagacccgtacccagtgcagctaattcctactactatggcggccgctgcagccgccacccctggtctcgggcccctgcaacttcagcaactgtatgctgcccagctagccgccatgcaggtttcccctggtggaaaattaccaggcatcccccagggcaatcttggcgctgcagtatccccaaccagcatccatacagacaaatccactaactcacccccccctaagtctaaggagaagacaaccctggagagtttgacacagcagctggccgtgaagcagaatgaagaaggaaaattcagccatgctatgatggactttaatttgtccggggacagtgacggtagtgctggagtatcagagagccggatataccgagaaagccgcgggagaggctctaatgaaccccatataaaaagacctatgaacgcctttatggtgtgggctaaggatgaacgaaggaaaatcctccaggccttccctgacatgcacaattccaatatttccaagattctgggaagtagatggaaagctatgactaatttggagaaacagccctactatgaagaacaggctcggctgtccaaacagcaccttgagaagtatcccgattacaagtataaaccgcggcctaagcgcacttgcttagtggatggtaaaaagctgcggatcggcgagtacaaagctatcatgcggaatcgccgtcaagagatgcgccagtacttcaacgtcggccagcaggctcagattcccatcgctacagctggggtcgtttacccgggcgctatagcaatggccgggatgccctctccacatcttccgagtgagcacagctcagtcagcagttcgcctgagccgggcatgcctgtcatccagagcacatatggagtcaagggcgaagagccacacattaaggaagaaatacaggctgaggatatcaacggggagatttacgacgagtacgatgaggaagaggatgacccagatgtggattatgggtctgattccgaaaaccatattgccgggcaggcaaattag

SEQ ID NO: 207022 - DNA, 1134 bp, synthetic construct
  misc_feature 1..1134: note = Description of Artificial Sequence: Synthetic coding sequence
  source 1..1134: mol_type = other DNA
atgcacgacgaggtggcccagcccctgaacctgagcgccaagcccaagacatctgacggaaagtctcctacctccccaacctccccacacatgcccgcccttagaatcaattccggagcaggaccactcaaggcctctgttccagcggctcttgcatctccatcagctagggtgagcacgatcggatacctgaatgatcacgacgcagtgacgaaagccattcaagaagcccgccagatgaaagagcaattgagacgagaacaacaagtcttggacgggaaggtagccgtagtcaatagtctggggctcaacaactgtagaaccgaaaaagagaaaaccaccttggagagcctgacgcagcagcttgcggtgaagcagaacgaagaggggaagttctcccacgcgatgatggattttaacctcagcggtgacagtgacggatccgcaggggtgagcgagagccggatataccgcgagtccagaggccgcggcagtaacgaaccccatattaaacggcctatgaacgccttcatggtctgggccaaagacgaaaggcgcaaaattctacaggcctttcctgacatgcacaactctaacatctctaaaattcttggctccagatggaaagccatgactaacctggagaagcagccatattacgaagagcaggcaaggctctcaaagcagcacctggagaagtaccccgactacaagtataaaccccggcccaagcgtacatgcttagtagatggaaaaaagctgcggataggcgagtataaggcaatcatgcgtaacagacggcaggaaatgcgacagtactttaacgtaggtcagcaggcgcagattcctattgcaaccgccggtgtagtttatcctggcgccatagccatggcaggcatgccctctccacacctcccgtcagagcacagcagcgtttcaagctctccggaacctggaatgccggtgatccaaagcacgtacggtgtcaagggcgaagagccgcacattaaagaagagatccaagctgaggacataaacggcgaaatctatgatgaatacgacgaggaggaagacgatcctgatgtcgattacggcagcgattctgagaaccatatagcagggcaggctaattag

SEQ ID NO: 207023 - DNA, 1764 bp, synthetic construct
  misc_feature 1..1764: note = Description of Artificial Sequence: Synthetic coding sequence
  source 1..1764: mol_type = other DNA
atgagcagcaagcggcccgccagcccctacggcgaggccgacggcgaggtggctatggtgaccagtcgccagaaagttgaggaggaggagagtgacgggcttcctgccttccacttacccctgcatgaggttgatgggaacaaggtaatgagtagcttcgctccccacaacagctcaacctcaccacagaaggcagaagagggagggcggcagtccggagagtccttgtccagtacagcccttggaacccctgagagaaggaagggctcccttgctgatgtggtcgacactttaaagcagcgaaagatggaagagctgatcaaaaacgaacctgaggagaccccaagcatcgagaaactgctgtctaaggactggaaggataagctgctcgctatgggcagcggaaacttcggcgaaattaaaggcacgccagaaagcttggccgaaaaggagagacagttaatgggcatgatcaatcagctcacttcccttagggagcagcttctggcagcccatgatgagcaaaaaaaactcgcggcttcccagattgaaaaacaaaggcagcagatggaacttgccaaacaacagcaggagcagatcgcccgtcagcaacagcagttgctgcagcaacagcataagataaacttgcttcaacagcagatccaagtgcagggacaactgccacccctgatgatcccagtcttccccccagatcagcggactctagccgccgccgcgcagcagggctttcttctgcctcccggattctcctataaggcggggtgcagcgacccttaccctgttcagttaatccctacaacaatggctgccgccgcagcagcaacgcccgggctcggaccgttgcagctccaacagctctacgccgctcagctcgccgcaatgcaagtatcaccgggcggcaagctgcccggaattcctcagggtaacctgggagcagcagtaagcccaactagtatccatacagacaagtcaactaactctccaccccctaagtcaaaggacgaggtagcccaacccttgaatctctctgccaaacctaaaaccagcgacggcaagtcaccgaccagccccacgagcccacatatgcctgcgctgcgcatcaattcgggcgctgggcccttgaaagcatccgtgcccgccgccctcgcttcacccagtgctcgggtttcaaccatcggatacctgaatgatcacgatgccgtcactaaggcaattcaggaggctcgccaaatgaaagaacaactgcggcgcgaacagcaggtgcttgacggtaaggtggccgtagtaaactcccttggcctcaataactgccggactgagaaagagaaaactaccttggagtccctcacccagcagttggcggtgaaacagaacgaggagggcaagttctcccacgccatgatggatttcaacctcagcggggactctgatgggagcgcaggggtgtccgagtcccgcatctaccgcgaaagccgtggccgcggctcgaatgaaccccatataaagagacccatgaacgccttcatggtttgggcgaaagatgaacgccgcaagatcctacaagcttttccggacctgggatttctgtgcgtttgtatgtacgttatcatggttcttatcatagggataacgctcgatcattgcgagctaaatccacatttgggaatgaaatcacacatcctgccctccgactggtctaggaataacctggatcttgatttcgcacttcagatgactacctag

SEQ ID NO: 207024 - DNA, 2292 bp, synthetic construct
  misc_feature 1..2292: note = Description of Artificial Sequence: Synthetic coding sequence
  source 1..2292: mol_type = other DNA
atgctgaccgaccccgacctgccccaggagttcgagcggatgagcagcaaacgccccgccagtccttacggcgaagccgatggcgaagtagccatggtcacgtctagacagaaggtagaggaagaggaaagcgacgggctccccgcatttcatttgcctctgcacgtgagctttcccaacaagccacactctgaggagttccaacctgtgtcactgctgactcaggagacttgtggccaccgcactccgaccagccagcataacactatggaagtcgacgggaataaggtcatgtcctcatttgcacctcataattcgtccacctccccacagaaggcggaggaaggcggaagacagtccggtgagagcctgagttccacagctctgggcacccctgagaggaggaaaggatccctggctgacgttgtcgatacacttaaacagaggaaaatggaggaactcataaagaatgagcctgaggaaactccctcaattgaaaagcttctcagtaaggattggaaggataaactgctcgccatggggagcgggaatttcggggagatcaagggaactccagagtcacttgcagagaaggagcggcagctgatgggtatgatcaatcagctcacctccctacgcgagcagctattggcggcccatgatgagcagaagaagctggcagcctcccagattgaaaagcagaggcagcagatggaattggcgaagcagcagcaggaacagatcgctcgtcagcagcagcaactgttgcagcagcagcataaaatcaatctcctgcaacagcagatccaggtgcaaggccagctgcctcctctgatgatccctgtgttcccccccgaccagaggaccctggctgccgcagctcagcaggggtttctactgcctcccggcttctcttataaggccgggtgttctgacccatatcccgtgcagctgatccctacaaccatggcggcggctgctgccgctaccccaggccttggtccactgcagttgcagcagctgtatgccgcccagctagcagccatgcaagtctcgcctggcggcaaactgcccggcataccacagggcaatctgggagcggcggtctccccaacatcaattcacaccgacaagagcaccaattccccccctcctaaaagtaaggacgaagtggcccagccacttaatttgagtgccaagccaaaaacctctgacggtaaaagcccaaccagtcccactagtcctcatatgccggctctccggattaactcaggcgctggccctcttaaggccagcgttccagctgcactggcatctcctagtgcgagagtctccactatcgggtatctgaacgaccatgatgcagtgacaaaggccattcaagaagctagacagatgaaggaacagctgagaagggaacagcaggtccttgacgggaaggttgctgtggtgaactccctgggcctgaacaattgcagaacagagaaagagaagacaacgcttgaatctctgacgcagcaactagctgtgaaacaaaatgaggagggtaagttttcccatgccatgatggacttcaacctatccggagactccgatggctcagcgggcgtatctgaatcgaggatttacagagaatcacgcggtagaggctctaatgagcctcacatcaagcggcccatgaacgccttcatggtatgggcaaaggatgaaaggcgcaaaattcttcaggcgttccctgacatgcataattccaatatcagcaagatactcggcagccgctggaaggcgatgacaaacttggagaagcagccctactatgaagaacaggcaaggctgagcaagcagcacctggaaaaatatcccgattataagtacaagccaagaccaaagaggacttgtttggttgatgggaagaagctaagaattggcgaatacaaggcaatcatgagaaataggagacaagaaatgagacagtattttaatgtgggacagcaggcccagatccccattgcgaccgccggtgttgtataccctggagccatcgcgatggccgggatgcctagcccacaccttccctcggagcattcttccgtgtcttctagtcctgagccaggcatgccggtcatccaatccacctacggcgtcaagggcgaagagccccacattaaggaggaaatccaggccgaagatatcaatggagagatatatgatgaatacgatgaggaagaggacgacccagatgttgactacggctcggatagcgagaatcatatagccggacaggccaattag

SEQ ID NO: 207025 - DNA, 1929 bp, synthetic construct
  misc_feature 1..1929: note = Description of Artificial Sequence: Synthetic coding sequence
  source 1..1929: mol_type = other DNA
atgagcagcaagcggcccgccagcccctacggcgaggccgacggcgaagttgctatggtgactagtaggcagaaggtggaggaggaggaatctgatgggctgccggccttccacctgcctctccacgtgtcgttccctaacaaaccacactcagaagagttccagcctgtaagtctgctaacccaggagacctgtggtcacaggacaccgacttcacagcataataccatggaagtggacgggaataaggttatgtcctcattcgcaccgcacaactcaagcacatctcctcagaaagctgaggagggcggtaggcagtctggcgagagcctgagttccacagctctggggaccccagagcgtagaaagggctctctcgcggatgtggtggacactctcaagcagcgcaagatggaggagttgatcaagaatgaacctgaggaaaccccgagcatcgaaaagttgctatcaaaagattggaaagacaaactgctggctatgggaagtggaaatttcggggagattaaggggacccctgagtctctggccgaaaaggagcgtcagttgatgggcatgattaatcagctgacatcactgagggagcagctgctagccgcccacgacgagcagaagaaactagctgcttctcaaatcgagaagcagaggcagcagatggagctcgccaaacagcagcaagaacaaatcgcgcgtcagcaacaacagcttttgcagcagcaacataaaataaatttgctgcaacagcaaattcaagtgcaaggccagcttcctcctctgatgattcctgtttttccccccgatcagagaacactcgctgctgcggcacagcagggattcttgttaccacccggtttttcatacaaggcagggtgctctgacccctatccagttcagctgatccccacgactatggccgccgctgccgccgctactcccgggctgggccccttgcagttacagcagttgtatgccgcccaactagccgcaatgcaagtgagccctggcgggaagctgcccggaattccacaaggcaatcttggggccgccgtcagcccgactagcatacacacggacaaatcaacgaacagcccaccccctaaatccaaagagaagacaaccttagagagtcttactcagcagctggccgtcaagcagaatgaggagggaaagttctcccacgctatgatggactttaatcttagcggcgattcagacggctcagccggcgtctctgagagccggatctatcgcgaatctcgggggagaggttcaaacgaacctcatatcaaaaggccgatgaatgctttcatggtctgggcgaaagatgagcgtcggaagatccttcaggctttccctgacatgcacaactctaacatttcaaaaatcctaggatcccgatggaaagccatgaccaacctggagaaacagccttactatgaggaacaggccagactgtccaagcagcatctggaaaagtaccctgactacaagtataagcctcgcccgaagagaacttgcctggtggacggaaagaagctgcggattggggagtacaaggccattatgcggaaccggcgacaagagatgaggcagtattttaatgttggccagcaagcacagatcccaattgctacagccggagtcgtgtatcctggcgccatcgcgatggctggtatgccctcacctcatctgccatcagaacatagctctgtgtctagcagtcctgagccagggatgccagtgattcaatctacatatggcgtgaagggggaagaaccccatattaaagaggagattcaggctgaggatattaacggcgaaatatacgatgagtacgatgaagaggaggatgacccggatgtggactacggcagtgactccgaaaaccatatcgcagggcaagctaactag

SEQ ID NO: 207026 - DNA, 2253 bp, synthetic construct
  misc_feature 1..2253: note = Description of Artificial Sequence: Synthetic coding sequence
  source 1..2253: mol_type = other DNA
atgagcagcaagcggcccgccagcccctacggcgaggccgacggcgaggtggcaatggtgacctccaggcagaaagtggaggaggaagagtccgatggcctgccggcttttcacctgcccttacatgtctcctttcctaacaaaccccattccgaggagtttcaacctgtgagtctgttgactcaagaaacctgcggccatcgaacaccaacctctcaacataacaccatggaagtcgacgggaataaggtcatgtctagctttgccccacacaacagctcgacaagtccacaaaaagccgaagagggaggacgccagtctggtgaatctctgagcagtaccgccctgggcacccctgagaggcgaaaaggttcactggctgatgtggtggatacactgaaacagcgcaaaatggaggaactgatcaaaaatgagccagaagagacaccaagcatcgaaaagctgctgagtaaggattggaaggacaagctcctggccatgggctcaggcaacttcggagagattaagggaactcctgaaagtctggccgagaaggagaggcagcttatggggatgatcaaccagctgaccagcctgagagagcagttgctggctgcccacgacgagcagaaaaagctggccgcatcacagatcgagaagcaaagacagcaaatggagctcgcaaagcaacaacaagagcagattgcaagacagcagcagcaactcctgcagcaacagcataagatcaacttactgcaacagcagatacaggtgcagggacagttgcctccccttatgatccctgtattcccacctgatcagagaactttggccgctgctgctcagcaggggttccttcttcctccgggcttttcatacaaggccgggtgttcggatccttaccctgtgcagctcatcccaacaaccatggctgcagcagccgctgccactccaggtctgggacctctgcagctccagcaattgtacgctgcccagctggcggccatgcaggtgtcacctggcgggaagctgcctggcatcccgcagggcaacctgggtgccgcagtttctccaacctcaattcatacggataaatcaaccaattcaccacccccaaagtccaaggacgaagttgctcagcctctcaatctgtccgcgaagcccaaaactagtgatggaaagtcacctactagtccgacctctccccacatgccagctctgcggattaactccggagccgggccgctgaaagcctccgtccccgccgcccttgcctccccaagtgcccgcgtcagtaccatcgggtacctgaacgatcatgatgcggtcactaaggcaattcaggaggctagacagatgaaggaacagctccgtagagagcaacaagtgctagacggtaaggtggctgtggtgaactcccttggactgaacaattgcaggactgaaaaggagaagacaacattagaatcactcacccaacagctggccgtgaaacagaatgaggagggcaagttttcacacgctatgatggactttaacctgtctggtgactcggacgggtccgcaggagtgagcgagtctcgaatctaccgggagtccagaggccggggctccaacgaaccccatataaaacggcctatgaacgcgttcatggtctgggctaaagacgagcgcaggaaaatcttacaggccttccctgacatgcataacagcaatatcagtaagattttgggatctcgctggaaagcaatgaccaatctcgagaaacagccttactacgaagagcaggcccgtctgtccaaacagcatctggagaaatatcccgactacaagtataagcctaggcccaagcggacatgcctggttgacgggaaaaaacttaggattggggagtataaagctatcatgagaaatcgcagacaggaaatgcggcagtacttcaatgtgggtcagcaagcccagattccaatagctaccgcaggtgtcgtctaccccggcgcgatagccatggcgggtatgcccagcccacacttgccgagtgaacacagttccgtaagcagcagcccagagcctggtatgccagtgatccagtcaacttatggcgtgaagggcgaagagccccacattaaagaagaaatccaagcagaggatattaacggcgaaatatacgatgagtatgacgaggaggaagacgaccccgatgttgactatggaagtgatagcgagaatcatattgccggtcaggccaactag

SEQ ID NO: 207027 - DNA, 2427 bp, synthetic construct
  misc_feature 1..2427: note = Description of Artificial Sequence: Synthetic coding sequence
  source 1..2427: mol_type = other DNA
atgagcagcaagcaggccaccagccccttcgcctgcgccgccgacggcgaagatgctatgacccaggatcttacctcgcgcgaaaaagaggagggatccgaccagcacgtggccagtcatcttcccctgcacccaatcatgcacaacaagcctcactccgaagaactgcccacactcgtttcaactattcagcaggatgctgactgggactctgtgttgtcgtcacagcagagaatggaatctgagaacaataagctgtgctccttatatagtttcaggaatacatccaccagtccccataagccagacgaaggtagtagggaccgcgagatcatgacgtcggtgacttttggtactcctgagagacggaaaggatcccttgctgacgtcgtagatacgctgaaacagaagaagctggaggagatgacgcgcaccgaacaggaggattcttcctgtatggaaaagctcctgagtaaggattggaaggagaaaatggagaggttaaatacgagcgaattactgggtgagataaaggggactccggagtccctggcagaaaaagagaggcagcttagcactatgattacacagctgatttccttgcgggagcagctgttagcagctcatgacgagcagaagaaactcgccgctagccagattgaaaaacagcggcaacaaatggatctggcccgccagcagcaggagcagattgcgcggcagcagcaacagctgctacaacagcagcacaaaatcaatttgctgcaacagcagattcaggtacagggccacatgcccccacttatgatcccaattttcccacacgatcagaggacgttggccgctgccgcagcagcccaacaggggtttctgttcccacctggaatcacctacaagcctggggacaactaccccgtccaatttatcccatctacgatggccgccgccgccgcgagtggcctgtcccctctgcagttacagaagggacacgtgagtcacccacaaatcaaccaaagattaaagggactcagcgatcgattcggacgaaacttggacacttttgagcacggaggaggtcactcctataaccacaaacagattgaacagctgtatgcagcacagctcgcttcaatgcaggtttctcccggcgcgaagatgcctagcactccacagccacctaacacagctggcacggtctcacccactgggatcaagaacgaaaagcgcgggacctcaccagtaacccaagtcaaggacgaggcagcagctcagcctttaaacctttcttctcgacccaaaacagctgagccagtaaagtctccaacctcccctacccagaatctgtttccagcctcaaagacctcacctgtgaacttgcccaacaagtcaagcatcccttctcccatcggtgggagtctgggtaggggctcaagcctcgacatactgagcagtttaaactcccccgcattgtttggggaccaggacacagtgatgaaggccatacaggaggcacgtaaaatgagagagcagatacagagagagcagcagcaacagcagccacatggtgttgatggtaagctatctagcataaataacatgggtttgaattcctgcaggaacgagaaagaacggactagatttgagaacctgggccctcagctgaccggaaaatctaacgaggacggcaagttaggcccaggggttatcgatttgacgaggcccgaagacgcagagggaggagctaccgtagctgaagcccgcgtgtaccgagacgctcgtggacgcgctagcagcgagccgcacatcaagcgccctatgaatgcgtttatggtgtgggccaaagacgagcgccggaagatcctccaggcgtttcctgacatgcataactcgaatattagcaaaatattaggtagccgttggaagtcgatgagcaatcaggaaaagcaaccttactatgaagaacaggccaggctgagcaaaatacatctggaaaaataccccaactacaagtacaaaccaaggcccaagagaacatgcatagtggatgggaagaagttacgtataggggaatacaaacagctgatgaggtcgcgtcgccaggagatgagacagttcttcaccgtcgggcagcagcctcagatccccatcaccaccgggactggcgtggtttaccctggtgctattactatggccacaaccacacccagtcctcagatgactagcgattgtagttccactagcgcatcgcccgagccctcactgcctgtgatccaatctacttacggaatgaagactgatggtggaagtcttgcgggaaacgagatgattaacggagaggacgagatggaaatgtacgatgactacgaagatgatccaaagtccgactacagctctgagaacgaggcccctgaagccgtgagcgccaactag

SEQ ID NO: 207028 - DNA, 2487 bp, synthetic construct
  misc_feature 1..2487: note = Description of Artificial Sequence: Synthetic coding sequence
  source 1..2487: mol_type = other DNA
atgagcagcaagcaggccaccagccccttcgcctgcgccgccgacggggaggacgctatgacacaggatttaacctctagagagaaagaggaaggcagcgaccaacacgtagcctcccacttacccctacatccaatcatgcataacaagccacatagcgaggagctccccacgctcgtctccaccatacagcaggacgcagattgggacagcgtgttgtctagccaacagcgcatggagagcgagaataataaactgtgtagcctctactctttcaggaacactagtacctcgcctcacaagccagacgaaggctcgagggaccgggaaataatgacaagtgtgacatttggtacccccgaacgcaggaaggggagtctggccgacgtggtggatacactgaaacaaaagaagctcgaagaaatgaccaggacggagcaggaggatagcagttgcatggaaaaactcctttccaaggactggaaagaaaagatggagagactgaataccagtgaactgctcggtgaaattaagggtactcccgaaagtcttgcagagaaggagaggcaactgtccaccatgatcacacagctcatcagcctgcgggagcagctgttagctgctcacgacgaacagaaaaagcttgcagccagtcagatagagaaacagagacagcaaatggacctcgcgaggcaacagcaggaacaaatcgcgcgacagcagcaacagctgctccagcagcagcacaaaatcaatctccttcaacagcagatacaggttcaaggccatatgcccccccttatgattcccatcttccctcacgaccagcgcaccctcgcagcagctgctgcagcacagcagggattcttgtttcccccaggcattacgtataagccaggggacaattacccggttcagttcattcctagcaccatggctgccgccgcagctagtgggctctcacccctgcagttgcagaaaggccacgtgtctcacccacagattaatcagcgcctaaaaggcttgtcggatagattcggaaggaatttggatactttcgaacatggcgggggacactcttacaaccataagcagatcgagcaactgtacgccgctcagctcgcgtccatgcaggtcagtcccggagccaaaatgccttccaccccccagcctcctaataccgctggtactgtatccccaactggcattaagaatgagaagcgggggacttcccctgttacccaagtcaaagacgaagcggctgctcagccactgaatctcagctccaggcctaagaccgccgagccagtgaagtccccaacctctcccacacagaatctgttccctgctagcaagacatccccggtaaatcttcccaacaaaagttctattccatcaccgattggcggctccctggggaggggctcatctctcgatatcctttcctccttgaattccccggccctgtttggagatcaggacacggtaatgaaggctatccaggaggccagaaagatgcgggaacagatacagcgggagcagcaacagcagcagccacacggtgtggacggaaaactgagctcaatcaataatatggggcttaactcttgtcggaacgagaaagagcgcactagatttgagaatctgggcccacaacttacaggaaaatccaatgaggacgggaagttgggccctggcgtcattgacctgactagaccagaggacgccgaggggtctaaagccatgaatggatcagcagcgaagttgcaacagtactattgttggccaaccggtggcgctacagtcgcggaagcccgggtttatagagacgcccgtggcagagcatcatccgagccacacatcaaacgcccaatgaacgcattcatggtttgggctaaggatgaacgcaggaagatcctgcaagcatttcccgacatgcacaacagtaatatatccaagatattgggatccaggtggaagtcaatgtcaaaccaggagaaacaaccatattacgaggagcaggccagactgtccaagattcatctggaaaagtatcccaactataagtataagccacggcctaaacgcacttgtattgtggatggaaagaagctgagaatcggagagtataaacagctgatgagatctcgcaggcaggaaatgagacagttttttactgttgggcagcagccacagattcctatcacgacaggaactggcgtggtttatccgggcgccattacaatggcaactacaacaccgagcccacagatgacctccgattgttccagcacctctgccagccctgagccctctttgccagtgatccaatccacatacgggatgaagacagatggcggctccctcgccggcaatgaaatgatcaacggcgaagacgaaatggagatgtacgacgactacgaggacgaccctaagtcggattacagctccgagaatgaggcaccagaggcggtgagtgcaaactag

SEQ ID NO: 207029 - DNA, 2427 bp, synthetic construct
  misc_feature 1..2427: note = Description of Artificial Sequence: Synthetic coding sequence
  source 1..2427: mol_type = other DNA
atgagcagcaagcaggccaccagccccttcgcctgcgccgccgacggagaggatgctatgacacaggatttaactagtcgagagaaggaagagggaagcgatcagcatgttgccagtcacctgccattacacccaattatgcacaacaaaccgcatagtgaagagctccctacacttgtgtccactatccagcaagatgcagactgggacagcgtactctcatctcaacaacggatggaatccgaaaataacaaactgtgttcattgtattctttccgtaataccagcacttccccccacaagcctgacgaggggagtcgcgatcgtgagattatgaccagcgttactttcggaacccccgagcgtcgcaaagggtctcttgcagatgtggtggacacattgaagcaaaaaaaactggaggagatgactagaaccgagcaggaggacagttcgtgcatggaaaaactcctttctaaagactggaaagagaagatggagcgactgaacacatccgaattattgggagaaatcaaggggactccagagtcgttagcggaaaaggagagacagttgagcaccatgattacacagcttattagcttgagggaacagcttctagcggcacatgacgagcaaaaaaagctggctgcctctcaaattgagaaacagaggcaacagatggatttggcgagacaacaacaagagcagatcgccagacagcagcagcaactgctacagcagcaacacaaaattaatctgctgcaacagcagatccaggtgcagggacatatgcctccgcttatgatcccaatctttccccacgatcagcgcaccctggctgccgctgcagcggcacaacaagggttcctgtttccgcccggtatcacctacaaaccaggagataactatccagtgcagttcatcccgagcaccatggcggcagcggccgcttcggggctgtctccgctgcaactgcagaaaggacatgtcagccatcctcagattaatcagcgcttgaaaggactgtctgacaggttcgggcggaatctcgacaccttcgagcatgggggagggcattcatataaccacaagcagatcgagcaactgtacgcagcacagctggcctccatgcaggttagcccaggagcaaaaatgccttcgacaccccagcctcctaatactgccgggacggtgtctcccaccggcatcaaaaacgaaaagcgagggaccagccccgtgacccaggtcaaggatgaagccgccgcccagcctctgaatctttcctcgaggccgaaaacagccgagcccgtgaagtctccaacttcaccaacccagaacctgttcccggcctccaaaacttctcctgtgaacctgccaaacaagtctagcatcccgagcccgatcgggggctccctcgggcggggatctagccttgatattctctcttcactgaactctccagcactctttggggatcaggataccgtgatgaaagcaattcaagaggcacggaagatgcgcgaacagatccagcgtgaacagcagcaacagcagccgcatggcgttgatggaaagctatccagcatcaataacatggggctgaatagctgcaggaatgaaaaggagaggacgcgctttgagaatcttgggcctcagctgaccggcaagagcaacgaggacggtaagctagggcctggcgtgattgacttaactcgtccagaggatgcagagggtggcgctacagtggcggaagcccgtgtgtatcgagatgcgaggggacgcgcgagttcagaaccccatattaaacggccaatgaacgctttcatggtgtgggccaaagatgagcggagaaagattctgcaagctttccccgatatgcataactccaatatcagcaagatcttggggtctcgctggaagagcatgagcaatcaggagaagcagccctattatgaggagcaagcccggctcagcaaaattcatttggaaaagtaccctaactacaagtataagcctcgccctaaacgaacatgcatcgtggatgggaaaaagctgagaataggcgagtataaacagctaatgcggtcccggagacaggagatgagacagttttttacagttggtcagcagccccagatccctatcaccaccgggacaggtgttgtatacccgggggccatcacgatggcaactaccacccctagcccccaaatgacttccgattgctccagcaccagcgcttctccagagccgagcctgcccgtgatccagagcacctatggcatgaagacagatgggggaagcttggccggtaatgaaatgattaacggcgaagatgagatggaaatgtacgacgactacgaggatgaccctaagtcagattatagctccgagaatgaggcacccgaggctgtcagtgctaactag

SEQ ID NO: 207030 - DNA, 420 bp, synthetic construct
  misc_feature 1..420: note = Description of Artificial Sequence: Synthetic coding sequence
  source 1..420: mol_type = other DNA
atgagcagcaagcaggccaccagccccttcgcctgcgccgccgacggagaagacgctatgactcaggatctgacgtcgcgcgagaaagaagaaggcagtgaccagcacgtggcgagccacctgccactgcacccaatcatgcataacaagccccattcagaggaactgccaacattggtctcaacaatacagcaggatgccgattgggactccgtattgtcatcgcagcaacgcatggagtcagaaaataacaaactgtgcagcctctattcctttcgcaatacgagcacaagcccacataagccggacgaagggtctagagatagggagattatgactagtgtgacctttgggacacccgagcggagaaagggcagcctagccgacgtcgtagacactttgaaacagaaaaagctgtag

SEQ ID NO: 207031 - DNA, 2406 bp, synthetic construct
  misc_feature 1..2406: note = Description of Artificial Sequence: Synthetic coding sequence
  source 1..2406: mol_type = other DNA
atgagcagcaagcaggccaccagccccttcgcctgcgccgccgacggggaggacgccatgactcaggacctgacatctcgggagaaagaagaggggagcgaccagcacgtcgcaagccatctgcctttgcaccctatcatgcataataaaccgcactctgaagagctgccgacattggtttctactatccagcaggatgcagattgggatagtgtactctcaagtcagcagcgcatggagtccgaaaacaataagttatgcagcctgtacagcttcagaaatacctcaacgagcccccacaagccagatgagggttccagagatagggaaattatgacatccgtgacattcggcacccccgagcgtagaaagggtagcctcgcagacgtggtggatactctgaaacaaaaaaagctggaggaaatgacaaggaccgaacaggaagactccagctgtatggagaagttattgagcaaggactggaaggagaaaatggagaggcttaatacatctgagctactaggggagattaaagggacgccagaatctcttgccgagaaagagagacagctgtctacaatgataacacagctcataagcctgagggagcagctactggccgcccacgacgaacagaagaagttagcggcaagccagattgagaaacagcggcagcagatggatcttgctcgccaacagcaagagcagatcgctaggcagcaacagcagctcttgcagcagcagcacaaaatcaatctgctgcagcagcagatacaggtgcaaggccacatgccgcctcttatgatccccatcttcccccatgaccagcgtaccctggctgccgcagcggctgcacagcagggatttctgttcccccccggaatcacgtacaagcccggtgacaactacccagtgcaatttatcccttccacaatggccgccgcagccgcatcaggtttatctcccctgcagttacagcaactatacgccgcccagttggccagtatgcaggtgagccctggcgccaaaatgccttcgacacctcaacctccaaacaccgcggggacagtttctccaaccggaattaaaaatgaaaagcggggcacgagtccagtgacacaggtcaaggacgaggcagccgcccaacccttaaacctgtcctctagacctaaaaccgcagaacccgtcaagtcccccacttccccaacccaaaatctctttcccgcctctaaaacatcccccgttaacctccccaacaagtctagcattccaagccctatcgggggctctcttggcagaggttcgtcgctgggaaagtggaaatctcagcaccaggaggagacgtacgagcttgacatcctgtcttctctgaattcccctgccctcttcggggatcaggacacagtgatgaaagccatccaagaagcgaggaagatgcgtgagcagattcagagggaacagcagcaacagcagccacatggagtggatggtaaactgagctcaattaacaatatggggctgaattcatgccgaaatgagaaggaacgcacaagattcgagaatctcggtccacagctgacaggaaaaagcaacgaggacggaaagctcggaccaggcgtcatagacctcaccagacccgaggacgcagagggctcaaaggccatgaacggtagtgctgccaagcttcaacaatattactgctggcctaccggaggtgcaaccgtggcagaagcccgcgtctatagagatgcccggggcagagcttcttccgagccccatattaagcgccccatgaatgcgttcatggtatgggccaaggacgaacgccggaaaatcctgcaagcttttcctgatatgcataattccaacattagcaagatcctcggcagccgatggaaaagcatgagtaaccaggagaagcagccttactatgaggagcaggcacgtctgagtaaaatacacctcgagaaatacccgaactacaagtacaaacctcgacccaagcgaacctgtatcgtggacggtaagaagctccggattggtgagtataaacaactgatgcgatctaggcgacaagaaatgcggcagttcttcacagtgggtcaacagccgcagatacccataacaactggcacgggcgtcgtttatcctggagctattactatggccacgactactccctccccccaaatgacctcagactgcagctccacctccgcctcgcctgaacccagcctacccgtgatccagagtacctatggcatgaaaactgacggggggagcttagcaggtaatgagatgatcaacggcgaggatgagatggaaatgtacgatgattatgaagacgatcccaagtctgattacagctctgagaacgaggcccctgaagccgtttcagcaaactag

SEQ ID NO: 207032 - DNA, 2487 bp, synthetic construct
  misc_feature 1..2487: note = Description of Artificial Sequence: Synthetic coding sequence
  source 1..2487: mol_type = other DNA
atgagcagcaagcaggccaccagccccttcgcctgcgccgccgacggtgaggacgccatgactcaggacttaacaagcagagaaaaggaggaaggcagcgatcagcatgtcgcttcccacctgccactacatcctatcatgcacaataagcctcattcagaagagcttccaacactggttagcacgatccagcaagacgccgactgggactcagtgttatcaagccagcagcgtatggaatccgagaataataagctatgctctctgtattctttccgaaatacgtccacctcgccacacaagcctgatgaaggcagccgggaccgagagattatgacttctgttacgttcggcacccctgagaggagaaaaggaagcctcgccgatgtagttgatacgctcaagcagaaaaaacttgaggaaatgacccggacagagcaggaggattcatcttgtatggaaaaactgcttagcaaggactggaaggagaaaatggaaagactaaatacgagtgagttgctgggtgaaatcaagggcactccagaatcccttgctgagaaagagcgccaactaagtacaatgattactcagcttatcagcctccgggaacaactcctggctgcacacgacgaacagaagaaacttgcagcctctcagattgagaagcagcgccagcagatggacttggcgaggcagcagcaggagcagatagctcgacagcagcagcaactgctccaacagcagcataagattaacctgttgcagcagcagatacaagtccagggacacatgccaccccttatgattccgatcttccctcatgaccagaggacgctcgccgccgccgctgccgctcagcagggcttccttttcccacccggcatcacatataagccaggtgacaactaccctgtccagtttataccatccactatggccgccgcggccgccagtggcctaagtccgctgcaactgcagaaaggacacgtctcacaccctcagatcaaccagagactgaaaggcctgagtgacaggttcggtagaaatttggacacattcgagcacggcggcggacactcatataaccataagcaaattgagcaactgtatgcagctcagttagctagcatgcaggtgtctccaggcgccaagatgccatctacaccccaaccgcccaatacagcaggcactgtgagtccaaccggtattaagaacgaaaagagaggcacaagtccagtcacacaggtgaaagatgaagcagcggcccagccgctaaacctgtcctccagacccaaaactgctgagcccgtgaagtcccccaccagtcccacacagaacttatttcctgctagcaagacctccccagtgaacctgcctaataaatccagcatacccagtccaatcggcggttccctgggcaggggttcctcattggatattctgagcagtctgaatagccctgccctgttcggagaccaagacaccgttatgaaggcaatccaagaagcacgaaaaatgcgtgagcagattcagcgcgaacagcagcagcagcagccccatggcgtcgatgggaagttgtctagcatcaataacatgggtctgaattcttgccgcaacgagaaagaacgaacccgcttcgaaaaccttggcccgcagctgacaggcaaatccaatgaagatggtaaactgggtcctggcgtcatcgatcttacgcgccctgaagatgcggaaggttccaaagctatgaacggctccgcggctaaactgcagcagtattactgctggccaacaggaggagcaacagttgccgaggctagagtctatagggacgcgcgaggacgagcttccagtgaaccgcatatcaagcggccgatgaacgcattcatggtctgggctaaagatgaaagacgcaaaatcttacaggcttttccagacatgcacaactctaacattagcaagatccttgggagcaggtggaagagtatgtctaaccaggagaaacagccatattatgaagaacaggctagattgagcaaaatacatttggaaaaatatcctaattacaagtacaaacctcggccaaaacgaacctgtattgtcgatggcaagaagttgcgaatcggggagtacaaacaactcatgcgtagccgacgtcaggaaatgcggcagttctttacagtcggacagcaaccccagattcctatcacaacggggacaggcgtcgtgtaccctggcgccattacgatggccacaacgactccctcaccacagatgactagcgactgttcttcgacatcagctagtccggaacctagcctgcccgtcatccagagcacatacggaatgaaaacagacggaggcagcctcgcaggaaatgagatgattaatggcgaggatgagatggaaatgtatgatgactatgaggatgacccaaagagcgattattcctctgagaatgaggctcctgaagcggtctcagcaaattag

SEQ ID NO: 207033 - DNA, 240 bp, synthetic construct
  misc_feature 1..240: note = Description of Artificial Sequence: Synthetic coding sequence
  source 1..240: mol_type = other DNA
atgagcagcaagcaggccaccagccccttcgcctgcgccgccgacggcgaagacgccatgacacaggatctgacatcccgggagaaggaggagggatcagatcaacatgtggcgagccatctgccgctgcaccctataatgcataacaagccgcattccgaggagctcccgaccttagtatcaacaatccagcaggatgctgactgggactccgtgctgagctcacagcaacgcatgtag

SEQ ID NO: 207034 - DNA, 480 bp, synthetic construct
  misc_feature 1..480: note = Description of Artificial Sequence: Synthetic coding sequence
  source 1..480: mol_type = other DNA
atgagcagcaagcaggccaccagccccttcgcctgcgccgccgacggcgaagatgctatgacacaagatctgacaagcagggagaaagaggagggatctgatcagcacgtggcttcccacctgccccttcatcctatcatgcataataagccacacagtgaagagttaccgaccctcgtgtctacgatccagcaggatgccgactgggatagcgtgctctcgagtcagcagcgcatggaaagtgagaataataaactgtgctccctctacagctttcgcaacacttccacttctccccataaaccggatgaggggtcccgagatagggagatcatgacttcggtgaccttcgggactcccgaaagacggaaggggtccctagccgatgtggttgatacactcaagcagaagaaactcgaagagatgacccgcactgaacaggaggattcttcatgtatggagaaattactttcaaagtag

SEQ ID NO: 207035 - DNA, 2415 bp, synthetic construct
  misc_feature 1..2415: note = Description of Artificial Sequence: Synthetic coding sequence
  source 1..2415: mol_type = other DNA
atgggccggatgagcagcaagcaggccaccagccccttcgcctgcgctgccgatggcgaggacgccatgacgcaggatctgacctcccgcgaaaaggaagaagggagtgatcaacacgtagcctcccatctgcccctgcatcccataatgcataataagccgcactcagaagagctacccacattggtctccacgatccagcaagacgctgattgggactccgtgttgtcatcacagcagagaatggaaagcgagaacaataaactgtgcagcctgtattcattcagaaacaccagtacaagcccacacaaacctgacgagggaagcagagacagagagataatgacctccgtgaccttcggcacgccagagagaagaaaaggatcccttgctgatgtagttgatacactgaaacagaagaagttagaggagatgacccgtaccgaacaggaagatagctcttgcatggagaaactcttgtccaaggattggaaagaaaaaatggaaaggctgaacacgtccgaattgctaggtgagattaaaggcactcctgagagcctggctgagaaagagcgacagctgtccaccatgatcacccaacttatcagccttagggaacagttacttgccgcacacgatgagcaaaagaaattggccgccagtcaaatcgagaaacaacgacaacagatggacctggctagacagcaacaagagcagatcgcacgccaacaacagcagctgttacagcaacaacataagataaatctgctgcaacaacaaattcaagtccaaggccacatgcctccgctcatgattcccatttttccccacgaccaaaggacgttggctgccgcggcggcagcccagcagggtttccttttccctcccggcatcacttataagccaggcgataactaccctgttcagtttataccgagtaccatggcagctgccgcagccagcggcctgtcccctctccaactgcagcagctgtatgccgctcagctggcgtctatgcaggtgagccccggtgcaaagatgcccagcacaccccaaccccccaacaccgcaggcactgtgtcccccactggaatcaagaatgaaaaacgtggcacttctccagtcacacaagtaaaggatgaggccgccgctcagcccctgaacctgtcttcacggccgaagactgccgagcctgtgaagagccctaccagccccactcagaatctgttccctgcaagtaaaacatccccggtgaacctgcccaacaaatccagcattccttctccaatcggaggcagtctcggacgcggctcatctctcggaaagtggaagtcgcagcatcaggaggaaacctatgagctcgacattctctctagcctcaactcgccagccctctttggggaccaggacacggtcatgaaggctattcaagaagcaagaaaaatgagggagcagatccagcgtgaacagcagcagcagcagccgcatggggtggacggcaaactttcaagcatcaataacatgggccttaactcttgcagaaacgaaaaggaaagaacacgatttgaaaacttgggcccccagttgacagggaaaagtaacgaagacgggaagcttggcccaggcgtaattgacctcacaagaccagaagacgctgagggcagcaaagccatgaatggcagtgccgccaagctgcagcagtattactgctggcccaccgggggtgctaccgtcgccgaggcgcgggtataccgtgacgccagggggcgagccagctctgagccccacatcaagcgccctatgaacgccttcatggtttgggctaaagatgaaagacgcaagattctgcaggctttccccgatatgcacaacagtaacattagcaaaatactggggagtagatggaaatccatgtccaaccaggagaagcagccatactacgaagagcaggcacgccttagcaagattcatctggagaagtatccgaactataaatacaaacctcgacccaaacgcacctgtatcgtcgacggcaaaaaactcaggatcggcgagtataaacagctgatgcgctcacgccgccaggagatgcgacagttcttcactgtgggtcaacagccacaaatcccaataactaccggcaccggcgtcgtctaccctggtgctataaccatggcaactactacaccatcaccgcagatgacgtcagactgcagctctactagcgctagtcctgaaccctccttaccggttattcagtctacctatggcatgaaaactgatgggggtagcttagcaggtaatgaaatgatcaacggcgaagacgagatggaaatgtacgacgactatgaggacgatcctaaatccgactactcttctgagaacgaggccccggaagccgttagcgccaattag

SEQ ID NO: 207036 - DNA, 1167 bp, synthetic construct
  misc_feature 1..1167: note = Description of Artificial Sequence: Synthetic coding sequence
  source 1..1167: mol_type = other DNA
atggccagcctgctgggcgcctacccctggcccgagggcctggagtgcccggcactggacgcagagctatctgatgggcagagccctcccgccgtcccacgcccccctggcgacaagggctcagaatcaaggatcagacgacccatgaatgccttcatggtgtgggcgaaggatgaaaggaaacgacttgccgtacagaaccctgatttgcacaatgcagaactgagcaagatgctaggcaagagctggaaagccctaacattgagccagaagcgcccctatgtggacgaagccgaacgactacgcctgcagcatatgcaggactaccctaactacaaatacagacctaggagaaagaagcaggcaaaacggctgtgcaagcgagtggaccccgggttccttcttagcagcctatctcgcgaccaaaacgcactgcctgagaaacgctctggctcacggggcgcacttggcgagaaggaggatcgaggggaatactccccgggaacagccttgccatctcttagaggctgctatcatgagggccctgcggggggtgggggtggtgggacaccttcctctgtggatacctacccttatgggttaccaaccccacctgagatgtctcctctggacgtgctcgaaccagagcagaccttttttagctcaccatgtcaggaagagcatgggcaccccaggcgaattccacaccttcctggccatccctattctcccgaatacgctcccagccccttacactgttcacaccctctcgggtcgttggccctcggccagagccctggtgtgtccatgatgtctcctgttcctgggtgccccccatccccagcgtattattctcctgcaacgtaccacccccttcattctaatctccaggcacatctcgggcaactctctccaccccctgaacacccagggtttgacgccctggatcagctcagccaggtcgaactccttggggacatggatcggaatgagttcgatcaatatctgaatacccctgggcatccagattctgctactggcgctatggcactgtcaggtcacgtgcccgtctcccaggtgacacctactgggccaacagagacatcgctcatttccgttttggctgacgccaccgcaacttattacaatagctactctgttagctag

SEQ ID NO: 207037 - DNA, 1323 bp, synthetic construct
  misc_feature 1..1323: note = Description of Artificial Sequence: Synthetic coding sequence
  source 1..1323: mol_type = other DNA
atgagcatgctggccgagcggcggcggaagcagaagtgggccgtggacccccagaacacggcttggagcaacgacgactctaaattcggtcagcggatgctggagaagatgggatggtccaagggcaaaggactgggggctcaagaacagggtgccacagaccacatcaaagtccaggtgaaaaataaccatctggggctcggcgccactattaacaatgaggacaattggatagcacaccaggatgattttaaccagctcctggccgaactgaatacctgccacggtcaggagactactgacagctctgacaaaaaggagaaaaaatctttttctctggaagaaaagtcaaagatctccaagaatagggtgcattacatgaaattcactaagggcaagagttggaaggccctcactttgagtcaaaagagaccatacgtggatgaggccgagcggctacgattgcagcatatgcaggattaccccaactacaagtatcgacctcgccgcaagaaacaggccaagagattgtgcaagagagttgatcccggattcttgctgagttctttatcgcgggaccagaacgccctgccagaaaagaggtcaggcagcaggggagccctcggcgaaaaagaggaccggggagaatacagtcctgggacagcactcccaagcctccgtggttgctaccacgaggggccagctggtgggggaggtggcggcaccccctcatccgtggatacatacccttatggcctccccacaccccccgagatgtcgcccttggatgttctggagcccgagcaaacctttttttccagtccctgccaagaagagcatggacaccccagacggatacctcacctccctggccacccttacagtcctgaatacgctccctcgcctttacactgttcccacccgctgggcagtttggcactgggccagtctcctggcgtgtcgatgatgagtccagttccgggctgtccaccaagcccggcctattactctcctgccacgtatcaccctctgcactctaatctccaggcgcatttgggacagctgtctcctcctcccgagcaccctggcttcgacgctctggaccaactctctcaggtggaactgctaggtgacatggatcgcaacgaattcgaccaataccttaacacccccggacaccctgattctgctaccggagctatggctctgtcagggcatgtccctgtttcccaagttaccccaactgggccaactgagacgtccctgatctctgtgctagctgacgctactgctacttactacaacagttattctgtgagttag

SEQ ID NO: 207038 - DNA, 1341 bp, synthetic construct
  misc_feature 1..1341: note = Description of Artificial Sequence: Synthetic coding sequence
  source 1..1341: mol_type = other DNA
atgctggacatgagcgaggcccggagccagcccccctgcagcccctcaggaaccgcgtctagtatgagccacgttgaagacagcgattcagacgccccacctagtcccgcagggtcagagggcttgggccgggcaggagtcgcagtgggcggggcccggggcgaccccgccgaagccgccgatgagaggtttcctgcgtgtattagagatgcggttagccaggtcctcaaagggtatgattggtcactcgtgcccatgcccgtaaggggaggaggaggaggggcactgaaagctaaaccccacgtgaagaggcctatgaatgccttcatggtatgggcccaagccgccaggcgcaagctggcagatcaatatccccatctgcacaatgccgaactgagtaaaacccttggaaagttgtggagactgctttccgaatcagagaaacgcccctttgtggaagaagcagagcgcctgcgtgttcagcataaaaaggaccatccagactacaagtaccagccacgccgaagaaagtctgccaaagccggacacagcgacagcgactcgggggccgaactggggcctcaccccggcggcggcgcagtgtacaaggccgaggctgggttaggggacggccaccaccacggggatcataccggacagactcacggccctcctacacctccgacgaccccaaagaccgagctccagcaggccggggccaaaccggagctcaagctggaaggcaggcgcccggtcgatagtggacggcagaacattgacttcagcaatgtcgatataagtgaattgtccagcgaggtaatgggcaccatggatgcatttgacgtgcacgaatttgaccagtacctccctctaggcggacccgcaccccctgagcctgggcaggcttacggcggagcttatttccatgcgggagctagcccagtttgggctcataaatcggctcctagcgcttccgccagtcccacggaaaccgggccacctcgtccacatattaaaaccgagcagccaagtccgggacactatggtgatcagcccagaggaagtcccgactatggtagctgtagcgggcagagttcagctactcctgccgccccggcagggcccttcgccggttctcagggtgactacggagatcttcaggcaagctcctattacggtgcctatccaggctacgcccccggcttataccagtacccctgttttcactcgccacggagaccatacgcatccccgctattgaatggtctggccttgccaccggctcactctcctaccagtcattgggaccagcctgtgtataccaccctcactagaccctag

SEQ ID NO: 207039 - DNA, 1530 bp, synthetic construct
  misc_feature 1..1530: note = Description of Artificial Sequence: Synthetic coding sequence
  source 1..1530: mol_type = other DNA
atgaacctgctggaccccttcatgaagatgaccgacgagcaggagaagggactctctggcgcaccctccccaaccatgagcgaagactccgcgggaagcccctgccccagcggctcgggttctgacacggagaatacccgacctcaggagaataccttcccaaagggtgagcccgacctgaaaaaagagagtgaagaagataagttcccagtgtgcattagggaggcggttagccaggtgctgaaggggtacgattggacactcgtaccaatgccggtgcgggtgaatgggtcctcgaaaaacaaacctcatgtgaaaaggccgatgaacgccttcatggtatgggcccaggctgcccgccgcaaactggcagatcagtatccacaccttcataatgccgagctgagtaaaactttgggaaaactatggcggcttcttaatgagtctgagaagcggccttttgttgaagaggcagagagactccgagtgcagcataagaaggatcatcccgactacaagtaccagccccggcgccgcaaatccgtgaagaacggccaagccgaggccgaagaggccacagagcaaactcacatatcacccaacgcaatatttaaggccttgcaggccgattctccacacagctcctcaggcatgtctgaggtccactcccccggagaacattctggccagtcacagggcccaccgaccccgccaacaactcctaaaactgatgtgcagcccggcaaggctgatctgaagagagaaggaaggccactgcccgaaggtggcagacagccccctatagactttcgggatgtggacatcggtgaactgtcttccgacgttatcagcaatatagagacttttgacgtgaacgaattcgatcaatatttgcctcccaatggccatcccggagtgcccgcaacccacggacaggtgacctacaccggctcttatggcattagtagcactgcagctacacccgcctcagctggtcacgtctggatgtctaagcaacaagcccctccccctccccctcagcagcccccccaagccccccccgcaccccaggcccccccgcagccacaggccgcacctccccaacaacccgctgcaccgccccagcaacctcaggcccatactctgacgacattgtcttctgaacccggacagtcccaaaggacccacattaaaactgaacagctgtccccatcacattactctgagcagcagcagcacagccctcagcagatcgcttattccccgtttaacctgccacactacagtccttcatatccaccgattacccggtctcagtacgactacacagaccaccagaattcaagtagttattacagtcacgcagctggccagggcactggcctgtatagcacattcacatacatgaaccccgcccagcggccaatgtacacccctattgcggacacttctggcgtgccctcaatccctcagacacacagcccacagcattgggaacagcctgtgtacacccagttgaccaggccatag

SEQ ID NO: 207040 - DNA, 1338 bp, synthetic construct
  misc_feature 1..1338: note = Description of Artificial Sequence: Synthetic coding sequence
  source 1..1338: mol_type = other DNA
atgaacctgctggaccccttcatgaagatgaccgacgagcaggagaagggcctgtcaggtgcacccagtccaactatgtctgaggattccgcaggctccccctgcccctccggatctggttctgatacagagaacacccgcccacaagaaaatacatttcccaaaggtgaacctgatctgaaaaaagaatccgaggaggataaattcccagtgtgtatcagagaagccgtgtctcaagtgcttaaggggtatgactggacacttgtgccaatgccagtgcgcgtgaacggatcctcgaaaaataagccccatgtgaagcggcccatgaacgcttttatggtatgggctcaggctgcccgcaggaaactcgccgaccaatacccacatttacacaacgctgaactaagcaagacactcggaaagctttggcgcttgctgaatgagtcagagaagcgcccatttgtcgaggaggcggagcgtctgcgtgtccagcataagaaagatcatccggattacaagtaccagcctaggcgccggaaatctgttaaaaatgggcaggccgaggccgaggaagccaccgagcagactcacatatccccaaacgctatttttaaggcactgcaggctgatagcccccacagctcctctggtatgagtgaagtgcatagccccggcgaacacagcggccagtctcaggggccacccaccccccccactacacccaagaccgacgtgcaacctggaaaagcggacctcaaaagagaaggtagacctctgccagaaggggggcgccagcctcccattgacttcagagacgttgatattggcgaactttcttctgacgtgatatcaaatatcgagacgtttgatgttaacgaatttgaccaatatctccctccaaatggtcacccaggagttccggcaacccacggacaagtcacatacactggctcctacgggatcagctccaccgccgccaccccagcttcggccgggcacgtgtggatgagcaaacagcaggcccccccccccccaccacagcaacatagtcctcaacagattgcatactcgcctttcaatctcccccactacagcccgagctaccctcccatcactcggagccagtatgattatacggaccatcaaaattcttccagttactactcacacgccgcaggccagggcaccggtctgtactctactttcacctacatgaatcccgctcagcggcccatgtatactccaatagccgacacttcaggcgtcccgtctattcctcaaacccacagtccccaacattgggagcagcctgtgtatacacaattgacaagaccatag

SEQ ID NO: 207041 - DNA, 273 bp, synthetic construct
  misc_feature 1..273: note = Description of Artificial Sequence: Synthetic coding sequence
  source 1..273: mol_type = other DNA
atgcggggctacctggtggccatcttcctgagcgccgtgttcctgtactacgtgctacattgtattctatgggggaccaacgtctactgggtggctccagttgagatgaagcgtcgcaataaaatacagccttgtttgagcaagcccgcgttcgcttccttgctttcacagtcctcagcttacatcctgcggaagggaatcgaggagttgaaccagactagtatcctgtttacccaggtgagctctgtgtctcccttttccgtctgtgggtag

SEQ ID NO: 207042 - DNA, 273 bp, synthetic construct
  misc_feature 1..273: note = Description of Artificial Sequence: Synthetic coding sequence
  source 1..273: mol_type = other DNA
atgcggggctacctggtggccatcttcctgagcgccgtgttcctgtactacgtcctgcactgtatcctctggggtacaaatgtctattgggttgcacctgtagagatgaagaggaggaataagatacagccttgtctgagtaagccagcgttcgcgtccctgctatctcagtcgagtgcctatattctgcgaaaggggatcgaagaactgaaccagacgtccattttgttcacgcaggtgagctcagtctccccattttcggtctgtggctag

SEQ ID NO: 207043 - DNA, 1335 bp, synthetic construct
  misc_feature 1..1335: note = Description of Artificial Sequence: Synthetic coding sequence
  source 1..1335: mol_type = other DNA
atgggcctgctggtgttcgtgcggaacctgctgctggccctgtgcctgtttctggtacttggcttcctctattatagcgcctggaaacttcacctcctgcagtgggaggaagacagctctaagtactcccactccagctctcctcaggagaagcctgtggccgacagtgtggtactgtccttcgatagtgcagggcaaactttaggatccgagtatgacagacttggttttctgctgaatctcgattctaagctgtcaccgcgcactctctgtaccgtagtgttcggccttgactgtatactggaaagccctggcgagcctaaaaagctcttaatgcccgcatcccaccctctcgagatcttgaagagcttaagcgaggatactgctttcgccctgggttttctgaagcttcctagacccgcggaactggccaccaaatatgccaacttctctgaaggggcatgcaagcctggctatgcatccgctctcatgacagccatcttcccccgattctctaaaccggctccaatgtttctagatgacagctttagaaagtgggctcgcattcgcgagttcgttcctccgttcggaataaaaggccaggataatctgatcaaagctatcctcagcgttaccaaggagtatcgcttaacccctgctttggactcactccggtgccgccggtgcatcatcgtgggcaatgggggcgtcttggctaataaatcactggggagtcgtattgacgattatgacatagttgttaggctcaatagcgctcccgtcaaaggattcgagaaggatgtgggcagcaaaacaactcttaggatcacctatcctgagggcgccatgcagcggcccgagcagtacgaacgtgattcgttatttgttctggcgggtttcaaatggcaggacttcaaatggctcaagtacattgtgtacaaggagagagtgagtgcgtctgatggcttttggaaaagtgtggcgactagggtacccaaagagccccccgagatccgcatcctgaacccgtattttattcaagaggctgcttttacgctgatcgggctgccatttaataatggcttgatgggtagagggaacatacccacccttgggtccgttgccgtaactatggcgcttcacggctgcgatgaggtggccgtggcaggcttcgggtatgacatgtcaactcccaacgccccactgcactattatgagacagtgcggatggctgccatcaaagaaagctggactcataacattcagcgcgagaaagaattcctgcgaaaactcgttaaggcccgggtgatcaccgacctgtccagtggtatctag

SEQ ID NO: 207044 - DNA, 468 bp, synthetic construct
  misc_feature 1..468: note = Description of Artificial Sequence: Synthetic coding sequence
  source 1..468: mol_type = other DNA
atgggcctgctggtgttcgtgcggaacctgctgctggccctgtgcctcttcttggtactgggctttctttactactctgcctggaagctccacctcttgcagtgggaagaggactccaactccgtcgtgctctctttcgactcagccggccaaacgctcggctcggagtatgaccggttgggatttcttctgaacctagacagcaaactaccagccgaattggctacaaagtatgctaactttagtgaaggcgcctgtaaacctggctatgctagtgctttgatgacagccatatttccgagattttccaagccagctcccatgttcttggacgactcattcagaaagtgggcaaggattcgcgagttcgtcccacccttcggtatcaagggacaggtcctcgatgctcagtacccagctcgtgagagggtgagcgccgaggctggggaatcttcaagacaccactag

SEQ ID NO: 207045 - DNA, 1035 bp, synthetic construct
  misc_feature 1..1035: note = Description of Artificial Sequence: Synthetic coding sequence
  source 1..1035: mol_type = other DNA
atgggcctgctggtgttcgtgcggaacctgctgctggccctgtgccttttcctcgtcttaggcttcctgtactactccgcttggaagctgcacctgcttcagtgggaggaggactccaacagtgtcgtgttgtctttcgacagcgccggacagactctcggctctgagtacgacaggctgggctttcttcttaacctggactcaaagctgttttccaagcccgctccaatgttccttgacgattcatttaggaaatgggcacgcatccgggaatttgtgccgcccttcggcatcaaaggccaggacaatttaattaaggccatcttatcagtaaccaaggagtatagattgacgcccgctttggacagcctgcgatgtcgcaggtgcattatcgtcggcaatggaggcgtgcttgctaataaatctctgggctcaagaattgatgattatgatatagtcgttagactaaactctgcccctgtcaagggttttgaaaaagacgtaggatctaagaccacattacgcataacgtatcccgagggagccatgcagcgtcccgagcaatatgagagggactcattgtttgtccttgccggcttcaagtggcaggattttaaatggcttaagtatatcgtgtacaaggagcgagttagcgcttcagacggattctggaagagcgttgctactcgcgtgcccaaggaaccacccgagatccggatcctgaatccctatttcatccaggaggctgcttttactctgatagggctgccctttaataacggcctgatgggcagggggaacattcccactctgggttcggtggctgtgaccatggcacttcatggctgtgacgaagtggccgttgccggattcggttacgatatgtctacccctaatgctccactgcactactacgagacagtgcgaatggcagcaatcaaggaaagctggacccacaacatccagcgggaaaaggagttcctgcggaagctagttaaggcccgggtgatcaccgacctgagctccggcatttag

SEQ ID NO: 207046 - DNA, 687 bp, synthetic construct
  misc_feature 1..687: note = Description of Artificial Sequence: Synthetic coding sequence
  source 1..687: mol_type = other DNA
atgggcctgctggtgttcgtgcggaacctgctgctggccctgtgccttttcctggttctgggttttctgtactattcagcatggaaattgcatctgctgcaatgggaggaagacagtaagtacgatcggctgggattcctgttgaatctcgattccaagcttccagctgagctcgcgacgaagtacgctaattttagtgagggggcatgtaagcccggttatgccagcgcactgatgacagccattttcccacgcttcagtaagcctgcccctatgtttctcgatgattccttcagaaagtgggctcgaatccgcgaattcgtccctcctttcgggataaagggccaggataacctaatcaaggccatcctgtcagtgacaaaggagtatcgactgaccccagctctcgatagcttacggtgccggaggtgcattatcgtggggaacggcggagttcttgctaacaagtccctaggcagtcggattgacgattatgacatcgtggtgcgggtgcatcgaatggcctcaggcaatctctggcctttggaatgccccagatctccactcaggttcgaatcttcgacacacattagcagtcgccgtcccccgtctccttctttagcctgcccctcaacaatggcttcatgggctgggggcacgtccctccccttggctgtttggcagtag

SEQ ID NO: 207047 - DNA, 1173 bp, synthetic construct
  misc_feature 1..1173: note = Description of Artificial Sequence: Synthetic coding sequence
  source 1..1173: mol_type = other DNA
atgggcctgctggtgttcgtgcggaacctgctgctggccctgtgcttgttcttagtgcttggattcctgtattactctgcctggaaactgcacttgctgcagtgggaggaggactcctcgaagtactctcactcctcttccccacaggagaaaccagtggctgacagcgttgtactgagctttgatagcgctgggcagacactcgggagcgaatatgatcgccttggcttcctattgaacctggatagcaagctgcccgcagaactcgcaacgaaatacgcaaacttttctgagggtgcatgcaaacccggttacgcgagcgcactgatgaccgccatctttccacggttctccaagccagcccccatgtttcttgatgacagctttcggaaatgggcccgtatcagagaattcgtacctccattcggcattaaggggcaggacaacctcataaaggcaatcctatccgtgaccaaggagtatcgtctgacaccagccctggattccctcaggtgccgacgttgcataatagtgggtaacggaggggttctggcaaacaagagtctgggatcccgaatcgatgattatgacatagtcgtccgattgaacagtgctcctgtgaaaggattcgaaaaagacgtggggtccaagaccacgctgcggattacctacccagaaggggccatgcagagacccgagcagtacgaacgagactccttattcgtcttggccggattcaagtggcaggacttcaagtggctcaaatatattgtctataaagagagggtgagcgcaagcgatggcttttggaagtccgttgctacacgcgtgcctaaggagcccccggagatcaggattctgaacccatacttcattcaagaggcagccttcaccctgatcgggcttcccttcaataatggcctgatgggacggggcaacattccaaccctgggcagcgtcgccgtcactatggccctgcacggctgtgatgaagtcgctgtggctgggttcggatacgatatgtcaacacccaacgcccccctccattattatgagactgtgagaatggcagctatcaaggagtcttggacacacaacatccagagggagaaagaattcctgcggaagctggtgaaagcgagagtcatcacggatctcagtagcgggatatag

SEQ ID NO: 207048 - DNA, 1242 bp, synthetic construct
  misc_feature 1..1242: note = Description of Artificial Sequence: Synthetic coding sequence
  source 1..1242: mol_type = other DNA
atgggcctgctggtgttcgtgcggaacctgctgctggccctgtgcttatttctggtcttgggcttcctgtattattctgcatggaagctacacctgctgcaatgggaagaagactcaaagtatgaccgcctgggctttctcttgaacttggactcaaaactgagcccacgcactctgtgtacagtcgtgtttggcttggattgcattttggagtcaccaggcgagcctaagaagttattgatgccagccagtcaccctctggaaattctgaagtccctctccgaagataccgcctttgccttggggttcctgaagctccccagacctgccgagctagcaacgaagtacgcaaatttttctgagggagcgtgcaaaccaggttacgccagcgcccttatgacagctatcttccctaggttctccaaacccgcccctatgttcctcgatgacagtttcagaaagtgggctagaatcagagagttcgtaccccctttcgggataaagggccaggataatctgattaaggcaatactgagcgtcacgaaagagtataggctgactcctgcactcgatagcctccggtgccggcggtgtatcatagtggggaatggcggcgtgctggccaataaatctctgggctcccggatcgacgactacgatattgtggtcaggttgaactccgcccccgttaagggttttgagaaagatgtggggtctaaaaccaccctgaggattacttaccctgaaggtgccatgcagaggcccgagcagtacgagcgagactcgctgttcgttctagctggctttaaatggcaggactttaagtggctcaagtacattgtttataaagaacgggtgtccgcatctgatggcttctggaaaagtgtggcaacccgcgtgccgaaagagccccccgagattagaatacttaatccttactttatacaggaggcagcctttaccctgatcgggttgcccttcaacaacggtctgatgggtaggggtaacatccccacactcggcagtgttgccgtgaccatggccttacacggctgtgacgaggtggcagttgccggatttggttatgatatgagtactcccaacgctccattgcactattatgaaacagtgagaatggcagccataaaagaatcctggacccataacatacagcgggagaaagaattcttaaggaagttggtcaaggctagagttattaccgacctgagttcgggcatctag

SEQ ID NO: 207049 - DNA, 834 bp, synthetic construct
  misc_feature 1..834: note = Description of Artificial Sequence: Synthetic coding sequence
  source 1..834: mol_type = other DNA
atgggcctgctggtgttcgtgcggaacctgctgctggccctgtgccttttccttgtgctgggatttctgtactattcggcgtggaagcttcatctgctgcagtgggaagaggatagcaactcggtagtcttgagttttgatagcgctggccagaccctaggaagtgaatacgacaggctgggatttctgttaaacctagactctaagttgcctgctgagcttgctacgaagtatgctaattttagcgagggggcttgcaagccaggctatgcctccgcacttatgacagctatctttccaagattcagtaaaccagcacctatgttcctggacgacagcttcaggaagtgggccaggatccgtgaattcgtccctcctttcggcatcaaggggcaggacaatctgatcaaagccatactctctgtgacgaaagagtatcggctaaccccggctctggactctctccgctgcagaaggtgtatcattgttggtaacggaggagtactcgcaaacaaaagccttggcagtcgtatcgatgattacgatattgtcgtgcgccttaatagcgccccagtcaagggattcgagaaagacgtaggctcaaagactacactgaggattacctaccccgagggagcaatgcagcgacctgagcaatatgagcgggacagtttgtttgtgttagctggatttaaatggcaagatttcaagtggctaaagtacattgtttataaagagagggtgtcctggacccacaatatccagcgcgaaaaagaattcctcaggaagttagttaaggctcgagtgatcacagacttgagcagcgggatctag

SEQ ID NO: 207050 - DNA, 1128 bp, synthetic construct
  misc_feature 1..1128: note = Description of Artificial Sequence: Synthetic coding sequence
  source 1..1128: mol_type = other DNA
atgggcctgctggtgttcgtgcggaacctgctgctggccctgtgcctgtttctggtcctcggctttttgtactatagcgcatggaagctgcacttgctgcagtgggaagaggacagcaactcggtggtgttatcttttgattcagctggtcagacgctgggcagcgaatacgacaggctcggctttctgctgaatctggattctaaattacctgctgagctcgctaccaagtacgctaacttcagcgaaggagcatgcaaaccaggctacgccagcgcccttatgactgcaatcttcccgaggttctcaaaacctgctcctatgttcctggacgactccttccgtaagtgggccaggatccgagagttcgtccctccctttggcataaaaggacaagataatctgataaaggcgattcttagcgtgacgaaagagtacagactgacacctgcccttgacagtttgcgctgtcgtcgctgcataatcgtgggaaacgggggggtgcttgcgaacaaaagcctgggtagccgcatcgacgactatgatatcgttgtccggctgaacagcgcccctgtgaagggtttcgagaaggacgtcgggtcaaaaaccacactccggataacctatcccgaaggagccatgcagcggcccgaacagtacgaacgggactcactctttgtgctggctggatttaagtggcaagacttcaagtggctgaaatacattgtttataaagaacgagtctcggcctccgatgggttttggaaatctgtggcaacaagggttcctaaagaaccaccagagatacgcatcctaaacccgtactttatccaggaggctgcttttacgctcatcggcctgccatttaacaacggattaatgggccgcgggaatatcccgactctcggatctgttgcagtcacaatggcactacacggatgtgatgaagtggctgtggccggattcgggtacgacatgtctacacctaacgccccactgcactactacgagaccgtgcggatggcagcaatcaaagagtcatggacccacaacatccaacgtgaaaaagaatttcttcggaaactcgttaaagcacgggtcattaccgacctttctagcgggatatag

SEQ ID NO: 207051 - DNA, 1080 bp, synthetic construct
  misc_feature 1..1080: note = Description of Artificial Sequence: Synthetic coding sequence
  source 1..1080: mol_type = other DNA
atgggcctgctggtgttcgtgcggaacctgctgctggccctgtgcctgttcctggtgttgggatttctctactatagtgcctggaagctacatctgctccagtgggaagaagattctaaatatgacagattgggcttcctgctgaacttggattcaaaattgccagcagagctcgctacgaagtatgcaaatttttcggagggcgcctgtaagcctggatacgctagtgcccttatgactgcaatattcccgagattctccaagccagctccaatgttcctcgatgatagttttcgaaagtgggcgagaatccgggagtttgtaccaccgttcgggatcaagggacaagacaacctcatcaaggcaatcctgtctgtgactaaagagtatcgattgacaccagcgctggattcgctgcgatgcagacggtgcataatcgtgggtaacgggggagtcttggcgaacaagtcattgggatcaaggatcgatgattatgacatcgtggtccggctaaatagtgctcccgtcaagggcttcgagaaggacgtgggaagcaaaacaacacttcggatcacataccccgagggagcaatgcagagacccgaacagtacgagcgcgacagcctctttgtgctggctgggtttaagtggcaagatttcaagtggcttaagtatattgtctataaggaacgtgtttctgccagcgacggcttttggaaatctgttgccaccagggttcctaaagaaccgccggaaatcagaatcctgaatccatattttatccaggaagccgcattcactcttatcgggctcccatttaacaatggtctgatggggcgtggcaacataccgacactgggatctgtggctgtaacgatggcgctacacgggtgcgatgaagtggctgttgccgggtttgggtatgatatgtctacaccgaatgcccccctgcactattacgagacggttaggatggcggctattaaggaatcttggacccacaacatacaaagagagaaagagtttctgaggaaactggtgaaggcccgcgttatcacggacctctcaagtgggatttag

SEQ ID NO: 207052 - DNA, 1335 bp, synthetic construct
  misc_feature 1..1335: note = Description of Artificial Sequence: Synthetic coding sequence
  source 1..1335: mol_type = other DNA
atgggcctgctggtgttcgtgcggaacctgctgctggccctgtgcctgtttctggtcctcggtttcctgtactattcagcatggaagcttcacctcctacagtgggaggaggattccagtaagtactctcattcttcttcaccacaggaaaaaccggtggccgacagcgtggtcctgtcattcgactcagctggccagacgctgggttctgagtatgaccggctcggtttcctgctgaacttagattccaagctctccccaaggacactgtgtacagtggtctttgggctggattgtattttggagtctcctggtgaaccaaaaaagctgctgatgccagcatcacacccgctcgagattcttaaaagcctcagtgaagatacggcatttgccctgggctttctgaagcttcccagacctgccgaactggctactaaatatgcgaatttctcagaaggtgcatgtaaacccgggtatgcctccgccctcatgactgccatctttcccaggttctccaaaccagcccctatgtttctagatgattcctttcggaagtgggcgcggattagagaattcgtgcccccattcggaatcaaaggccaggataatctaattaaggccatactttctgttacaaaagagtatagactcactccggccctggacagtcttagatgccgccggtgtattatagttggcaatggcggcgttctcgccaacaaaagcttaggaagtagaattgacgactatgacattgtggtgcgtctgaactctgccccggttaagggcttcgaaaaggacgtcggatcaaaaacaactctgaggattacctaccccgaaggcgccatgcagagacctgagcagtacgagcgtgacagcctgtttgtcctcgccggatttaagtggcaagattttaagtggctgaagtatatcgtgtacaaagaacgtgtgagcgccagcgacggcttctggaaatcagtggccacccgcgtgcccaaggaacccccggagatccgaatcctgaatccctattttatacaggaagcagccttcaccctgataggtcttccttttaacaatgggctgatgggcagggggaacatccccacattgggttcggtcgccgtgactatggccctccacggctgtgacgaggttgctgtcgcaggattcggctatgatatgagcacacctaatgctccattacactactacgaaacagttcgcatggctgccattaaggagtcttggacccataatattcagagagagaaagaattcttgagaaaactcgtcaaggcccgcgtgattacagatctgtccagcgggatctag

SEQ ID NO: 207053 - DNA, 513 bp, synthetic construct
  misc_feature 1..513: note = Description of Artificial Sequence: Synthetic coding sequence
  source 1..513: mol_type = other DNA
atgggcctgctggtgttcgtgcggaacctgctgctggccctgtgcctgttcctcgtgctgggatttctgtactactcagcctggaagctccacctcttgcagtgggaggaggacagcagtaaatattcccactcatctagcccccaggaaaaaccggtagctgatagcgtggttctcagcttcgattccgccggccagacgctgggaagcgagtacgatcgcctggggttcctcctcaatctggattcaaaactaccggccgaactcgccacaaaatatgcaaacttcagcgaaggggcatgcaagcctggttacgcctcagccctgatgacagctatcttcccccggttcagtaagccagcccccatgtttctcgatgacagcttcaggaagtgggcaaggatcagagaattcgtacccccgtttggaatcaaaggacaggtgcttgacgcccagtaccctgcccgagaacgcgtctctgccgaagccggcgagtcgtcacgccaccactag

SEQ ID NO: 207054 - DNA, 468 bp, synthetic construct
  misc_feature 1..468: note = Description of Artificial Sequence: Synthetic coding sequence
  source 1..468: mol_type = other DNA
atgggcctgctggtgttcgtgcggaacctgctgctggccctgtgcctttttctggtactcggatttctgtattattctgcttggaagctccacttgcttcagtgggaagaagacagcaattccgtagttttgtccttcgatagtgcaggtcaaaccctgggctccgagtacgatcgactaggcttcctcttaaacctcgactctaagttacccgctgagctggctacaaaatacgcaaacttctctgaaggagcatgtaagccagggtatgcctccgctttaatgactgctatctttcccaggttctccaagcctgcgccaatgtttctagacgattcgtttaggaaatgggcacgaattcgcgagttcgtccctccatttggcattaagggccaggttctcgacgcccagtacccagcgcgagaacgagtgtccgccgaggccggcgagagctcaagacaccattag

SEQ ID NO: 207055 - DNA, 561 bp, synthetic construct
  misc_feature 1..561: note = Description of Artificial Sequence: Synthetic coding sequence
  source 1..561: mol_type = other DNA
atgggcctgctggtgttcgtgcggaacctgctgctggccctgtgccttttcctggtgttgggcttcctttattatagcgcttggaaactgcacttactgcagtgggaagaggacagcaactctgttgttctctccttcgacagtgccggccaaactttgggcagcgaatacgatcggctgggattcctccttaatctcgattctaaacttccggctgaattggcgaccaagtacgccaatttctctgagggcgcctgtaaacctggctacgcctctgctttaatgaccgcgatcttccctcgctttagcaagcctgcccctatgttcttggatgactcttttaggaagtgggcccgcattcgggagttcgtccctccctttggcattaaaggacaggacaatctcattaaggcaattctttccgtcaccaaggagtataggctcacaccagcgcttgacagccttcgttgccgcagatgcatcatcgtggggaacggaggagttctggccaacaagtcattgggcagcaggatcgacgactatgacatcgtggtgagatag

SEQ ID NO: 207056 - DNA, 558 bp, synthetic construct
  misc_feature 1..558: note = Description of Artificial Sequence: Synthetic coding sequence
  source 1..558: mol_type = other DNA
atgggcctgctggtgttcgtgcggaacctgctgctggccctgtgcctgttcctagtgcttggtttcttatactacagcgcttggaagctgcatctacttcaatgggaagaagacagcagtaagtatagtcactcttcctcgccacaggagaagcccgtagctgaatacgatcgtctcggctttctcctcaatttagattctaagctgcccgccgaactagccacgaagtatgccaatttcagtgagggagcatgtaagcccggttacgcttcggctctcatgacagctattttcccccgcttctctaagccagcccctatgttcctggatgattctttccgcaaatgggctcgcatccgagagttcgtgccaccattcggcatcaagggccaagacaacttaatcaaagccatcctcagcgtgacaaaggagtacaggctgaccccggctctggattctctgcgttgccgtaggtgtattattgtgggcaatgggggcgtgttggccaataaatctctggggtcaaggattgacgactatgatatcgtcgtaagatag

SEQ ID NO: 207057 - DNA, 606 bp, synthetic construct
  misc_feature 1..606: note = Description of Artificial Sequence: Synthetic coding sequence
  source 1..606: mol_type = other DNA
atgggcctgctggtgttcgtgcggaacctgctgctggccctgtgcctgttcctagtcctgggattcctgtattactccgcctggaaattgcatctcctgcagtgggaagaagatagcagtaaatattctcactcgagcagcccgcaagagaagcctgtggcggagtatgaccggcttggtttcttgcttaatcttgacagcaagttaccggcagaactggctacaaaatacgctaatttcagcgaaggagcttgcaaacctggttacgcctcagctttaatgaccgctatttttcctcgcttcagcaaacccgcccctatgtttctggacgactctttcagaaagtgggctcgcatcagggaattcgtccccccttttggaatcaaggggcaggacaacctgatcaaagcaatcttgagcgtgactaaggagtatagattgacacccgcacttgactctctgcgctgtcggcgctgcattattgtcggaaacggcggggtattggctaataaatccctgggatctcgcatcgatgattacgatatagtggtttcaccgggacgcactatatccagtgagagaaagtccttttgtgggagttggtag

SEQ ID NO: 207058 - DNA, 1290 bp, synthetic construct
  misc_feature 1..1290: note = Description of Artificial Sequence: Synthetic coding sequence
  source 1..1290: mol_type = other DNA
atgggcctgctggtgttcgtgcggaacctgctgctggccctgtgcctgtttttggtgctgggctttctatattattctgcctggaagctccatctgctgcagtgggaggaggactcaaactctgtggtgcttagtttcgactctgcaggacagacccttggctcagaatacgaccggctgggatttctgttgaacttggatagtaagctctccccacgcaccctgtgcaccgtagtgttcggcctcgactgtatactggaatcacccggggagccaaaaaagctgcttatgccagcatctcaccctctggagatcctgaaatcactgagcgaggatactgcgtttgccttgggatttctgaagcttcctcgccccgccgagctcgctacaaaatatgcaaatttttctgagggggcttgtaagcctgggtacgcaagtgcactgatgaccgctatattcccacgattttcaaagcctgccccaatgttcctggacgactcatttaggaaatgggcacgaattcgggagtttgtaccaccttttggaatcaaggggcaggataatttgataaaggccatattgagcgtgaccaaagaatataggctgacccccgcgcttgactcactcaggtgtaggagatgcattattgtggggaacgggggagtgctggctaacaagtccttaggttcaaggatagacgattatgacatcgttgttcggctgaactctgctcccgtcaagggctttgaaaaagacgtcggatccaagactactctgaggataacttatcccgaaggcgccatgcagaggcccgagcagtacgagcgtgacagcttgttcgtgctggctgggtttaagtggcaggattttaagtggttgaagtacattgtgtataaagagcgggtgtcagcttccgacggtttttggaaaagtgtggctactcgagtgcccaaggagcctccagagatacgtattctgaacccttactttatccaggaggcagctttcacactgataggactgccgttcaacaacgggctaatgggaagaggcaatatcccaacgttgggaagcgtggcagtcaccatggcccttcatggatgtgatgaggtggccgtcgctggtttcggctacgacatgtccactcctaatgctcctctacattattacgagacggtcagaatggccgctattaaagagtcatggactcataatattcagcgtgaaaaagaattcctgcgcaaactcgtgaaggcaagagttataaccgacctctcaagcggcatttag

SEQ ID NO: 207059 - DNA, 1038 bp, synthetic construct
  misc_feature 1..1038: note = Description of Artificial Sequence: Synthetic coding sequence
  source 1..1038: mol_type = other DNA
atgggcctgctggtgttcgtgcggaacctgctgctggccctgtgcctgtttttggtgttgggattcctttactactccgcctggaaacttcacctgctccaatgggaggaggactccaactcggtcgtcttgtcgtttgattctgccggtcagactcttggttcggagtacgacagattaggcttcctcctcaatctcgactccaaactgccagcagaactggccactaagtatgctaacttcagtgaaggcgcctgcaaaccagggtacgcttccgccctgatgacagcaatattcccccgtttttcgaaaccagctcccatgttcctggacgattcctttcgtaaatgggcccgtattcgggagttcgtgcctccttttggaattaaggggcaggacaacctgataaaagccatcctgtccgtgactaaggagtaccgcctcactcccgcgctggacagccttagatgtcggaggtgcatcattgtgggtaatggcggagtcttggccaataagtcactaggcagcagaatcgatgactacgatattgttgtaaggcttaattccgccccagtaaaaggctttgaaaaggatgtgggcagcaagaccactttacgcattacgtatccggagggagccatgcagaggcctgagcagtacgaacgggacagtctctttgtgctagcaggtttcaagtggcaggattttaaatggctcaaatacattgtgtacaaagaacgcgtggaggcagcctttaccttaatcggcctacccttcaacaatgggcttatgggtagagggaacattcctactctgggctccgtagccgtaacaatggctctgcatgggtgtgatgaggtggctgttgctggatttgggtacgacatgtccacacctaatgctcctcttcactactacgaaactgtcagaatggccgccataaaggaatcctggacccacaatatccagcgggaaaaagaatttttgaggaaacttgtgaaggctcgtgtcatcaccgatctatcgtctggaatttag

SEQ ID NO: 207060 - DNA, 1242 bp, synthetic construct
  misc_feature 1..1242: note = Description of Artificial Sequence: Synthetic coding sequence
  source 1..1242: mol_type = other DNA
atgggcctgctggtgttcgtgcggaacctgctgctggccctgtgcctctttttggtgctgggtttcctgtattactctgcgtggaagctccacttgctgcagtgggaggaggattcgaaatacgaccgtttaggcttcctgctgaatctggacagcaagctttcccccagaacactgtgtacagtcgtgtttgggctcgactgcatactcgaatcccccggcgagcccaagaaactgttaatgcccgctagtcaccctctggagatcctcaagtccctgagcgaagacaccgctttcgcgctcgggttcttaaaactgccccgaccagctgagctggctaccaagtacgctaacttcagcgaaggtgcctgcaaaccagggtatgcctctgccttaatgacagctatcttcccccgcttctctaaacccgcaccaatgttcttggatgacagcttccggaagtgggcccggatacgcgagttcgtccccccttttgggataaaggggcaggacaacctgatcaaggcaattctcagtgtaactaaggaatatcgtctgacgcccgcactggacagtctccgatgcaggcggtgtattattgtgggtaacggcggcgtgctagccaataagtccctggggtcaaggattgacgattacgacatcgtagtgcgactgaacagcgcccccgtcaaggggtttgagaaggacgtaggttcaaaaaccactctccgcatcacttaccctgagggggccatgcagagacccgagcagtacgagagggatagcctgttcgtattagctggattcaagtggcaggattttaaatggctgaagtacatagtttacaaggagagagtcagtgcgagtgatggcttttggaaaagtgtagctacccgtgtacctaaggaaccacccgagatcagaatactgaacccttactttatccaggaggccgcgttcacattgattgggcttcccttcaacaatgggcttatggggagaggaaacattccgaccctggggtctgtggccgtcacaatggccctgcacggctgtgatgaggtggcggtggcagggttcgggtatgacatgtccacgccaaacgcccctttacattactacgagactgtacgaatggccgctatcaaggagtcttggacccacaacatccaacgcgagaaggaattcctgcgcaagttggtgaaggcccgagtcatcacagatttatcttccggaatatag

SEQ ID NO: 207061 - DNA, 1035 bp, synthetic construct
  misc_feature 1..1035: note = Description of Artificial Sequence: Synthetic coding sequence
  source 1..1035: mol_type = other DNA
atgggcctgctggtgttcgtgcggaacctgctgctggccctgtgcttgttcctggtacttgggttcctgtactatagtgcctggaaattgcatctgttacagtgggaggaggattctaattccgtcgttctgagtttcgacagtgctggccagacactggggagcgaatacgaccggttgggttttttgctgaacctggattctaaattattctcaaagcccgctccaatgttcctggatgatagcttcaggaaatgggcgcgcattcgggagttcgtgccgccctttggcattaaaggccaggataatctcattaaggccatcctgagcgtgaccaaagagtaccggctgacccctgcccttgactctctaagatgcagaaggtgtatcattgtgggcaacggcggggtcttggccaacaaaagtctgggctcccggatcgacgactatgacattgtcgttcgactgaacagcgctcccgttaaaggattcgaaaaagatgtcggttctaagacgacactgcggatcacctatcctgaaggcgccatgcaaagaccagagcagtatgaacgtgactcactgtttgtgctggccggcttcaagtggcaggacttcaagtggctgaagtacatcgtatataaggaaagggttagcgcatctgatggcttctggaaaagcgtcgccaccagggttccaaaagaaccgccagagatccggattctgaatccttatttcattcaggaagccgcgttcaccctgattggcctccccttcaataacggactgatgggacgcggaaacatcccaacacttggatcagtggctgtgaccatggccctgcacggatgcgacgaggtagctgtcgctggttttgggtacgacatgtcgacacctaatgccccactgcactactatgagactgttagaatggccgctatcaaggagtcctggacacacaacatccagagggagaaagagttcttgagaaagctcgtgaaagcacgggtcatcaccgacttgtcctcaggtatctag

SEQ ID NO: 207062 - DNA, 1290 bp, synthetic construct
  misc_feature 1..1290: note = Description of Artificial Sequence: Synthetic coding sequence
  source 1..1290: mol_type = other DNA
atgggcctgctggtgttcgtgcggaacctgctgctggccctgtgcctcttcctggtcctgggctttctttattacagcgcatggaaattacatctgcttcaatgggaggaagacagcaattctgtcgtactttctttcgactctgcaggacagactctcgggtcagagtatgacagactgggctttctgctgaacctcgattctaaactgagccccaggaccctgtgcactgtggtctttggactcgattgcattcttgagtcgcctggtgagcccaagaagctgctcatgccagcctcccacccgctggaaattctgaaatccctgtccgaggacacagcattcgctctgggcttcctgaagcttccgcgccccgcagagctggctaccaaatacgccaactttagcgagggggcctgcaaacctggatacgcctccgccctgatgacagcaatattcccccggttctcaaagcccgcccccatgtttttggacgactcatttaggaagtgggcaagaattcgggagttcgtgcccccctttggtattaaaggtcaggataacttgattaaagctatcctcagtgtgactaaggagtacagactcaccccagctttagactctcttaggtgtcgccgatgcataatcgtaggcaatggaggcgtgcttgccaataagtcccttggatccaggatagatgactatgacatagttgtgcggcttaattcagcacccgtcaagggcttcgagaaagacgttggttcaaagactactctgcgcattacgtatcccgagggagccatgcagcgccctgaacagtacgaaagagattctttatttgtgttagcaggatttaaatggcaggacttcaagtggcttaaatatattgtctacaaagagcgcgtgagcgcatctgacggcttttggaaaagcgtcgccacgcgtgttccaaaagagcccccagagatccggatcctcaacccctactttatccaggaagcggcatttaccctgatcggcctgcccttcaacaacggcctcatgggacgggggaacatccctacgctggggtccgtggccgtgacgatggcgctgcacggctgcgacgaggttgccgtagcgggcttcggatatgacatgagcacgcccaatgcccctctgcattattacgagaccgttcgtatggcagctatcaaggaatcctggacgcataatattcagcgggagaaagaatttcttagaaagctcgtcaaagccagagtgatcactgatctgtccagcggaatctag

SEQ ID NO: 207063 - DNA, 456 bp, synthetic construct
  misc_feature 1..456: note = Description of Artificial Sequence: Synthetic coding sequence
  source 1..456: mol_type = other DNA
atgggcctgctggtgttcgtgcggaacctgctgctggccctgtgcctgttcctagtgctcggcttcctgtattacagcgcgtggaaacttcatctgctgcagtgggaggaggactccaactccgtagtgcttagctttgattccgcgggacagacactgggctctgaatacgaccgcctagggtttctgctgaacctcgacagcaaattacctgccgaactggccacaaagtacgctaatttctccgaaggagcatgtaagccaggatatgccagtgcacttatgacagccatttttcctcgatttagtaagcctgcaccgatgtttctggatgacagcttcaggaaatgggccagaataagggaattcgtgccccctttcggaattaaggggcaggagtgcatcggttggctgctggagatttgcggccacagttccgcccaaggcgcaccatag

SEQ ID NO: 207064 - DNA, 561 bp, synthetic construct
  misc_feature 1..561: note = Description of Artificial Sequence: Synthetic coding sequence
  source 1..561: mol_type = other DNA
atgggcctgctggtgttcgtgcggaacctgctgctggccctgtgcctttttttggtgttggggttcctatactacagtgcttggaaactgcacctgttacaatgggaggaagactcaaaatacgacaggctgggcttcctgctcaatcttgactctaagctccctgccgagctcgcaactaaatacgccaattttagtgaaggagcctgcaaacccggatatgcctcggctctcatgactgccattttccctaggttctctaaaccagcgcctatgtttcttgatgacagcttcaggaagtgggcccggatccgggaatttgtacctcccttcggtatcaaaggccaggataatctgatcaaggcaatactatccgtgacaaaagaataccggctcacccctgctttggactctctccgatgtcgaaggtgcattatcgtcgggaacgggggggtcctagcgaacaaatccctggggtcgaggatagacgattatgacattgtagtctctccaggtcgcaccatcagcagcgaacgtaaaagtttttgcggttcttggtag

SEQ ID NO: 207065 - DNA, 420 bp, synthetic construct
  misc_feature 1..420: note = Description of Artificial Sequence: Synthetic coding sequence
  source 1..420: mol_type = other DNA
atgggcctgctggtgttcgtgcggaacctgctgctggccctgtgcctgttcctcgtgcttggcttcttatattactctgcttggaaactgcacctcctccagtgggaagaagattcaaagtatgataggctcggatttctgcttaacctggacagtaaactgccagccgagctggccacaaaatacgctaactttagcgagggtgcttgtaagcccggttatgcttcggcactcatgaccgcgatatttcctcgattctctaagcccgcccccatgttcctcgatgacagtttcaggaaatgggcgagaattcgtgaatttgtgcccccctttggtatcaaaggccaagtcctggacgctcagtaccccgctagagaaagggtgtccgctgaagcgggagaaagttcgagacaccactag

SEQ ID NO: 207066 - DNA, 306 bp, synthetic construct
  misc_feature 1..306: note = Description of Artificial Sequence: Synthetic coding sequence
  source 1..306: mol_type = other DNA
atgggcctgctggtgttcgtgcggaacctgctgctggccctgtgcttgttcctggtgctgggcttcctgtactattcagcgtggaagctgcacctcctgcagtgggaggaggatagcaaatatgaccgtctaggcttcttgttaaatctcgatagtaaactaccagccgaactggccaccaagtatgccaatttctctgaaggagcttgtaagcctggttatgcctctgcattgatgaccgcgatcttccctcggcctgggcgcaccatttctagcgaaaggaaatccttctgcggaagctggtag

SEQ ID NO: 207067 - DNA, 786 bp, synthetic construct
  misc_feature 1..786: note = Description of Artificial Sequence: Synthetic coding sequence
  source 1..786: mol_type = other DNA
atgggcctgctggtgttcgtgcggaacctgctgctggccctgtgcctctttctggtcctgggcttcctatattactctgcgtggaaactccatttgcttcagtgggaggaggatagtaaatacgatcgcttgggcttcctgctaaatctcgactcaaaattgcccgccgaactggctacaaaatatgccaatttttcagaaggggcctgcaaacctgggtacgcaagcgctctgatgaccgccatcttcccccgattcagtaagccggcccccatgtttctggatgattccttccggaaatgggcccgcatacgggagttcgttcccccgtttgggattaagggccaagataatttgattaaagctatcctatcagtcactaaagaataccgcttgacacctgctctggacagcttgcgatgtagacgatgtatcatcgtgggtaacggtggagtcctggccaacaagtcactaggatctagaatcgatgactatgacattgtggtgcgcctgaatagtgcaccagttaaaggattcgagaaggacgtgggaagcaaaacaaccctccgcataacttacccagagggagcaatgcagcgccctgagcagtatgagagagatagtcttttcgtactggccggatttaaatggcaggacttcaagtggctgaagtacatagtgtataaagaacgtgtctcatggacccacaatattcagcgggagaaagaatttcttcgaaagttggtgaaggcacgggtcattactgacctgtcttcaggcatttag

SEQ ID NO: 207068 - DNA, 834 bp, synthetic construct
  misc_feature 1..834: note = Description of Artificial Sequence: Synthetic coding sequence
  source 1..834: mol_type = other DNA
atgggcctgctggtgttcgtgcggaacctgctgctggccctgtgcctctttctcgttcttggctttttgtattactcagcctggaagctccatttgctgcagtgggaggaagattcaaactctgtagtattgtcgtttgatagcgccgggcagacattgggctctgaatatgacaggcttggcttcctcttaaatctggacagtaaactgcccgccgagttagctaccaagtatgccaattttagcgagggggcgtgtaagcctgggtatgcgtcggctttaatgactgctattttcccccgcttctccaaaccagcgccaatgttcctcgacgattcgttccgcaaatgggccaggattcgcgagttcgtgccgccgtttggcattaagggtcaggacaatctaatcaaagcaattctctccgttaccaaggaataccggctgacccctgctctggattccctgcggtgtcgaaggtgcattatagtggggaacggaggtgttctagccaataaatcgctgggctcccgcatcgacgactacgacatcgtagtgagactaaattcagccccggtgaagggctttgagaaagatgttggatctaagacaacgctgcgcattacttaccctgagggcgcgatgcaaagacccgaacagtatgaaagggactcactgttcgtccttgccggcttcaagtggcaggacttcaagtggctgaagtatattgtctataaggaaagggtgtcgtggacccacaacattcagcgagagaaagagttcctgcgaaaattggtcaaggcccgggtgatcactgacttgtcttctggaatctag

SEQ ID NO: 207069 - DNA, 513 bp, synthetic construct
  misc_feature 1..513: note = Description of Artificial Sequence: Synthetic coding sequence
  source 1..513: mol_type = other DNA
atgggcctgctggtgttcgtgcggaacctgctgctggccctgtgcctattcctggtgcttggctttctgtattattccgcttggaaattgcatctgttgcagtgggaggaagattcctcaaagtacagtcactccagcagcccccaggaaaaacccgtggccgactctgtggtgctgtctttcgattccgctggccaaaccctggggtccgagtatgaccggctcggtttcctgctgaacctggactccaagctccccgcggagcttgctaccaaatatgcaaactttagtgagggagcgtgtaagccgggttacgcaagcgccttaatgacggctatttttccaaggttcagtaaacccgccccaatgtttctcgacgacagcttccggaagtgggctagaattcgggagtttgttccaccctttggaataaaagggcaggtgctggatgctcaatatcccgcaagagaaagggtgagtgccgaggctggagaatcttctcgccaccattag

SEQ ID NO: 207070 - DNA, 642 bp, synthetic construct
  misc_feature 1..642: note = Description of Artificial Sequence: Synthetic coding sequence
  source 1..642: mol_type = other DNA
atgcggaccagcgccgagtacttccggctggccctgagcaagctgcagagctgcgacctgttcgacgaattcgacaagatgaacaatggcccagtgctggggcatgaagaggaggtgggaaggaggactacttttaggcttttttatcctgagtcagtcttctcagaccctatccacaatgatcctaacacaacggtgattctgactgcattcaaaccacatgatctgagatggctgttggagcttcttatgggtgacaaaattaataccaatggtttctggaaaaaaccagctctgaacttaatttacaaaccttaccagattaggattctcgacccctttattattaggaccgccgcctatgaactgctccactttcccaaggtctttccaaaaaaccagaagcccaagcaccctaccacaggtataattgctattactttggccttctatatttgccacgaagttcaccttgcaggcttcaagtacaatttttccgatctgaaaagtcccctccattattatggtaacgccactatgtccctcatgaataagaatgcttatcataacgttactgcggagcaacttttcttaaaagacatcattgaaaaaaatttagtaatcaatctcacccaggattag

SEQ ID NO: 207071 - DNA, 996 bp, synthetic construct
  misc_feature 1..996: note = Description of Artificial Sequence: Synthetic coding sequence
  source 1..996: mol_type = other DNA
atgcggggctacctggtggccatcttcctgagcgccgtgttcctgtactacgtattacattgcatactttgggggacaaatgtgtattgggtggcaccagtggagatgaagaggaggaacaaaatccaaccttgtctgtcaaagccagctttcgcttcattactcaggtttcaccaattccatccttttctttgcgccgccgattttcgtaagatagcctctctgtacggtagcgataagtttgatttaccttatggaatgcgcacttctgccgaatatttccgtttagccttatccaaacttcagtcctgtgacttatttgacgaattcgacaatatcccctgcaaaaaatgcgtcgtcgtcgggaacggcggagttctgaagaacaaaacattgggagagaagatagattcatacgacgtgattattagaatgaacaacggccccgtgctgggccatgaggaagaagtcggccggagaactacttttaggcttttctacccggagagtgtgtttagcgatcccattcacaacgacccaaatacaacagtgatactcaccgcttttaagccacatgacctgcgctggctgctggaactgttaatgggggataaaatcaacaccaatgggttctggaagaagcccgccttgaatctgatctataagccttatcaaatacggatcttagatccattcattattcgcaccgctgcctacgagctgctgcatttccccaaggtgtttcctaagaaccagaaaccaaagcacccaacgacggggattatcgccattacgctggccttttacatttgtcacgaagtccatctggctggctttaagtacaattttagcgatttaaaaagccctttacattactatggcaacgccactatgtcactgatgaacaaaaacgcctaccacaacgttacggcagagcagctgtttctcaaagatatcattgagaaaaatctcgtgatcaacctgacacaagattag

SEQ ID NO: 207072 - DNA, 996 bp, synthetic construct
  misc_feature 1..996: note = Description of Artificial Sequence: Synthetic coding sequence
  source 1..996: mol_type = other DNA
atgcggggctacctggtggccatcttcctgagcgccgtgttcctgtattacgtgttgcactgtattctctggggcaccaacgtttattgggtggcacccgtggagatgaagcgacggaataaaattcagccctgcctgagcaagcccgccttcgcttccctcctcagattccatcaattccaccccttcctgtgtgcggccgattttcgcaaaatagcatctctgtatggcagtgacaagtttgacctcccttacgggatgagaacctctgccgagtacttcaggctggccctgtctaaactgcagagttgtgatcttttcgatgagttcgacaatattccctgcaagaaatgcgtggtggtgggcaatggcggagtgctgaagaacaaaaccctgggcgaaaaaatcgactcctatgatgtgattatccgaatgaacaatgggcccgtgctgggtcatgaagaggaagtgggcagaaggactaccttcaggcttttttatccagagtccgtcttctccgatcccatccacaacgaccccaataccaccgtaattcttacagcgttcaaaccccatgatttaagatggctccttgaactgctaatgggcgataagattaacactaatggtttttggaagaaacccgcactcaatcttatctataagccatatcagatccgaattctcgatccctttattatcagaaccgccgcatatgagcttctgcactttcctaaagtgttccccaagaatcagaagccaaaacatcctactaccggtataattgcaatcacactggcattttacatatgccacgaggtgcaccttgcaggttttaaatacaactttagcgacctgaagtcccccctgcactattacggtaacgctacaatgagcctgatgaacaaaaatgcctaccacaacgtcaccgctgaacagttatttcttaaggacatcatcgaaaaaaatctcgtaatcaatctgacccaggactag

SEQ ID NO: 207073 - DNA, 696 bp, synthetic construct
  misc_feature 1..696: note = Description of Artificial Sequence: Synthetic coding sequence
  source 1..696: mol_type = other DNA
atgcggggctacctggtggccatcttcctgagcgccgtgttcctgtattatgtgttgcactgcattctctgggggaccaacgtctactgggttgctccagttgagatgaaaaggagaaacaaaattcagccctgtctgtcgaagcccgcttttgcaagtctgcttcgattccaccagtttcaccccttcctctgtgctgccgattttagaaaaatcgctagtctatacgggtcggacaagttcgacctgccgtatgggatgcggaccagtgccgaatacttcagactggctctgtctaagctgcagagctgcgacttattcgacgaattcgataatattccttgtaaaaaatgcgttgtcgttgggaatggcggggtcctgaaaaataaaactcttggggaaaagatcgattcttatgatgtgattattagaatgaacaacggtccggtactgggacacgaagaggaggtgggcagaaggactacgttcaggcttttctacccagagagtgtttttagtgacccgatccacaacgaccctaacacaacggtgatcctcaccgccttcaaacctcacgacctgagatggctacttgaacttcttatgggtgataagattaacactaatgggttttggaagaagcccgccttaaatctcatatataaaccctaccagattagaattcttgatccctag

SEQ ID NO: 207074 - DNA, 741 bp, synthetic construct
  misc_feature 1..741: note = Description of Artificial Sequence: Synthetic coding sequence
  source 1..741: mol_type = other DNA
atgcactgccgggactgcgccctggtgaccagcagcggccacctgctgcactcgcgccaaggatcacagatcgatcagactgagtgtgtcatacggatgaatgatgcacctacgcggggttacggtagagatgtcggcaatagaacatctctgcgggttatcgcacatagctctattcagcggatccttaggaacagacacgatctgcttaacgtgagccagggcacagtgttcattttctggggcccctcctcctatatgaggcgggacggcaaagggcaggtctataataatctgcacctgctgagccaggtgttgccccgcctcaaagccttcatgatcacacgacataaaatgctgcaattcgacgaactctttaaacaagaaaccgggaaagacagaaagatcagcaatacatggctgagtaccggctggtttaccatgaccatcgctctggagctatgcgatcgcattaacgtgtatggcatggtccctcccgacttctgtcgtgatcctaatcatccaagcgttccctatcactattacgagccattcggcccagatgaatgtaccatgtacctgagccatgagagaggtagaaaaggctcacatcacaggttcattaccgagaaacgcgttttcaagaattgggcaaggacatttaacatacattttttccagcctgattggaagcccgagtcgctggccatcaaccatcccgagaacaagcctgtcttttag

SEQ ID NO: 207075 - DNA, 1011 bp, synthetic construct
  misc_feature 1..1011: note = Description of Artificial Sequence: Synthetic coding sequence
  source 1..1011: mol_type = other DNA
atgaagaccctgatgcggcacggcctggccgtgtgcctggccctgaccaccatgtgcaccagtttactcctcgtctacagtagcctgggcggtcagaaagagcgccctccccagcagcagcagcaacagcaacagcagcagcaacaggcttccgccactgggtccagccagcctgcagcggagtcatctactcagcagaggccaggagtccccgctggaccacggccgttagatggctacttgggtgtggccgatcacaaacctctgaaaatgcactgtcgagactgcgccctggtcacgtcctccgggcatcttctgcactccagacagggctcacagattgaccagaccgagtgcgttattagaatgaatgacgctcctacccgggggtacgggcgcgatgtcgggaaccgcacatccttgcgtgttattgcccatagttctatccagcgtatcttgagaaacagacatgatttacttaatgtatcccagggaacagtgtttatattttggggtcctagtagctacatgaggagagatggtaaagggcaagtatataataatttgcacctccttagccaagtgcttccacggctgaaagctttcatgatcacccgtcacaagatgctgcaatttgacgaactgttcaagcaggaaaccggcaaagacagaaagatctctaacacatggctgagcacggggtggttcacaatgaccattgccctggaactctgcgaccggataaacgtgtacggcatggtcccccccgatttctgccgagaccccaaccatccaagtgtcccctatcactattacgagcctttcggtcctgacgaatgcactatgtatttaagtcacgagaggggccggaagggtagccaccacaggtttataacagaaaaacgcgtattcaagaattgggcccggactttcaacatccacttcttccagcctgactggaaacccgaatctctggccatcaaccaccccgagaacaaaccagtattttag

SEQ ID NO: 207076 - DNA, 1275 bp, synthetic construct
  misc_feature 1..1275: note = Description of Artificial Sequence: Synthetic coding sequence
  source 1..1275: mol_type = other DNA
atgagcgaccacggcgacgtgagcctgccccccgaggaccgggtgcgtgccctgagccagctcggttctgctgtggaggtcaacgaagacattccacctcgtaggtacttcagatctggggttgagatcatccggatggcatctatttattctgaggagggcaatatcgagcacgcttttatactgtataacaagtatatcactctttttatagagaaattacctaagcatagggattacaagagcgcggtcattcctgagaagaaggacaccgttaagaaactgaaggaaatagctttcccaaaggctgaggagcttaaggccgaacttctcaaacgttacaccaaggaatacactgaatacaacgaggagaaaaagaaagaggctgaagaactggcaagaaacatggctattcagcaggagttggaaaaggaaaaacaaagagtggcccaacagaagcaacagcagctggaacaggagcagtttcacgcatttgaggagatgattcggaaccaggaactcgagaaagagagactcaagattgtacaggaattcggaaaggtagatccaggacttggcggacctctggtacccgatctggaaaaaccttccctagatgtattccctacactcactgtctcatcaatccagcccagcgactgccacactacggttcggcctgcaaaaccccctgtggttgaccggagcttgaaacccggtgctctctccaattccgaatcaattcccacgattgatggcttgagacacgttgtcgtgccaggcaggctctgtcctcagttcctgcagctcgcctctgcaaatacagcgaggggagtcgaaacctgtggcatcctgtgtgggaaattaatgaggaatgagtttaccatcacacatgtgttgatacctaagcaaagcgccgggagtgactactgtaatacagaaaacgaagaagaactgtttctgatacaggaccagcaagggctcatcacactcggctggatccacactcatcctactcaaaccgcattcctatcttctgtggatcttcacacacattgctcctaccagatgatgctgcccgaaagtgtagccattgtatgctctcccaagttccaagagacagggttttttaagttgaccgatcatggtctcgaagagatcagctcctgtcggcaaaaagggtttcacccgcactcaaaggatccacccctgttttgtagctgttctcatgtgaccgtagtcgacagggctgtcaccatcaccgatcttagatag

SEQ ID NO: 207077 - DNA, 1275 bp, synthetic construct
  misc_feature 1..1275: note = Description of Artificial Sequence: Synthetic coding sequence
  source 1..1275: mol_type = other DNA
atgagcgaccacggcgacgtgagcctgccccccgaggaccgggtgcgagcactgtctcagctggggagtgcggtggaagtgaatgaagacataccacccaggcgatactttagatcaggagtggagatcatacggatggcatcaatatactctgaagagggcaacattgaacacgcatttattttatacaacaaatacatcacactgtttattgagaagcttcccaagcaccgcgactacaagagcgccgtgatccccgagaagaaagacacagtcaagaaactgaaagagattgcatttccaaaggcagaggagctgaaggctgagcttctgaagagatacaccaaggagtatacagaatataacgaagaaaaaaaaaaggaggcagaggagctagcccgcaacatggccatccagcaagagttagaaaaagaaaaacaaagggtggcccagcagaagcagcaacaactcgaacaggaacagttccacgcctttgaggagatgattcggaaccaggaactggagaaggagaggttgaaaatcgtccaggagttcggaaaggtcgatcctgggctcggaggacctctagtcccagaccttgagaaacccagcctcgatgtgttcccgacgctgaccgtgtcttccatacagccttctgattgccatactaccgtgaggccagcaaagcctcctgtggtggacaggtcgctgaagccaggtgcgctgtcaaactcggaatcaatcccaacaattgacggtctgaggcacgttgtggtgccgggacgcctctgcccccagttcttgcaactggccagcgctaataccgcgcgcggagtggaaacgtgtggcattctatgtggcaagctgatgaggaacgaatttactattacacatgtgttgatcccaaaacagagtgcgggctccgactattgtaacaccgagaatgaggaggaactatttcttattcaggaccagcagggcctgatcactctcggctggatccatacccacccaacacagaccgcattcctgtccagcgtggacttacatacacattgtagttatcagatgatgctccctgaatctgtcgcgattgtatgttcaccaaagttccaggaaacgggatttttcaagctcactgatcatggactggaggaaatatcgagttgtcgccagaagggctttcacccccactccaaagatcctccgctcttctgcagttgttcccacgttaccgtggtggatagggcagtgaccatcactgatttgcgctag

SEQ ID NO: 207078 - DNA, 1275 bp, synthetic construct
  misc_feature 1..1275: note = Description of Artificial Sequence: Synthetic coding sequence
  source 1..1275: mol_type = other DNA
atgagcgaccacggcgacgtgagcctgccccccgaggaccgggtgcgagccctttcccagctcggctcagctgtcgaggtgaacgaggacataccgcctcggcgatattttcgatccggtgtggagattatccggatggccagtatctatagcgaagagggcaacatcgaacatgcttttatcctgtataacaaatacattaccctcttcatagaaaagctaccaaaacatcgagactataagagtgccgttataccagaaaagaaagacacagtgaaaaaattgaaggaaatcgccttcccgaaagctgaggaattaaaggccgagctgctaaagcggtacactaaagaatacaccgaatacaatgaggagaagaaaaaggaagccgaggagctcgccaggaatatggccatacagcaggagctggagaaggaaaagcagcgagtcgcccagcagaagcaacagcaactggagcaggagcagttccatgcatttgaagaaatgattagaaaccaggagctcgaaaaggagcggttgaaaattgtacaggagttcggcaaagtcgaccctggcctcggaggcccacttgtgccagatctagaaaagccttctcttgacgtctttccaaccctgacagtgagctcaatccagccaagcgattgtcacaccactgtccgcccggctaagccaccagtggttgaccgatcacttaaacccggcgccctgagcaatagcgagagtatcccaaccatagacggtctaagacatgtggttgtgcctggtcggttgtgcccacagttcttacaattggcgtcggcaaatacggcccgtggcgttgaaacatgcgggatcctgtgtggcaaactaatgcggaatgagttcacgatcacccatgtactcattcctaagcagagcgctggaagcgactactgtaacaccgagaacgaagaggagcttttcctaatacaggatcagcaggggttgattacgctcggctggatacacacgcatcccacccagaccgctttcctatcctccgtggatctccatacccactgctcttaccagatgatgctgccagagtctgtggccattgtgtgctcccccaaatttcaggagacagggttcttcaagttaactgaccatggcttagaggaaatttcttcttgccgccagaaaggatttcatccccattccaaagaccccccccttttctgctcctgctctcacgtgactgtggtggatcgggccgttaccattaccgatctcaggtag

SEQ ID NO: 207079 - DNA, 1275 bp, synthetic construct
  misc_feature 1..1275: note = Description of Artificial Sequence: Synthetic coding sequence
  source 1..1275: mol_type = other DNA
atgagcgaccacggcgacgtgagcctgccccccgaggaccgggtgagggccctgtcccagctgggcagtgctgtcgaggttaacgaggatatccctccaagacgctactttcgtagtggcgtggaaattatccggatggcttcaatttacagcgaggagggaaacatcgaacatgcgtttattctgtacaataagtacattacgctgtttatcgagaaactgcctaaacatagagactacaaaagtgcagtgataccagaaaagaaggataccgtgaagaaactcaaggagatcgccttccctaaggcagaggaactgaaggcggagctgcttaaacgctacaccaaggaatataccgaatataatgaagaaaaaaagaaagaggctgaagaactggccaggaatatggccatccaacaggagctcgaaaaagaaaaacagcgtgttgcccagcagaagcagcagcagctggagcaagagcagttccacgcctttgaggagatgataaggaaccaggaactcgagaaagagaggttaaagattgtccaagagttcggcaaggtcgaccccggtttggggggtcctcttgtccctgacctcgaaaagccctctctggacgtgttccccacactgacagtttcctcaattcagccatccgattgccacacaactgtgagacctgctaagccgcctgtggtagacagatctttaaaacctggcgccctgagcaactctgagtctatacccactattgacggacttcggcacgtcgtcgttccagggaggctgtgcccacaattccttcagcttgcctcggccaataccgctagaggtgtggaaacctgtggtattctgtgcgggaaacttatgcgcaatgagttcaccataacacacgtgctgatccccaaacagtccgcagggtccgattattgtaacacagaaaatgaggaggagctgttcctcattcaagatcagcagggcctgatcacacttggctggattcatacccaccccacacagacggctttcctctccagtgtagacctccacacgcattgttcataccagatgatgcttccggaaagtgttgcaattgtgtgcagccctaaattccaagagaccgggtttttcaaattgaccgaccacggacttgaggaaatctctagctgtcgccagaaaggctttcacccccactctaaggatccgcctctgttttgctcctgttctcacgtcactgttgtggatcgcgccgtgacaattaccgacctgcgttag

SEQ ID NO: 207080 - DNA, 492 bp, synthetic construct
  misc_feature 1..492: note = Description of Artificial Sequence: Synthetic coding sequence
  source 1..492: mol_type = other DNA
atgagcgaccacggcgacgtgagcctgccccccgaggaccgggtgagggccctgagccagttggggtctgctgtggaagtaaatgaagatataccacctagaaggtactttaggtccggggtcgagattatccgtatggcgtcaatatactctgaggaagggaacatcgaacatgcctttattctttacaacaaatacataacgttattcattgaaaagctgcctaagcaccgggactacaaaagcgctgtgattcccgaaaagaaggacaccgtcaaaaaactcaaagaaatcgccttccctaaggctgaggagttgaaagccgagctgttgaagaggtatacaaaggaatatacagagtacaatgaagagaagaaaaaggaggccgaggagctggcgagaaatatggctatccagcaggagttggaaaaagaaaagcagcgggtggcccaacagaaacaacaacagttggagcaagagcagtttcattag

SEQ ID NO: 207081 - DNA, 957 bp, synthetic construct
  misc_feature 1..957: note = Description of Artificial Sequence: Synthetic coding sequence
  source 1..957: mol_type = other DNA
atgagcgaccacggcgacgtgagcctgccccccgaggaccgggtgcgggcgttatctcagctggggtctgccgtagaagtgaacgaggacatcccacccagaagatattttcggtccggcgtggagatcattcgaatggcaagcatctacagtgaggagggcaatatcgagcacgcttttatcctgtacaacaaatacatcactctcttcatcgagaagcttccaaaacatagagattataagagcgcggtgatccccgaaaagaaggataccgtcaagaagttaaaggaaattgctttcccaaaagcagaagaattaaaggccgagctgctcaagagatacacaaaggaatataccgaatataatgaggaaaaaaaaaaggaggccgaagagcttgcacgaaacatggcaatccagcaggagctggaaaaagagaagcaacgagtggcacagcagaagcagcagcagttagagcaggagcagtttcacgcctttgaagaaatgatacgtaaccaggagctcgagaaagagcgattgaagattgttcaggagttcgggaaggtggatcctggtctgggtggccccctggtgccagacttggaaaaaccttccctcgacgtcttccctacactgactgtgagcagtatccagccgtccgactgtcatacaacagtgcgaccggccaagccacccgttgtagataggagtttgaaacccggggcactaagcaattccgaatccattcccacaattgacggcttgaggcatgttgttgtgcccggacgattgtgtcctcaattcctgcagctagcttccgctaacacagcaagaggcgtggagacttgcggtattctgtgtggtaagctcatgcgcaacgaattcacaatcacccacgtacttattcccaagcagagcgccgggtccgattactgtaacactgagaacgaagaggaatag

SEQ ID NO: 207082 - DNA, 414 bp, synthetic construct
  misc_feature 1..414: note = Description of Artificial Sequence: Synthetic coding sequence
  source 1..414: mol_type = other DNA
atgagcgaccacggcgacgtgagcctgccccccgaggaccgggtgcgtgccttgtcccagttgggctcagccgtggaagttaacgaagacataccaccccgacggtatttccggtccggagtggagattatccgcatggcctctatctattccgaggagggaaacattgaacacgcctttatactgtacaataagtacatcacactattcatcgagaagctccccaagcatagggattataagtccgcagttattccggaaaaaaaggacaccgttaagaagctgaaggaaatagcatttcccaaagctgaagaactgaaggcagaactgctcaaaagatacacaaaggaatataccgagtataatgaagagaagaagaaggaggctgaggaactggcccggaacatggcatag

SEQ ID NO: 207083 - DNA, 1047 bp, synthetic construct
  misc_feature 1..1047: note = Description of Artificial Sequence: Synthetic coding sequence
  source 1..1047: mol_type = other DNA
atgagcgaccacggcgacgtgagcctgccccccgaggaccgggtgcgagctctttcccaacttggcagcgccgtcgaggtgaatgaggatatacccccacgccggtatttccggtctggcgttgagatcattcgaatggcgtcgatatatagtgaggaaggaaatatagagcatgcatttatcctgtacaacaaatacatcacgctgtttattgagaagctccccaaacacagggactacaagtcagcagtgatcccggaaaagaaagacacggtaaagaaactgaaggaaatagcctttcctaaagccgaagagcttaaagccgagctcttgaaacgatacaccaaggagtacactgaatacaacgaagagaagaagaaagaggctgaagaactcgcccggaacatggcaatccagcaggaattagagaaggagaaacagcgtgtcgctcagcagaaacagcagcagctagagcaagagcagttccacgcttttgaagaaatgattcggaatcaagaactcgagaaggagcgcttaaagattgtgcaggaattcggaaaagtggatccggggctgggagggcccttggttcctgatctagaaaagccttccctggatgtcttccccaccctgaccgtgtcatcaatccaaccgtcagattgccatactaccgtgagacctgctaaaccacctgtcgttgatcggagtctgaaaccgggcgcattgagcaattccgagtctatcccgactatagacggactcaggcacgttgtcgtgccaggacggctatgcccacagtttctgcaactggccagcgctaacacggcacggggcgtggaaacttgtggcattctgtgtggcaagctgatgaggaatgagtttactataacccatgtgctcatacccaagcagagtgcaggtagtgattattgcaataccgagaatgaggaggagttgtttctgattcaggaccaacaggggcttatcacactggggtggatacacgttgaaacgctgtggtctcttaaaagccttcacgcaccttag

SEQ ID NO: 207084 - DNA, 813 bp, synthetic construct
  misc_feature 1..813: note = Description of Artificial Sequence: Synthetic coding sequence
  source 1..813: mol_type = other DNA
atgcggcagcagcagctggagagcgagcagttcctgttcttcgaggaccagctgaaaaagcaggaactggcacgaggacaaatgcggagtcagcagacatccggattgtctgaacagatcgacggcagtgcgctctcctgtttcagcacgcatcaaaacaattccttactgaacgtcttcgctgaccaaccaaataaaagcgacgcaacaaattacgcctcacactctcctcctgtgaatcgtgctctcacaccagcggctacgctttcagccgtacagaacctcgtagtggaaggtctcagatgtgttgtcctcccagaggacctctgtcacaagttcctccaactagcagagagcaatacagtgcgcggtatagagacttgcggcattctatgtggaaagctgacacacaacgagttcaccatcacgcacgtcatcgtcccaaagcagtcagccgggccggattactgcgacatggaaaacgtcgaggaacttttcaacgtgcaggatcagcatgacctgcttactcttggctggattcacacccacccaacccagaccgctttcctgtcttctgtggaccttcatacccattgcagttatcaactgatgctgccagaggcaatcgccattgtatgcagcccaaagcacaaagataccggcatctttcgactgaccaacgccggcatgctagaggttagcgcttgtaagaaaaaggggtttcacccccacactaaggagcctcgactattctccatatgcaaacatgttctggtcaaagacattaaaattatcgtcctagatctgagatag

SEQ ID NO: 207085 - DNA, 1311 bp, synthetic construct
  misc_feature 1..1311: note = Description of Artificial Sequence: Synthetic coding sequence
  source 1..1311: mol_type = other DNA
atggaccagcccttcaccgtgaacagcctgaagaagctggccgccatgccagaccacaccgatgtatctctatctcccgaggagagagtgagagcgttgtcgaagctcggttgcaacattactatatctgaagacatcacacctcgtcgatactttcggagcggcgtggaaatggagcggatggcttcggtgtatttggaggagggcaaccttgagaacgctttcgtgttgtacaataagttcatcacactgttcgtggagaaactcccgaaccatcgggattaccagcagtgtgcggtgccggagaagcaagatatcatgaagaaactcaaagaaattgcctttcctcgtactgacgagcttaaaaatgatttactcaagaaatataacgtcgaataccaggaatatcttcaatcaaaaaataaatacaaggccgaaattctgaagaagctggagcatcagaggctcatcgaagcagagcgcaagaggatcgcacagatgcgccagcagcagctagagagtgaacagtttctattctttgaggaccagctgaagaaacaggagctggctagaggccaaatgagatcccagcaaactagtggactcagcgagcagattgacggatctgcgctgagctgcttctctacgcatcagaataactccctactgaacgtgttcgctgaccagcccaataaaagcgacgcaaccaattacgcctcccactcaccccccgttaacagggctctcaccccggcagcaacacttagcgcggtgcagaacctggtggtagagggccttagatgcgtggttctgcctgaggatctgtgtcataaatttttgcagctggccgaatccaacaccgttcgcgggattgaaacttgtggcatcctgtgcggtaaacttacccacaatgaattcaccatcactcatgtcatcgtgcccaagcagagcgccggcccagactattgcgatatggaaaacgtggaagaactgttcaatgtccaagaccagcatgatctcttaacacttggttggatccacactcaccctacacagaccgcatttctgtctagtgtggatcttcatacccactgcagctatcagttaatgctgcctgaagcgattgctatcgtgtgttcccctaagcataaagataccggaatatttagactgactaacgccggaatgcttgaggtctcggcctgtaaaaagaaagggttccaccctcacacaaaagagccaagacttttcagtatctgcaaacacgtcctcgtcaaggatattaagataatcgtgctggatttgagatag

SEQ ID NO: 207086 - DNA, 1311 bp, synthetic construct
  misc_feature 1..1311: note = Description of Artificial Sequence: Synthetic coding sequence
  source 1..1311: mol_type = other DNA
atggaccagcccttcaccgtgaacagcctgaagaagctggccgccatgcctgatcatacagacgtgtcattgtcccctgaggaaagagttagggctcttagtaagctgggatgcaatatcacaataagcgaagatattacgccccgccggtatttccgatctggcgtagaaatggaaagaatggcaagcgtctatcttgaggagggaaatctggagaatgcttttgtgctttacaacaagttcattacgctatttgtcgagaaactgccaaatcatcgcgactatcagcagtgcgcggtgcccgaaaaacaggatatcatgaaaaaactgaaggagatagcattccctcgcacagatgagctgaagaatgacctgctaaagaagtacaacgtggaataccaggaatacttgcagtccaagaataaatataaagcagagattttgaagaagctggagcatcagagattgatcgaggccgaaaggaagagaattgctcagatgcggcaacaacagctcgagagtgaacagttcttgtttttcgaggatcagctgaaaaagcaagaactggccagggggcagatgcgaagccagcagacctcaggactttcagagcagatcgacggcagtgcactttcatgcttttcaactcatcagaacaactccctactgaacgttttcgccgatcagcccaacaagtcagacgccaccaattatgcttcacacagtccccctgtcaaccgcgcattgacgcccgctgccacactgtctgcagtgcagaatttagtcgtggagggtttgcgatgcgtggtgctcccggaggatctctgtcacaaatttctacagctcgccgagtcaaatactgtgcggggtatcgagacctgcggcatactgtgtgggaagttgacgcataatgagtttactattactcacgtgatagtgccaaagcagtcagctggacccgattactgcgacatggagaatgttgaggagctgttcaatgtacaggatcaacacgacttgcttactctcggatggatccatactcacccaactcaaacggcatttttgtctagtgtggacctccatacccactgtagctaccagctcatgctaccagaggccattgccattgtctgtagccctaagcataaggacacaggaatttttcgactaacaaatgccggtatgctggaggttagcgcttgcaaaaaaaaaggtttccatccgcatacgaaagagcccagactgtttagtatttgtaaacacgtgctggtcaaggacattaaaataattgtgctcgatttgagatag

SEQ ID NO: 207087 - DNA, 1386 bp, synthetic construct
  misc_feature 1..1386: note = Description of Artificial Sequence: Synthetic coding sequence
  source 1..1386: mol_type = other DNA
atggaccagcccttcaccgtgaacagcctgaagaagctggccgccatgccagatcatacagatgtcagcttgtctcctgaggaaagggtgagagccctgtctaaactcggctgcaacatcaccatttctgaagacatcacgcctaggcgctacttccgctcaggtgtcgaaatggagaggatggcttctgtgtacctcgaggaaggtaacttggagaacgcattcgtgttatataacaaattcattacattattcgtagaaaagttaccaaatcatagggactatcagcagtgcgcggtgccggaaaagcaggacatcatgaagaagcttaaggaaattgccttcccacggacagatgaactcaaaaacgacctattaaagaagtacaacgtggagtaccaagagtacctgcagtccaaaaataagtataaggcagagatcttaaaaaaactggagcaccaacgtttgatcgaggcagaacgcaagaggatcgcccagatgaggcaacagcagctggaatcagagcagtttctgttcttcgaagaccaattgaagaagcaggagttggcacgcggccaaatgcggtcacagcagacatctgggctgtcagagcaaatcgacggctctgccctgtcttgcttttccacccaccaaaataatagccttttaaatgtctttgctgatcagcccaataaatccgacgctaccaattacgcatctcacagcccaccggtaaacagagcattgacccctgctgcaacactgtcagcagtccagaacctggtagtggaggggctgaggtgcgtcgtgcttcccgaggatttatgccacaagttcctgcagctcgctgaatcaaacactgttaggggaatcgaaacttgtggtatattgtgtgggaaactcacacacaatgagtttacaataacccatgtgatagttccaaagcagtcggccggacctgattattgtgatatggaaaatgtggaagaactgttcaacgtgcaagaccagcacgacttgttgacgttaggctggattcatacacatccaactcagacagccttcttgtccagtgtggatctccacacacactgctcctaccagttgatgcttccagaggcaattgctattgtgtgttctcctaaacataaagatactgggatcttcaggctgactaacgcagggatgctagaagtgagcgcatgtaaaaaaaaaggttttcaccctcacactaaggagcccaggttgttttctatacaaaagttcctttcaggcattatcagtgggaccgcactggagatggagcctctcaagattgggtacgggcccaatggtttcccactgctgggaatcagcagaagttccagtcctagtgaacagttatag

SEQ ID NO: 207088 - DNA, 267 bp, synthetic construct
  misc_feature 1..267: note = Description of Artificial Sequence: Synthetic coding sequence
  source 1..267: mol_type = other DNA
atgagcatcatggaccacagccccaccaccggcgtggtgaccgtgatcgttatactgattgctatcgccgcactcggtgccttgatcctcgggtgctggtgttacctgcgtctgcaaagaatcagccaatcggaggacgaagaatctattgtgggagacggcgaaaccaaggagcccttcctgctggtgcagtactcggccaagggcccatgcgtcgagcgaaaggccaagcttatgaccccaaacgggcccgaagtgcacggctag

SEQ ID NO: 207089 - DNA, 744 bp, synthetic construct
  misc_feature 1..744: note = Description of Artificial Sequence: Synthetic coding sequence
  source 1..744: mol_type = other DNA
atgctgcagaacagcgccgtgctgctggtgctggtgatcagcgcctctgctacacacgaggccgagcaaaatgactcggtgtcacctagaaaaagtagggttgctgctcagaactctgcggaggtagtaaggtgtttgaactcggcgcttcaggtgggctgtggcgccttcgcatgtttggaaaatagcacttgtgacacagacggtatgtacgatatctgcaaatctttcctctacagcgctgccaaatttgatactcaggggaaagcgttcgttaaggagtccctgaagtgcatagcgaatggagtcaccagcaaagtgttcctcgctatcaggagatgcagcacctttcagagaatgattgcagaagtgcaggaagaatgttacagtaagttaaatgtgtgcagcatcgcgaagaggaaccctgaggctatcactgaggttgtccagctgcccaaccatttttcaaaccgttattacaatcgactggtgagatccctgctcgaatgtgatgaagataccgtttccacaatccgggatagcctaatggaaaagattgggcccaacatggccagcctctttcatattctgcagaccgaccactgtgctcagacccaccctcgagcggacttcaaccggcgtcgtacaaacgaacctcaaaaactgaaggtgctgctgcgcaatctaagaggcgaagaggattccccatcccatataaaacgcacctcacatgaaagcgcctag

SEQ ID NO: 207090 - DNA, 537 bp, synthetic construct
  misc_feature 1..537: note = Description of Artificial Sequence: Synthetic coding sequence
  source 1..537: mol_type = other DNA
atgtacgacatctgcaagagcttcctgtacagcgccgccaagttcgatacccagggaaaagcctttgtgaaggaatcccttaaatgcattgccaacggggtgacaagcaaagtctttctcgcgattcgccgctgttccaccttccagcggatgatagcagaggtacaggaagaatgctactcgaaactgaacgtctgtagcatagcgaaaaggaatcccgaagctataaccgaagtggtgcaactgcctaatcatttctcgaacaggtattacaatagactagtgcgtagccttcttgagtgtgacgaagataccgtatccacaatccgcgactccttgatggagaaaattggccccaatatggcttctctgtttcatatccttcagacagatcattgcgcccagacacacccccgagccgacttcaaccggcggcgcacgaacgagccacagaaacttaaagtgctcctgcgtaatctaaggggcgaggaagactcaccttcacacattaagcgaacctcgcatgagtccgcttag

SEQ ID NO: 207091 - DNA, 537 bp, synthetic construct
  misc_feature 1..537: note = Description of Artificial Sequence: Synthetic coding sequence
  source 1..537: mol_type = other DNA
atgtacgacatctgcaagagcttcctgtacagcgccgccaagttcgacactcagggtaaggcatttgttaaagaaagcctgaagtgcatagctaacggcgtcaccagcaaagtgtttctggccattcgaagatgttccacatttcagcgcatgatcgctgaagtccaggaggagtgctattctaaattgaacgtgtgtagtatcgctaagcgcaatccagaggccatcacagaggtggtgcaattacctaaccatttttctaatagatactacaatcgcttagtaagatcccttctagaatgcgacgaggataccgtctctacaatcagagactcactaatggaaaagataggcccaaacatggcgtcacttttccatattctccaaactgaccattgcgcccagactcatcctcgcgctgatttcaaccgtagacggacaaatgagccgcagaagctgaaagtgcttctgagaaaccttcgcggcgaggaggactccccatcacatataaagcgtacaagtcacgagagcgcttag

SEQ ID NO: 207092 - DNA, 2733 bp, synthetic construct
  misc_feature 1..2733: note = Description of Artificial Sequence: Synthetic coding sequence
  source 1..2733: mol_type = other DNA
atggccagcagcgcccagagcggcggcagcagcggcggccccgccgtgccgacggtgcagagagggattatcaaaatggtgttatcaggatgtgctattattgtccgcggacagccgcgaggggggcctccacctgaaaggcagattaacctaagcaatatcagggcaggaaatttagcccgacgcgccgccgccactcaaccagatgccaaagataccccagatgaaccatgggcctttcccgctagggaattcctccgtaagaaacttatcgggaaagaggtatgctttacaatagagaataagactcctcaaggaagagagtacggaatgatatatcttggaaaggacacaaatggagagaacattgcggaaagtcttgtggccgagggccttgcaacaaggagagagggaatgcgagccaataacccagagcagaataggctgtcagaatgtgaggaacaggcaaaggccgccaaaaagggcatgtggtccgagggcaatggaagtcataccatacgagatctgaagtacacaattgagaacccgcgtcatttcgtcgacagtcaccaccagaagcccgtgaatgcgattatcgagcacgtgcgtgacggttctgttgtccgcgctctgctgctcccagattactaccttgtgacagtgatgctcagcggcattaaatgccctacattccggcgggaagcagacggaagtgaaacacccgagccgtttgccgcggaggccaagttctttaccgaatcaagactcctccagagagacgtccaaataattcttgaatcttgccataaccaaaacatcctgggaaccatcctgcatccaaacgggaatattaccgagctgcttctcaaagaaggtttcgctaggtgtgtggactggtccatcgccgtttacaccagaggggctgagaagctgcgtgccgcagagcggtttgcaaaagaacgacgcctccgaatctggcgcgattatgtagctcccactgcgaacttggatcaaaaggacaaacaattcgtagcaaaggtgatgcaggtgttgaatgccgatgcaatcgtagtgaaattaaattccggtgattataaaactatacacctgagttccatcaggccccctcggctcgaaggagaaaatacacaggacaaaaataagaaactgcgtccattatatgatatcccatacatgttcgaagcgagagagttcctcaggaaaaaactgattggaaagaaagtgaatgttacagtggactacatcagacccgcctctccagccaccgaaacagtgcccgctttctctgagcgtacgtgcgcaactgttacaattgggggcattaacattgccgaggctctcgtgagcaagggtcttgccacggtgattcggtataggcaagatgatgaccagcgctcaagtcactacgacgaactgttggccgcagaagcgagagctatcaagaacggcaagggtctgcattctaaaaaggaggtcccgatccatagggtcgccgacataagcggcgacacccagaaagcaaagcagtttctgccttttcttcagagagccggaagaagcgaggctgtagtcgaatacgtattctctggttccagactcaagctctacttacccaaagagacgtgtctcattactttcctgctcgcggggattgagtgtccacggggcgcccgaaacctacccggtctggtacaggaaggcgaacccttctccgaggaagctaccctgtttactaaagagcttgttctgcagcgagaagtggaggtcgaggttgaaagcatggataaagcaggcaactttatcggctggctgcacatagatggcgccaacctgagcgtgctcctggtggagcacgccctgagtaaagtgcacttcactgctgaacgttcctcatactataagtctcttctatcagctgaagaggcggctaaacagaagaaggaaaaagtgtgggcccattacgaagaacagccggtggaggaggttatgcccgtgctggaggagaaggaaaggagcgcatcatataaacccgtttttgtgactgaaatcactgatgacctgcatttctatgtgcaggatgtggagacagggacccaactggagaagctgatggaaaacatgcggaatgatatcgccagccacccgcctgtggaaggttcttatgcaccacggcggggagaattctgcatagcaaagttcgtcgacggtgagtggtaccgagcccgcgtcgagaaagttgaatccccagcaaaaattcacgttttttacattgactacggtaaccgggaagtactgcctagcaccagactgggcacactcagccccgctttcagcacacgagtgctgcccgcccaagctactgaatatgcatttgctttcattcaggtcccacaggatgacgatgctcgtactgacgccgttgactcagtggtgagggacattcagaatactcagtgcctgcttaatgttgagcacctttctgccggatgtccacatgtgacattgcaattcgctgacagtaaaggtgacgttggcttggggcttgtgaaagaaggcctggtcatggtcgaagtccggaaggagaaacagttccagaaggtgattactgaatacctcaacgctcaggaaagcgctaaaagtgcacgcctgaacctttggagatacggagattttcgcgctgacgatgctgatgagtttggatactcacgctag

SEQ ID NO: 207093 - DNA, 2703 bp, synthetic construct
  misc_feature 1..2703: note = Description of Artificial Sequence: Synthetic coding sequence
  source 1..2703: mol_type = other DNA
atggccagcagcgccgtgcccaccgtgcagcggggcatcatcaagatggtgctgtctggttgtgcaatcatcgtgcgagggcagccccgcggaggccctccacccgaaaggcaaatcaacctaagcaacatccgcgccggcaacctggccagacgcgctgccgccacccagcccgacgccaaggacacacctgacgagccatgggcctttccggctagagagttcttgaggaaaaaattgatcggcaaggaagtctgttttacaatagaaaacaagacaccccagggtagagagtatggtatgatctacctgggtaaggacaccaatggcgaaaacatagcagaatccctagtggctgagggactggccacacgcagggaagggatgagagccaataacccggaacaaaaccgcctttctgaatgtgaagagcaggctaaggctgccaagaaggggatgtggtccgaagggaacggatctcacaccattcgcgacctgaaatatacgatcgagaacccccgtcactttgtggactcccaccaccagaaaccggtcaatgctataattgagcacgtacgagacggaagcgtggttcgggcgcttctactgcccgactactatttggttacagtgatgctttcagggatcaaatgtcctaccttccggagggaggctgatggatccgaaactcccgagccgttcgccgccgaggccaagttttttactgaatctcgtctgctccaaagagatgttcaaatcatactggaaagctgccacaatcaaaatatccttgggactatcctgcaccccaatggcaacatcacagaacttctgttgaaagaggggtttgctcggtgtgtggattggagcatcgccgtctacacccgcggcgccgagaagctccgcgctgctgaaagattcgctaaggaaagacgtctaaggatatggagagactatgtcgcccctaccgctaacctcgaccagaaggacaagcagtttgttgcaaaggtaatgcaggtgttaaacgcggacgctatagtggtgaaactcaactcaggcgactataaaacaattcatctgtccagcatccgtcctccgagactggagggcgaaaatacccaagacaagaacaaaaaacttcgtccactttatgacatcccctatatgttcgaggctagagagttccttagaaaaaagctgattgggaaaaaagttaacgttactgtggattatatacggcccgccagccctgctactgagactgtgcccgccttttctgagcgcacatgtgctaccgtcactatcggcggaattaacatcgccgaagccttagtgtcaaaaggattggcaaccgtgattcgctaccggcaggacgacgaccaacgctctagtcactacgacgagttgcttgctgctgaggccagggctataaagaatggcaaggggctccatagcaaaaaggaggtgcctatccaccgggtggcggatatttcaggcgatacccaaaaagccaagcagtttctgccatttctgcaacgggccggtcggagcgaggcggttgtggagtatgttttctccggaagtagactgaaattatatctcccaaaagagacctgccttatcacattcctgctcgccggcatcgaatgtcctagaggcgcacggaaccttccgggactggtacaggaaggcgagcctttctctgaagaagctactctctttaccaaggagctggttctgcagcgggaggttgaagtggaagtggagagcatggataaagctggtaactttatcggttggctccatatagatggcgcaaatcttagtgtattacttgtggagcacgctctgagcaaagtgcacttcacagcagagaggagctcatactataaatcgttactctcagccgaggaggcagccaagcaaaaaaaggaaaaagtgtgggcccattatgaggaacagcctgtggaggaagtcatgccagtgcttgaggagaaagagaggtccgctagctataagccagtcttcgtgacagagataactgatgatctgcacttttatgtccaggacgttgagactgggacccagctcgagaaactcatggaaaatatgagaaacgacattgccagtcacccccccgtggagggcagctatgccccccgacgcggagagttctgcatcgcaaagtttgtcgacggggaatggtatcgggccagggtggagaaagtggagagccctgcaaagatccatgtgttctatatagattatggcaacagagaagtgctgccctcaacgaggctggggactctttctccagcattctccactagggtactgcctgcacaagccaccgagtacgcctttgctttcattcaggtgccccaggatgacgacgctagaacagatgctgtggattcagttgtgagagacatccagaacacacagtgtctgcttaatgttgagcatttgagcgccggatgcccacatgttaccctgcaatttgctgatagtaaaggcgacgttggactgggcttagtgaaagaaggcctcgtaatggttgaggtacggaaagagaaacagtttcagaaagtgattaccgaatacctcaatgctcaggaatctgccaagtccgcaagactgaatctgtggaggtatggtgatttccgggcagacgatgccgatgagttcggctattcccggtag

SEQ ID NO: 207094 - DNA, 705 bp, synthetic construct
  misc_feature 1..705: note = Description of Artificial Sequence: Synthetic coding sequence
  source 1..705: mol_type = other DNA
atgaaccacctgcccgaggacatggagaacgccctgaccggcagccagtcttcacatgcctccttgcgtaacatacactctatcaaccccacgcagctaatggcgcgcatcgaatcttacgagggccgcgagaaaaaaggtatcagtgacgtccggcgcaccttttgcctttttgtcaccttcgacctactctttgtcaccttactatggattatagagcttaatgttaatggcgggattgagaataccctcgaaaaggaggtgatgcagtatgactactactctagctacttcgacatctttctcttagccgtcttcaggtttaaagtgctcatactggcgtatgctgtatgcaggcttagacactggtgggcgattgcactgacaaccgcggtcacaagtgcttttctgctcgcaaaagtgatattgtccaagctcttttcccaaggtgcatttgggtacgtgttgcctattatcagctttatcttagcttggattgaaacttggttcctggactttaaagtccttccccaggaggctgaggaggagaatcggctgctgatagttcaagacgcatccgagagagcagcgttgatacccggtggactgagcgatggccagttttacagcccacctgaatctgaggccgggtcagaggaagcagaggagaaacaagattcagagaagccactgctagagctctag

SEQ ID NO: 207095 - DNA, 705 bp, synthetic construct
  misc_feature 1..705: note = Description of Artificial Sequence: Synthetic coding sequence
  source 1..705: mol_type = other DNA
atgaaccacctgcccgaggacatggagaacgccctgaccggcagccagtcatcacacgccagcctgaggaatatacattctattaatccgacacagcttatggccagaatcgagtcatacgaaggacgtgagaaaaagggaatttctgacgtgcggagaaccttctgtctgttcgtgacctttgatctgctgttcgtgacgttattatggatcatcgaactgaacgtgaatggcgggatcgagaatacattggagaaagaagtgatgcagtatgattactattcatcctattttgatatcttcttgttagctgtttttagattcaaggtcctgatattggcctacgccgtctgcagactgcggcactggtgggcgatcgccctgacaaccgcagtgaccagcgcattcctgctggctaaggtgatcctatcaaagctttttagccaaggtgccttcggttacgtcctgccaatcatttcctttattctggcttggattgaaacttggttcctcgatttcaaggtccttccccaggaggccgaagaggagaatcgcctcctgattgtgcaggacgcgtctgagcgcgcagcgcttatcccaggaggtttgagcgatggtcagttctattctccccccgaaagtgaagcaggctcggaggaggccgaggagaaacaggattccgaaaagcccctcctggagctgtag

SEQ ID NO: 207096 - DNA, 621 bp, synthetic construct
  misc_feature 1..621: note = Description of Artificial Sequence: Synthetic coding sequence
  source 1..621: mol_type = other DNA
atgaaccacctgcccgaggacatggagaacgccctgaccggcagccagagttcccatgccagtctgcgcaatattcacagcatcaaccccacacaactgatggcccggattgaaagctacgagggtcgagaaaagaagggaatatctgacgtgaggaggacgttctgcctttttgtcacatttgatctcctgtttgttaccctcctctggattattgagcttaacgttaacggcggcatcgaaaacaccctggaaaaagaagtgatgcaatacgattactatagcagctacttcgacatcttcctgctagccgtcttcagattcaaggttctgattttagcctacgccgtatgcagattgaggcactggtgggccattgcattgacaacggctgtaacaagtgcctttttactcgccaaggttatattatcaaaactgttttctcagggcgcgttcggttatgtgttgcctatcatctcttttatcctggcatggatcgagacgtggttcctcgacttcaaggtgctgccacaggaagccgaggaggagaaccggttactgatcgtgcaggatgcatctgaacgcgcagctcttatacctgggggactaagcgacgggtag

SEQ ID NO: 207097 - DNA, 555 bp, synthetic construct
  misc_feature 1..555: note = Description of Artificial Sequence: Synthetic coding sequence
  source 1..555: mol_type = other DNA
atgaaccacctgcccgaggacatggagaacgccctgaccggcagccagtcatcccacgccagtctccgtaatattcacagcatcaatccaacacaactgatggcacggattgaaagctatgaagggagggaaaaaaaggggatctcagacgtgaggaggacattctgtctgtttgtcaccttcgacctcctatttgttacccttctatggattattgagcttaacgtgaatggaggaattgagaataccctcgaaaaggaggtaatgcagtatgactattacagctcttacttcgacatctttctactggcagtctttaggttcaaagtacttatactcgcttacgcagtctgcaggttgcgccattggtgggctatcgcactcactactgccgtgacatctgccttcctgttggcaaaggtcatcttatccaagcttttctcccagggtgcctttggatatgtgctgccgataatcagttttatcctcgcttggattgaaacttggttccttgacttcaaggtcctacctcaggaagccgaggaagagaactag

SEQ ID NO: 207098 - DNA, 519 bp, synthetic construct
  misc_feature 1..519: note = Description of Artificial Sequence: Synthetic coding sequence
  source 1..519: mol_type = other DNA
atgaaccacctgcccgaggacatggagaacgccctgaccggcagccaatcctcacacgcatctctccggaatatccatagcatcaacccaacacaactgatggccagaattgagtcctatgaggggagagagaaaaaaggcatctccgatgtcaggagaacattttgtctgtttgtcacgttcgatctcttattcgtaactctgctgtggataatagagttaaacgtaaatggaggtatcgagaataccctggaaaaggaggtaatgcagtatgactattactcctcttattttgacatctttctgctggcagtgtttagattcaaggtgcttattcttgcctacgctgtatgtaggcttcgccattggtgggccattgcattaaccactgccgtcacgtccgctttcttgctggcgaaagtaatcctctccaagctgttcagccagggcgctttcggatacgtgctgcccattataagcttcatcctggcctggatcgagacttggttcctggactag

SEQ ID NO: 207099 - DNA, 684 bp, synthetic construct
  misc_feature 1..684: note = Description of Artificial Sequence: Synthetic coding sequence
  source 1..684: mol_type = other DNA
atggagaacgccctgaccggcagccagagcagccacgccagcctgcggaacattcacagcatcaatcccacccagctcatggctcgcatcgagtcatatgagggacgtgagaaaaagggcatttctgacgtgcggcgcaccttctgcctgtttgtcactttcgacctactattcgttactctgctctggattatagagctgaacgtaaacggcggcatcgagaacaccttggaaaaagaagtgatgcagtacgactactacagtagttactttgacattttcctgctggccgtcttccgcttcaaggtgctcatcttggcctatgcagtgtgcaggctgaggcactggtgggccatagctttaaccactgccgttacatctgcatttctgttggctaaagtcattttgtcgaaactgttttctcagggagcattcgggtatgtgctccctatcatttcctttatcctggcttggattgagacctggttcctcgatttcaaggtgctgccccaagaagcagaggaggaaaatagattactgatcgtccaggacgcctccgaaagagccgctctcattcctggaggcctttccgatggccagttttacagcccacctgaaagcgaggctggaagcgaggaggcggaggagaagcaagattcagaaaagcccctcctcgaactctag

SEQ ID NO: 207100 - DNA, 1338 bp, synthetic construct
  misc_feature 1..1338: note = Description of Artificial Sequence: Synthetic coding sequence
  source 1..1338: mol_type = other DNA
atgagcaagctgccccgggagctgacccgggacctggagcggagcttgcctgctgtggcaagcctcggaagttctctgagccatagtcagtctttgtcgagccatttactccccccccctgaaaagcggcgagcgataagcgacgtccgccgcactttttgcctcttcgttaccttcgacctgctatttatatcgttactctggatcattgagcttaatacaaacacaggcatcagaaaaaacctcgaacaggagattatacagtataacttcaaaacctctttctttgacatcttcgtgctggctttttttcgcttttcgggcctcttgctgggatatgccgtgcttcgcttgcgccactggtgggtaatcgccgtgacaacactggtgagcagcgcttttctgatcgtgaaagttattctatcggagctcctgtcaaaaggtgcatttggatacttgctcccaatcgtgagcttcgttttagcgtggttggaaacttggtttctcgacttcaaggtcctcccccaggaagccgaagaggaaagatggtatctggccgcccaagtcgctgtggcacggggacctctgctattttcaggagctctgtccgagggtcagttttattctccccccgaatcttttgccggatccgataacgaaagtgatgaagaagtcgccgggaagaaaagtttcagtgctcaagaacgggaatatatacgccagggcaaggaggctacagcagttgtagaccagatactggcccaggaggagaattggaaattcgagaaaaacaatgagtacggcgatacagtatacacaattgaggtgccttttcatggaaagacattcattcttaaaaccttcctcccttgcccggcagagcttgtctatcaggaggtgatcctccagcctgagaggatggtcctatggaacaagacagtgaccgcctgtcagattctgcagcgtgtcgaagacaacacactgatttcatacgatgtatctgctggtgctgcaggcggcgtagtgagccccagggactttgtaaatgtgcgtagaattgagcgccggagggatcgctacctgtcttctggcatcgctacatcccattcggcaaaaccgcccacccataaatacgtgaggggagagaatggtccgggcggtttcattgtcctgaagagcgcatctaatcctcgagtatgtacgtttgtttggatcttgaatactgatctgaaggggcggctgcctcgctatctcatccatcagagcttggctgctactatgttcgagttcgcattccacttgaggcagcggatatctgaattgggcgctagagcttag

SEQ ID NO: 207101 - DNA, 1284 bp, synthetic construct
  misc_feature 1..1284: note = Description of Artificial Sequence: Synthetic coding sequence
  source 1..1284: mol_type = other DNA
atgagcaagctgccccgggagctgacccgggacctggagcggagcctcccggccgtcgcctccctcgggagcagcctcagccatagtcagtccctttcttctcacctgctgcctcccccggaaaaaaggcgggcaatctctgatgtgaggagaacgttctgcctattcgtcaccttcgatctgcttttcattagcctcctgtggatcatcgagctgaacacgaataccggcatccgtaaaaatctcgagcaggagattatacagtacaatttcaagacgtctttctttgacatctttgtactggccttcttccggttttccgggttgctcttaggttacgcagtcttgcgactgagacattggtgggtgatcgcactgctcagcaagggggcgttcggctatttgctcccaatcgtctctttcgtgttagcctggttggagacatggttcctggactttaaagtgcttccacaagaagccgaagaggaacgatggtatctcgccgcccaggttgcggtggctcgcggacctctcctctttagcggtgccctgtcagaggggcaattttacagccctcccgaatcttttgccgggtcagataacgagagtgatgaagaagttgctgggaaaaagtctttcagcgcccaggagcgggagtacattaggcaaggaaaggaagctacggctgtggtggatcaaattctcgcacaagaagaaaactggaagttcgagaaaaacaacgaatacggtgatactgtgtacactatcgaggtccccttccacgggaagacttttattcttaaaactttcctgccctgtcccgctgagctagtgtaccaggaggtgatcctccagccagagagaatggtcctgtggaacaagactgtgaccgcatgccagatattgcagcgggtcgaagacaacactctgatcagctacgacgtgtccgcgggcgccgcagggggagtcgtctcaccaagagattttgtgaacgtgcggagaatcgagcgccgacgagatcgatatctgtcttctgggattgccaccagccacagtgctaaaccgcccacacacaaatacgtccgtggtgagaatggtccagggggtttcatcgtcctgaaaagcgcatcaaatccaagggtatgtacattcgtgtggatacttaacacagacctcaagggtaggctgcctcggtacctgatccaccaatctctggccgctacaatgttcgagttcgcatttcacctgagacagcggatatccgaattgggggcacgcgcctag

SEQ ID NO: 207102 - DNA, 591 bp, synthetic construct
  misc_feature 1..591: note = Description of Artificial Sequence: Synthetic coding sequence
  source 1..591: mol_type = other DNA
atgagcaagctgccccgggagctgacccgggacctggagcggagcctacccgccgtggcctccttaggaagcagcctgtcacactcccagtccctgagttctcacctgttacccccaccagaaaagcgtagagccatctctgatgtcaggcgtactttttgcttgttcgtgacattcgacttgttgtttatttccctattgtggattatcgaacttaacactaacacaggcattagaaagaatttggaacaggaaatcattcagtataatttcaaaacctcctttttcgatatcttcgtactggccttttttagattctctggtctgttactcgggtacgcagtgctgaggctgagacactggtgggttatcgccgtgactaccttggtcagctcggcattcctgatagtcaaagtcatcttgtccgagctgctgtctaaaggagctttcggatatttacttcctatcgtgagcttcgttttggcatggcttgaaacttggtttttggacttcaaagtattgccccaggaggccgaagaagaacgttggtatctcgccgctcaggtggccgtggctagagggcctttatag

SEQ ID NO: 207103 - DNA, 1338 bp, synthetic construct
  misc_feature 1..1338: note = Description of Artificial Sequence: Synthetic coding sequence
  source 1..1338: mol_type = other DNA
atgagcaagctgccccgggagctgacccgggacctggagcggagcctacctgctgttgcgtccttaggatcctccctctctcatagccagagcctgtcctcgcacctgctgccccctcccgaaaagaggagagccatttctgacgtgcggcgtacattctgtttgtttgtaacattcgacctcctttttatatccctgctgtggattattgagcttaacaccaatacagggattcggaaaaatctcgagcaagaaatcattcaatacaatttcaagacctctttctttgacattttcgtccttgcctttttccggttctctggactcttgctcgggtatgccgttctccgactccgccactggagcagaaggtggtgtcctgtgcacagttcactctcccgttcttcctccctgagttgcagtgctaaaggccatctcgctacatgtagcccttcatcactgctgtcatcacccgggtggcgcccaggatccctcacttctaagagctaccctaggaaacttaagagaagcgattcagctccgccgggatatctggcggcccaagttgccgtggcccggggccctttgctgttttcaggagccctgtctgaggggcagttttactcccctccggaaagcttcgctggtagcgataatgagagcgatgaggaagttgccggcaaaaagagcttctctgcccaagagagggagtacatccggcagggcaaagaggcgacagccgtggtggaccagatcctggcacaagaggagaactggaagtttgaaaagaataatgaatacggagacaccgtctacacaattgaagtgcccttccatggcaaaactttcatcctgaaaactttcctcccatgcccggcagagctcgtgtatcaggaggtgattctgcaaccagaacgcatggtgctttggaataagaccgtcacagcatgtcagatactgcagagggtggaggacaacactttaattagttacgatgtctccgccggcgccgcaggtggtgtcgtgtcccccagggatttcgtgaatgtaagaagaattgagcgccgtcgcgaccgctacctaagttctggaattgccaccagtcactctgctaaaccccccacacataaatatgtgcgtggggagaatggacctggaggctttattgtcctaaaatctgcttctaatccccgcgtgtgcacttttgtgtggatactcaacacagacctcaagggacgcctccctagatacctgattcaccaatcactggccgccaccatgtttgagtttgcgtttcatttacgacaacggatctccgaactcggtgctagagcttag

SEQ ID NO: 207104 - DNA, 618 bp, synthetic construct
  misc_feature 1..618: note = Description of Artificial Sequence: Synthetic coding sequence
  source 1..618: mol_type = other DNA
atggagggcctgagcgacgtggccagcttcgccaccaagctgaagaacacgctgatccagtaccattcaattgaagaggacaagtggcgggtagccaaaaagaccaaggatgtgaccgtgtggcgcaagccttcagaggagtttaacggctacttatataaggctcaaggcgtgattgacgacctcgtctattccatcatcgatcacatcagaccaggcccctgccgtttggattgggattctctcatgacaagccttgatattctggagaactttgaggaaaattgctgtgtgatgcgatacacgacggccggacagctctggaatattatatctcccagagagttcgtcgatttttcatataccgtgggatataaagagggactgttgtcatgcggtatttcactcgattgggacgagaaacgccccgagtttgtgcggggctacaatcacccctgcggctggttctgcgtgccattaaaggataaccccaatcaatcattacttacaggctatatacaaacggacctccgtggcatgatcccacagtccgcagtagacacagccatggcgtcaacactcaccaacttctacggggacctgcgtaaagcgctctag

SEQ ID NO: 207105 - DNA, 576 bp, synthetic construct
  misc_feature 1..576: note = Description of Artificial Sequence: Synthetic coding sequence
  source 1..576: mol_type = other DNA
atggagggcctgagcgacgtggccagcttcgccaccaagctgaagaacacacttatccagtatcactctattgaggaggataaatggagggttgctaagaaaacgaaagatgtgaccgtctggcgtaaaccttccgaggagttcaacggatatctctacaaagcacagggcgtcattgatgatctcgtgtactcgattatcgatcacattaggcctgggccatgcagactggattgggattctctcatgacctctctggatatactcgagaactttgaagagaattgctgtgtgatgcgatacactacagcaggtcagctgtggaatatcatatctccccgggaattcgtcgatttctcctacaccgtgggatataaggagggtcttttaagctgcggcatttcactggattgggacgagaagaggcctgaatttgttcgtggttataaccacccttgcgggtggttttgcgttcctctgaaggataatcccaaccagtctttgctgaccggctatattcagactgacctccgcgggatgattcctcagagtgctgtagataccgccatggcatag

SEQ ID NO: 207106 - DNA, 642 bp, synthetic construct
  misc_feature 1..642: note = Description of Artificial Sequence: Synthetic coding sequence
  source 1..642: mol_type = other DNA
atggaccccgccctggccgcccagatgagcgaggccgtggccgagaagatgctgcagtacaggagggatactgcaggatggaaaatatgtagagaaggaaacggcgtctccgtgagttggagaccaagcgtggaattcccaggaaacctgtaccgcggagaaggaatcgtgtatggcacgctagaggaggtgtgggactgcgttaagcccgctgtcgggggactccgggtcaagtgggatgagaacgttacgggcttcgagattattcagtcaattacggacaccctctgcgtaagtcggacctccacaccctccgccgctatgaaattaatttctccccgggactttgttgacctcgtgttagttaaacggtacgaggatgggacaatttctagcaatgctacacacgtcgagcatcctttgtgcccccccaaaccgggatttgtccgcggattcaatcacccttgcgggtgcttctgcgaaccactccctggtgagccaaccaagacgaatctggttaccttttttcacacggatctgagcggatatctcccacaaaatgtggtggacagtttcttccccagaagcatgacccggttttacgccaacctgcagaaggcggtcaagcagttccatgagtag

SEQ ID NO: 207107 - DNA, 663 bp, synthetic construct
  misc_feature 1..663: note = Description of Artificial Sequence: Synthetic coding sequence
  source 1..663: mol_type = other DNA
atggacttcaaggccatcgcccagcagaccgcccaggaggtgctgggttacaatcgcgacacaagcggatggaaggttgtgaaaacttctaagaaaatcaccgtcagctcaaaggccagcagaaagttccatggtaacctttacagggtggagggcatcatcccagaatccccagcaaagctgtctgattttttgtaccagacaggtgatcgcatcacatgggataagagcttgcaagtatataacatggtacaccgcatcgactcagatactttcatatgccacactataactcaatccttcgcagtcggctcaatatcaccacgcgacttcattgatttagtgtatattaaaagatatgaagggaacatgaacatcatctcttctaagagtgtagactttcccgaatatccccccagctctaactatatcagaggctataatcacccttgcgggttcgtctgctcccctatggaagagaatcccgcttactccaagctggttatgttcgttcagaccgaaatgcggggcaagctaagcccatcaattatcgagaagaccatgccctccaatctggtgaactttatcctgaatgcgaaggatggcatcaaggcacataggacaccttcaagacgcgggtttcatcataacagtcattcttag

SEQ ID NO: 207108 - DNA, 3072 bp, synthetic construct
  misc_feature 1..3072: note = Description of Artificial Sequence: Synthetic coding sequence
  source 1..3072: mol_type = other DNA
atgaccctgaacaactgcgccagcatgaagctggaggtgcacttccaatccaaacagaacgaagatagtgaggaagaagagcaatgtaccatatcttcacattgggctttccagcaagaatccaagtgttggtcgcccatgggatctagcgatctgcttgcgccaccttcaccgggcctacccgcgacatctagctgcgaatccgtcctcacagaactgagcgcaacatcgcttccagtcatcaccgtatctttgccaccagaacccgccgatctcccccttcctggacgggctccctcctcttcagaccgccctctcctgagccccacacaagggcaggagggcccccaagataaggccaagaagcgtcatagaaaccgctccttcctgaaacacctggagtccctgagacgaaaggaaaaatctggtagtcagcaggccgaacctaagcattcccctgccacttccgaaaaagtgagcaaggcctcttctttcaggtcatgccgtgggtttctcagcgcaggcttttacagagcaaaaaattgggcagccacttccgctgggggatccggggctaatactcgcaaggcctgggaggcctggccagtggcatccttcaggcacccacaatggacccacagaggagactgtcttgtgcacgtgccgggagaccacaaacccggaaccttccctcgatccctgtctatcgagagtttgtgtccggaggacgggcatagattggccgattggcagcctgggcgccgttggggttgcgaggggcgtagaggaagctgcggcagcactggcagtcacgcttccacctacgataaccttcccgagctttaccccgccgagccagtgatggtgggagctgaagcagaggacgaagatgacgaagaaagcggtggatcgtacgctcacctagatgatatcttacagcatgtctggggccttcagcaacgcgtggagctttggtcccgggccatgtacccagacttgggacctggtgatgaagaggaagaggaagccacaagttcagtcgagatagccacggtggaagtgaaatgccaggctgaggctctgtcccaaatggaagtacccgcccacggcgaaagtcccgcctgggcacaggcagaggtgcagcctgccgtgctagctccagcgcaggcccccgccgaggccgaacctgtggctcaagaagaggctgaggccccggccccggcaccggcccccgcccctgcccaggattcggagcaggaagctcattctgggggcgagcctaccttcgctagttcattgtctgtcgaggagggtcacagtatctctgacaccgtggcgtcatctagtgagcttgacagctcaggcaactcaatgaatgaggccgaagccgctgggccgttggctgggttgcaggcgtccatgcccagggagagacgagactcaggggtgggagctagtctcaccaggccttgccgaaagctccggtggcacagctttcagaatagtcaccgcccttccttgaactcggagtccctggagataaaccgccagtttgccggacagattaacctactgcataaaggatcgctattgaggcttacagctttcatggaaaagtatacagttccccacaaacagggctgggtgtggagtatgcccaagttcatgaggaggaataagacccctgattatagagggcagcatgtattcggtgtgccccctctgatacatgtgcagcgcactggtcaaccgctaccccagtccatacagcaagctatgcggtacctccgctcccaatgtctcgaccaggttggaatttttcgcaaaagtggcgtcaagtcacgcattcagaacttacgacagatgaacgagacaagtccggataacgtatgctacgaggggcagtccgcctacgacgttgccgacctgctaaaacaatacttccgcgaccttcccgaacctatctttaccagtaagctgactacgacctttctccaaatctatcaactgctccctaaagaccagtggctcgctgccgcccaggcagccactctgctgctaccagacgagaaccgagaagttttacaaacactcctatactttctgagcgatatagcctcagccgaggaaaatcagatgaccgccggcaatctggccgtctgcctcgcgccctccatcttccacctcaacgtttcaaagaaggactcaccaagcccccgaatcaagagtaagcgatcactgatcggaaggccaggtccacgggacctctctgataacatggcagcaacccagggactgtcccatatgattagcgactgtaaaaagctgttccaggttccccaagacatggtgctccagctatgcagttcgtatagtgccgcggagctgtccccccctggtcccgcgctcgcggaactcagacaggcccaggccgccggggtttcactgtctctgtatatggaggagaacatccaggacctgctcagggatgcagccgagcgtttcaaaggatggatgtccgtgcctggcccccagcacactgaactggcatgccggaaagcccccgatgggcaccctctccgcttgtggaaggcttctacagaggtagccgctccacctgccgtcgtactgcaccgcgtgcttagggagagggccctttgggacgaagacctgttacgggcccaggtgttggaagcactaatgcccggagttgaactctatcattacgtgacagatagcatggccccccacccatgccgagactttgtggtcctgcgaatgtggcgatctgacctcccgcgagggggatgcctgttggtgagtcagagcctcgacccagagcagccggtcccagaaagcggtgtcagagctctgatgttgaccagccaatacttgatggagccatgcggcctgggccgcagccgattgacacacatctgtcgcgctgaccttagagggaggtctccagactggtacaataaggtcttcggccatctctgcgctatggaagtggcgaagatacgagatagcttccctactttacaggccgcgggccctgagacaaagctctag

SEQ ID NO: 207109 - DNA, 3072 bp, synthetic construct
  misc_feature 1..3072: note = Description of Artificial Sequence: Synthetic coding sequence
  source 1..3072: mol_type = other DNA
atgaccctgaacaactgcgccagcatgaagctggaggtgcacttccaatccaaacagaacgaggattctgaggaagaagagcagtgtaccatttcttctcattgggcgttccagcaggagtctaagtgttggtctccaatgggctcaagcgatctcctcgcccctcccagcccgggactccccgccacctcgtcctgcgagagcgtcctgacggaactgagcgctaccagcctaccagtgattactgtttccctaccacctgagccggccgatctgcctcttcctggcagggcccccagtagctccgaccgcccactgctgtctccgacacagggccaggaaggaccacaagataaggcaaagaagaggcataggaatcgaagtttcctcaagcacctcgaatcacttcgcagaaaggaaaagtctgggtctcagcaggccgagccaaagcacagtcccgcaacgtccgagaaagtcagtaaagcatcctcctttaggagctgtcgcggtttcctgagcgcgggtttctacagggcgaagaattgggctgccactagcgcgggcgggtccggagcgaataccaggaaagcctgggaagcctggcccgtggccagcttccgccacccacagtggacgcaccggggggactgcctggtgcatgtacccggcgatcacaaaccaggcacttttccaaggtccctaagtatcgagtccctctgccctgaggatggacacaggctcgctgactggcagccaggaaggcggtggggctgtgaaggacggcgtgggagttgcggaagtaccggaagtcacgcaagcacctatgataatcttccagaattatatcctgccgaacctgtgatggtcggcgctgaagccgaagatgaagatgacgaggaaagtggaggatcatacgcccacctggacgatattctgcaacacgtctggggcctgcagcaacgcgtcgagctgtggtcaagagccatgtatcccgacctgggcccgggcgatgaagaggaagaggaggctacgtcctccgtggagatagccacagtggaggttaagtgccaggcggaagctctcagccagatggaggtgcccgctcacggtgagagcccagcttgggcacaagcagaggtacagccagcagtgctcgctccagcccaggctcctgctgaggcggagcccgttgcgcaggaggaagccgaagctccggccccagccccggcacctgcccctgctcaggactcagagcaggaggcgcattccggtggggagcccacttttgcttcttccctgtcagttgaggagggacattccatcagtgatactgtggctagcagttcagaactggattcctccgggaatagtatgaatgaagctgaagccgccggaccactggcaggtctgcaggccagcatgccacgtgagcgcagggactcgggggtgggggccagtctgactaggccttgccggaagctgaggtggcattccttccagaattcccacagaccttcgctgaattcagagagtctggagattaatcggcagtttgcagggcaaattaacctgcttcacaagggctccttactaaggctgacagcttttatggaaaagtacactgtaccgcataagcaagggtgggtctggtcaatgcccaagttcatgcgtcggaacaagacacctgattaccgaggccagcacgtgttcggggtcccgcctcttattcacgtgcaaagaaccggacaacctctcccccagagtatccagcaggctatgcgctatctgaggagtcagtgtctggaccaggtgggaatcttcaggaagtcgggcgttaagagtaggatacagaacctacgccagatgaatgaaacatcaccggacaatgtgtgttacgagggtcagagcgcatacgatgtggcagatctcctaaagcagtactttagggatcttcctgaaccaatttttacatcaaagctgaccacaacctttctgcagatctaccaacttctgccgaaagatcagtggctggcagctgctcaagccgctacactgctcctgccagacgagaacagagaagtactccagactttgctgtatttcctgtccgatatcgcgtctgccgaagaaaatcaaatgactgccggtaatttggcagtttgtctggcgcctagcatattccacttgaacgtgagcaagaaagattccccaagcccccgcattaaatcaaagaggagtctgattggccgcccgggccctcgggacctgtcagacaacatggccgctacacagggcctgtcacacatgatctccgattgcaagaagctctttcaggtgcctcaggatatggtactgcagctgtgttccagttatagcgccgccgaactgtcccccccaggtcccgcacttgctgaactgaggcaggcacaggctgctggcgtgtccctatcgctgtatatggaggaaaatatccaggatttactgagggacgctgccgagcggtttaagggttggatgagcgtacctggacctcagcataccgagttggcctgtcggaaggctcccgacggccaccccctgcggctgtggaaagcctccacagaggtcgctgcacctcccgccgtagtgctgcatagagtgctgcgggagcgggccttgtgggatgaagatttgctgcgggcacaggtgcttgaagcacttatgccaggcgtagaactctatcactacgtcaccgacagcatggctcctcatccctgcagagattttgtggtgctcaggatgtggcggtctgacttgccaaggggaggttgcctgctggtctcccaatccttggacccggagcagccagtgccagaaagcggcgtgcgagctttaatgctaactagccagtatctcatggaaccttgcggcctcggtcggtccaggctgacgcacatttgcagggccgatttaaggggtcggagcccggattggtacaataaggtgtttggccatctgtgtgcgatggaagttgcaaaaatccgagattcgtttccgacgttacaagccgcagggcccgagaccaagctgtag

SEQ ID NO: 207110 - DNA, 3312 bp, synthetic construct
  misc_feature 1..3312: note = Description of Artificial Sequence: Synthetic coding sequence
  source 1..3312: mol_type = other DNA
atgcccctgctggacgtgttctggagctgcttccggaaggtgaagtgtttccccctgctgcaggtaaaaaaaaacgctgaagcagaggctaagcgggcctgtgagtggctgcaggctaccggatttccacaatacgtgcagctctttgaggaagggtcctttccgttggatatcggcagtgttaaaaagaaccacggattcttagatgaagactctctgggagcgctgtgtcgcagattgatgaccttgaacaactgcgccagcatgaaactggaggtacactttcagtctaaacagaacgaggacagcgaagaggaagaacagtgcacaatctcaagccattgggcgttccagcaggaaagtaaatgttggtctccaatgggttcttccgacctgctcgcaccaccatcgcccggtctcccagcaacttcaagttgtgaaagtgtgctgaccgagctctccgccacaagtttacccgtcattactgtatccctgccccctgagcccgccgatttgcccctcccaggccgcgcaccttcttccagcgatcgtccactcctttcccctacacagggccaggagggcccccaggacaaagctaaaaaaagacaccgaaatagatccttcctcaagcacctagaatctctcaggagaaaggaaaagtcaggcagccaacaggcggagcccaaacacagtcccgcaactagcgaaaaggtctcaaaagctagcagtttcaggagctgccggggtttcctgtctgcagggttctatcgcgctaaaaattgggctgccaccagcgccggcggctctggcgctaatacaagaaaagcatgggaagcctggcccgtcgccagctttcgccacccacagtggacacataggggagattgtctggtccacgtccccggtgaccataaaccggggacattcccaagaagcctgtccattgaatctttgtgccctgaggatggccaccgtcttgcggattggcagccgggacggcgctggggttgcgaggggcggcgcggctcctgtggaagcactggttcccatgcaagtacatacgacaacctgccagagttgtacccagcggagcctgtcatggttggcgcggaagcagaagatgaggacgatgaggagagtggtgggagctacgcgcacctcgacgatatcttacagcatgtatggggcctgcagcagagagtggaactgtggtccagagctatgtaccctgacttgggtccaggagacgaggaggaagaagaggcgacatccagtgtggaaatcgccacagtagaagtgaagtgccaagctgaagctctttctcagatggaggtgcctgcccacggagagagcccagcctgggcacaggccgaagtacagcctgcagttctcgcacctgcgcaagccccagcagaggccgagcccgtggcacaagaagaggcggaagcgccagcgccagctcctgccccagctccagcccaggattccgaacaggaggcacatagcgggggtgaaccaaccttcgctagttcactgtcagtggaagaggggcactcaatttctgataccgtcgcttccagcagtgagcttgacagctctgggaacagtatgaatgaggctgaagctgctggaccactggccgggctccaagccagcatgcctcgcgaaaggagagactcaggtgttggggcctctttaacccggccatgccgcaaactgcggtggcattcttttcagaattcccataggccaagccttaactcagagtccctggagatcaaccgacagtttgccggccagataaacctactacataaagggtcattactgcgcttgacagccttcatggaaaaatacacggtacctcacaaacagggctgggtctggagcatgccgaagtttatgaggcggaataaaacacctgactataggggacagcatgtcttcggcgtaccgcctctcatccacgtgcagaggaccgggcaacctttaccccagtctattcagcaagcaatgcgctatctacgctcccagtgtttggaccaggtcggcatttttcgcaagagtggagtgaagagtcgaatccagaatctgagacagatgaacgagactagtccggataatgtttgctacgagggacaatccgcttacgacgtcgccgacctgctgaaacagtattttcgggatctgcccgagcctatcttcacctccaagttgactaccacatttttgcaaatttatcagctcctgccaaaggatcagtggttggccgcggcacaggccgccaccttactgctcccggatgagaacagagaagtgttgcaaaccctgctttatttcttgtcagacatcgcctccgctgaagagaatcagatgacagccggtaatcttgcagtatgcctcgccccatcgatcttccacctgaatgttagtaaaaaggattccccctcccccagaataaagtcaaagagaagcctgataggaagacccgggccaagggatctgagcgacaacatggctgctacacaggggctgtctcacatgatctccgactgcaaaaagttatttcaggtgccacaggatatggtcctgcagctctgctccagctattcagctgccgaactgagccctcccggaccagcccttgccgaactgcggcaagcccaggccgccggcgtttctttaagtctgtacatggaggagaatattcaggatctgctacgcgacgccgcggagcggtttaagggttggatgagcgttcctggcccccagcacactgaactggcttgtaggaaagcaccagatggccatcccctgagactttggaaagcctccaccgaggtcgccgcccctcctgctgtcgtgctacatagagttctgcgagaacgtgcactgtgggacgaggatctgctgcgcgcacaggtgctggaagcattaatgccaggcgttgagctgtatcactatgttacagactccatggctccacacccttgcagggatttcgtggtcctaagaatgtggaggtccgatctcccacgcgggggctgcctactagtgagtcagtcattagaccctgagcagccagtgcccgagtctggcgtccgggcattaatgctcacctcgcagtatcttatggagccttgcgggctcgggcgatcaagactgacccatatttgcagggccgatctgagaggaagatctcccgattggtacaataaggtgttcggtcacctctgtgctatggaggtggccaagatacgagatagtttccccaccctgcaggccgccggacctgaaaccaaactgtag

SEQ ID NO: 207111 - DNA, 159 bp, synthetic construct
  misc_feature 1..159: note = Description of Artificial Sequence: Synthetic coding sequence
  source 1..159: mol_type = other DNA
atgcccctgctggacgtgttctggagctgcttccggaaggtgaagtgctttcccctgctccaggtcaaaaagaacgctgaagcagaagccaagagagcatgtgagtggttacaggctacagggttcccccaatacgttcaacttttcgaaggagggtag

SEQ ID NO: 207112 - DNA, 189 bp, synthetic construct
  misc_feature 1..189: note = Description of Artificial Sequence: Synthetic coding sequence
  source 1..189: mol_type = other DNA
atgaagttcctggtgttcgccttcatcctggccctgatggtgagcatgatcggcgcggatagctccgaggaaaaattccttagaaggattgggcgatttggctacggttatggaccctaccaacccgtgcctgaacagccactctatcctcagccgtaccagcctcagtatcagcaatacacattctag

SEQ ID NO: 207113 - DNA, 159 bp, synthetic construct
  misc_feature 1..159: note = Description of Artificial Sequence: Synthetic coding sequence
  source 1..159: mol_type = other DNA
atgaagttcctggtgttcgccttcatcctggccctgatggtgagcatgatcggcgctgactcatctgaggagtacggatatggcccttatcagcctgtgccagaacagccactgtaccctcaaccataccaacctcagtaccagcagtacactttttag

SEQ ID NO: 207114 - DNA, 843 bp, synthetic construct
  misc_feature 1..843: note = Description of Artificial Sequence: Synthetic coding sequence
  source 1..843: mol_type = other DNA
atgcggtggttcctgccctggaccctggccgccgtgaccgccgccgccgccagtactgtgttagctaccgccttgagtcctgctcccacaactatggatttcaccccagctcccttggaggataccagcagccgtccacagttttgtaagtggccctgcgagtgcccacctagcccacctagatgtcccctgggtgtctctctgataaccgacggttgcgaatgctgcaaaatgtgtgcccagcagctgggagataactgtaccgaagcagctatctgtgaccctcatagaggcctttattgcgactactcaggtgacaggccacggtatgcaatcggagtgtgcgctcacgcggtgggggaggtggaggcatggcaccgaaattgtatcgcgtataccagtccctggagtccgtgctctacttcctgtggtctcggggtatctaccagaatttccaatgtgaatgcccagtgttggcccgagcaggaaagtaggctatgcaatctccgtccgtgtgacgtcgatatccataccctgataaaggcagggaagaaatgcttggccgtgtaccaacctgaggcttccatgaactttacactcgccggttgcatatctaccaggagctatcaacccaagtactgcggggtttgcatggacaacaggtgctgcataccctataagtcaaaaaccatagatgtgtcgtttcagtgccctgacggtctgggtttcagccgccaagtgctgtggattaatgcatgtttttgcaacttgagctgcagaaatcccaatgacatcttcgcagacctcgaatcataccccgacttttccgagatcgctaactag

SEQ ID NO: 207115 - DNA, 507 bp, synthetic construct
  misc_feature 1..507: note = Description of Artificial Sequence: Synthetic coding sequence
  source 1..507: mol_type = other DNA
atggccaagaccgccatggcctacaaggagaagatgaaggagctgtcgatgctgagcttgatatgtagctgcttctaccctgagcctcggaacataaacatatacacctacgacgatatggaggtgaaacaaattaataagcgggcgagcggccaggcgtttgagctgatcctaaagcctccttctccgaaaaagaaggatctgtcccttgaagagattcagaagaaactcgaagcagccgaggagcgccgcaagtcccaagaggcccaagtccttaagcaactagccgaaaaaagagagcatgaacgggaggttttgcaaaaggccctcgaggagaacaataactttagcaagatggcggaggagaagctcatactcaagatggagcagattaaagagaaccgggaggctaacctcgcagctattattgagagacttcaggagaaggagaggcacgcggccgaggtccgccgaaataaggagctgcaggtggagctctctggctag

SEQ ID NO: 207116 - DNA, 564 bp, synthetic construct
  misc_feature 1..564: note = Description of Artificial Sequence: Synthetic coding sequence
  source 1..564: mol_type = other DNA
atggccaagaccgccatggcctacaaggagaagatgaaggagctgtccatgctatcactgatctgtagctgtttctaccctgaacctcgaaacattaatatctacacatacgacgatatggaagtcaagcagataaataagagagcaagtgggcaggcttttgagctgatcttgaagcctccctcgcctatctctgaggccccccggactctcgccagtcctaagaaaaaggatcttagccttgaggaaatccagaaaaagctcgaagccgctgaagagcggcggaagtcacaggaagcccaagtccttaagcaactcgccgaaaaacgggaacatgaaagagaggtcctccaaaaagcattagaggaaaacaacaacttttcgaaaatggctgaagaaaaactgattcttaagatggagcagattaaagaaaatagagaggcgaatctggcggctatcattgagagactgcaagagaagctcgtcaagtttatttcgtccgagctgaaagagtcgatagaaagccagttccttgagctgcagagagagggggagaagcagtag

SEQ ID NO: 207117 - DNA, 543 bp, synthetic construct
  misc_feature 1..543: note = Description of Artificial Sequence: Synthetic coding sequence
  source 1..543: mol_type = other DNA
atggccagcaccatcagcgcctacaaggagaagatgaaggagctgagcgtgctgagtctcatatgcagttgcttttacactcagccccatccaaacactgtttaccaatatggtgacatggaggtgaagcagttggacaagcgcgcctccggccagtcctttgaggttatcctgaagagcccttccgacctgtctcccgaatcgcccatgctgtcttccccacccaaaaaaaaagacactagcctggaggagctccagaaaagacttgaggccgcggaagagcgccgcaaaacacaggaagctcaagtgctcaagcagttggccgagcggcgagaacacgagagagaggtgttgcacaaagctctagaggagaacaacaacttttcacgccaggcagaggaaaagttaaattacaaaatggagctgtctaaagaaatccgggaagcccaccttgcggccctgcgtgagcgcttgcgggagaaggagctgcacgctgccgaggtcaggaggaataaggaacaaagagaagaaatgagtggatag

SEQ ID NO: 207118 - DNA, 510 bp, synthetic construct
  misc_feature 1..510: note = Description of Artificial Sequence: Synthetic coding sequence
  source 1..510: mol_type = other DNA
atgaaggagctgagcgtgctgagcctgatctgcagctgcttctacacacaacctcaccccaacaccgtttatcaatacggcgacatggaggtcaagcagctggacaagcgagccagcgggcagagttttgaggttatcctgaagagcccttccgatctgtcacctgagagccctatgttatcctccccgcccaagaaaaaagacacaagtctcgaagaactacagaaacggcttgaagctgccgaagagcggagaaaaacccaggaagctcaggtcctgaagcagctcgcggagcgacgggagcatgaacgcgaagtactccacaaggcacttgaggaaaataacaactttagccggcaagctgaggagaagttgaattacaaaatggagttgtcaaaggagataagagaagctcaccttgcagccctaagagagagactgcgggagaaagaactgcatgcagctgaggtgaggcgaaacaaggaacagagagaggagatgtccggttag

SEQ ID NO: 207119 - DNA, 1422 bp, synthetic construct
  misc_feature 1..1422: note = Description of Artificial Sequence: Synthetic coding sequence
  source 1..1422: mol_type = other DNA
atgttcagcgtgcagctgagcctgggcgagcagacctgggagagcgaaggctcatcaatcaagaaggctcagcaggctgttgcaaacaaggccctcacggagagcactttgcctaaaccagtccagaagcctcctaagtcaaacgtgaataacaatccaggcagcatcacgcctacagtagagctgaacggcttggcaatgaagagaggagagccagccatctatcgccccctggatccaaaaccatttcccaactatcgtgcgaattataacttcagggggatgtacaaccagcggtaccactgtcccgtaccaaaaatcttttacgtgcaactaactgtgggcaacaatgagttctttggagagggcaagacgaggcaagccgctagacacaatgccgctatgaaagctcttcaagctctgcagaacgaacctatacccgagaggtcgccacagaatggtgagtcaggaaaagacgtggatgacgacaaagatgcaaacaagtcagagatcagtcttgtgtttgaaattgcgctgaagagaaatatgcccgtttcctttgaggtcatcaaggagagcggacccccccatatgaaatccttcgtgaccagagtttcagttggagaattcagcgcggaaggagagggaaactcaaagaaactcagtaaaaagcgtgccgccaccacggtgcttcaggaactgaagaagctgcctcctctgcccgttgtcgagaaacctaaactgtttttcaaaaaaagaccaaagactatcgtgaaggctggaccagagtacggccagggcatgaaccctatttcccggctcgctcagatacagcaagccaagaaggaaaaagaacccgattatgttctgttatcagagcgcggcatgccacgccgtcgagagttcgtcatgcaggtgaaagtgggcaacgaggttgcaactggaaccgggcctaacaagaagattgccaaaaaaaatgccgctgaggcaatgttgctgcagctgggctacaaggccagtacgaacctccaggaccagctggagaagacaggagagaacaagggctggagtggtccaaagcccggctttcccgagccaaccaacaacacccccaagggcatcctccatctctccccagatgtgtaccaggaaatggaggcaagcagacacaaagtaatcagcggtaccactttgggatatctgtcgcccaaggatatgaaccagcccagctctagcttcttctcaatcagcccgacaagtaattcatccgccactattgcccgggaactgcttatgaacggtacatccagcactgccgaagcaatcggcctgaaggggagcagcccaacaccgccttgcagccccgtgcaaccatcgaagcagctagagtacctcgcaagaattcaaggattccaggtttag

SEQ ID NO: 207120 - DNA, 1515 bp, synthetic construct
  misc_feature 1..1515: note = Description of Artificial Sequence: Synthetic coding sequence
  source 1..1515: mol_type = other DNA
atgaagcggggcgagcccgccatctaccggcccctggaccccaagcccttcccaaactatcgcgctaattataattttcgaggaatgtacaaccagaggtaccactgtcccgtgcctaaaattttttacgttcaacttactgtggggaacaatgagttcttcggcgagggcaaaacccgccaagctgctcggcataatgccgccatgaaagcattacaagccctacaaaacgaacctatccctgagcgctccccacagaacggcgagtccggcaaggatgtcgacgatgataaagacgcaaacaagtccgaaataagtcttgtgttcgagatcgccctgaagcgaaatatgccagtcagttttgaggtgataaaagaatccggtccccctcacatgaaatcattcgtgaccagagtctctgtgggagagtttagcgcagaaggtgaaggcaacagcaagaaactgtccaagaagagggctgccacaacggtgctccaggagctgaaaaagctcccccccctgccagtagtagagaagcccaagctgtttttcaagaaaagaccaaaaaccatcgttaaagccggtccagagtatgggcagggtatgaaccctataagtcgcctagcccagattcagcaggctaaaaaggaaaaggagccagattacgtgttgctgagcgagagaggtatgcctcgccggcgcgaatttgtgatgcaagttaaggtaggtaacgaggtggcaaccggcacaggccctaataaaaagattgcaaagaaaaatgccgcggaagcaatgctgctgcaactcggatataaggcatcaacaaaccttcaggatcaattagagaaaacaggggaaaataaaggctggagcggccccaaacccggattccccgagcctactaacaacaccccgaaaggaatcctgcatctcagtcccgatgtttatcaagagatggaggctagccgccacaaggttatctccggcaccacactgggatacttgtctccaaaagatatgaaccaaccttctagtagtttcttttccattagccccacgagcaacagcagcgcaacaattgctagagagctgctgatgaatgggacatcgtccaccgccgaagcgatcggtctgaaagggtccagccctacaccaccctgctcgcctgtccaacctagcaaacagttggagtacctcgcccggatccaaggatttcaggtccattattgcgatcgccagtccggtaaggaatgtgtgacctgcctgactctcgctccagttcagatgaccttccacgctataggcagctccattgaggccagccatgaccaggcggctttgtcggcgctcaagcagttctctgagcaggggctggaccccattgacggggccatgaatatcgagaagggatccctggagaaacaggccaagcacctacgcgaaaaagccgataacaatcaggcccctcctggctctatcgctcaggattgcaagaaaagcaactctgctgtgtag

SEQ ID NO: 207121 - DNA, 1197 bp, synthetic construct
  misc_feature 1..1197: note = Description of Artificial Sequence: Synthetic coding sequence
  source 1..1197: mol_type = other DNA
atgaaggccctgcaggccctgcagaacgagcccatccccgagcggtctcctcagaatggggaatcaggaaaggatgtcgacgacgataaagacgcgaacaaatcggaaatatctttagtgttcgaaatcgccttgaagcgcaacatgccggtatcctttgaggtgatcaaggagtctggcccaccccacatgaagagttttgtcaccagagtgtcagtgggggaatttagtgccgagggggagggtaattcaaagaaactgagtaagaaacgtgctgctaccacggtgcttcaggagctgaaaaagctcccaccgttgccagtcgtggagaaaccaaagctattcttcaaaaaacggccgaagacgattgtaaaggcaggtcctgaatacggccagggtatgaatccgattagtcgattggctcaaatccagcaggctaagaaggaaaaagagccagattacgtgctgttatcagaaaggggtatgcctcgccgccgcgaattcgtgatgcaggtgaaggtgggaaatgaagtggccacaggcacagggcccaataaaaagatcgctaagaaaaacgccgccgaagctatgctgcttcagttgggttataaagcatctaccaatctgcaggatcaactggaaaaaacaggagaaaacaaaggttggtccggtccgaagcccggctttcccgagccaacaaataacaccccaaaaggaatcctgcacctgtcccccgacgtataccaagaaatggaagcctctcggcataaggtcatttctggaactacattgggttatctaagtccgaaagacatgaaccagccaagttcgtctttcttcagtatctcacccacttcgaattcaagtgccaccatcgccagagaacttctgatgaatggaacaagtagcactgccgaggcaatcggactcaagggctcaagcccaacacccccctgcagcccggtgcaaccctccaagcaacttgaatatcttgcacgaattcagggattccaggcggctttgagcgcacttaagcagttctctgaacaggggctggaccctatagatggtgccatgaacatagagaaaggttccctggagaaacaggccaagcacctgagggaaaaagcggataacaatcaggccccccctggcagcattgcacaagattgtaagaaaagcaattcggccgtttag

SEQ ID NO: 207122 - DNA, 1440 bp, synthetic construct
  misc_feature 1..1440: note = Description of Artificial Sequence: Synthetic coding sequence
  source 1..1440: mol_type = other DNA
atgctgcagatcaaccagatgttcagcgtgcagctgagcctgggcgagcagacttgggagtctgagggctccagtattaagaaggctcagcaagccgttgctaacaaggcgctgacggaatccacattacccaagcctgtgcagaaacctccaaagtccaacgtgaataataatccaggctctatcactccaactgttgaactgaacggtcttgccatgaaaagaggagaaccagccatctataggcccctggacccgaagcccttccctaattaccgggctaattacaatttcagaggcatgtacaaccaacgataccattgtcccgtaccgaaaattttttacgtccaactcaccgtggggaacaatgaattcttcggagagggaaagaccagacaggcagccaggcataatgccgctatgaaggccctccaagcgctccagaatgagccaatccctgagcggagtccccagaacggagagtctggcaaggacgttgacgatgacaaggatgcaaataagtcagagatctctctcgtgtttgagattgctcttaaaaggaatatgcctgtctccttcgaggtaatcaaagaaagtggcccccctcacatgaaaagcttcgtcaccagagtttctgtgggtgagtttagcgcagagggggaagggaactcaaaaaaattgagcaaaaagagggcagccacaaccgttctgcaggaactgaagaagttaccaccccttccagtcgtcgaaaaaccaaagctgttcttcaagaagagacccaagacaatagtcaaggcaggccccgagtatgggcagggaatgaatcccatttccaggctggctcaaatccaacaagctaagaaagaaaaggagccagattatgtcctcttgtctgagaggggcatgccccgaagaagggaattcgtgatgcaggtcaaagtgggaaatgaggtcgctactggaactggtcctaataagaaaattgccaaaaaaaatgccgccgaagccatgctgctgcagctgggatacaaggcatcaaccaatctgcaagatcagctcgagaagacaggcgaaaacaagggatggtctggacccaagcccggtttcccggagcctaccaataacacgccgaagggaatcctccatctcagtcccgatgtgtatcaggagatggaggcctcacgccacaaggttatctctgggacgactctggggtacctttcaccaaaggatatgaaccagcctagttcctctttcttctcaattagtccaacgagcaactcttcagccacgatagcgagggaactcctaatgaatgggacctcaagtaccgcggaagccatcggattgaaaggatcctcccctactcccccctgctcccctgtccagccatctaagcagctggagtacctggccaggatacagggcttccaggtgtag

SEQ ID NO: 207123 - DNA, 615 bp, synthetic construct
  misc_feature 1..615: note = Description of Artificial Sequence: Synthetic coding sequence
  source 1..615: mol_type = other DNA
atgctgcagatcaaccagatgttcagcgtgcagctgagcctgggcgaacagacttgggaaagcgaaggatccagcataaagaaggcccagcaggccgttgctaacaaagcccttacggagtctaccctgccaaaacccgtgcaaaaaccgcctaagtctaatgtgaacaacaacccaggcagtatcacccctacagtggaattgaacggtctcgcaatgaaacgtggcgagccagctatctatcgtccgttggatcccaagccctttcctaactacagagctaattacaatttcagaggaatgtataaccagcgataccattgtccggttccaaaaatattttatgtccagttgacagtgggaaataacgaattcttcggtgaaggcaagacccgccaggcggcaaggcataatgctgctatgaaagccctgcaggcattgcagaatgagccaattcctgaacgaagccctcagaacggcgaatcagggaaagatgttgacgatgacaaggacgccaacaaatccgaaatctctttggtcttcgaaatcgcacttaaacggaacatgcccgtgtcatttgaagtgataaaggagagcggacccccacacatgtag

SEQ ID NO: 207124 - DNA, 195 bp, synthetic construct
  misc_feature 1..195: note = Description of Artificial Sequence: Synthetic coding sequence
  source 1..195: mol_type = other DNA
atgctgcagatcaaccagatgttcagcgtgcagctgagcctgggcgagcaaacttgggaaagcgaggggtcatctatcaaaaaagcacagcaagccgtagccaataaggccctgaccgagagtactctcccgaagcccgtgcagaagccccccaagagtaacgtgaacaataatccagggtccatcaccccttag

SEQ ID NO: 207125 - DNA, 1440 bp, synthetic construct
  misc_feature 1..1440: note = Description of Artificial Sequence: Synthetic coding sequence
  source 1..1440: mol_type = other DNA
atgctgcagatcaaccagatgttcagcgtgcagctgagcctgggcgagcaaacatgggagtctgaaggatcaagtatcaagaaagcccaacaggccgtggctaataaggccctgactgaaagcaccctacccaaacctgtacagaaacctccaaagtctaatgtgaataataacccgggctccattacgccaacagtggaactgaatggtctagccatgaaacggggggaacccgcaatctaccgtcccttagatcctaaaccattcccgaactacagggccaactacaatttcaggggcatgtataaccagcgataccattgcccagtgcccaaaatcttttacgtccagcttaccgtgggtaacaacgagttctttggtgagggcaagacccgtcaagctgcccgacacaacgccgcaatgaaggctcttcaggccctgcaaaacgaacccatccccgaaaggtcgccacagaacggtgaatcagggaaagacgtcgacgacgacaaggatgctaataagagtgagattagtctcgtattcgaaatcgctctgaagcgaaatatgcctgtctcatttgaagtcattaaagagagcgggccaccacacatgaagtccttcgtgactcgcgtgagtgtcggagagttcagcgccgagggcgagggcaactccaagaagttgtccaaaaagagagcggcaacaaccgtgctacaggagttgaagaaactcccgcccctgcccgtcgttgaaaagcccaaactctttttcaaaaagaggcccaaaactatcgtaaaggccggccctgaatatggacagggcatgaatccaattagtagactggcgcaaatccagcaggccaaaaaagagaaagaaccagattatgtcctcctcagtgagaggggaatgccccgacgcagagagtttgtgatgcaagtgaaggtaggaaatgaggttgctactgggactggccccaacaaaaaaatcgcaaagaagaatgctgcagaggctatgctgctgcagctggggtacaaggccagtactaatctccaggatcagctggagaaaacaggggagaacaagggatggtcagggccgaagccaggatttcctgaaccgaccaacaatacacccaaggggatcttgcatctctcccccgacgtctatcaggaaatggaggcttctcgacataaagtcatttcagggacaacactgggctatttatcacccaaagacatgaatcaaccttcctccagcttcttttctattagtcctaccagtaactcgagcgccaccattgcaagagaactgctcatgaacggcacttcgtctacagctgaggctattgggcttaaaggcagtagtcctacacccccatgcagtcctgtgcagccatctaagcaactcgagtaccttgctcggatacagggattccaggtgtag

SEQ ID NO: 207126 - DNA, 1617 bp, synthetic construct
  misc_feature 1..1617: note = Description of Artificial Sequence: Synthetic coding sequence
  source 1..1617: mol_type = other DNA
atgctgcagatcaaccagatgttcagcgtgcagctgagcctgggcgagcagacctgggaaagtgagggaagctctatcaagaaggcccagcaggccgtggcaaacaaggctttaaccgaaagcacattgccaaaacctgtgcaaaaaccccccaagtctaacgttaacaataatcccgggagcattactcctaccgtcgaacttaacgggctcgcaatgaagcggggggaacctgctatctaccgcccactggacccgaagccctttccaaactacagagcaaactataattttcgaggcatgtataatcagaggtaccactgcccagtccctaagatattttacgttcagctgaccgtgggtaacaacgaattctttggggaggggaagacgagacaggcggccagacacaacgccgccatgaaggcactccaagccctccagaacgaaccaattccagagcgctctccacaaaacggggagagcgggaaagatgtggatgatgataaagacgccaataagtctgaaatctccttagtgtttgaaatcgccttgaagaggaacatgccggtgagctttgaggtgatcaaggagtctggaccaccccacatgaaaagcttcgtaacccgcgtctctgtgggtgaattttccgcagagggtgaaggcaactccaaaaaactctctaagaagagggccgccactacagtcctccaggagctgaagaagctgcctcctctgccggtcgtggaaaagcccaaacttttcttcaaaaaacgacctaagaccatcgtgaaggccggacccgagtacggacagggaatgaatcccatttccagactggcccagatccagcaagccaaaaaggaaaaagagccagactatgtcctgctgtcagagcgcggcatgcccagacgtagagagttcgtgatgcaggtgaaggtggggaacgaggtcgccacaggcaccggacccaacaaaaagattgctaaaaagaatgcagcagaggccatgctgttgcagctgggctataaggcctcgactaatctccaggaccagctggaaaaaactggagaaaacaagggttggagcgggccgaaaccaggcttcccagaaccaacaaacaatactcccaaaggcatcctgcacctgagcccagatgtttaccaagagatggaggcaagccgccataaggtaattagcgggactaccctcggatatctctcacccaaagacatgaaccagccctccagttcctttttttccatttcccctacttcaaactccagcgccacaattgccagggagttgctgatgaacggcaccagtagcaccgcagaagccatcggtttgaaggggagctctcccactccaccgtgcagccctgtgcagccaagtaagcaactcgagtacctggcaagaattcaggggtttcaagccgccctctcagccctcaaacaattctccgaacagggactggatcctatcgatggagccatgaatatcgaaaaaggatccctcgagaaacaggcgaagcatctgcgggagaaagcggataacaatcaggccccgcccggatccattgctcaggactgcaaaaagtccaacagcgcggtctag

SEQ ID NO: 207127 - DNA, 318 bp, synthetic construct
  misc_feature 1..318: note = Description of Artificial Sequence: Synthetic coding sequence
  source 1..318: mol_type = other DNA
atgctgcagatcaaccagatgttcagcgtgcagctgagcctgggcgaacaaacctgggaaagcgagggtagctccattaagaaggcgcagcaggccgtggccaacaaggccctgacagagagcactctccccaaacccgtgcaaaaaccgcccaaatctaatgtgaacaacaaccctggatctattacccccacggtggaattgaacggtcttgccatgaagaggggagaacctgcaatttaccggccacttgaccctaaacctttcccaaattacagggcgaactacaacttccggggcatgtacaatcaacggtag

SEQ ID NO: 207128 - DNA, 1713 bp, synthetic construct
  misc_feature 1..1713: note = Description of Artificial Sequence: Synthetic coding sequence
  source 1..1713: mol_type = other DNA
atggccaaccccaaggagaagaccgccatgtgcctggtgaacgagcttgcacgttttaatagggtgcaaccccagtacaaactgctcaatgaaaggggtcctgctcactccaaaatgttctcagtccaactgtctctgggggaacaaacttgggagtcagaaggctcatcaattaagaaggcacagcaggctgttgcaaacaaggctctcactgaaagcacactgcctaagccagtgcagaagccgcctaagagcaatgttaataacaaccctggatctattacgccaaccgtcgaactgaacgggctcgctatgaagaggggcgagcctgccatctatagacctctggacccgaaaccatttcccaactaccgtgcgaattacaattttagaggaatgtacaaccagaggtaccattgtcccgtgcccaaaattttctacgtccagctaaccgtgggtaataacgaattcttcggcgaaggaaagactcgccaagcggcacgccataacgctgcaatgaaagcacttcaggcactgcaaaacgagcccattcccgagcggtcaccccagaatggggagtcaggtaaggacgtggatgatgacaaagatgccaataaaagtgagatcagcttagtcttcgagatcgctcttaaaaggaatatgcccgtaagcttcgaagtgatcaaggaatccggccctccacatatgaaatcttttgtgacccgtgtctccgtcggcgagttcagcgccgagggagaaggtaattcaaaaaaattatcaaaaaaaagagccgctacaactgtcttgcaagagctcaagaagttgcccccactgcccgtcgtcgaaaaaccgaagctcttctttaaaaagaggcctaagaccattgtgaaagccgggcctgaatacgggcagggcatgaatcccatcagtcggctggcacaaatacaacaagctaagaaagagaaggaaccagattatgtgctgctttccgagcgaggtatgccccgaagacgggaattcgtgatgcaagtaaaagtaggaaacgaagtggctaccggaacaggccccaataaaaagatcgcaaagaaaaatgctgcagaggctatgctgctccagctgggctacaaagcctccacgaatctacaggatcagctggaaaagactggagaaaataaaggttggtccggaccgaagccgggctttcccgaaccaaccaacaatacgcctaaaggcatcctccatctttcccctgacgtctaccaggaaatggaggcttctaggcacaaggtgatctccggaactacacttgggtaccttagcccaaaggatatgaatcaaccaagcagcagctttttcagtatcagtccaacctcgaactcctctgccacaatagctcgagagctgttaatgaacggaacctcatctacggctgaggcgatcggactgaagggctcctcgcctacccccccttgctcccctgtgcagccatctaaacagttggaataccttgctcgcattcaagggttccaagcagctctgtccgctctaaaacagttcagcgagcagggcctagacccgatcgacggcgccatgaacatcgagaaggggtcacttgagaagcaggcaaaacacttgagagagaaggccgataacaatcaggccccaccgggcagcatagcccaggattgcaaaaagtcaaatagtgctgtgtag

SEQ ID NO: 207129 - DNA, 1044 bp, synthetic construct
  misc_feature 1..1044: note = Description of Artificial Sequence: Synthetic coding sequence
  source 1..1044: mol_type = other DNA
agcctgctgaccaacgacgccagcagcgagagcatcgccagcttctccaagcaagaagtaatgagctcgttccttcccgagggtggctgctacgaactgttaactgtcattggtaaaggattcgaagatctgatgaccgtcaatttggccagatacaagcccacaggagaatacgttacagtgcggcggataaacctggaagcatgctctaacgagatggtcacatttcttcagggagaattgcatgttagcaagctcttcaaccatcctaatatcgtgccatacagggccactttcatcgctgacaacgaactgtgggtggtgacatcctttatggcatatggttcagcaaaggatctgatatgcacacatttcatggacggtatgaatgaactggccattgcctacattctacagggcgtactgaaagcgctggattatattcatcacatggggtatgtccatcggagcgttaaggcgtcccacatcttgatctccgtcgatgggaaagtctacttaagcggactaagatcgaatctgagtatgattagccacggacagaggcagcgtgtcgtgcatgacttccctaaatattctgtaaaggttctcccatggctctcaccggaagtgctgcagcagaatttgcaaggttatgatgcaaaatctgatatttactccgtgggaatcacggcttgtgagttggctaacggccatgtcccattcaaggacatgcccgccacccagatgctgcttgaaaagctgaatggcaccgtaccctgcttgttggatacctccactatacccgctgaagagctcacgatgtccccaagccgctctgtggcaaatagcggcctctctgacagcttaaccacatcaactccccggccgtctaatggcgactctccctctcacccctaccacagaacgttcagtccccacttccaccactttgtggagcagtgcctgcagagaaacccagatgcccggtatccgtgctggccagggcccggactgagggagtctcggggatgctccgggggttag

SEQ ID NO: 207130 - DNA, 1296 bp, synthetic construct
  misc_feature 1..1296: note = Description of Artificial Sequence: Synthetic coding sequence
  source 1..1296: mol_type = other DNA
atgagcttcctggtgagcaagcccgagcggatccggcggtgggtgagcgaaaaattcatcgtagagggactgcgcgatttggaactgtttggggaacagcccccaggtgatactcgtcgtaagaccaacgatgcatcttcagagtccatcgccagtttttcaaagcaggaggttatgtctagcttcctgccagaaggaggttgttacgaactgctgaccgtaattggcaagggatttgaggatctcatgactgtcaacctggctagatacaaacccaccggcgagtacgtcaccgtcaggagaattaaccttgaagcttgcagtaatgagatggtcaccttccttcagggagagctccacgtgtcaaaactattcaatcaccccaacattgtgccatatagagccacattcatcgctgacaacgagctatgggttgtgacgagttttatggcttacggtagtgccaaagatctgatctgtacacattttatggatggaatgaatgaactggcaattgcctatatcctgcaaggggtgctgaaagcactggattacatccaccatatgggttacgtgcaccgctccgtgaaggccagtcacattttgatttccgtcgacggcaaggtctacctttccggcctccggtccaacctgagtatgatctctcacggccagcggcagcgcgtggtgcacgacttccctaaatactcagttaaggtgcttccgtggctgtcccctgaagttctgcaacagaacctccaaggttacgacgccaagtctgatatttatagcgtgggcatcaccgcatgtgagttagccaatggccatgtccctttcaaggacatgcctgcaactcagatgctgctcgagaagttgaatggaacagtcccatgcctgctagatacctccaccatacccgctgaagaattaacgatgtctccgtccagaagtgtcgccaactctggcctgtccgatagtctcaccactagtacaccgaggccatccaatggggattcgccttcccatccatatcaccgaacattcagccctcactttcaccactttgtagaacagtgcctgcagaggaacccagacgctcgcccttctgcctctaccctgttaaaccactctttttttaagcagatcaagcgcagggccagtgaagccctgcccgagctgctccgtcccgtcaccccgatcactaattttgagggatcccaatctcaagatcactcaggtatctttggattggtgaccaatcttgaggaattggaggtagacgattgggagttctag

SEQ ID NO: 207131 - DNA, 1122 bp, synthetic construct
  misc_feature 1..1122: note = Description of Artificial Sequence: Synthetic coding sequence
  source 1..1122: mol_type = other DNA
atgagcagcttcctgcccgagggcggctgctacgagctgctgaccgtaatcggaaagggattcgaagacctgatgactgtgaacctcgctaggtataagcccacgggggagtacgtgacagttcgtagaataaacctggaagcttgctctaatgagatggttaccttcctccaaggcgaactgcacgtgagtaagctgtttaaccacccaaacatcgtcccatatcgggccacattcatcgccgacaatgagctgtgggtcgtgacaagctttatggcgtatggctccgccaaggatcttatttgtactcattttatggacggtatgaacgaacttgccatcgcctatatcttgcagggggtgctcaaggctctggattatatccaccacatgggatacgtgcacaggtccgtaaaggcctcccacatcttaatctctgtcgatggtaaagtatatctaagcggtctgaggagcaatctgtccatgatctctcacggacagcgccagcgggtggtgcacgattttccgaagtattcagttaaagtcctcccttggctgtcccctgaggttcttcagcagaatctacaagggtatgatgcgaagtcagacatatattccgttggcatcacagcatgtgaactggctaatggtcacgtgccattcaaggatatgcccgcaactcagatgctgctcgagaagctgaatggcaccgtgccatgcctgcttgataccagcacgatacccgccgaggagcttactatgagcccgtctcgcagtgtggcaaattcaggactgtccgactccctgactacctctaccccacggccatcaaatggagacagtccttcacatccttaccaccgcactttttcacctcactttcatcactttgtggagcagtgtctccaaagaaatcctgacgcacgtccatctgctagtactctgctcaatcatagcttcttcaagcagatcaaacgtagagcctccgaggcactgccagagctcttacgtccagttacacctataaccaacttcgagggctctcagtctcaggatcactctgggatttttggcctggtcaccaatttagaggagctagaggtggacgattgggaattctag

SEQ ID NO: 207132 - DNA, 1047 bp, synthetic construct
  misc_feature 1..1047: note = Description of Artificial Sequence: Synthetic coding sequence
  source 1..1047: mol_type = other DNA
atgagcttcctgaccaacgacgccagcagcgagagcatcgccagcttctccaaacaggaagtgatgagtagcttcttgcctgagggcggttgctacgaactgctcaccgtaatcggaaaaggctttgaagatctcatgacggtgaacctggccaggtacaagcccactggagagtatgtcactgttcggagaatcaacctggaggcttgctcaaacgagatggtaacatttttacagggcgagcttcacgtctccaaactctttaaccacccgaatattgtgccttatagggcaacttttattgctgacaacgagttgtgggtggttactagctttatggcatacggatccgccaaggacctgatctgcacccactttatggatggaatgaatgagttagctatagcgtacatccttcaaggtgttctgaaagctctcgattatatccaccacatgggttacgtccatcgcagcgttaaagcctctcacattctgatctctgttgacggaaaagtgtatctgtcaggcctaaggagtaacttgagtatgatcagtcacggtcaacgtcagcgcgtcgtgcatgactttcccaaatatagtgtcaaggttctgccttggctgagcccagaagtcctgcagcagaatctgcagggatacgacgctaaatctgacatatactctgtgggaattaccgcatgtgaactggccaatggccacgtgccttttaaggatatgcctgcaacccaaatgctgcttgaaaagctgaatgggacggtaccctgcctgctggacaccagcacaatacctgccgaagagctgacgatgtcacccagccggtctgttgcaaacagcgggctgtccgatagcctgacaacgtccacccccagaccctcaaacggggactctccttctcacccataccatcgcaccttcagtccgcatttccaccacttcgtggagcagtgtctgcaaagaaacccagacgcccggtacccttgttggcccggccccgggctgcgggaatctaggggttgttccggcggctag

SEQ ID NO: 207133 - DNA, 900 bp, synthetic construct
  misc_feature 1..900: note = Description of Artificial Sequence: Synthetic coding sequence
  source 1..900: mol_type = other DNA
atgagcttcctggtgagcaagcccgagcggatccggcggtgggtgagtgagaaatttatcgtcgagggcttacgcgaccttgagctgtttggcggcaagggcttcgaggatctgatgaccgtaaacctggcgcgttataaacccactggggaatacgtcacagtacgtaggatcaacttggaagcttgcagcaatgagatggtgacgtttctccagggggagctacacgtaagtaagcttttcaatcatcccaacatcgtcccatacagggctacattcatcgctgataatgagctgtgggtcgtcactagcttcatggcatatgggtccgcaaaggatttgatttgtacccacttcatggacgggatgaacgagttggcgattgcctatattctacaaggagtactcaaggcactcgattacatacaccatatgggatatgtgcataggagcgtgaaggcgtcgcatattctcatttccgttgatgggaaagtttacctttccggtctgagaagcaatctgtcaatgattagccatggccaacgtcaacgggtagtgcatgatttccctaaatattccgtcaaggtcctgccttggttatcccctgaggttcttcaacaaaatctacaggggtacgacgcgaagtctgacatctactcggtcggtatcaccgcttgtgaattggccaacggccatgtcccgtttaaggacatgccagccacacagatgcttctggagaagctgaacggcacagtcccttgtctgctggatacatccactatccctgccgaagagctgacaatgtcgccatctcgcagcgtcgcaaactccggtctgtctgactctctgaccaccagcactcccagacctagcaatggaccagtgcccgcgccttcctag

SEQ ID NO: 207134 - DNA, 1257 bp, synthetic construct
  misc_feature 1..1257: note = Description of Artificial Sequence: Synthetic coding sequence
  source 1..1257: mol_type = other DNA
atgagcctgctggactgcttctgcaccagccggacccaggtggagtcactgaggccagagaagcagagtgagaccagcatacaccagtacctagttgacgagcccacactttcatggagcaggccttctactcgcgcatctgaagtactctgtagcacaaacgtgtcacactacgagcttcaagtggaaatcggcaggggcttcgataatttgaccagtgtgcatttagcccgacatacccctaccggcaccctagtgactataaaaataaccaacctagagaattgtaacgaagagaggctgaaggcacttcagaaggccgtgatcttgagccacttcttccgccatcctaacattacaacttattggacggtgtttactgttggaagctggttgtgggtgatttctccttttatggcgtacggttctgctagccagctcctcagaacctatttccctgaaggtatgtccgaaacactgataaggaatattctgtttggagctgttaggggcctaaattatctgcaccagaacgggtgcattcacagaagcattaaagctagccacatcctgatcagtggtgacggtctggttactctgtccggtctctcccatctccattccttggtgaaacatggacagagacacagggcggtatatgatttcccgcagttcagcacctctgtgcaaccgtggctgagtccggaactgctaagacaggacctgcatggatacaacgtcaagtcagacatctatagcgtaggtatcacagcatgcgagctggcttcaggacaagtgccctttcaagacatgcatcgcactcaaatgttgctccagaagcttaagggaccaccatactccccgctggacatcagcatattccctcagtccgaaagtcgtatgaagaattcccaaagcggggtggactctggcatcggagaatccgtgctcgtgagcagtgggacccacaccgtgaattccgaccggctgcacaccccctcaagcaaaaccttcagccccgccttcttcagcctcgtgcagctgtgcctccagcaggaccccgagaagcggccttctgccagttcgcttctcagtcacgtcttttttaaacagatgaaggaagaaagccaggactccatactctcgctgttgcctcccgcctacaacaagccttctatatccctgccccccgtactcccctggactgaacccgaatgtgacttcccagacgaaaaggattcatactgggagttttag

SEQ ID NO: 207135 - DNA, 1134 bp, synthetic construct
  misc_feature 1..1134: note = Description of Artificial Sequence: Synthetic coding sequence
  source 1..1134: mol_type = other DNA
atgagcctgctggactgcttctgcaccagccggacccaggtggagtccctgcggcccgagaagcagtctgaaacgagtattcatcaatacctggtggacgagccaacactctcctggagtaggccatccactcgtgcctcagaagtcctgtgctctaccaacgtcagccattatgaactacaagtagaaatcggaagaggctttgataacttaacctctgtacacctcgctcgtcatacgcctactggtacactggtcacaatcaaaataactaatttggagaattgcaatgaagagcggttgaaagcgctacagaaagcagtaatcctgagccatttttttaggcatcccaatataaccacatattggactgtctttacagtcgggtcttggctctgggtgatctctccattcatggcctatgggtcagcgtcacagctgcttcgaacctacttcccagagggcatgagtgaaacactcattcggaatatcctgttcggagctgtccgcggactgaactacttgcaccagaacggatgcatccacagaagtatcaaagcctcccatattctcatctccggagatgggctcgtaactctgtctggactgtcccatctacattctctggtcaaacatggccagcggcacagagctgtctacgattttccacagttctctactagtgtgcagccatggttatcccccgagctgttacgccaagacctgcacggctataacgtgaagtctgatatttatagcgtaggcatcacggcttgcgagctcgccagtggccaggttccattccaagacatgcatcgcacacagatgctactacagaaactcaaagggcctccctactctcccctggacatatctatattcccgcagtctgaatcccgcatgaagaactctcaaagcggagtagactccggaatcggggagagcgtgctcgtgtccagcggtacccataccgtgaatagcgaccgccttcacacgccaagctctaaaacattctctcccgctttctttagcctagtgcagctgtgtctgcaacaagaccccgaaaaacgtccatccgccagctccctgctgtcccacgtcttttttaaacaaccctattttgagttcttatag

SEQ ID NO: 207136 - DNA, 843 bp, synthetic construct
  misc_feature 1..843: note = Description of Artificial Sequence: Synthetic coding sequence
  source 1..843: mol_type = other DNA
ctgggctactgcagcgccagccagctgctgcggacctacttccccgaaggtatgtctgaaacccttatacgcaatattctcttcggagcagtcagaggccttaactacctacaccaaaacgggtgcatccataggtcaatcaaggcatctcacatcctgatctccggcgacgggctcgtcaccctctctgggctgtcccacctacactccctcgtaaagcatggacagcgacatagggctgtgtacgatttcccgcagttctccacaagtgtccagccttggctgtcgcccgagctactgcgccaggacctgcatgggtacaatgtcaagtctgacatttactctgtgggcatcacggcttgtgagctggctagcgggcaggtcccatttcaagacatgcaccgaacccagatgctcctacagaagctgaagggccccccgtattcccctttagacatttccatcttccctcagtctgagagtaggatgaagaattcccagtccggggtcgattcgggcattggcgagtccgtgctggtgtcatctggcacccacaccgtgaatagcgaccggctgcataccccctcaagtaaaacttttagtcctgctttcttctccttggttcagctctgcctgcagcaggacccagagaaaaggccctcagcatcctctttactcagccacgtgttcttcaagcagatgaaggaagaatctcaggacagcattctttcacttcttcccccagcatacaataagccgtctatttcccttcctccagtgctcccttggaccgaaccagaatgtgatttccccgacgagaaggacagttattgggagttctag

SEQ ID NO: 207137 - DNA, 1257 bp, synthetic construct
  misc_feature 1..1257: note = Description of Artificial Sequence: Synthetic coding sequence
  source 1..1257: mol_type = other DNA
atgagcctgctggactgcttctgcaccagccggacccaggtggagtcgctgcggcccgagaaacaaagcgagacctctatacaccaatacctcgtggacgaaccgacacttagttggagtcgaccttctaccagggcttccgaggtactgtgcagtacaaatgtgtcccattatgaacttcaggttgagatcgggagggggttcgacaatctgacatcggtccatctggctcggcatacccctacaggcactttagtgacaatcaagatcaccaacctagagaattgcaacgaggagcggctgaaggcgctacagaaggcggtgattctcagccatttctttcgccatcctaatattaccacatattggacggtgtttactgttggaagttggctctgggttatttcgcccttcatggcatatggtagcgcatctcaactgttgaggacatacttcccagaggggatgtccgagactctgataaggaatattctgtttggagcggtgagaggcctgaattatctccatcagaacggatgtattcaccgcagtatcaaggcctctcatatcctgatatccggcgatgggctggtgaccctttccggcctcagccacctgcactcactggtcaagcacggacagaggcaccgtgcggtgtacgactttccacagttctctacctctgtgcagccctggctgagtcccgagctgcttcgacaggacctgcacgggtacaatgtcaagtccgatatttacagtgttggcataactgcatgtgaactggcctctggacaggtgcccttccaggatatgcatagaacccagatgctgttgcagaagctgaaaggacctccttactctccactggatatcagcatctttccacagtcagaatcacggatgaaaaacagccagtcaggtgtagattctggcattggggaatctgttctggtgtctagcggaacacacacagttaactccgatcgcctgcataccccgtctagcaagaccttttcccctgcatttttttcccttgttcagctttgtctccagcaagaccctgagaagagaccctctgctagctcccttttatctcatgtcttcttcaaacagatgaaggaggagagccaggacagcattcttagcctgctgccccccgcgtacaataaaccatccatcagcctgccacccgttctgccttggactgagcccgagtgcgacttcccagatgaaaaagactcatactgggagttctag

SEQ ID NO: 207138 - DNA, 1260 bp, synthetic construct
  misc_feature 1..1260: note = Description of Artificial Sequence: Synthetic coding sequence
  source 1..1260: mol_type = other DNA
atggagagcatcagcatgatgggcagccccaagagcctgagcgagacatttctcccaaacggaattaatgggatcaaagacgcgaggaaggtgacagtgggggtgattgggtccggcgactttgccaaatctctgacaatcaggctgataaggtgtggttatcacgtagtgatcggctcccggaacccaaaattcgcgtcggagtttttcccccatgtggtcgatgtgacacatcacgaggatgctctgacaaaaacaaacatcatcttcgttgccatacaccgcgagcactatactagtctgtgggatctacggcatctcctggtcggaaaaatccttatcgatgtttccaacaacatgaggatcaaccagtacccggagagtaacgcagaatacctggcctctcttttccccgattctctgattgtaaagggatttaacgtcgtcagcgcctgggctttacagctagggcccaaagatgcctcacggcaggtatacatctgttctaataacatacaggctcgtcaacaggtgatcgagctagcgcgccagctgaatttcattcccatagacctgggcagtctttccagcgcgagagagatcgaaaacctacccctgcgtctgttcacgctgtggaggggccccgtggtggtggctatctccctggccaccttctttttcctatactctttcgtcagagacgtgattcatccctacgccaggaatcaacagagtgacttctacaagatacccattgagattgtgaataaaacgctccccattgtggctattaccctgctctctctagtctacctcgctgggttgttggcggccgcataccaattgtactacgggaccaagtataggcgttttcccccgtggttagagacatggctacagtgtagaaagcagctgggccttctcagttttttcttcgccatggtccacgtcgcctattctctctgcctgcctatgcgacgctcagaacgttatttattcctcaacatggcttatcagcaagtacacgctaacatagagaatagttggaatgaagaggaagtatggaggatcgaaatgtacattagtttcggtattatgtctctaggcctgctcagtctcctcgctgttaccagcattccttctgtgagcaatgcactcaattggagagagttttcattcatccagatattttgtagtttcgcagacacccaaacggaactcgaactcgaattcgttttcctgctgaccctgcttttatag

SEQ ID NO: 207139 - DNA, 1473 bp, synthetic construct
  misc_feature 1..1473: note = Description of Artificial Sequence: Synthetic coding sequence
  source 1..1473: mol_type = other DNA
atggagagcatcagcatgatgggcagccccaagagcctgagcgagaccttcttgccaaatgggatcaatgggattaaggacgcaaggaaagttaccgtaggggtgattggcagcggcgattttgctaagtcactcacgattagattgatacggtgcggataccacgtcgttatcggctccagaaaccccaaattcgccagcgaattttttcctcatgtggtagatgtaacacaccacgaagatgcccttacaaaaacaaacatcatctttgtggcaattcacagggaacactacacttccctctgggatctgcggcatctattagtaggcaaaatactgatagacgtgagcaataacatgagaattaatcagtatcctgaatcaaacgctgagtaccttgcgtccctgtttcctgacagcctgatagtgaaagggttcaacgtggtttccgcatgggcgctgcagctggggccaaaagacgctagtaggcaggtctatatttgcagcaacaatattcaggcccggcaacaggttattgagctcgccaggcagctcaatttcataccaattgatctggggagcctgtcttctgccagggagattgaaaacctaccgttacgcttgtttacactttggcgcggacctgtcgtggtggcgatctctctcgcgactttcttttttctgtacagcttcgtgcgggacgtgatccatccctacgctaggaaccagcaatccgacttctacaagattcctatcgagatagtgaataaaacacttccaatcgtcgccatcaccttactgtcgttggtgtacctggccggcttgcttgcggcagcgtaccagctctattacggtacaaaatatcgcagattcccaccgtggctcgaaacatggcttcaatgtcgaaagcagctcgggctcctgtccttcttttttgcaatggtacacgttgcttatagtctgtgtttacctatgaggcggagtgaaaggtatttatttttaaatatggcctaccagcaggtgcatgccaatatagagaatagctggaatgaagaggaggtttggcgcattgagatgtacatatcattcgggattatgagtctggggctcctgtctttgctggcggttacctctattccttctgtcagcaatgcactcaattggagggaattctcttttatccaatccacacttggatacgtcgccctgctgatctctacgttccacgtgctcatttatgggtggaaaagggcattcgaagaggaatactataggttctacactccgcctaacttcgtcctggccttggtgctaccgtccatcgtgatactaggtaaaattatactcttcttgccctgtatttcgaggaagctgaagcgcataaaaaaggggtgggaaaaatcacagtttctggaggagggaatgggtggaactataccgcacgtatctcccgagcgtgtgaccgtgatgtag

SEQ ID NO: 207140 - DNA, 1473 bp, synthetic construct
  misc_feature 1..1473: note = Description of Artificial Sequence: Synthetic coding sequence
  source 1..1473: mol_type = other DNA
atggagagcatcagcatgatgggcagccccaagagcctgagcgagacatttcttcccaatgggataaatgggatcaaagacgccaggaaggtcaccgtgggggtgattgggtccggggacttcgcgaaaagcctcaccatcaggctgattcgctgcgggtatcatgtggtgataggtagccggaatcccaagttcgctagcgagtttttcccgcacgtggtagacgtgacccatcatgaggatgctctgacaaagaccaatattattttcgtcgctatccaccgtgagcattacacatcactgtgggacctgcgccatctactggtgggaaagatattaatcgatgtgtcgaataacatgcgcataaatcagtatccagaatcaaatgctgaatacctcgcaagcctatttcccgacagcctgatcgtgaaaggttttaatgtcgtgtcagcatgggccctccagttagggcccaaagacgccagtagacaggtatacatttgttctaacaacatccaggcccggcagcaggtaatagaactggctcggcaattaaactttatcccaatcgacctcgggagcctcagctctgcgcgtgaaattgagaacctgcccctcaggctgtttacactatggcgcggccctgtcgtggtcgccatttctcttgctacatttttttttctctactcattcgtccgggacgttattcacccctacgcgcgaaaccagcagtccgatttttataagattcccattgagatcgttaacaaaactctgccaattgtggccatcacattactgagcctggtgtacttagcgggcttgctggctgccgcctaccagctttattatggtacgaaataccgaaggtttcccccctggctagaaacctggctgcaatgccggaagcagctagggctgttgtcgtttttttttgctatggtccacgttgcatacagcctgtgcctgcctatgaggagaagcgaaagatacttgtttctgaatatggcctaccagcaggtgcacgccaatatcgagaacagctggaatgaggaggaggtatggcgcattgagatgtatatctcttttggcatcatgagcctgggactccttagtctgctggctgttacttctattccatcagtatcaaacgctcttaattggagggagttttccttcattcagagcacactgggatatgtggctctgctcatctccacgttccacgtgctaatctatgggtggaagcgcgccttcgaagaagagtattatcggttttataccccacctaatttcgtcctcgccctcgtcttgcccagtattgtcatcctgggtaagataatactgtttttaccttgtatctccagaaagctgaagcgcatcaagaaggggtgggaaaagtctcagttcctcgaagagggcatgggtgggactattcctcatgtcagcccagaacgagtgaccgtcatgtag

SEQ ID NO: 207141 - DNA, 1473 bp, synthetic construct
  misc_feature 1..1473: note = Description of Artificial Sequence: Synthetic coding sequence
  source 1..1473: mol_type = other DNA
atggagagcatcagcatgatgggcagccccaagagcctgagcgagacgttcctaccaaacggaatcaatggcatcaaagacgctcgcaaggtcactgtgggcgtgataggatcaggagacttcgccaaatctctcaccatccgtctgatccgctgtggctaccacgttgtgattggatctcgcaacccaaagtttgcaagtgaattctttccacatgttgtggacgtcacgcatcacgaggatgcacttacaaagaccaacattatcttcgtcgcaatacatcgggagcattacactagcctgtgggatctgcggcatctcctcgtggggaagattcttatcgacgtatccaataacatgcggattaaccagtacccagagtccaatgctgaatacttggccagtctgtttcccgattcactgatcgtgaaagggttcaacgttgtatcagcctgggccctgcaactgggacccaaggacgcatctaggcaggtgtatatttgttcaaataacatccaggccagacaacaggtcattgagttagccaggcagttgaatttcattcccatcgaccttggatcgctgtcttctgccagagagatcgagaatctccctctccgcctttttacactgtggaggggccctgttgttgtcgcgatctcgctggccacatttttctttctctatagctttgtgcgggatgttatccatccctatgcccggaaccagcagagcgacttctacaagatccctattgagattgttaataaaacacttcctatagtcgcaatcaccctcctttctctggtgtacttggctgggttgcttgcagctgcctatcagctgtactatggcactaagtacagaagattccctccctggctggagacctggcttcaatgtaggaagcaactgggactcctcagcttttttttcgctatggtgcacgttgcctacagcctgtgtttgccaatgcggcgcagcgagcggtacctcttccttaacatggcctaccaacaggtgcatgccaatatagaaaacagttggaacgaagaagaagtgtggcgcattgagatgtatatcagttttggtatcatgtctctgggtctactgtctttgctggcggtgacaagtatcccatcagtgagcaacgccttgaactggagagagttctcgttcatccagagcacactgggttacgtggcattgctgatatccactttccatgtgctgatctacgggtggaagagagcattcgaagaggagtattataggttctacacaccccccaacttcgtcctggcccttgtactgccttccattgtgatactggggaaaattattctattcctgccgtgtatcagtcggaaactgaagaggattaaaaagggatgggagaaatcccagtttctggaagaaggcatgggaggcaccatcccgcacgtgtccccagagagagtcaccgtgatgtag

SEQ ID NO: 207142 - DNA, 1365 bp, synthetic construct
  misc_feature 1..1365: note = Description of Artificial Sequence: Synthetic coding sequence
  source 1..1365: mol_type = other DNA
atggagagcatcagcatgatgggcagccccaagagcctgagcgagacattccttccgaacgggataaacggaatcaaggatgccagaaaagtgacggtgggtgtgataggatcaggcgattttgccaaatcactcactatccgactgatcagatgcggataccatgtggtcatcgggagtcgtaatcctaaatttgcctctgaatttttccctcatgtggtagatgtgactcatcatgaggatgcccttactaaaactaacataatcttcgtcgccatacatagagagcattacacatccctttgggacttgcgccacctgctcgttggtaaaatcctgatcgacgtatccaacaacatgcgcatcaatcagtaccccgaatccaatgccgaatatctggcatccctgttccctgactccctaatcgtgaagggtttcaatgtggtatcggcctgggctctccagttgggccccaaggatgcaagccgacaggtgtatatttgcagcaataacattcaggctaggcagcaggttattgaactggctcggcagcttaactttattcctatagatctgggctctctctcttccgctagagagatagaaaatttgcctctgagactattcactttgtggcggggcccggtggtggtggcgatatctctcgccacatttttcttcctgtattcctttgtcagagatgtgattcacccctatgctagaaatcaacagtctgatttttataagatccccattgaaatcgtcaacaaaaccctgcccatcgtggccattaccttattgagtctcgtttatctcgccggactcctcgccgccgcctatcaactgtattatggcacgaaatataggcgctttccaccttggctggagacctggctgcaatgccgcaagcagctcgggctgctctctttctttttcgcgatggtccacgtggcatacagcttgtgtctaccaatgagacgctctgaacgatatctttttctgaacatggcataccagcaggttcacgctaacatcgaaaatagttggaatgaggaggaagtctggcgcattgaaatgtacatcagcttcggtataatgagcctgggccttttatctctactggccgtgaccagcattccaagtgtgtcaaatgcactaaactggagagagttttcctttatccagtcaacgcttgggtatgtcgccctgctgatctcaacttttcacgttctgatctacggctggaagagggcctttgaggaggaatattacagattttacacaccaccaaacttcgtgttagctctcgtgctgccaagcatcgtgatattagatctcttacagttatgtagatatcctgactag

SEQ ID NO: 207143 - DNA, 1365 bp, synthetic construct
  misc_feature 1..1365: note = Description of Artificial Sequence: Synthetic coding sequence
  source 1..1365: mol_type = other DNA
atggagagcatcagcatgatgggcagccccaagagcctgagcgagactttcctcccaaacggaattaatggtataaaggacgctcggaaggttactgtgggggtcatcggatctggcgactttgctaagtcgttaacaatccgcctcattcgatgtggctaccatgtcgtgattggttctaggaatcctaagttcgctagtgagtttttcccgcatgtggtcgatgttactcaccatgaggacgctcttaccaagactaacataatctttgtcgcaatacatagagagcactacactagcctgtgggatctgcgccacctcctggttgggaagattcttattgatgtgtcaaacaatatgaggattaaccagtacccagaatctaacgctgaatatctcgcatcactctttcccgattctctcatagtcaaaggattcaatgtcgtcagcgcttgggcactacagctgggcccaaaggatgcaagccgccaggtgtacatctgttccaacaatatacaagcccggcagcaggttatcgaactcgctaggcaattaaactttattcccatagacctcgggtccttgtcaagcgctagagagatagagaacctgcccctaaggcttttcacactctggagaggccctgtggtggtggccatttcgttagctactttcttcttcctatattcctttgtgcgcgacgtgattcacccgtacgcaagaaatcagcagtcagacttttataagatccctattgagattgtcaataagactttgccgattgtggccatcacactattgtccctcgtatacctggcagggttgctagctgcggcgtatcagctgtactacggcaccaagtataggagatttccaccttggctcgagacctggttgcagtgcagaaaacagctgggtctcctctcctttttcttcgcaatggtccacgttgcatattctctgtgtttaccaatgcggcgatccgagaggtacctctttcttaacatggcctaccaacaggtgcacgcaaacatcgagaatagctggaacgaagaggaggtttggcggattgagatgtacataagttttggcatcatgagtctgggactgctgagtctccttgccgtgaccagcatcccctctgtgtcgaatgccctgaactggagagaattttcatttatccagtcaaccctaggctatgtggccctgcttattagcacctttcacgtgcttatttatgggtggaagagagccttcgaggaggagtactacaggttttatacacctccaaactttgtgctggctcttgtattgccatctatagtgatactggatcttcttcagctctgtcgttatccggattag

SEQ ID NO: 207144 - DNA, 1365 bp, synthetic construct
  misc_feature 1..1365: note = Description of Artificial Sequence: Synthetic coding sequence
  source 1..1365: mol_type = other DNA
atggagagcatcagcatgatgggcagccccaagagcctgagcgagacctttctgcccaatggcatcaacggtatcaaggacgcaagaaaagtgaccgttggagttattggatctggggacttcgccaaatcgctaaccatacgtctaatacgttgcggttaccatgtagtgataggttctcgcaacccaaaattcgcgtccgagttcttccctcatgttgtggacgtcacccaccacgaagacgctctgactaagactaatatcatatttgttgcaattcaccgggagcattacacgtccctctgggacttaagacatctcttggtggggaaaatcttaatcgacgtatccaataacatgcgaattaatcaatatccagagagcaacgccgagtacctcgcgagccttttccccgattccctgattgtgaagggctttaacgtggtgagcgcttgggcactccagctgggtcccaaagacgcgtctcgccaagtatatatctgttccaataacattcaggccaggcagcaagtgatagagttagcacgacaattaaatttcatccccatcgatctcggaagtctgtcctcggcaagggaaattgagaaccttcccctgagactctttacactttggcggggtccagtcgttgtggctattagtctggcaacgtttttcttcctgtacagtttcgtccgcgacgttatacacccttatgcgagaaaccaacagtccgacttttataagatccctattgagattgtcaataagaccctgcccattgttgctatcactcttctcagcctagtatacttagctgggctacttgccgcggcttaccaactgtattacggcacaaaatacaggcgattcccgccctggctcgaaacatggcttcagtgccgtaaacaactaggcttactgagctttttcttcgcaatggtgcatgtcgcttattccttatgcctccccatgcggaggagtgagcgctatctgtttttgaatatggcgtaccagcaagtgcacgcaaatattgagaattcctggaacgaggaggaagtgtggaggatagaaatgtacatcagctttgggatcatgagtctcgggctgctgtctctactagccgtgactagcattccctccgttagcaacgccctgaattggcgcgagttcagcttcatccagtctacactggggtatgtggctctgctcatttccacctttcacgtcttaatttacggttggaaacgcgcttttgaggaagaatattaccggttctatacacctccgaacttcgtgctcgccctggtcctaccttctatcgttatcctggacctgctgcagctctgccgatatcctgactag

SEQ ID NO: 207145 - DNA, 267 bp, synthetic construct
  misc_feature 1..267: note = Description of Artificial Sequence: Synthetic coding sequence
  source 1..267: mol_type = other DNA
atggagagcatcagcatgatgggcagccccaagagcctgagcgagacgtttttgcctaatggtatcaacggcatcaaggacgcccgcaaggtgaccgtcggcgtaatcgggtcaggcgatttcgccaagagcttgaccattagacttatcaggtgcggctaccacgtggtgatcggatcacgtaacccaaagtttgcaagcgagttctttccacatgtcgttgacgtgacgcatcacgaagacgcactcacaaagaccaacatctag

SEQ ID NO: 207146 - DNA, 549 bp, synthetic construct
  misc_feature 1..549: note = Description of Artificial Sequence: Synthetic coding sequence
  source 1..549: mol_type = other DNA
atggagagcatcagcatgatgggcagccccaagagcctgagcgagaccttcctacccaatggtatcaacggcataaaagatgctcgaaaagtcacggtcggcgttatagggtccggcgactttgctaaatctctcaccattcgtctgatccgttgcggttaccacgtggtgataggtagcagaaacccgaagtttgcatctgagttttttccgcacgtggtagatgtgactcaccacgaggacgctctaaccaaaacaaacataatttttgtggccattcatcgggagcactacacctccctgtgggatttacggcaccttctggtgggaaagatcctgatcgacgttagtaacaacatgcggattaatcagtatcctgaaagtaacgctgaatacctggccagtctctttcccgactcccttatagtcaaaggttttaatgtggtctctgcatgggcgctgcagctcggccccaaagacgcctctaggcaggtctacatttgttctaataatattcaggcaaggcaacaggtcatagagctcgcgtag

SEQ ID NO: 207147 - DNA, 1467 bp, synthetic construct
  misc_feature 1..1467: note = Description of Artificial Sequence: Synthetic coding sequence
  source 1..1467: mol_type = other DNA
atgcccgaggagatggacaagcccctgatcagcctgcacctggtggactccgattcttctttagctaaggtccctgacgaggctcctaaggttggaatcctgggcagcggtgacttcgcgcggagcttggccacacgactggttggttctgggttcaaggtcgtcgtgggtagccgaaatcctaagaggacagctcggctcttccccagtgcagcccaggtcaccttccaggaagaagctgtttcttcccccgaagtgatcttcgtagccgtgtttagggagcattacagctccctgtgtagtcttagcgatcagctggctggtaagatcctggtggatgtgagcaatcccacagagcaggagcacctacagcaccgcgagtcgaatgccgaatacctggcctccctgttccccacatgtactgtcgttaaggcttttaatgtaatttctgcatggactctgcaggcaggcccacgagacggaaacagacaggtgcccatttgtggggatcaaccagaggctaaacgcgcagtgagcgagatggccctggctatggggtttatgcccgttgatatggggagtctggcatcggcctgggaagtggaagccatgccacttaggctgcttccagcctggaaggtgcctacgttactagccctgggtttgttcgtgtgcttttatgcctacaattttgtgcgggatgtgttgcagccttacgtccaggaatctcagaacaagttcttcaaactgccagtgagtgtggtgaacaccacattgccttgcgtagcatatgttctgctcagtcttgtgtatctgcccggcgtgttagcggcggccctccagctcagacggggtaccaagtaccagagatttcctgactggctggaccactggctccaacacagaaaacaaatcggtctgctaagcttcttttgtgcagctttgcacgccctttactctttctgcctgccactgaggcgggcgcaccggtatgacttggtgaatctggccgttaaacaggtgctggctaataaatctcacctgtgggtggaagaagaagtgtggagaatggaaatatacctgtcccttggagtgttagccctcggtacattatcgttactggccgtgacatcgcttccttccatcgccaactcactgaattggcgggaattttcttttgtgcaatcctccctcggtttcgtggccctggtgctgtcgacgctgcacactctcacatacgggtggacccgggcgttcgaagagtcccgatacaagttttaccttcccccaaccttcactctgacactcctggtcccctgcgtcgtaattttagctaaagccctgttcctgctgccctgcatttcgcgtcggctggcacgaattcgccgcgggtgggagcgcgagagcacgatcaagttcactttgccaacagatcatgccctagcagagaaaacctcacacgtatag

SEQ ID NO: 207148 - DNA, 1467 bp, synthetic construct
  misc_feature 1..1467: note = Description of Artificial Sequence: Synthetic coding sequence
  source 1..1467: mol_type = other DNA
atgcccgaggagatggacaagcccctgatcagcctgcacctggtggattccgatagtagccttgccaaggtgcctgacgaagcacccaaggtcgggatcctcggctcaggggatttcgctcggtcccttgctacacggctggtggggagcgggttcaaggtcgtggtcggtagtcgaaaccctaaacggaccgctcgcctgtttcccagcgctgcccaggtaacttttcaagaagaggcggtgtcctccccggaggtgatttttgtggccgttttcagagaacactattccagcctgtgcagccttagtgatcaactggccgggaaaatacttgttgatgtgtccaatcctaccgagcaggaacatcttcagcatcgggaatccaacgccgagtatcttgcctctctgttcccgacttgcacggtggttaaagcctttaatgttattagcgcctggactttgcaggccgggcctagggatggtaacagacaggtgccaatttgcggcgatcagcccgaagctaagagggctgtgagcgaaatggcattagcgatgggcttcatgcctgtggatatggggtccctggccagtgcgtgggaggtagaggcaatgccacttcggctcctgcccgcatggaaagtgcccaccttgctggcattgggtctcttcgtgtgtttttacgcctacaatttcgtcagggacgttctgcagccctacgtacaggagagtcaaaacaaattttttaaactgcctgtgagtgtagtgaatacgaccttaccctgtgtagcttatgtgttactgtctctcgtttacctgccaggggttctggcagcagccctccagttgcggcggggtacaaagtatcaacggtttcccgattggcttgaccactggctgcagcataggaaacagattggcttgctctctttcttttgcgccgccctgcatgcgctctattcattttgtttgcccctgcgaagggcccaccgttacgatctggtgaacctggccgttaagcaggtactggcaaacaagtcccacctttgggttgaagaagaggtctggcgaatggagatctacctaagcctgggcgttttagccctcggtacccttagtctcctcgctgttacttcactcccgagtattgcaaattcacttaattggcgggagtttagtttcgtgcaaagctctctcgggttcgttgccctggtgctgtccaccctgcatacactgacgtacggttggactcgagctttcgaggagtctcggtataagttctatttgcctccaacatttaccctgactcttttggtcccttgcgtcgtcattttagcgaaagctctattccttctgccttgcatctctagaaggctagccagaattcggcggggctgggagagagagagtaccataaagttcactctacccacggatcatgcacttgctgaaaagacaagccatgtgtag

SEQ ID NO: 207149 - DNA, 1467 bp, synthetic construct
  misc_feature 1..1467: note = Description of Artificial Sequence: Synthetic coding sequence
  source 1..1467: mol_type = other DNA
atgcccgaggagatggacaagcccctgatcagcctgcacctggtggattcagatagtagtctggctaaagtccccgatgaggcccccaaagtgggcattctcgggagtggcgatttcgcgcggagcctggcaactagactggtcggaagcgggtttaaggtcgtcgtgggaagccgcaaccccaagaggacagcccgcttgtttccatcagccgctcaggtgacttttcaggaagaagcagtatcgtcaccagaggtgatcttcgtcgcagtgttcagggaacattacagctcactctgttccctctctgatcagcttgcgggcaagattctggtagacgtgtctaatcctaccgagcaggaacacttacagcaccgggaaagtaatgccgagtacctggccagcctcttcccgacatgcaccgtcgtaaaggctttcaatgtgatttctgcctggaccttacaagctggtcccagggatggcaaccgtcaggttcccatttgtggggaccagcccgaggccaagagagccgttagtgaaatggccctcgcaatgggattcatgcccgtggatatgggctcccttgccagcgcctgggaagtcgaagcaatgcccctgaggctgttaccagcatggaaagtgcccaccttgctcgccctgggactgtttgtgtgcttttacgcatataacttcgtgcgcgacgttctgcagccctacgtccaggagtcccagaataaattcttcaagttgcctgtgtccgttgtaaacacgaccttgccctgtgtggcctacgttctcctgtcgttggtttacctccctggggttctggccgctgccctgcaattgagaagaggtactaagtatcagaggttcccagattggcttgaccactggctacagcatcgcaaacaaatcggattactgtcttttttctgcgccgcactccacgccctctattcattttgcctgcctctacggcgggcacataggtatgacctggtaaatctagctgtaaagcaggtcttggccaataagtctcacctgtgggtggaagaagaggtctggcgtatggagatatacctctccctgggtgtgttggccctgggtaccctgagcctgttggcagtgactagcctgccctctatagctaatagtctcaactggagagagtttagttttgtgcagagtagtctgggatttgtggccctcgtcttatccaccctgcataccttgacctatggttggactcgcgcctttgaagagagccggtacaagttttacttacctcctacatttacacttacccttctggttccctgcgtggtgattctggcaaaggccctgttcctgttaccctgtatctcacgccggttggccagaatcagacgagggtgggagcgggagtctacgatcaagttcactctccctaccgatcacgcattagcggagaagacctcgcacgtgtag

SEQ ID NO: 207150 - DNA, 1467 bp, synthetic construct
  misc_feature 1..1467: note = Description of Artificial Sequence: Synthetic coding sequence
  source 1..1467: mol_type = other DNA
atgcccgaggagatggacaagcccctgatcagcctgcacctggtggactctgactcatcgttggcaaaggttcccgacgaagctcctaaggtgggcattctcgggagcggagatttcgcccgatccctggccactaggctggttggatccggcttcaaggttgtggtaggttctcgaaatccaaaaaggacagcacgcttattcccctctgcagcacaagtaacattccaagaagaagcggtctcttcccccgaggtcatttttgtggccgtttttcgagagcactactcctcactgtgcagcctctccgaccagctagccggaaaaatcttggttgacgtgtccaacccgactgagcaggagcatctgcaacacagagagtccaacgcagaatatctagcgagcctcttcccaacctgcacggtcgtaaaggccttcaatgtaattagcgcctggactctgcaggccggaccacgggacggtaaccggcaggtgccgatctgcggggatcagccggaagctaaaagagccgtgagcgaaatggccctggccatgggattcatgccagtggatatgggatcattagcaagcgcctgggaagtggaagctatgccactgagacttctccctgcttggaaagttccgactttgctggccttagggttattcgtttgtttttatgcatataatttcgttcgagatgtgttacagccatacgtccaagagtcccagaacaagttcttcaaactgcctgtatcggtggtgaatactacgctgccttgtgtggcatacgtgctgctttctttggtgtatctcccaggagtgctggctgccgccctgcagctgcgcaggggcaccaagtaccagcgcttccccgattggttggatcactggcttcagcaccgaaagcagattggcttactgtccttcttctgtgcggccttgcatgcattatactccttctgcttaccactcagacgagcacataggtatgacctagttaatctggcggttaaacaggttctcgccaacaaaagccacttgtgggtcgaagaagaggtgtggagaatggagatatatcttagcctgggagtcttggcactgggtactctctcactgctggcagtaacatccctgcccagtattgctaacagtctgaattggcgtgaattcagctttgttcagtcatccctgggatttgtcgccctggtcctaagcaccttgcacacactgacctacgggtggaccagagccttcgaggaatcaagatacaaattctaccttcctccaaccttcaccctcaccttgctggtcccctgcgtcgtcatccttgccaaagctctgttcttgcttccctgtatctccagaaggctggcccgcattcggagggggtgggaacgagagtccactatcaaattcactctgccaacagatcatgcactggctgaaaaaacctctcacgtctag

SEQ ID NO: 207151 - DNA, 1497 bp, synthetic construct
  misc_feature 1..1497: note = Description of Artificial Sequence: Synthetic coding sequence
  source 1..1497: mol_type = other DNA
atgagccaccagcccgccgtggccaccaagatgcccgaggagatggataagccattgattagtctacacctggttgacagtgattcatctctggccaaggttcctgacgaagcccccaaggtgggtatcttgggttctggtgatttcgccaggtccctagcaactcgtctggtgggttctggatttaaagtggtcgtgggcagccgtaatccaaagaggactgctcggttatttccatcagccgcccaggtgacctttcaggaagaggccgtgtcctctcctgaggtgatttttgttgccgttttccgggaacactactcaagcctctgttctctgtccgatcagttggccggaaagatcctggtggatgtgagcaatcctactgagcaggaacatctacaacaccgcgaatcgaatgccgaatatttagcctcgttattccctacctgcacagtggtgaaggctttcaatgtgattagtgcctggacactgcaggccggccccagagatggaaaccgtcaggtccctatctgcggagatcagcctgaagccaagcgggccgtgagtgagatggcgcttgcaatgggttttatgccagttgacatgggtagcctggcttccgcctgggaagtggaggcgatgccgcttcgcttgctgcccgcttggaaggtaccaaccctcctcgccctgggcctcttcgtctgcttttacgcgtacaactttgtacgggacgtcttacagccgtacgtgcaagagtcacaaaataagttttttaagctgcctgttagcgtcgtcaatacgacattgccgtgcgtggcttatgttctgctgtccctggtgtacctgccgggggtgctggccgcagcccttcaattgagaagaggaactaagtaccagcgctttcctgactggctggatcactggctgcagcaccgtaaacagatcggcttgctttcttttttttgcgcagcactgcatgcactatattctttctgccttccactgcgacgggcacacagatacgaccttgtgaatctcgctgtgaagcaagtactggccaataagagccacctttgggttgaagaagaagtatggcggatggaaatttatctgtcactgggagtgctcgccctcgggactttgtccctgctcgccgtgactagtcttccatcaatagctaattcactaaattggagggaatttagtttcgttcagtccagtctcggtttcgtggccctggtgctgtctactctccacactctgacttacggctggacgagagcattcgaggaatcccggtacaaattctatttacctcctacattcaccttgactctgctcgttccctgtgtggtgatcctggccaaagctctctttttacttccttgcatctccaggaggttggcacggatacgaagaggatgggaaagggaaagtaccatcaagtttacacttccaactgatcacgcattagctgagaagacctcacacgtctag

SEQ ID NO: 207152 - DNA, 1374 bp, synthetic construct
  misc_feature 1..1374: note = Description of Artificial Sequence: Synthetic coding sequence
  source 1..1374: mol_type = other DNA
atgcccgaggagatggacaagcccctgatcagcctgcacctggtggattcggattcctccctagcaaaggtgccagacgaggcccctaaggtcggaatactggggtccggtgacttcgcccgcagcctagccacccgtctggtggggtccggcttcaaagtagtcgtgggaagcaggaacccaaagcgcaccgcgaggttattcccctccgctgcgcaggtgacatttcaggaggaagcagtgtcgtctcccgaagtgatttttgtggctgtctttcgtgaacactattcaagcctttgttccctttctgatcagctcgctggaaaaatcttggtggatgtaagcaaccccacagagcaggaacacctccagcaccgggagtcgaacgccgaatacttagcctccttattcccaacctgcaccgtggtcaaggcttttaatgtgattagtgcctggacactgcaagccggaccgcgggacgggaatcgccaggtgcccatctgtggagaccaacctgaggctaagcgggccgtgagtgaaatggcgctcgccatggggttcatgccggtcgacatggggtctctcgcaagcgcgtgggaagtcgaagcaatgcctcttagactgctgcctgcttggaaagtgccaaccctgctcgctcttggtttatttgtgtgtttctatgcatacaacttcgtgagagatgttctccagccgtacgtccaggaaagccaaaataagttttttaagctccccgtgagtgttgtaaacactacactgccctgtgtggcatacgtccttctgagtttggtgtatctgcctggagtcttggcagctgcactacagctcagacggggtacgaagtatcagagattccctgattggctcgatcactggctccagcatagaaagcaaatcggtctcctttcttttttttgcgcagctctgcacgcactctatagcttctgtttgccgttaagaagagcccacagatacgatctagtgaacctggctgtgaagcaggtcctggctaacaagtcccatctttgggttgaggaagaagtgtggaggatggagatttatctgtctctcggtgtgctcgccctgggcacgctgagcctattggcggtcaccagtctgccgtcaatcgcaaattccctgaattggcgtgaattcagcttcgtacagtgtgtggcaactagttcagctggaaacacaggcagtggaaccagacgacccgagtctcagtcccaggacccgcaccttccagccccacatcaccaaacatcttttctcgggccaaggtccttttgttgttccctggtgccggtcagcacgccatatggccaccaggaggatttgtcatggacccggtag

SEQ ID NO: 207153 - DNA, 1467 bp, synthetic construct
  misc_feature 1..1467: note = Description of Artificial Sequence: Synthetic coding sequence
  source 1..1467: mol_type = other DNA
atgcccgaggagatggacaagcccctgatcagcctgcacctggtggactcagatagcagtcttgctaaggtgccagacgaagctccaaaagtggggatcttggggtcaggagactttgcccggtcactcgccactagacttgtcggctcaggcttcaaggtggtcgtgggaagcaggaaccctaaaagaaccgcccggctctttccatctgcagcacaagtaaccttccaagaagaggctgtgagctctcctgaagtgatcttcgtcgcagtatttcgcgaacactactcttctctatgctctctttccgatcagctcgcgggcaaaatattggttgatgtgtcaaatcccaccgaacaggaacacctacaacatagagagtccaacgcagaatatcttgcttcactgttcccaacgtgtactgtggtgaaggcatttaacgttataagtgcttggaccttgcaggcaggacctcgagacggaaacagacaggtgcctatctgcggcgaccagcccgaggccaagcgcgccgtctccgaaatggccctcgccatgggattcatgcccgtggatatgggctcattggcctccgcctgggaggtggaggctatgccgttgcgcctcctgcctgcctggaaggtcccgacgctactggcactcggtttattcgtgtgcttctacgcctataacttcgtccgagacgtactgcagccctacgtgcaagaaagccaaaataagttcttcaaactgcccgtgtccgtcgtgaacactaccctcccatgcgtggcatatgtactcctctcacttgtgtacctgcccggcgtgttggctgccgcactgcaactccgccgaggaactaagtaccagaggtttcccgattggcttgaccactggctacagcaccgaaagcaaattggccttctgtcatttttttgcgcagcacttcacgctctttatagcttttgtcttccactgcgacgcgcccaccgctacgatctggtcaacctcgccgtgaagcaggtgctggccaataaatcacacctttgggtcgaggaagaagtgtggagaatggagatctacctgtccctgggcgttctcgcactcgggaccctgagcctcctggccgtcacatcactgccttcaatagcaaacagcttgaattggcgcgaattcagcttcgtacagtcaagtctcggttttgtggctcttgtgttgtcaacactccacaccctcacctacgggtggactcgagcatttgaagagtccagatacaaattttaccttcccccaacctttaccctgactcttctggtgccttgtgtcgtgatcttggccaaagcactgttcttgctgccttgcatttcccgccgcttggcgcggatacggcgcgggtgggagagggagagcacaattaagtttacactccccactgatcacgctctcgcagagaagacaagtcacgtttag

SEQ ID NO: 207154 - DNA, 1374 bp, synthetic construct
  misc_feature 1..1374: note = Description of Artificial Sequence: Synthetic coding sequence
  source 1..1374: mol_type = other DNA
atgcccgaggagatggacaagcccctgatcagcctgcacctggtggacagtgactcatccctggcaaaggtcccagacgaggctcctaaggttggaattctgggaagcggtgattttgctcgttccctcgcaacccgcttggtggggagtggctttaaggtagtcgtggggagtcggaatccaaagcgcacggctcgcttgttcccatcggccgcgcaagtgactttccaagaagaagccgtatctagtcctgaagtcattttcgtagctgtgttccgagagcactattccagcctgtgctctctgtcggaccagttggcaggcaagatcttggtcgatgtcagtaacccaacagagcaagaacatctacagcacagggagtcaaatgcagaatacttggcttcgctttttcctacatgcaccgttgtgaaggcttttaacgttatcagtgcatggactctccaggcgggccctcgggacggaaatcgacaggtaccaatctgcggcgatcagcccgaagccaagagggccgtctctgaaatggcgttagctatgggattcatgcccgtggacatgggatctctggcctccgcgtgggaggtggaagcaatgcccttacgattacttccagcctggaaagttcccaccctactggccctcggactctttgtctgtttctatgcgtataacttcgtacgcgacgtccttcaaccttacgttcaggaatcacaaaacaagttttttaaattacccgttagcgtggttaacactaccttgccatgcgtagcttatgtgctcctttctctggtatatctgccgggcgtcctggccgccgccctccagctacggcggggaactaagtaccagcgcttccctgactggttagatcattggctccaacaccgaaagcagatcgggcttctgagtttcttttgtgctgcactgcacgccttgtattccttttgccttcccttgaggcgggcgcatcgttacgatttagttaatctggctgtgaaacaggtgctggccaataagagccatctgtgggtggaggaggaagtgtggcgcatggagatctacttgtcgttgggagtgttagccctgggcactctctctttactggctgtgacatcccttccaagcatcgccaattctctaaattggagagagttttcctttgtccaatgtgtcgctacatcttccgccggcaacaccggtagcggaacgcggagaccagagtctcagagccaggatccacacctgcctgccccacaccaccaaactagcttcctgggtccccgttccttctgttgctctctggtgccagtctcaacaccctatggccatcaggaagatctgtcttggacgaggtag

SEQ ID NO: 207155 - DNA, 432 bp, synthetic construct
  misc_feature 1..432: note = Description of Artificial Sequence: Synthetic coding sequence
  source 1..432: mol_type = other DNA
atggagatctacctgagcctgggcgtgctggccctgggcaccctgtctttgctggccgtgacctccctgcctagcatcgctaattctctgaattggagggaattttccttcgtgcagtcctcactgggttttgtagccctggtgctcagcacgcttcataccctgacctacgggtggacccgtgcattcgaagaatccagatacaaattttatctgccaccaacattcacattaactttacttgtcccttgcgtcgttatccttgcgaaagccttgtttctcttgccctgcatctctcggcgattagcccggattcggagagggtgggagcgtgagagtactattaagttcacacttcctaccgaccatgcattgtctccattaggttttctgttcctggtggtacagtcaggaattaccgtgtgtaagtag

SEQ ID NO: 207156 - DNA, 852 bp, synthetic construct
  misc_feature 1..852: note = Description of Artificial Sequence: Synthetic coding sequence
  source 1..852: mol_type = other DNA
atggagaagacctgcatcgacgccctgcccctgaccatgaacagctccgaaaagcaagaaacggtatgcatttttgggacaggcgacttcggacggagtctggggctgaagatgctccaatgtggctattccgtcgtgtttggcagccgcaacccacagaagacaacacttttgccttccggcgccgaggtgctgtcatattctgaggcagccaagaaatcgggaatcatcatcattgctatccatcgagaacactatgacttcctgactgaactcacagaggtgcttaatggaaaaatcttggtggatatcagtaacaacctaaaaatcaaccaataccccgagagtaacgcggaatacctcgcccaccttgtgcctggggcgcacgttgtgaaagcctttaacacgattagtgcctgggccctacagtccggagctctggatgcaagccgccaggcaatattgaagaaggagaaccctttcagcacttcctcagcatggctgagcgactcttatgtggcacttggcattcttggtttttttttgtttgtgttattaggcatcaccagcctccctagtgtgtccaatgctgtgaattggcgggagttcagattcgtacagtctaaactaggctacctcactctgatactgtgcacagcacatactctggtttacggcggcaaacggttcctgagtccctccaatctgcgatggtaccttccggctgcttatgtcctggggttaatcatcccctgcacagtactggtcatcaagtttgtcctcatcatgccatgtgtcgataacacacttacccggatcagacagggctgggaacgaaatagtaagcattag

SEQ ID NO: 207157 - DNA, 1380 bp, synthetic construct
  misc_feature 1..1380: note = Description of Artificial Sequence: Synthetic coding sequence
  source 1..1380: mol_type = other DNA
atggagaagacctgcatcgacgccctgcccctgaccatgaacagctccgaaaaacaagaaacggtatgtatctttggcacaggagacttcggcaggtctctaggcctgaagatgctacaatgcggatactccgtggtgttcggtagtaggaatcctcaaaaaacaaccctcttgccctctggggccgaggtgctctcttacagcgaggccgccaaaaaatccgggatcatcattatcgccatacatcgagagcactacgattttctgactgaattaaccgaggttctgaacggcaaaatcctggtggacatcagcaataacctgaagatcaaccagtaccctgagagcaacgcggagtatctggcccatctggttccaggggctcacgtcgtcaaggcttttaatactatttctgcttgggccttgcagagcggagccctggacgcatcgaggcaagttttcgtatgcgggaatgatagcaaagcaaagcaacgagtgatggacattgtgaggaaccttggactgactcccatggatcagggttctctcatggccgccaaagagatcgaaaagtacccgctccagctcttccctatgtggcgttttccattctacctcagtgcagtgctttgcgtcttcctgttcttctattgtgtcattagagatgtgatctatccgtatgtctatgaaaagaaggacaacacattcagaatggcaatatccattcccaatcgaatttttccaataaccgcacttaccctcctagccttggtgtacttaccgggggtgatcgccgctatcctgcagttataccgcggaacgaaatatagaagattccccgattggctcgaccactggatgctgtgtagaaagcaactgggcctcgtggcactcggattcgcttttctgcacgtcctctacactctggtgatccccattcgctactatgttcgttggcggctgggcaatttgactgtcacacaagccattcttaagaaagaaaaccccttctcaactagttctgcctggttgagtgacagctacgtagcattgggaatattaggcttttttttgttcgtgctcctcggcataacctcactgcctagcgtgagcaatgctgtgaattggcgagagttccgattcgtgcagtccaagctaggctacctgactttaattctgtgtacggctcatacgctggtgtacggggggaagcgattcttgtccccatccaatctccgttggtaccttcccgccgcctacgtattggggctgatcattccttgcaccgtcttagtcattaagttcgtgttaatcatgccgtgtgtagataatacactgacgcgcatcaggcaaggatgggagcggaacagtaagcattag

SEQ ID NO: 207158 - DNA, 1080 bp, synthetic construct
  misc_feature 1..1080: note = Description of Artificial Sequence: Synthetic coding sequence
  source 1..1080: mol_type = other DNA
atgcccgcccacctgctgcaggacgacatcagcagcagctacaccaccacaaccaccattacggctcctcccagccgggtcctccagaacggcggagacaagctggagacaatgcccttgtacctggaggatgacattagaccggacatcaaggatgatatctatgatccaacctataaggataaagaaggcccatcccctaaagttgagtacgtctggagaaatattattttaatgagcctcctccacctgggcgcgctgtacggtataacactgattccaacatgtaaattttatacttggttgtggggtgtcttctactatttcgtaagcgccctcggtatcactgccggagcccatagactgtggtcccaccgttcgtataaggctcgtctgcctttgcgtcttttcctaattattgcgaacacaatggcgtttcagaacgatgtttacgaatgggccagggatcaccgcgcccatcataaatttagcgagacccacgccgacccacacaactcaaggcgtgggttctttttctcccacgtcggttggttgcttgtacgcaagcaccccgccgtgaaggaaaagggcagcacattagatttatctgatctggaagccgaaaaactcgtgatgtttcagagacgatattacaagcctggcctattgatgatgtgtttcattctccccactttggtaccctggtacttctggggcgagacctttcagaactccgtatttgttgccaccttcctgcgttatgctgttgtcctgaacgccacctggttagtcaacagcgctgcacacctcttcggttataggccctatgacaaaaatatttctccgcgggaaaacatccttgtgagcctgggggccgtgggagagggattccataactatcaccactccttcccttacgactatagcgctagcgagtaccgatggcacatcaattttacgactttttttatagactgcatggcagcgctcggactggcttatgatcgaaagaaggtgtcgaaagccgcgatcttagctaggattaaacggacaggtgacgggaattacaaatccggctag

SEQ ID NO: 207159 - DNA, 729 bp, synthetic construct
  misc_feature 1..729: note = Description of Artificial Sequence: Synthetic coding sequence
  source 1..729: mol_type = other DNA
atgcccgcccacctgctgcaggacgacatcagcagcagctacaccacaacaacaactatcacagcccctccttcccgagtacttcagaatgggggcgacaaactcgagaccatgccgctgtacctcgaggatgatatccgaccagacatcaaggatgacatctacgaccctacctataaagacaaagaagggccatccccgaaggtggagtacgtttggcggaacattatattaatgagtctgttacacctgggggccctttatggcatcacactgattccaacttgcaagttttacacatggctgtggggcgttttctattatttcgtttcggcgttaggcatcacagccggggcgcaccgactgtggagccacagatcatataaagcaagactgcctctccgactgtttcttattatcgccaacactatggcttttcaaaatgatgtatacgagtgggccagagaccatcgggcacaccataagttcagcgagacacacgcagacccgcataacagcaggcgcggctttttcttcagccacgtgggatggctcttggtaagaaaacatcctgctgttaaagagaagggctctaccctggacctctcggacttagaggcagagaagctagtaatgttccaaaggcggtactacaagcccggcttgcttatgatgtgttttatcctccctaccctggtcccctggtacttttggggggaaacgttctag

SEQ ID NO: 207160 - DNA, 813 bp, synthetic construct
  misc_feature 1..813: note = Description of Artificial Sequence: Synthetic coding sequence
  source 1..813: mol_type = other DNA
atggcctgccggccccggagccccccccggcaccagagccggtgcgacggcgatgcctcccctccgagccctgcacgctggtctttgggacgcaaacgtcgggcagatggcagacggtggcggccagaggatgccgaagaagctgagcacagaggcgccgagcgaagacccgagtcatttacaacccccgagggccccaagcctcgctctcgctgtagtgactgggcatctgccgttgaggaggatgaaatgcgcacccgggtgaataaggaaatggcacggtacaaaaggaagctactgatcaacgactttgggagagagcgcaaatcttcttcaggctcctcagatagtaaggaatccatgagcacagtgcccgccgacttcgagactgatgaatcagtactcatgagacggcagaaacagattaactacggtaagaatactatcgcgtatgatagatacattaaggaggtcccacgacatctccgccagcccggtatccaccctaaaacccctaacaaattcaaaaaatactctcggagatcctgggatcagcagattaagctttggaaagttgccctccacttctgggatcctccggccgaggagggctgtgacttgcaggagattcacccagtcgatctggaaagcgctgagtcctcctcagagccgcaaacctcttctcaagacgactttgacgtctatagcggtacacctacgaaagttcgacatatggacagtcaggttgaagacgaatttgacctcgaggcgtgcttgacagagcctctccgagacttttccgccatgagctag

SEQ ID NO: 207161 - DNA, 5328 bp, synthetic construct
  misc_feature 1..5328: note = Description of Artificial Sequence: Synthetic coding sequence
  source 1..5328: mol_type = other DNA
atggccctgagcctgtggcccctgctgctgctgctgctgctgctgttattgctcagcttcgcagtcacactcgctcctaccgggccccactctttggatcccggactctcatttctgaaatcactcctttcaaccctggaccaagcccctcaagggagcctctctcgtagtcggttcttcacttttctcgctaacattagcagtagcttcgagccaggaaggatgggtgaggggccagtcggcgaacctccgcccctgcagccgcctgccctccggttgcatgactttttggtcacactaagggggagtcctgactgggagcctatgctaggactcttgggtgatatgctagctttactgggacaagaacagaccccacgggacttcttggtgcatcaagcaggcgtgctcgggggactagtggaggtgttgctcggggcattggtgcccggcggcccaccgactcccacgagaccaccctgtacacgggatgggccctcagattgtgtgttggccgcggattggctccctagtctgctgctgctcctggagggaacgcggtggcaggccttagttcaggtccagccatccgtggacccaaccaacgccacaggccttgacggcagggaagccgctccccacttcctacaagggctgctggggttactgacacctaccggggagttagggtcaaaggaagctctgtggggaggccttctgcggacagtaggcgctcccctgtacgccgcctttcaagagggcttgctgagggtgacacactcgctccaagacgaagtgttttcaatactcgggcagccagagcctgacaccaatgggcagtgccaaggcggtaacttgcagcagttactgctgtggggcgttagacacaatctgagttgggatgtgcaggcactggggtttctatccggctccccccctccaccacctgctttgctgcactgcctctccacgggcgtcccactcccgagagcctcacagccttccgcccatatttcaccaagacagaggcgggccataaccgtcgaggccctttgtgaaaatcatctaggacccgccccaccctacagcataagcaacttcagcatccaccttttatgccagcataccaagccagctacgccgcagccgcatccaagcaccaccgccatttgtcagacggccgtctggtatgcagtctcttgggccccgggtgcgcagggttggcttcaagcctgtcacgatcagtttccagacgaatttctcgacgccatttgctctaatctctccttctcagcactctcgggatctaatcgccgtcttgtcaaaaggctgtgtgccgggttgctgccaccgcccactagttgtccagagggtctcccaccggtcccacttacaccagatatcttctggggatgcttcctggagaacgaaaccctctgggctgaaagattgtgcggggaggcctccttacaggctgtacccccttcaaaccaggcctgggtacagcatgtctgtcagggaccgacaccagacgtcacagccagtcctccatgtcatattggcccgtgtggcgagcgttgtcccgacggcggatctttcctagtcatggtgtgtgcgaacgacacaatgtatgaagttctagtcccgttctggccatggttggccggccagtgcagaatttctcggggtggcaacgacacctgtttcctcgaggggttgctgggtcccttacttccgtccctgccccccttggggccctcccctctgtgtctcacccctggtcccttcctcctgggtatgctctcacagctcccaagatgccagtccagcgtccctgcacttgcccaccctacgaggctgcattatctcctgcggttgctgacatttctgttagggcccggagcgggcggagccgaggcccagggcatgctgggaagagcgttgcttttgtccagtctccctgacaactgtagcttttgggacgcatttcgtcccgaggggcggcgctcggtgttgcggaccatcggcgaatatctggagcaggacgaggagcagcctacacccagtggttttgagccaacagtgaaccccagcagcggaattagtaagatggaactgctagcttgctttagtcctgtgctgtgggacctgctgcagagagaaaagagcgtgtgggcactccaaattttagtgcaagcatatctgcatatgcccccagaaaatttgcagcagttagtactgtccgccgagagggaggccgctcagggttttttaacccttatgctgcagggaaaactccaagggaaactccaggtaccaccttctgaggagcaggccctcggacgtctaacagccctgttgctccagcggtatcccaggctcacgagccaactctttatcgacctgtcacctctcatccctttcctggccgtgtctgatttaatgaggttccctccgtctcttttagctaacgactccgtccttgccgccattcgggattactccccaggaatgaggcccgagcagaaggaagcactggccaaaaggctcctggcgccggagttgtttggcgaggtgcccgcctggccgcaggagctgctgtgggctgtcctgcccctactcccacaccttccgcttgaaaattttctgcagttgtcaccgcatcagattcaggcccttgaagattcgtggcctgccgcagggctgggcccgggccatgctcggcacgtcttgcgctcgcttgtcaaccaaagtgtgcaggacggcgaggagcaggtgcgtcgtctgggcccccttgcctgtttcctgtctcccgaagaactgcagtctctcgtgcccctttcagacccaaccggacccgtcgagcgcgggctcctggagtgtgcagccaatggaactttgtccccggaaggtcgcgtcgcctacgaactactcggtgtgcttcggtcttccgggggggcagttctgagccccagagagcttagggtgtgggcccctctgttcagccagctcggcctgcggtttctgcaggagcttagcgagccccagcttcgggctatgctgcctgtccttcaaggcacatccgtgaccccagcccaggcggtcttgctgctgggtagactcctgcctaggcacgacctcagtctcgaggagctgtgctcactccatcttctcctccctggtctttctccccagactctgcaagccatccctcgccgggttttagtaggggcctgctcctgcctggcaccagagctgagccgtttatcagcctgtcagacagctgctctgctccagacttttagagtaaaggatggtgtgaaaaacatggggaccaccggcgctggtcccgctgtgtgcatccccggccagcccatccccacaacgtggcccgattgtctcttgccgctcttgcctcttaagcttctgcagttggatagcttagccctgctcgcaaatcgccgacggtattgggagcttccttggagcgaacagcaggcacagtttttgtggaaaaaaatgcaggtccccaccaatctgaccctccggaaccttcaggccctggggacactggcagggggcatgtcatgcgaattccttcaacagatcaacagcatggtggattttctcgaggttgtgcatatgatctatcagctgcccacacgcgtgagaggttccttaagggcttgcatatgggcagaactacaaagacgcatggctatgccagaaccagaatggacaaccgtcggcccagaacttaatgggctcgattccaagctgttgctggatcttccaattcagctaatggaccgcctctctaacgagtctataatgctggttgtggaattggtccagagggcccccgaacagctcttggcactgacccctctgcaccaggctgccctggccgagagggctcttcaaaacttagctccaaaagaaaccccagtgtccggagaggttctggagacgcttgggcccttggttgggtttttggggacagaatctaccagacaaattcctctgcagattctgttatcacacctcagccaactgcagggcttttgtctcggagaaacctttgcgactgagctgggttggttactgcttcaggaatctgtgctaggcaagccggaactgtggtcgcaagacgaggtcgaacaagctggccggttggtcttcacactgtcaaccgaagcaattagtcttatccctagagaggccctgggaccggaaacactcgaacgactattagaaaagcagcaatcctgggagcagtcgagagtgggtcagctttgtagagaaccacagctcgcagctaaaaaggctgccttggtggctggggtggtgagaccggcggctgaggacctgcctgagcctgtccccaactgcgccgatgtgcggggcacctttcctgctgcatggagcgcaactcaaatcgcagagatggagttgagcgattttgaggattgtttgacattgtttgctggcgacccaggcctgggcccagaagaactccgagctgctatggggaaggccaagcagctctggggaccacctcgtggcttcaggccagaacaaatcttacagttaggaagactattgattggcctgggcgatcgcgaacttcaggaactcattctggttgactggggggtgctgagtacacttggacagatagatggatggtccacaacacagcttaggattgtggtttccagcttcttgcgacagtcaggccggcacgtatcccacctcgattttgtccacctgactgcccttgggtacaccctgtgtggccttcggcccgaggagctgcagcacattagttcctgggaattcagccaggcggcactattcctgggcactcttcacctgcagtgcagcgaggagcagttagaagtgctcgcccacttgcttgtcctgcctggtgggtttgggccaatcagcaactgggggccagagatcttcactgagattggcaccatcgctgccgggatcccagatctcgctctctcagctctcctcaggggccagatccagggggttacaccgctggctatctctgttataccccctccaaagttcgccgtggtcttctcccctatccagttatcctcattaacatccgctcaggccgtcgcggtcaccccagagcaaatggcttttctatctccagagcagaggcgcgccgtggcttgggcccaacacgaaggcaaagagtcacctgaacagcagggcaggtccacagcctggggcctacaggattggtccaggccctcatggtctttggtcctgacaatttctttcttgggccacctgctgtag

SEQ ID NO: 207162 - DNA, 1056 bp, synthetic construct
  misc_feature 1..1056: note = Description of Artificial Sequence: Synthetic coding sequence
  source 1..1056: mol_type = other DNA
atggccctgagcctgtggcccctgctgctgctgctgctgctgctgttgctgctctctttcgccgtgacacttgctcccacgggaccccattccctcgacccagggttatctttcctgaagtctctcctgtccacactggatcaggccccgcagggatccctatcgcgatcgcgcttcttcactttcctggccaacatctctagtagctttgaacctgggaggatgggtgagggacccgtgggtgaaccccccccgcttcagccccccgctctgagactgcacgacttcttggtgacgttacgcggctctccggactgggaaccaatgctgggtctgttgggagacatgctcgcccttctgggccaagagcagaccccacgggatttcctggttcatcaggcaggagtcctaggaggattggtggaggtcctgcttggcgcgctggttccaggtgggccacctacgcctacccagccaccgtgtacccgggacggaccttccgattgtgtgctcgccgccgattggcttccatcgctgcttcttctcctggaagggaccaggtggcaggcgctggtgcaagtacagccaagcgtggatcccaccaatgcaaccggccttgatggtcgcgaggctgcccctcacttcctgcaggggctgctgggcctgctaaccccaaccggcgagctgggctcaaaagaggctctgtggggaggactgttgcgcactgtaggggcacccctgtatgctgcctttcaggaggggctgctcagggtcacacactccttgcaggacgaggtattcagcattctagggcagcccgagcccgacactaatggccaatgccaaggagggaacctacagcagctgttactatggggcgtgcgccataatctatcatgggacgtacaggcccttggcttcttatcggggagtcctccaccccctccagcactgctgcattgcctgagtacaggcgtacccttgccccgtgccagccagccctcagcacacatttccccgcggcagagaagggcaataactgttgaggcgctgtag

SEQ ID NO: 207163 - DNA, 5328 bp, synthetic construct
  misc_feature 1..5328: note = Description of Artificial Sequence: Synthetic coding sequence
  source 1..5328: mol_type = other DNA
atggccctgagcctgtggcccctgctgctgctgctgctgctgctgctgctgctgtcctttgccgtgactctggcccccaccgggccacactctctggatcccgggctaagttttctgaagagtctcctgagcacacttgaccaggctccacaggggtctctgtcccggagccggttttttacatttctggccaacatctctagctcattcgagccagggcggatgggtgaaggacctgttggagagccgcctcccctgcagcctcctgcgctgcggctgcatgacttcctggtgaccctccgcggctcaccagattgggagcccatgctgggacttctgggcgacatgctggctctcctgggccaggagcagacccctagagactttctggtgcatcaagctggcgtgttgggggggttggtggaagtgctcttaggtgctttggttcccggcgggccgccaacaccgactcggcctccctgtacacgagatggacctagcgactgcgtgctggcagctgactggctacccagcctgctgctgctgctcgagggaacaaggtggcaggcgctcgttcaagtgcagccgtctgtggatcccaccaacgccactggactggatggcagggaggcagctccccactttctccaaggcctcttaggattgctaacaccaaccggtgagctgggctctaaggaggctctgtggggcgggctgctgcgcactgtcggtgcacctctttatgcagcttttcaggagggactcttgcgcgtcacacactcgctccaggatgaggtctttagtattttgggtcagcctgagccagacaccaacggtcaatgtcaagggggaaatctccagcagctgctgctttggggagttaggcacaacctcagctgggatgtccaggctcttggattcctgagcgggtcaccccctcctcccccggctttgttgcattgcctgagtaccggggtgcctcttccccgcgcttcccagccatcagcacatatttctccccgccagcggagagccatcacagttgaggccctgtgtgaaaaccatttggggcccgcgccaccatactcaatttccaacttcagcattcacctgctatgtcagcacactaagccggctaccccgcaaccgcacccctcaaccaccgccatttgccaaacggctgtgtggtatgccgtcagctgggcacccggagcacagggctggttgcaagcctgtcacgaccaatttcccgacgagtttctggacgccatctgctctaacttgagtttcagtgccctatccggcagtaatcgccggctggtgaaaagattatgcgctggtcttctcccaccacctacatcatgtcctgagggtctgccaccggtcccactcactccagacatcttttggggctgtttccttgagaacgaaacgctgtgggctgagcgcctatgtggcgaggccagcttgcaggctgtgccacccagtaatcaggcatgggtgcaacacgtttgccagggcccgacaccagatgtgacggcaagtcccccatgccatatcggaccgtgtggcgaaaggtgtcctgacggcgggagtttcttggtcatggtttgtgctaatgataccatgtacgaagtgctcgtccccttttggccctggcttgccggtcagtgccgaatatcccgaggcgggaatgacacttgtttcctcgagggccttctcgggcccctgcttccatccctccctccgctgggaccctctcccctatgcctgactccaggtcctttcctcctggggatgttgtcccagctacctaggtgccagagctccgttccagcgctggctcatcccacgagacttcactatctgcttaggttactaactttcctgctcggccctggcgcaggcggcgccgaagcccagggtatgctgggcagagcactcttgctctcttctctcccagataattgctctttttgggacgccttccgccctgagggccgtcggagcgtactcaggaccatcggagagtacctcgagcaggatgaagaacaaccaacaccatcaggatttgagcctactgtgaacccatccagcggtatcagcaaaatggagctcctggcttgtttctcacccgtgctctgggatttgctccagcgggagaagagcgtctgggctctgcagattctagtccaggcttacctgcacatgcctcccgagaatcttcagcagttggtgttatccgctgagcgagaagcagcacaaggcttcctcaccctcatgctccaaggcaaactgcagggcaagctgcaggttccccccagcgaggagcaggctctggggcgtctcacagcattattactgcagagatacccccgcctaaccagccagctctttatcgatctaagtcctctgatacccttcctcgccgtctctgatttgatgcgatttcctccctccctcttggccaatgattcggtgctagccgccatacgtgattattcccccggaatgaggcctgaacagaaggaggctctcgctaaaaggttacttgcaccggaattgttcggggaggttccagcctggccacaagaattattgtgggccgtgttgcccctcctcccacaccttccacttgaaaacttcctacaactcagtccccatcaaatacaggcgctcgaggacagctggcccgctgccggactgggtccaggtcatgcgcggcatgttttacggtcactggtgaatcagagcgtgcaggacggcgaggagcaagtgagaaggctggggccacttgcctgtttcctgagcccggaggaacttcaatccctagtcccactctcagaccccacgggcccggtggaacgcggcctgctggagtgcgctgctaatgggaccctgtcacccgagggccgcgttgcttatgagctgctgggcgtactgcgcagtagcggcggagctgtactgtctccacgcgagctacgggtttgggccccgctgttttctcagctcgggctccgctttctgcaggaactgagcgagccccagctgagagccatgctgccagttctccaggggacctccgtcactccggcccaggcggttctgctcctcggcagactgctaccccgccatgacctgtctctagaggaattgtgtagtctgcatcttttgctgcctgggctttctccacagacgctgcaggctatccccagacgcgtcctggtgggtgcctgttcctgcctggcaccggagttgtccaggctgtcagcctgtcagactgcagccctcctgcagacctttagagtaaaagatggcgtgaagaacatggggactactggtgccggtccagccgtctgtatcccggggcagcctattccgaccacttggcctgactgtttactgccgttgctcccgctgaaactgcttcagcttgactctctcgctttgctggctaatagacgccgctattgggaactgccttggtcagagcaacaggcacaatttttgtggaagaaaatgcaggtgcccacaaacttgactctgcggaatctgcaagccctcggtactttggccgggggcatgtcatgtgaattcctgcagcaaataaactccatggttgattttctggaggtcgtacatatgatatatcagctccctacccgggtgcgcgggtcgctgcgagcttgcatttgggccgagcttcagcgtcggatggctatgcctgaacccgaatggacaaccgttggtcctgaactcaacggccttgactccaagctgctgttggatttgcctatccagctaatggatcgactttccaacgaaagcatcatgctcgtcgtcgagttggtgcagagagctccagagcagctcctcgccctgacgccactgcaccaagcagcactggctgagcgagctttgcagaacctggctcccaaagaaacccccgtcagtggcgaggtgctcgagacacttggacccctcgtgggattccttgggaccgaaagtacaagacagatccctctgcagattctcctttcgcacctgagccagctgcaagggttctgcctcggggaaacctttgctaccgaactggggtggctgcttcttcaggagtctgtgctcggaaagcccgagttgtggtctcaggacgaggtggagcaggcaggaagactggttttcacacttagcacagaagccatttctctgattcctagggaggccctaggccctgagactctggagcgtctgctggagaaacagcagtcttgggagcaaagccgggttggacagctctgccgtgagcctcagctggcggctaagaaggctgcactggttgcgggcgtcgtacggcccgccgctgaagacctacccgagccggtgccgaactgcgcggacgtccgtggcacattccctgcggcgtggtccgcaacacagatagccgaaatggagctatcggacttcgaggactgcctgactctgtttgccggcgacccagggcttggacctgaagaacttcgggcagccatggggaaggccaagcagctctgggggcccccgcgcgggtttcgaccagagcaaattctccagctgggcaggctgctcataggactgggtgaccgtgagcttcaggagttgattctggttgactggggcgtcctttctacgctgggtcagatcgacgggtggagcaccacgcaacttcgtattgtcgtctcttccttcttgagacagtctggccgccacgtatcacacctggatttcgtacacctcacagcactcggctacaccttgtgtggactcaggcccgaagaactgcagcacatctcctcctgggagttcagtcaggcagctttgtttctgggcacactgcatctgcaatgttcagaagagcagcttgaagtgcttgcccatctccttgtgctccctggaggattcggcccaatatcaaactggggccctgaaattttcacagagatcggaactatagccgcaggtatcccagatctcgcgttgtccgcgttgctgagggggcagatccaaggcgttaccccactggccattagcgtgattcctccacccaaattcgcagtagtgttctcaccaattcagctcagttcccttaccagcgcccaggctgtggccgtaactccagaacagatggcattcctgagtcctgaacagcgccgcgcagtcgcctgggctcaacatgaggggaaggagagccctgaacagcagggaagatccacagcctggggcctccaagactggagtcggccctcatggtctttggtcctgacaatcagtttcctcgggcacctgttgtag

SEQ ID NO: 207164 - DNA, 1056 bp, synthetic construct
  misc_feature 1..1056: note = Description of Artificial Sequence: Synthetic coding sequence
  source 1..1056: mol_type = other DNA
atggccctgagcctgtggcccctgctgctgctgctgctgctgctgctgcttctcagctttgcagtgacattggctccaactggcccacactctcttgatcccggcctgagtttcctcaaatccctgctctccactcttgaccaggcaccccagggctccttgtctcggtctaggttctttacttttttagccaacatatcatcttccttcgaaccaggaagaatgggcgaaggcccagtgggagagcctccacccttgcaaccacctgctcttcgtctgcacgacttcctcgtgacactacgtggtagccctgattgggagcctatgctgggactacttggcgacatgttagcccttctggggcaggaacaaacgccccgagacttcctcgtacatcaagcaggcgtactggggggattggtggaagtgctactgggagccctagtccccggcggcccacccacccccacccgaccaccatgtacgagggatggcccatcagattgcgtgctggccgcagactggctgcctagtctgctgctgctgctggagggaactaggtggcaagccttggttcaggtacaaccgagcgtcgatccaaccaacgcaacaggccttgatggaagggaggctgcaccacacttccttcagggactgctgggcctattaacacccactggagaactcgggagtaaggaggctctctgggggggccttctgcgcacagtaggtgctcctctttacgctgcctttcaggaaggcctcttaagggtcacccactcgctgcaggatgaagtgtttagtattctcgggcagcctgaaccagacactaatggccagtgccagggaggcaacttgcaacagcttctcctgtggggtgtccggcataacctgagttgggacgtacaggccctggggtttttgtctgggtccccaccccctccacccgcgctgttgcactgtctgtctaccggcgtgcccctgcctagggcaagtcagcccagcgcccacatttccccaaggcagcggcgggccataaccgtcgaagctctgtag

SEQ ID NO: 207165 - DNA, 2100 bp, synthetic construct
  misc_feature 1..2100: note = Description of Artificial Sequence: Synthetic coding sequence
  source 1..2100: mol_type = other DNA
atggccctgagcctgtggcccctgctgctgctgctgctgctgctgcttttattaagtttcgctgtcactctggcccctacagggccacattccctcgatcctgggctctcattcctgaagagtcttctgagcacattggaccaggctccccaggggagcttaagcagatcaagatttttcaccttcttagccaacatctctagcagctttgagcctggcaggatgggggaggggcccgtgggtgagcctccgccattacagcctccggccctcaggttacatgatttcctggtaactctaagaggctcaccagactgggagcccatgttgggactgttgggggatatgctggccttgctaggacaggagcagaccccgcgtgactttttagtgcaccaggccggcgtgctgggcggactggtggaagtgctgctgggggccttggtcccaggcggtccgcctactcccacccaacctccttgtacgcgcgacggcccatcggactgcgtacttgccgccgattggctgcccagtctgctgctgcttctagaagggacaaggtggcaagcacttgtccaagtgcaaccatctgtggatcccacgaacgctaccgggttggatgggagagaagctgccccacactttctgcagggactgctgggtttactcaccccgactggggaactcgggtccaaggaggcactgtggggcgggctgctccgcaccgtaggcgctcctctgtatgcagcatttcaagaagggctgctaagggtgacccattctctgcaggatgaggttttttccatactaggtcaacccgaacccgataccaatgggcagtgccagggagggaacctgcaacagctgctgctgtggggcgttcggcataatctctcctgggatgtacaggcccttgggttcctgtccggtagcccaccaccaccacccgcactcctacattgcttgtccacaggagtccctctcccacgcgctagtcagccaagcgcgcacatttcccctcggcagcgtcgggcgattacagtggaggcgctctgtgagaatcatctcgggcccgcgccgccttacagcattagtaatttctctatccatctactctgtcaacacactaagcctgccacaccccagccccacccctcgactaccgccatttgtcagaccgctgtttggtatgccgtgtcctgggcgccgggtgcccagggttggttgcaggcatgccatgaccagttcccagacgaattcctagacgccatctgtagtaacctctcattttccgccctcagtggaagtaacagacggctggtcaagaggctttgcgcaggtctgctgcccccgccaacctcctgcccggaaggcctgcctccagtgccactcactccagacatcttctggggatgcttcctggaaaatgaaacgttatgggctgagcgactctgcggcgaggcgtctctgcaggctgtccctccttctaaccaggcgtgggtacagcatgtctgccagggaccaactcctgacgtgacagcttctccgccttgtcatattggaccctgcggcgaacgttgccccgacggcggctcctttctcgtgatggtctgcgctaatgacacaatgtacgaggttctcgtacctttttggccctggttggccggccagtgtaggatttcgagaggaggcaacgatacctgcttcttggaaggcctgctggggcccctcctgccgagcctcccacctttgggacccagtccactttgcctaaccccagggccctttttactcggcatgctgagtcagttgccaaggtgccaatcctcagtcccagccctggcccatccaacaaggctccactacctgcttcgactgctgactttcttactgggaccaggagccggtggggcggaagcacagggcatgctgggccgggcccttctcctcagcagcctacctgacaactgctccttttgggatgcattcaggccagagggaagacgcagtgtcctcagaacaattggggagtacaataagatgcggagctcgcagcctcaccaggctttaaatccactcagcacccctgcactcgtatag

SEQ ID NO: 207166 - DNA, 3009 bp, synthetic construct
  misc_feature 1..3009: note = Description of Artificial Sequence: Synthetic coding sequence
  source 1..3009: mol_type = other DNA
atggagctgctggcctgcttcagccccgtgctgtgggacctgctgcagagagagaagtctgtgtgggcgctccagatattagtgcaggcctatctccatatgcccccagagaacctccaacagctggtgttgtcagcggagagggaggccgcacagggatttctaacgctgatgctccaaggcaaactgcagggaaaattgcaggtcccaccgtctgaggaacaggccttaggcaggcttacagccctgctgcttcagagataccctcggctcaccagccagctgtttattgatttaagtcctttgattcctttcttagcagttagcgacctgatgcggttcccaccttccctcctggcgaatgatagtgtccagcaaggctaccgcgggtctgaagaaaacagtctggaagaggacaaaggactgcgtccaatgaccccacggtctctggccgctattcgcgactactcccctggtatgcggccggagcaaaaggaggctctggccaaacgccttctggcgcccgaactattcggcgaggtgcctgcatggccacaggagctgctttgggccgtcttaccccttctgccgcatctccctctggaaaactttctgcagctcagtccccatcagattcaggctcttgaagatagctggcccgctgctgggctgggcccgggacacgctcgtcacgtgcttcgaagtttggtgaatcagagcgtccaggatggagaagaacaagtcagaaggctaggtcctctagcctgcttcctgtcccctgaagaactgcagtctctggtccctttgtctgaccctaccggtcctgtggagagagggctcctggagtgtgccgccaacggcaccctctcccccgaggggcgtgtggcctacgagctcctaggggtgctgcgaagttctggtggtgccgttctgagccctagggaacttagggtctgggcgcctctgttctcccagctgggccttcgattcctgcaggagctttcagagcctcaactgcgcgccatgctgccggttctgcagggcactagtgtgacgcccgctcaggcggtgcttctcttaggaagacttctgccacgccacgatttgcttcagctggactcacttgctctattggccaatcggaggcgctattgggagctcccttggagcgagcagcaagctcagtttctgtggaagaagatgcaagtcccgacgaacctgacccttaggaatctacaggccctgggtacgctggccggcggaatgagttgcgagttcctgcagcagatcaattcgatggtggatttcctcgaggttgtgcacatgatttatcagcttcccactcgagtacgcgggtcactgcgagcctgtatatgggctgaactgcagcgccgcatggctatgccggaaccagagtggaccacagttggacctgaactgaacggcttggacagcaaactgcttttagacctacctatccaattaatggacaggttgtcaaatgagagcattatgctggtagtggagctagtgcaacgagcccccgagcagctactagcgttgacccctttacaccaggctgccctggctgagagggcacttcagaatctggcaccaaaagaaacaccagtgagcggggaagtattagagacccttggtcctctggtgggattcctcggcacggaatctacgagacagatcccactgcagatactcctgagccatctatcacaactccagggattctgcctgggcgagacatttgcaacggagctgggatggctcttgctgcaggaaagtgtattagggaagcctgagttgtggtctcaggatgaagttgaacaggctggccgtttagtgtttactctctctaccgaagcgattagcctcatccccagggaggccttaggtcctgagacgctggagcggctgctggagaagcaacagtcgtgggaacagtcacgcgtgggacaactgtgccgggagccccagctcgctgcaaagaaggcagctcttgtcgctggcgtggtgagaccagccgccgaggatctacccgagcccgtgcccaactgcgctgatgtgcgcggcactttccccgcagcatggtcagcgacgcaaatagctgagatggagctttctgatttcgaggactgcctcactttgtttgccggagacccaggactcggacccgaggaactcagagctgccatgggcaaggccaaacagttgtgggggccgcctcgtggttttcgcccagagcagatcctgcagctgggacggctcctgatagggctcggcgatcgcgagcttcaagagctgatcctggtcgactggggtgtgctcagtacattgggtcaaattgacggttggagtacaacacagctcaggattgtggtgagcagctttctgaggcaaagcggccgccacgtctcacacctggacttcgttcatctgaccgccttagggtataccctctgcggactgaggccagaggaattgcagcacatttccagctgggaatttagccaggctgctctcttcctcggtacactccatcttcagtgctcagaggaacagctcgaggtgttggcccatctgctcgtgctgccgggagggtttggcccaatatccaactgggggcctgaaatttttactgagatcggtacaattgccgccggtattcccgacctggctctctcagccctgctgcgtggacagattcagggggttacccccctggccatcagcgtaatcccgccccctaagttcgcagtcgtcttttcccccattcagctgtcgtcactgacatcggcccaagcagtggccgtgacccctgaacagatggccttcctcagtcctgagcagcgccgggccgttgcctgggcccagcacgaggggaaagagagccccgagcagcaagggcgcagtaccgcatggggcctccaggattggtcccgcccaagttggtcacttgtgcttacaatcagcttcctcggtcacctattatag

SEQ ID NO: 207167 - DNA, 1890 bp, synthetic construct
  misc_feature 1..1890: note = Description of Artificial Sequence: Synthetic coding sequence
  source 1..1890: mol_type = other DNA
atgttccgggaccaggtgggcgtgctggccggctggttcaagggctggaacgagtgcgaacagacagtcgctcttctctccttgctcaaacgcgtgtctcaaacacaagcacgctttttgcagctctgtttggagcactcgctggccgattgtgctgagcttcatgtgctcgagagagaggccaattcccccggcattatcaaccaatggcaacaggagtcgaaagacaaggtgatatccctgctcctaacccaccttccattgctgaagccaggaaacctcgacgctaaagtggagtacatgaagttattacccaaaatcttggcccattccattgaacataatcagcatatagaggagtcaagacagctgcttagttatgcattgatccatcccgccacttccctggaagacaggtccgccctggctatgtggttaaaccatttagaggataggacatcgacgagctttggaggtcaaaaccgggggagaagcgacagcgtagactacggacagacacattattatcaccagagacagaattcagacgataagctgaatgggtggcagaactcacgggattcaggtatttgtatcaatgccagcaattggcaggacaaatctatgggatgtgaaaatggtcacgtgcctctgtactcgtcctcttcggtccccaccactatcaacactattggaacttcaacgtccacgaatgtgcccgcctggctcaaatcactcagactccacaaatatgccgctctttttagtcaaatgacctacgaagaaatgatggctcttacagaatgccagttagaggcccaaaatgtgacaaagggcgctcgtcataagatcgtcatctctatccagaaactaaaggaacggcagaatcttctcaagtcactggagcgcgatataatcgagggtggctccttacgtatccctctccaggaactgcatcagatgattctgacgccgattaaagcctatagcagtccatccaccaccccagaggccaggcggcgagagccgcaggctccccgccaaccctccctgatgggcccagaatctcagagccctgactgcaaagatggagccgctgcaaccggggccacggcaactcctagcgcaggagcaagtggcgggctgcagcctcaccaattatcatcatgcgacggcgagcttgcagttgcacctcttcccgagggagatctccccggccagttcacacgggttatgggcaaggtgtgtacccagcttcttgtgtcccgaccagacgaggagaatattagctcctatctacagctgatcgacaaatgtcttattcacgaagccttcacggagactcagaaaaagcgtctgctttcgtggaagcagcaggtccagaaattattccgatcatttcctaggaagacactgcttgacatctccggctacagacaacagagaaaccgaggcttcggccagtcaaattccctacctacggcaggttcagtgggaggcgggatggggcgacgaaaccccagacaataccagataccaagtcgtaatgtcccctcagcacggctggggctgctcggaacatctggattcgtaagctcaaaccaaagaaacactactgccacgcctacaataatgaaacagggacgtcagaatctgtggtttgctaatcccggcgggtctaactccatgccatcaagaacgcacagctcagtgcaacgtacaaggagtctgccagtgcacacatccccccaaaatatgctaatgtttcagcagccagagtttcagctgccggtgactgagcccgatatcaataatcgattggaatcactttgtttgtcgatgactgaacacgccttaggcgacggagtcgatcgtacctccactatttag

SEQ ID NO: 207168 - DNA, 1893 bp, synthetic construct
  misc_feature 1..1893: note = Description of Artificial Sequence: Synthetic coding sequence
  source 1..1893: mol_type = other DNA
atgatgttccgggaccaggtgggcgtgctggccggctggttcaagggttggaacgaatgtgagcagactgtagcattactgtccctgttgaagagggtatcccaaacccaggcccgatttctgcaactttgtctggaacactccctggccgattgtgctgaactgcatgttctggaacgagaggctaatagtccagggattatcaaccagtggcaacaggaaagtaaagacaaggttattagtctgttgctgacccacctgcctctgctgaagccaggtaatctggatgccaaggtcgaatatatgaagcttctgcctaaaattctcgcccatagcatagaacacaatcaacacatcgaggaaagccgacagcttttatcctatgctctgattcaccccgccaccagcctagaggaccgctctgctctggcaatgtggctgaatcacttggaggatcgtacttctacctcttttggaggacagaaccgcggcaggagtgacagtgtcgactatggtcagactcactactaccaccagaggcaaaactccgatgacaaactcaacggctggcagaatagccgtgactctggcatatgcataaatgcatccaattggcaggataagtccatgggctgcgaaaacggacacgtgcctctgtactcctcttcatctgtcccaaccaccattaacaccataggaacctcaacttccactaacgtccccgcgtggctgaagtctttacggcttcataaatacgcagccctgttttcgcagatgacctacgaggagatgatggctctaacagaatgccaactggaggcccagaatgtgacaaaaggtgccagacataaaatcgtaatttcaattcagaagctcaaggagaggcaaaacctgctcaagagtttagagagggacataattgaaggtggtagcttgcggattcctctgcaggagctgcaccagatgatccttactccaataaaggcttactcctcaccatccacaacgccggaggccaggagacgggagcctcaggcacctaggcaacctagcctgatgggaccagagtctcaatcccctgattgcaaggatggagcggcggccacaggcgcaactgctacaccaagtgccggtgcctccggtggccttcaacctcatcagctcagttcctgtgatggggaattagcagtggcccccttgccggagggggacttgccgggtcagttcaccagagtgatgggaaaggtgtgcacacaactcctcgtgagcaggccggatgaggagaacatatcatcatacctgcaactgatagataagtgtctcattcacgaagcctttaccgaaactcagaaaaaacggctgctgtcctggaagcaacaggtacagaagctgtttcggagttttccacggaaaaccttgctggatattagcgggtataggcaacagcgcaataggggattcggtcagtctaattctctacccacagcaggatcagtcgggggaggcatgggccgacgaaatcctcgacagtaccaaattccctctcgaaatgtccctagcgctaggctcggactgctcgggacatccggatttgtctcaagcaaccagcgaaacaccaccgccacgccaactatcatgaaacaggggagacagaatctttggtttgcaaacccagggggcagtaactccatgccgagccgcacacacagttccgtacagagaactcgatctcttcctgtacataccagcccacaaaacatgcttatgtttcaacaaccggagtttcagctgcctgtaacagagcccgacatcaataaccgcctcgagagcctgtgtttgagtatgaccgagcacgccctgggtgacggtgtcgatagaacttctaccatttag

SEQ ID NO: 207169 - DNA, 2154 bp, synthetic construct
  misc_feature 1..2154: note = Description of Artificial Sequence: Synthetic coding sequence
  source 1..2154: mol_type = other DNA
atgttccgggaccaggtgggcgtgctggccggctggttcaagggctggaacgagtgtgaacagaccgtcgccctgctgagcctgctcaaaagagtgagccagacacaagctaggttcctgcagttatgtcttgagcacagtctagctgattgtgccgagctccatgtgctggagcgtgaagcaaattcgcccgggattattaaccagtggcagcaagagagcaaggacaaagtgattagcctgctgttaacacatctgcctttgctcaagcccggcaacctggacgcaaaagtggaatatatgaaacttttacctaagatcttggcgcactctatcgagcacaaccaacacatagaagagtccaggcagctgctaagttacgcattgatccaccccgccactagtttagaagaccgatctgctctggcgatgtggttaaatcatctagaggatcgaacatcgacttcatttggaggccagaacagaggcaggagtgactccgtggattatggtcaaacacattactatcaccaacggcagaactctgacgacaagttgaacggttggcagaacagccgagacagcgggatctgcatcaacgcttctaattggcaggacaagagtatgggctgtgagaatggtcatgttccactgtacagttcttcgtctgtgccaaccaccattaacactattggcaccagcacgagcactatcctcagtgggcaggctcatcactctccactgaagagatctgttagcctcaccccaccgatgaacgttccaaaccagcctctcgggcatgggtggatgtcacatgaggatttgcgggctcgtgggcctcagtgcctgcccagcgaccacgctccgctgagcccccagagctctgtggccagctcagggtctgggggcagcgagcatctggaagaccagacaaccgctagaaatactttccaggaggagggaagcggaatgaaggacgtgccggcatggctgaaaagcttaaggctgcacaaatacgcagctttattttcccagatgacctatgaggagatgatggctctgactgagtgtcagcttgaagcccagaacgttacgaagggcgcgcgccataaaattgtcatcagtatacaaaagctgaaagagcggcaaaacctattgaagtccttggagagggacatcatcgaaggcggctctttgagaattccactgcaggaactccaccagatgatattgacgcccattaaagcctattcctccccatccactacccccgaggcacgcaggcgggaaccacaggctccccgacagccaagcctcatggggcctgaaagtcaaagccccgactgcaaagacggggctgccgctacaggggcaactgccaccccgtccgccggggcctctggaggcctgcagccacatcaattatccagctgcgatggcgagctggctgtcgcacctctccctgagggagacctgccaggacagttcacacgagtcatgggaaaggtatgcactcagttactggtgagccgccctgatgaagagaatattagcagttaccttcagctgattgataaatgcttaatccacgaagcctttacagagactcagaaaaaacgcttactctcatggaaacagcaggtgcaaaaactattcagatcattcccacggaaaacactgcttgatatttctggctaccgccaacagcggaaccgggggtttgggcagtccaattcattgcctacggccggtagtgtcggcggtgggatgggccgtcggaatcctcggcagtaccaaatcccgagtcgaaatgtgcccagtgcacgcctcggtttgcttggtacttccggcttcgtttcctctaaccagcgtaacaccacagctactcccaccatcatgaagcagggtaggcagaacctgtggtttgccaaccctggagggtcgaattctatgccttctagaacccacagctctgttcagcgtacacgtagcctgcccgtacacactagtccccagaacatgttgatgtttcaacaacccgaattccagctgcccgtgaccgagcccgatattaacaacagacttgaaagcctttgtctgtccatgactgagcatgctcttggagatggggtggataggacctccaccatctag

SEQ ID NO: 207170 - DNA, 2157 bp, synthetic construct
  misc_feature 1..2157: note = Description of Artificial Sequence: Synthetic coding sequence
  source 1..2157: mol_type = other DNA
atgatgttccgggaccaggtgggcgtgctggccggctggttcaaggggtggaatgaatgtgagcagaccgtggccctgctttcattgctcaaacgcgtgtcacagacacaggcacgcttcttgcagttgtgcctggaacactctttggccgactgtgcagaactgcatgtgctcgaaagggaggctaactcccctgggataattaatcagtggcagcaagaatctaaggacaaggtgatctccttgcttctgacccatctcccactgttgaagcccggtaatctcgatgctaaagtagaatatatgaaactcttaccaaaaatccttgctcacagcatcgagcataatcaacacatcgaagagagtaggcagctactatcctacgcacttatccaccctgccacaagtctggaagaccggtctgccctcgctatgtggctcaatcatctggaagacaggacttcgactagcttcgggggccagaacaggggccgctcggactctgtcgattatggacagacccattattaccaccagcggcagaactctgacgacaagctgaacggttggcagaacagcagagattcaggcatctgcatcaatgcctctaactggcaggacaagagtatgggatgcgagaacggacacgttccattatatagctctagttcagtgccgactaccataaacacaattgggaccagtacgtctacaatcctctccggacaggcccaccattccccgcttaaacgctccgtgtcgctcaccccccctatgaatgtccctaatcagccgctgggccacggctggatgagccatgaagacctgagagccaggggcccacagtgtctccctagcgaccatgccccactgtccccccagtcttccgtggcttcgtccggctccgggggcagcgagcatctcgaggaccagaccacagcccgcaatacttttcaagaggaggggtccggcatgaaagacgtaccagcctggcttaagtctttgagactgcataaatatgccgccctcttctcgcaaatgacttatgaggaaatgatggccttgacggagtgtcagctggaagctcaaaacgtgacaaaaggggcgcgccataaaatcgtgattagtattcagaaactcaaagaaaggcagaacttgctgaaatcccttgaacgagatatcatcgagggaggtagtctgagaatcccattgcaggaactccatcagatgatcttaaccccaatcaaggcgtacagttctccatcaactactccggaagcccggcgaagagagcctcaggctccgaggcagccttcactgatggggccggagagtcaatccccggactgcaaggacggcgccgctgctactggtgccacagctacaccaagtgccggcgcatcaggcggcctgcagccgcatcagttatcatcctgtgatggggagcttgccgtcgctccccttcctgagggcgacctgcccggacagtttacccgcgtgatgggtaaagtctgcacccagctactggtgtccagaccagatgaagagaatatctcctcttacctccagctcattgacaagtgtctgatccacgaggctttcacagagacacagaagaagcgtctgctgtcttggaaacagcaggtgcaaaaactcttcagatccttccccagaaagaccctgcttgatattagcggctaccgccaacagcgcaaccgcggttttggacagagcaacagtctaccaacagctgggtcagttgggggaggcatgggaagaaggaacccaaggcagtaccagattccatccagaaatgtgcccagcgcccgtcttgggctcttaggaaccagcggtttcgtaagctctaatcagcggaacactacagccactcctacaatcatgaagcaaggaaggcagaatctatggtttgccaatcctggaggttctaactctatgcctagtagaacccacagcagtgtgcagcgtaccaggagcctcccggttcacacgtcaccacagaacatgcttatgttccagcaacctgaatttcaactcccagtgaccgaaccagatataaacaaccgcctggaatctctctgcctgtctatgaccgaacacgcgctaggagatggggtggatcggacttctacaatctag

SEQ ID NO: 207171 - DNA, 2157 bp, synthetic construct
  misc_feature 1..2157: note = Description of Artificial Sequence: Synthetic coding sequence
  source 1..2157: mol_type = other DNA
atgatgttccgggaccaggtgggcgtgctggccggctggttcaagggttggaacgagtgtgagcagaccgtggcattgctatctctcctgaaaagagtctctcagacccaggccaggttcctacaactttgtctcgaacacagtctggctgactgtgccgaactgcacgtactagagagagaagctaattcccccgggattataaaccaatggcaacaagaaagcaaagacaaagtgatcagcctgttgctcacccatttacctttattgaaaccagggaatctcgatgctaaggtggaatacatgaagttactgcctaaaatactcgcacattctattgaacacaaccagcacattgaagaatcacggcagcttctgagctatgccctaatccaccctgctacgagtctggaggatcgctccgcactcgctatgtggctgaaccatctcgaggacagaacttcaaccagttttggcggccagaaccgggggcgtagcgactcagtagattacggccagacgcattattatcaccagcgccagaatagcgatgataaactcaacggatggcaaaactctagggactcaggaatatgtatcaacgccagtaattggcaggacaagagcatggggtgtgaaaacggccacgtgccactgtattcgtcctcatctgtgcccacaaccattaatacaatcgggacttccacgagtaccatactgtccggccaggcacatcattcacccctgaagcggtccgttagccttacccctcccatgaacgtgccaaaccagcccctgggacatggatggatgagccacgaagacttgagggctagaggacctcagtgtctgcctagcgaccacgctccgctttcaccacagagctctgtggcatcttccggttctggggggtctgagcacttagaggaccagacaacggccaggaataccttccaggaggaggggtcaggtatgaaagatgtcccagcatggctgaaatcactgaggctgcataagtatgcagccttgttctcacagatgacttacgaggagatgatggctctcaccgagtgccagctggaagcccagaatgttaccaagggcgcccgccacaagatagtgatcagtattcaaaagctgaaggagagacaaaatctgctgaaatcgctagaacgagacattatcgagggaggtagcctaagaatcccgttgcaggagctgcatcaaatgatacttactcccatcaaagcatactcctccccttctacaaccccggaagcaagacggcgggaacctcaggctcctaggcagcccagcttaatgggaccagaaagtcagagcccagactgcaaagatggggccgctgctacgggtgctacagcaacaccttcagctggtgcctcaggtggcctccagccccatcagctgagctcctgcgatggagagcttgctgtggccccactgccagaaggcgatctccccggccaatttacacgagtaatgggtaaggtatgtacgcagctgctagtgtcccggccggacgaggagaacatctcatcctacctccagttaatagataagtgccttatccatgaagctttcaccgaaacacagaagaagcgcctccttagttggaaacagcaggtacaaaagttatttcgttcctttcctagaaagacacttctggatatcagtggatacaggcagcagaggaatcggggtttcggccaatcaaattccttacctactgctggaagtgtggggggaggaatgggcaggcggaacccacggcaataccagattcctagcaggaatgtgccgtcggctaggctgggactgctggggactagcgggttcgtgtctagcaaccaaagaaatacaacggctacccctacaattatgaagcagggcagacagaacctatggtttgctaaccctggcggaagtaacagcatgccctccaggacccattcgagtgtgcagcgcactcggagcctccccgtgcacactagcccccaaaatatgctgatgttccagcagccggaattccagctccccgtgacagagccagacattaataatcgcctggagagcctctgtttgagcatgactgagcatgcattgggggacggagtcgatagaacgtcaacgatatag

SEQ ID NO: 207172 - DNA, 1038 bp, synthetic construct
  misc_feature 1..1038: note = Description of Artificial Sequence: Synthetic coding sequence
  source 1..1038: mol_type = other DNA
atgatcctgacccccatcaaggcctacagcagccccagcaccacccccgaggccagacggcgggagcctcaagccccccgccagccatcactgatgggccccgagtcccagagtcctgattgcaaggatggtgcggcagccacaggcgcgaccgcaaccccgtcagctggagcttctggtggtctgcagccccaccagctgtccagctgtgatggggagttagcagtggcccctctgccagaaggcgatctgcctggtcaatttaccagagtgatgggaaaagtgtgtacccagctgcttgttagtagacctgacgaggagaacatctcaagctatctccagctcatagataaatgcctcatccatgaagctttcaccgaaactcagaagaaacggctgctgagttggaaacagcaagtacaaaagctcttcagatctttcccacggaagacactcctggatatcagcggatatcgtcagcagcgcaatcggggattcgggcagtctaactctctgcccaccgccggctctgtagggggcggtatgggcagaagaaacccccgtcagtatcagattccgtctcgcaatgtcccaagtgcacgtctggggttgttgggcacctccgggtttgtctcgagcaaccagcggaacaccaccgctacccctacaatcatgaagcagggccggcagaatctgtggttcgctaaccccggcggttctaactcaatgccctcaaggacccactctagcgtgcaacgcactcggtctctgcctgtccatacaagcccccagaacatgctgatgttccagcaacccggatcacaggtgcactctggactgtgtctgaccgatctccgcggctggctcagcctgtcaggtgcccccagcatgcctgccttgacagtgccgaagagttcacaaggggagtttcaactgccagtaaccgaacccgatattaataaccgcttagagagcctgtgcttaagtatgacagaacatgctctgggagacggggtggataggactagtaccatatag

SEQ ID NO: 207173 - DNA, 981 bp, synthetic construct
  misc_feature 1..981: note = Description of Artificial Sequence: Synthetic coding sequence
  source 1..981: mol_type = other DNA
atggccggccccaaccagctgtgcatccggcggtggaccaccaagcacgtcgccgtttggctcaaggatgaaggcttcttcgaatacgttgatatcctgtgcaataaacatagactagacggcatcacattgttaacactgaccgaatacgacttgcgttccccacccctggaaattaaagtcctgggtgacattaaacggctcatgctgtctgtcaggaagctacagaaaattcatattgacgtattggaggagatgggttataactctgattcacctatggggagtatgacaccttttatatccgcgctgcagtctaccgattggctgtgcaatggtgagctgtcccacgactgcgatggacccatcacagatctgaatagtgaccaataccagtacatgaatgggaagaataaacactctgtgagaaggttggaccccgagtactggaagaccatccttagttgcatctatgtatttatcgtctttggttttacctcatttattatggtcatcgtccatgagcgcgtgccagatatgcagacctatcccccattgcctgacatctttctggactctgtcccacggattccttgggcctttgcaatgacagaagtttgcgggatgattctctgctatatctggctgttggtgctcctgctgcacaagcatcgttcaatccttctaagacggttatgctcccttatgggtaccgtgttcctgctgcgctgttttaccatgttcgtaacctcactctctgtgcctgggcagcatctccagtgtaccggaaagatctatgggtcagtgtgggagaagctgcacagggctttcgctatttggtccggctttggcatgaccctgacaggtgtgcacacatgtggcgattatatgttttctgggcacacggtcgtcctgacaatgctaaacttcttcgtgaccgagtgcaaataccttttcagcgcatccatgcggatacggtag

SEQ ID NO: 207174 - DNA, 1437 bp, synthetic construct
  misc_feature 1..1437: note = Description of Artificial Sequence: Synthetic coding sequence
  source 1..1437: mol_type = other DNA
atgcccgcccggagccggcaccggccccggctgcacagcggcagccccccccgagcgcctccaccccccctagaggccctgcattcgggcgaagcaggccgggccccagattcagatgggggaagcgacgctgacagcgaggtgggtcctggcagccccactcggaccgcagaggctgccgaggaggagatggcaggtccgaatcagctgtgtatcaggaggtggactaccaagcatgtagctgtgtggcttaaggatgaaggcttcttcgagtatgtggacattctctgtaacaaacacaggcttgacggcatcacactgctgacactgactgaatatgatctgaggagcccacccttagaaattaaggtgctgggcgacattaagagattaatgctcagtgtgcggaaactccaaaaaatccatatcgacgtgctggaggagatggggtacaactcagactccccaatggggagtatgacgccctttatttcggctttacaaagtacagactggctctgcaacggcgagctctcacatgactgtgacggtcccatcacagatcttaattctgaccagtatcagtacatgaacggcaagaacaagcattcagttcgtcggctggacccagagtactggaaaaccatcctctcctgcatctatgtcttcattgtgttcggttttacctccttcattatggtcatcgtccacgagcgagttcctgatatgcagacctacccaccactgcctgacatattcttggattcagtcccacgaatcccatgggcgtttgctatgacagaggtttgtggcatgattctgtgttacatttggctactggttctgctactacacaaacacagatcaatcttgcttcgtcgtctgtgcagtctaatgggtactgtgtttcttcttaggtgcttcacaatgttcgtgacctcactgtccgtcccgggtcagcacctgcaatgtaccggaaaaatttacggatccgtgtgggagaagctgcatcgggcttttgcgatttggtccggatttggtatgacactgacgggagtgcatacatgtggcgattacatgtttagcgggcataccgttgtgttaacaatgctaaacttctttgttaccgagtatactccccgatcatggaacttcttgcacaccttgagctgggttcttaacctgttcggtatcttttttattctggcagcccatgagcattactcgattgatgtattcattgcattctacattacaactcgcctcttcctctactaccatacactggcaaatacgcgggcctaccagcagagcagacgggcgcgcatttggttcccaatgttcagcttttttgaatgcaatgttaatggtactgttccgaacgagtattgttggccttttagcaagccagcaattatgaaaagactgattggatag

SEQ ID NO: 207175 - DNA, 765 bp, synthetic construct
  misc_feature 1..765: note = Description of Artificial Sequence: Synthetic coding sequence
  source 1..765: mol_type = other DNA
atggccggccccaaccagctgtgcatccggcggtggaccaccaagcatgtggcagtgtggctgaaggatgaggggttctttgagtacgtggacattctatgcaacaagcatcggctggacggaatcaccttactgacactcaccgaatacgacttgaggagtccacctctggagataaaggtcctaggcgatataaaaaggcttatgttgagcgtgaggaaactgcaaaagatacacattgacgtccttgaagaaatgggttataactccgacagtccaatgggctccatgactcccttcatttccgctctccaatcgactgattggctctgtaacggtgagctatctcatgactgcgacgggcctataacggatctgaatagcgatcagtatcaatatatgaacggcaagaataaacactctgtgaggaggctcgatcccgaatactggaagactattttgagttgcatttacgtatttatcgtcttcggatttacaagcttcattatggtgatcgttcacgaaagggttcccgacatgcagacctaccctcccttgcccgacatctttctcgatagcgtgcctcgaatcccctgggcattcgccatgacagaagtatgtggcatgattttgtgttacatatggctgttggtgctcttactgcataagcaccggagcattctgctgcgtcgcctctgtagtttaatgggaacagtgttcttgcttcggtgcttcacaatgtttgtcacatccctgtccgtctag

SEQ ID NO: 207176 - DNA, 1248 bp, synthetic construct
  misc_feature 1..1248: note = Description of Artificial Sequence: Synthetic coding sequence
  source 1..1248: mol_type = other DNA
atggccggccccaaccagctgtgcatccggcggtggaccaccaagcacgtggccgtctggctgaaagatgaagggttctttgaatatgtcgatatactgtgcaacaaacaccggctggatggcattacattactgacccttactgagtatgacctgcgttctccaccgctggagataaaggttctaggcgacatcaagcgcctcatgcttagcgtccggaagctgcaaaagattcacatcgacgtacttgaggaaatggggtataactccgatagtcccatgggatctatgactccctttatcagcgctctccagagcaccgattggttatgcaatggggagctgagccatgattgcgatggtccaatcactgatctgaattcagatcagtatcagtacatgaatggcaaaaacaaacatagtgtaagacgccttgaccctgagtattggaaaacgatccttagttgcatctatgtgtttatcgtgtttggcttcacctcctttattatggtgatagttcacgaacgggtcccagacatgcagacttacccacctctgcctgacatcttcctggacagtgtacccaggatcccttgggcctttgcaatgactgaggtttgtggaatgatcctgtgctacatttggctactggtactcctgcttcacaaacacaggtcgatactcctaagacggctgtgtagtctgatgggaactgtgttcctgcttaggtgttttaccatgtttgtcaccagtctgagcgtgcctggccagcatctgcaatgcacaggaaagatctacggcagtgtgtgggagaagctgcatcgcgcctttgcaatatggtctggattcggcatgacactgaccggcgttcacacgtgtggagattacatgttcagtgggcacacagttgtgctgactatgttgaacttctttgtgaccgagtatacccccaggagctggaactttctgcacaccctgtcttgggttctaaatctgttcggcattttctttatactcgctgcacacgaacactacagcattgacgtattcattgccttctacatcacaaccaggctctttctctattatcataccctggccaacactagggcgtatcagcagagccggcgggcaagaatatggtttcccatgtttagtttcttcgaatgcaacgtcaacggtacagttccaaatgagtactgctggcccttctccaagccagctatcatgaagcgtctcatagggtag

SEQ ID NO: 207177 - DNA, 4770 bp, synthetic construct
  misc_feature 1..4770: note = Description of Artificial Sequence: Synthetic coding sequence
  source 1..4770: mol_type = other DNA
atggccaagcagctgaacctgcccgagaacaccgacgactggaccaaggaagacgttaaccagtggcttgaatcacacaagatagaccagaagcaccgggaaattctgaccgagcaggacgttaatggagcggtgttaaaatggctcaagaaggaacacctggtggacatggggatcacacacggaccagccattcaaattgaagaattatttaaggagctgcggaagacggctattgaggatagcatccaaaccagcaaaatgggcaagccttccaagaacgcacctaaagaccagactgtgagccaaaaggaaaggagagaaacttcaaaacagaagcagaaaggcaaagaaaaccccgatatggcaaaccccagcgctatgtctacaacggctaaagggagcaaatcattgaaggtagaacttatcgaagataagatagactatacaaaagagcgtcagcccagcatcgacttaacctgtgttagttatcccttcgatgagttctctaacccttatcgttacaaattagatttctcactccagccagagacgggccctggcaacctcattgaccccatccatgagttcaaagcattcaccaataccgcaaccgccacagaagaggacgtcaagatgaagttctcaaatgaggtcttccggttcgcctcggcatgtatgaattctaggaccaacggtacaattcatttcggagtgaaggacaaacctcatggaaagatcgtgggtattaaggtgaccaatgatacaaaagaggccctcattaaccattttaaccttatgattaacaagtatttcgaagaccatcaggtacagcaagcaaagaagtgtatcagggagcctcgatttgtggaagtccttctccccaatagcactctgtccgacaggttcgtcatcgaagtagacatcattccccagttcagcgaatgtcagtatgattactttcagataaaaatgcagaactacaacaataagatctgggagcagtctaagaagttttcactattcgtacgagacgggacctccagtaaggatatcaccaagaacaaggttgattttcgggcgttcaaggccgatttcaaaactctagccgaatctcggaaagccgctgaagagaagtttcgcgccaagactaataagaaggaaagggaaggcccgaagctggtgaagctgttaacaggcaatcaggacttactcgataatagctattatgaacagtacattctggtcaccaacaaatgtcaccctgaccagaccaaacatctggacttcctcaaggaaataaagtggttcgcagtactggaattcgacccagagagcaacatcaacggggtcgtgaaagcttataaggagtcccgggtggctaacctccacttcccttctgtgtacgtagagcaaaaaaccacccccaatgagaccatttctacactgaacctgtatcatcagccaagttggattttttgtaacggccgtctcgatctggactcagagaagtataagccgttcgatccctcttcatggcagagagaacgcgccagtgacgtgaggaagcttatcagctttcttacccacgaagacatcatgccccggggtaaattcctggtcgtgtttctgctcctgagttctgtagacgacccgagagaccccctgatcgaaacattctgtgcgttctaccaagatttaaaggggatggagaatatcctgtgcatctgtgtgcatccccacatttttcaggggtggaaagacctgctggaggcacgcctgataaaacaccaggacgaaattagtagtcagtgtatcagcgcccttagcttggaagagattaacggaaccattctcaagctaaagtcagtcactcagtcgagtaagaggctactcccttcaattggactgtcaacagtgctgctgaagaaagaggaggacattatgacagcgctcgagataatttgcgagaacgagtgtgaggggacgctgctagaaaaagacaagaacaagtttctggaatttaaggcttccaaggaggaagacttttacagagggggtaaggtgtcttggtggaatttctatttcagttctgagagttattctagcccttttgtgaagagggataagtatgaaaggctcgaagcgatgatacaaaactgtgccgactccagcaaaccaacgtcaacaaagattatccatttataccaccatccgggctgtggtggcacaaccctggccatgcatattctgtgggaactccgcaagaaatttaggtgcgcggtcttgaaaaacaaaactgtagatttttccgagataggggagcaggtcacaagtctcatcacatacggcgccatgaaccggcaagaatacgtgcctgtgctcctactagtggacgactttgaggagcaagacaacgtctatttgctgcaatatagcattcaaaccgcaatcgccaagaaatacatccgttacgaaaagcccctggtcatcatactgaattgcatgcgctctcagaaccctgaaaagagtgccagaatccccgacagcatcgcagtgattcagcagctgtcacccaaggaacaacgggcattcgagctgaaactgaaggagattaaggagcagcacaaaaactttgaagacttttacagctttatgatcatgaagacaaacttcaataaggagtacatcgaaaacgtagttaggaatatcctgaaaggacagaacatctttaccaaagaagctaagctcttctcctttcttgccctactgaatagctacgtacctgatacaaccatttcactgtcccagtgcgagaaatttcttgggatcggaaacaaaaaagctttctggggaaccgaaaaatttgaagataagatgggtacctactccacaattctcatcaaaactgaggttatcgaatgcggcaattactgcggagttcggatcattcacagtctcatcgctgaattctcccttgaggaactgaagaaaagctaccacctgaataagagccagatcatgctggatatgctgacagagaatttgttctttgacaccggtatgggcaagagcaaatttttacaggacatgcacactctgctgctcacacgacaccgggacgaacacgaaggagagaccggaaattggttcagtccattcatagaagcccttcacaaagatgaaggtaatgaagctgtcgaagcggtgctgttggagagcattcaccgcttcaacccgaacgcgtttatctgccaagctttggccagacatttttatattaagaaaaaggacttcggtaacgccctgaactgggccaagcaagctaaaatcatcgaacccgacaacagctatatatccgatacactggggcaggtgtataaatccaagatcagatggtggattgaagagaacgggggcaacggaaacatctcggtggacgaccttattgccctcctggatttagctgagcacgctagctctgcctttaaggagagccagcagcagtcagaagatcgggagtatgaggtgaaagagaggctgtaccccaagtccaagagacgctatgacacctacaatatcgcagggtaccaaggggaaatcgaggtggggctgtataccattcagatcctgcagcttatcccattttttgacaataagaacgagttgagcaagcgctatatggtgaacttcgtctcaggatcctcggatattccaggcgacccgaacaacgaatacaagctggcattgaaaaactacataccctaccttactaagctgaagttcagcttgaaaaaatctttcgacttcttcgatgagtactttgtgttgctgaagcccaggaacaatattaaacagaacgaggaggccaaaactagaagaaaggtcgctggatactttaagaagtatgtggacatcttctgtctcctcgaagagtcccagaacaacacggggctgggatccaaattctcagagcctctccaagtcgaacgatgtagaaggaatctagtcgctttgaaagccgacaagtttagtggcttgctggagtacctgattaagtcacaagaggacgctatctccaccatgaaatgtatcgtaaatgagtacactttcctgttggaacagtgtacagtgaagatccagtcaaaagagaagctaaatttcatcctggccaacattatcctctcttgtatccagcctacatcgcggctagttaagccagtggaaaagcttaaggatcagcttagggaagtcctacagcctattgggttaacttaccagttctccgagccctatttcctggcgtctctcttgttttggcccgagaaccagcagctcgaccaacacagcgaacagatgaaggagtatgcacaagcccttaagaattcgtttaagggccaatacaaacacatgcaccgtaccaaacaacccatcgcgtactttttcctggggaagggtaaacggctcgagaggttggtgcacaaaggtaaaatcgaccagtgttttaaaaagacgcctgatatcaacagcttgtggcagtcaggcgacgtatggaaggaagaaaaagttcaggaactgctgcttagactgcaagggagggccgaaaataactgcttatacatcgaatacggcatcaacgagaaaatcactatcccgataacacccgcgttccttgggcagttgagatctggacggtcaatagaaaaagtctccttttatcttggctttagcattggaggccctttagcctatgatatcgagatcgtgtag

SEQ ID NO: 207178 - DNA, 3852 bp, synthetic construct
  misc_feature 1..3852: note = Description of Artificial Sequence: Synthetic coding sequence
  source 1..3852: mol_type = other DNA
atggccaagcagctgaacctgcccgagaacaccgacgactggaccaaagaagacgttaatcagtggcttgagtcgcacaaaatcgatcagaaacaccgggaaatccttacggaacaggacgtgaatggggccgtgctgaaatggcttaaaaaggagcacctggtggatatgggcattacgcacgggcctgctatacagattgaagaacttttcaaggagctgagaaaaactgctattgaggacagtattcaaaccagtaaaatgggcaagcccagcaaaaacgccccaaaagaccagaccgtctcacagaaggaaaggagagaaacctctaagcaaaaacaaaaaggaaaagaaaaccccgatatggccaaccccagtgctatgagtacaaccgccaaggggagcaagagtctgaaggtagaattgatcgaggacaagatagattataccaaggaaaggcagccctctattgacttgacatgcgtgagctacccattcgatgagttcagcaacccttaccggtacaagttggacttcagcttgcagcctgagaccgggccaggcaacttgatagaccctatccatgaattcaaggcatttacaaacactgcaactgcaacagaggaggatgtcaaaatgaaattctctaacgaagtgttcaggtttgcgagcgcatgtatgaactcccgcacaaacggcacgattcacttcggcgtgaaggacaagcctcatgggaaaattgtgggaattaaagtgaccaacgatactaaggaggccctcataaatcattttaacctcatgattaataagtactttgaggaccaccaggttcaacaagccaaaaagtgtatacgtgagccccgattcgtagaagtcctcttgccaaactcaaccctgagcgaccgtttcgtgattgaggtggatattatcccgcagttttcggagtgccagtacgattattttcaaatcaagatgcaaaattacaacaataagatctgggagcaatctaagaagttttccctgttcgtccgggatggaacaagctcgaaggacattactaaaaataaagtggacttccgggcattcaaagcagatttcaagactttggcggagtcacgcaaagccgctgaggaaaagttccgcgcaaagaccaataagaaggaaagggagggccccaaactggtcaagcttctcaccggtaaccaggaccttctggataatagttattatgagcagtacatccttgtgaccaataagtgtcaccctgaccagaccaagcacttggatttcttgaaagaaattaagtggtttgccgtgctcgaatttgaccctgagtctaacattaatggagtagtcaaagcttacaaagagtcacgtgttgcaaatcttcacttccccagtgtctatgtggagcagaaaacaactccaaatgagactattagtacattgaatttgtaccaccagccatcttggatcttttgtaatggcagactggatttggattctgaaaaatacaaaccgtttgatccttcctcctggcagagagagagggccagcgacgttcgaaagctaatatcatttttgacccacgaggacatcatgcctagagggaagttcctcgtggtctttctgcttctgtccagcgtggatgacccaagggaccctctgatagaaaccttctgtgcattttaccaggatttgaagggcatggaaaatattctatgtatctgtgttcatccccacatcttccaaggctggaaagacctgctcgaagcccggttaatcaagcatcaggacgagataagctcccaatgtatctctgcccttagtttagaggagattaacggcacaattcttaagcttaagtccgtgactcagagctcaaagagattgcttcctagtattggccttagcaccgtcctgctgaagaaggaagaggacataatgacggccctggaaattatttgcgaaaatgaatgtgaaggaaccctgctcgagaaggacaaaaacaagttcctggagttcaaagctagtaaggaggaagacttctaccgaggaggcaaagtgtcttggtggaacttctatttctcctctgaatcatactcctctccctttgttaaacgcgataaatatgaacggcttgaagcaatgatccaaaactgcgcagattcttctaaaccgacctccacaaagattatccacctttatcaccaccccggatgcggtggcaccaccctcgcaatgcacatcctgtgggaattaaggaagaagtttagatgcgccgttttgaaaaataagaccgtggacttcagtgaaatcggggagcaggtcacctccctgatcacatatggagcaatgaacaggcaggagtatgttcccgtattgctgctggtggacgactttgaggagcaggacaatgtatatctcctccaatacagtattcaaactgccatcgccaagaaatatattagatatgagaagccgctggtcatcattcttaattgtatgcgctctcagaaccccgagaagtccgctaggatccctgactcaattgccgtcatccagcagctatccccgaaagagcaaagagcattcgagctgaagctcaaagagattaaggagcagcacaagaatttcgaggatttttactccttcatgatcatgaagactaattttaacaaagagtacatagaaaatgtggtgaggaacatccttaaaggtcagaatattttcaccaaggaggccaagctttttagcttcctggctctgctgaactcctacgtccccgacacaacgatctctttgagtcagtgcgagaagttcctgggaataggaaacaagaaagctttctgggggactgaaaagtttgaggataagatggggacatacagtacaattctgattaagacagaggttatagaatgtgggaactactgtggcgtgcgaattatacacagcctcatcgcggaattttccctggaggaactgaaaaagagctaccacttgaataagtctcaaatcatgctcgatatgctcacggaaaacctcttctttgatactggcatgggcaagtccaaatttctgcaggatatgcacacactgttactcactcggcaccgagacgagcacgagggggagacggggaattggttctccccgtttattgaagccttgcataaggacgaagggaatgaagccgtggaagcggtccttctggagagcatccaccggttcaacccaaacgcctttatatgccaagcactggccagacatttctacatcaagaagaaggactttggtaacgctctgaattgggccaaacaggccaaaatcatcgaacccgataacagctacatatccgacactttgggccaggtgtataaatccaagatccgatggtggatcgaggagaatggaggcaacggcaacatttctgtggatgacctgatcgctttgctggacctggcagaacatgccagctccgccttcaaggagagccaacaacagagtgaagaccgggagtatgaagtcaaggaacgcctctaccccaaaagtaagcggcgttacgatacctataacattgcaggctatcagggcgaaatcgaggtcggtctgtatacaattcagatcctgcagctgatacctttcttcgacaataagaatgagctgagcaaaagatacatggtgaacttcgtcagcggctcatctgatatccccggggatcccaacaatgaatataaactggctctaaaaaattacatcccctatctgactaaattaaagtttagtctgaaaaagtcctttgacttttttgacgagtacttcgtactgttaaagccgaggaacaactag

SEQ ID NO: 207179 - DNA, 4755 bp, synthetic construct
  misc_feature 1..4755: note = Description of Artificial Sequence: Synthetic coding sequence
  source 1..4755: mol_type = other DNA
atgagcaagcaggtgagcctgcccgagatgatcaaggactggaccaaggagcacgtgaagaaatgggtcaatgaggatctcaagatcaacgagcagtacgggcaaatacttctttccgaggaagtgacgggcctggtgctgcaggagctaacagagaaggaccttgtggaaatgggcctgccgtggggccctgccctgctaattaagcggtcatacaacaagctgaactcaaaatctcccgaatcagacaatcacgatcccgggcaattggacaacagcaaacccagcaaaacagaacaccagaagaatccaaaacacaccaagaaagaggaggaaaatagcatgtcaagtaacattgattacgacccaagagagatacgggatattaagcaagaagagagtatcctgatgaaggaaaacgtcctggatgaggtagctaacgctaaacacaaaaaaaaaggcaagctgaaaccggagcagttaacttgtatgccgtatccattcgatcaattccatgactcacatagatacatcgaacattacaccctgcagccagagaccggggcattgaatctcatagatccaatccacgagttcaaagccctcactaataccgagaccgcaacagaagtggacattaagatgaaattcagtaatgaggtgtttaggtttgcaagcgcatgcatgaactctagaacaaatggcacaattcatttcggcgttaaggacaagccccacggggagattgtcggtgtgaagatcacatccaaagctgcgtttatcgaccattttaacgtgatgatcaaaaaatatttcgaagagtccgagatcaatgaggccaagaagtgcataagggagcctcgctttgttgaggtgctcctacaaaataacacacctagcgacagattcgtcattgaggtggatactatacccaagcacagtatttgcaacgacaagtatttctacattcagatgcagatttgtaaagataagatctggaagcagaatcaaaacctctcattgttcgtccgggaaggcgcctccagtcgggacatcttggccaacagtaaacagagggacgtagatttcaaagcctttttacagaaccttaagagtctagtggccagccgaaaggaggcggaggaggaatacggaatgaaagccatgaagaaagagtccgaaggacttaagttggtgaagctcttaatcggtaatcgggacagcttggacaatagctattacgactggtatatcctcgtgaccaacaaatgtcaccccaaccagatcaagcatctggattttctgaaggaaataaagtggttcgccgtgttagagtttgatcctgaatcgatgattaatggtgtcgtgaaggcctataaggagagtagggtcgccaatttgcattttcccaatcagtacgaggataagacgaccaacatgtgggagaaaatttctaccctgaacctctaccagcaaccttcttggattttttgcaacgggcggtcagatctgaagtcagaaacctataagccactggagcctcacttatggcaaagagagagagcatctgaggtccggaaactcattctctttctcactgatgaaaacatcatgactaggggaaagttcctggtggtgttcctgttgctgtctagtgtggagagtccaggtgacccactcattgagactttttgggctttttaccaggcacttaaaggcatggagaacatgctgtgcataagtgtgaacagtcatatctaccagcggtggaaggatctgctacagacgagaatgaagatggaggatgagttaacaaaccacagtatatctaccctaaatatagagcttgtgaactccacgatactgaagctcaaaagtgttaccaggagttctagacgctttcttcctgcacgtggaagctcatcagtgatccttgaaaaaaaaaaagaggacgtgttgactgctctggaaatcttgtgcgagaacgaatgtacagaaacggatatagaaaaggacaagagtaaattcctggagttcaaaaagtccaaggaagagcatttttacaggggtggtaaggtctcctggtggaatttctactttagttccgaaaactacagttctgacttcgttaaacgggattcgtacgagaagcttaaggacctcatccactgttgggctgaaagtccgaaaccaattttcgccaaaatcatcaatttgtaccatcaccctgggtgcggcggcacaacccttgctatgcacgtgctctgggatttgaagaaaaacttcagatgtgcagtattgaagaacaaaacaaccgactttgcggaaatcgccgagcaggttataaacctggtaacctatcgggccaagagtcatcaggattatattccagttttgctgctagtggatgactttgaggaacaagaaaacgtgtattttctccagaacgctatccatagcgtgttggctgagaaggatcttagatacgagaagaccttggtgattatcctcaactgtatgcggtctaggaaccctgatgagagtgctaagctggcagactccattgcactgaactatcaacttagctccaaggagcagcgggcatttggtgctaaactgaaagaaatcgaaaagcagcataaaaactgtgaaaatttttactcatttatgattatgaaatccaacttcgacgagacatacatcgagaacgtggtccgaaacattctgaaaggccaagatgttgactcaaaagaggcccagttaatcagttttctagctttactctcttcttacgttacagatagtactatctctgtgtcccaatgtgagatttttttgggaataatctacacaagcaccccttgggaaccagaatcactcgaagataaaatggggacttactcaacactgctcattaagactgaagtcgccgagtacgggaggtacaccggggttcgcattatccaccctttgattgccttgtattgcctgaaagagctcgagcgttcgtaccacctggataaatgccagattgctcttaacattctggaggaaaatttgttttacgacagtgggatcgggcgcgacaagttccagcacgatgtgcagacattgctgctgactaggcaacgcaaagtgtacggagatgagacagacacgcttttctcacctctcatggaagcactccagaacaaagatatagagaaggtattatccgctgggtcccggagatttccacagaacgcttttatctgccaagctctggctcggcatttctacatcaaggagaaggactttaataccgctctcgactgggcaaggcaggcaaaaatgaaagcacctaaaaatagctacatttctgacacattgggtcaagtctacaaatccgaaatcaagtggtggcttgacggtaacaaaaactgcagatctattaccgttaacgaccttacccaccttctggaagctgctgagaaagccagtagggccttcaaagaatctcagagacagactgatagcaagaactatgagacggaaaactggtctccgcaaaaaagccaaagacgctatgatatgtacaatacagcttgttttttgggcgagattgaggtaggcctgtataccatccagattctccagctgacgccgttctttcacaaggagaatgagctgtccaaaaagcatatggtccagttcctgtcagggaagtggactatacccccagaccctcgcaacgaatgttatttggcattgagcaaatttacatcccacctaaaaaacctccagtcagatctgaaaaggtgctttgacttcttcatcgactacatggtgcttctgaaaatgagatacactcagaaagaaatcgcagagattatgctttctaaaaaggtgtcccgatgttttcgcaaatacacagagctgttttgccatttggatccctgcctgcttcagagcaaggagtcccagctgctccaggaggagaactgccggaagaagctcgaagcattgcgagctgacagattcgctgggttgcttgaatatttgaatcctaactataaggacgctacaaccatggagtccatcgtcaatgagtacgcttttctgctccagcaaaactcaaaaaaacctatgacaaacgagaagcaaaacagtatccttgccaatatcatcctgtcgtgcttaaaacccaactctaagctcatacaacctttgacaacattaaaaaagcagctgcgggaagtactccagtttgtcggcttatcccaccagtatcccgggccttacttcttggcttgtcttctcttctggcctgagaatcaggagctggatcaggacagtaagcttattgagaaatacgtgtccagcctcaatcggagcttcaggggacagtacaagcgtatgtgccggtccaagcaggcatcaaccctgttttacctcgggaaacggaaggggctgaactcgatcgtgcacaaagcaaagattgagcagtactttgataaggcccagaataccaatagcctgtggcactctggtgacgtctggaaaaagaacgaagtcaaagacctgctgcggaggctcactggtcaggctgagggcaagctgatttctgtagagtacggcaccgaagaaaagatcaagattccagtgatttcagtgtattcaggcccccttcggtctggacgcaatatcgaacgcgtgtccttttatctgggcttttcaatcgaggggccccttgcatatgatatcgaggtaatatag

SEQ ID NO: 207180 - DNA, 1221 bp, synthetic construct
  misc_feature 1..1221: note = Description of Artificial Sequence: Synthetic coding sequence
  source 1..1221: mol_type = other DNA
atgagcaagcaggtgagcctgcccgagatgatcaaggactggaccaaggagcacgttaagaagtgggtgaacgaggacctgaagatcaatgaacagtatggtcaaatcctactgtcggaggaggttacaggcctggtccttcaggaattgactgagaaggatctcgtcgagatgggattgccatggggacccgctctacttattaagcggtcttacaacaagctgaattcgaaaagccccgagtctgacaaccatgaccccggacagctggacaattccaagcccagcaaaactgagcaccagaagaacccaaaacacaccaaaaaggaagaagagaattccatgtcctctaacatcgattatgacccaagggagatacgagatattaaacaggaagagtcaatcttgatgaaagagaacgttctggatgaagtggccaacgctaagcataagaagaagctggaggcgctcagggctgaccggttcgctggccttctggagtaccttaatcctaactataaagatgccacgacaatggagagcatcgttaacgagtacgcttttctgctccagcagaactctaaaaaacctatgactaacgagaaacagaattccatcctggccaatatcatcctctcttgcctgaaaccaaactccaagttaatccagcccttgactacgctcaagaaacagttgcgcgaggtgttgcagttcgtagggcttagccatcagtatcccggaccttatttcctggcttgtcttctgttctggcccgagaatcaggaactggaccaggacagcaaactgattgagaaatatgtgagttctttgaacaggagcttccgggggcagtacaaacggatgtgtagatcaaagcaagcctcgactctgttttatctcggtaaacgcaagggtttgaattcaattgtgcacaaggctaagattgagcaatactttgacaaggcccaaaatacaaacagcctttggcacagtggcgacgtgtggaagaaaaatgaagtgaaagatctcctgcgacggctcactggacaggccgagggcaagctgatcagcgtggaatacggcaccgaggagaaaatcaaaatacctgtgatttcagtctattccgggcccctgagatctgggcggaatatagagagagtgagcttttacctgggatttagcatcgaaggaccgttggcatatgatatcgaggtaatttag

SEQ ID NO: 207181 - DNA, 4755 bp, synthetic construct
  misc_feature 1..4755: note = Description of Artificial Sequence: Synthetic coding sequence
  source 1..4755: mol_type = other DNA
atgagcaagcaggtgagcctgcccgagatgatcaaggactggaccaaagagcacgtcaagaagtgggtcaatgaggaccttaagattaacgagcagtatggccaaatcctcctgagcgaggaggttacaggcctcgttttgcaggaactgaccgagaaagatttagtcgaaatgggactcccatggggaccagctcttctaatcaaacgtagctataataaactcaattctaaaagccctgaatcggataaccacgatccggggcagctcgacaacagcaagccctctaagactgaacatcaaaagaatccgaaacacactaaaaaggaggaggagaacagcatgagctccaatattgattacgatcccagagaaatacgtgacattaagcaagaggaatcaattctgatgaaggagaatgttctcgatgaagtcgcaaacgcaaagcataagaagaagggaaagcttaagccagaacaacttacctgcatgccatacccatttgaccagtttcacgactctcaccggtatatagagcactacacattacagccagagacaggcgctcttaacctcatagaccctattcacgagttcaaggccctgacaaatactgagaccgctacagaagtggatattaagatgaaattcagcaatgaggtgttccgatttgcatcagcatgtatgaattctcggaccaacggcacaattcacttcggggtgaaagacaagccacatggggagatcgtgggggttaagatcacaagcaaggccgcctttatcgatcactttaatgttatgattaaaaagtactttgaggagtcggaaataaacgaagcaaagaaatgtattagagaacctcgctttgtggaggtattgctgcagaataacactccatctgatcggttcgtgatagaggtggacaccattcctaagcattctatttgcaatgacaagtatttctacatccagatgcaaatatgcaaagataagatttggaagcaaaatcagaatctctcgctgttcgtgagggaaggagctagtagtagggacattcttgccaattctaagcaacgggatgttgactttaaggcattccttcagaacctgaaaagcctggtggcatctcgcaaggaggcagaagaggagtacggcatgaaagccatgaagaaagagagcgaagggcttaagctcgtgaagctcctgattggaaaccgggatagtctggacaactcatattatgattggtacattttggtgaccaacaagtgccaccccaatcagattaaacacttggatttcttgaaagaaattaaatggtttgccgtgttggaatttgatcccgagtctatgataaatggtgttgtgaaggcttacaaggagagtcgtgttgccaacctgcacttccctaaccagtatgaggataaaacaactaacatgtgggaaaaaatttccactcttaatctttatcagcagccttcatggatattctgcaatggacggtctgatctcaaatccgagacctataaacccctggagccacacttgtggcaacgcgaacgagcatctgaggttcggaaactgatcttattcctcacagatgaaaacatcatgacacgggggaagttcttagtagttttccttctgctgagctccgttgagtctcctggcgatccgctgatcgagaccttttgggcgttctatcaggctctcaaggggatggagaatatgctgtgcatctctgtgaacagtcacatctaccagcgatggaaagatcttttacagaccagaatgaagatggaggacgaactaaccaaccactcaatctccactctgaacatcgagctcgtaaactctaccatcctcaagctcaagtcagtcacacgcagttcaagaagattcctgcccgctcgcgggagtagttccgtgattctggagaaaaagaaggaagacgtactgacggcgctggagattctgtgtgaaaacgaatgtactgagaccgacattgagaaggacaagagtaaatttctcgaattcaaaaagagtaaagaggaacatttttacagggggggaaaggtgtcctggtggaacttttatttttccagtgaaaattattcttctgacttcgttaaacgtgattcctatgagaagctaaaagacctgatccactgctgggccgagtccccaaagcccatttttgctaaaataattaacctgtatcaccatccgggctgcggcggtacgacccttgctatgcacgtcctgtgggatctaaaaaagaattttaggtgcgcggtcttgaagaacaagaccactgattttgccgagattgcagagcaggttataaatctggtaacataccgagccaagtctcatcaagactacatccccgtgcttctgttggttgacgactttgaggaacaggaaaatgtgtatttcctgcagaatgcaattcactcagtacttgctgagaaggacctccgctatgagaaaactttggtaatcatattgaactgcatgcgctcgcgcaaccctgacgagtcggcaaagctggcagattcaatcgcactgaactaccagcttagctctaaggaacagagagccttcggcgccaaactgaaggagatcgagaaacagcacaagaactgcgagaacttctactcattcatgatcatgaaatcaaactttgacgaaacatatatcgagaacgttgtaaggaacattctaaaaggccaagatgtggacagtaaagaagcccaactcatatcatttctcgccttgctgagcagttacgtgaccgattccacgataagtgtgagtcagtgtgagatctttttgggcatcatctacactagcacaccctgggaacctgaatcccttgaagataagatggggacctattcgacactgttgatcaagaccgaagtggcagaatacgggcgttacactggcgttagaattatccatcctctgattgcgctgtattgcctgaaggagttggaacggagttaccacctggataagtgccagattgctctcaacatcctggaggagaacctattttacgactctggcatcgggcgtgataagtttcaacacgatgtgcaaaccctcctgctgactcgtcaaaggaaagtttacggcgacgagacagacactctgtttagtcctctgatggaagccctgcagaataaagatatagaaaaagtgctcagcgctggcagtcgacggtttccccagaatgccttcatctgccaggccctggcgaggcacttttacatcaaagagaaagacttcaacaccgcactggattgggcccgccaagcaaagatgaaggcaccaaaaaattcttatatcagtgacacactggggcaggtatacaagtccgaaataaaatggtggctagatggcaataagaattgtcgcagcattactgtgaacgacctgactcatctgttggaggcagccgaaaaggcgtcacgggccttcaaagagagccagcggcaaacggatagtaagaattacgagactgagaactggagcccccaaaaatcccaaaggcgctacgatatgtataacaccgcttgtttcctgggagagattgaggtgggtctgtacacaatacagatcctccaacttacgccattctttcacaaggaaaacgagctgtctaaaaagcacatggtgcagttcctcagtgggaagtggaccattccaccagatcctagaaatgagtgctatctggccctgagcaagttcacttcccatctgaaaaatctccaaagcgacctcaaacgctgtttcgacttcttcatagactatatggtgctgctcaagatgcgatatacccagaaggaaattgccgaaatcatgctgagtaaaaaagtgagccgttgcttcagaaagtatacagagctcttctgtcatctggacccttgtctccttcagagcaaggaaagccaactgctccaggaggagaattgtaggaagaagttggaggcccttcgagcagatcggtttgccggactcttggaatacttaaaccctaactacaaagacgctacaaccatggagtctattgtgaacgagtacgccttccttctgcaacagaactcaaagaagcccatgacgaacgaaaagcagaatagtatcctggccaatattatcctgtcttgcttaaaacccaatagcaaactcattcagcctctgactacccttaaaaagcaactaagggaggtgctacagtttgttggactgagccaccagtacccaggcccctatttcctggcttgtctgttattctggccagagaaccaggagctggatcaggattctaagctaatcgagaaatatgtttcctccctgaatcgatcgttcagaggacagtacaagcggatgtgccggagcaaacaggcttccaccttgttttacctgggcaaacgcaagggcttgaactccattgttcacaaagccaagatcgagcagtacttcgacaaggctcagaacacaaactccctgtggcattccggagatgtgtggaagaagaacgaggttaaggatttgctgaggcgacttaccggacaggccgaaggcaaactcattagtgtcgaatacggcacagaagagaaaattaagatccccgtgatttccgtgtacagcgggccactccgaagcggtaggaatatagagcgcgtcagcttctatctgggattcagtattgagggacccttggcctatgacattgaagtgatctag

SEQ ID NO: 207182 - DNA, 213 bp, synthetic construct
  misc_feature 1..213: note = Description of Artificial Sequence: Synthetic coding sequence
  source 1..213: mol_type = other DNA
atgagcaagcaggtgagcctgcccgagatgatcaaggactggaccaaggagcacgtcaaaaaatgggtgaacgaggatttgaagattaatgagcagtatggccagatccttctgagtgaggaggtcacaggacttgtcctgcaagagctcacagaaaaagatttagttgagatggggctaccctggggccctgctctgctcataaagcgctag

SEQ ID NO: 207183 - DNA, 4755 bp, synthetic construct
  misc_feature 1..4755: note = Description of Artificial Sequence: Synthetic coding sequence
  source 1..4755: mol_type = other DNA
atgagcaagcaggtgagcctgcccgagatgatcaaggactggaccaaagagcacgtgaaaaagtgggtcaatgaggatctgaagataaatgagcaatatgggcagatccttctgtccgaagaggtcacaggactggtgttacaggagctcaccgagaaggacctggtggaaatgggtctgccttggggcccagcgttgctgatcaagcgcagttataataaacttaattcaaagtctccagagtccgacaatcatgaccctggccagctggataatagcaagccatcaaagacagaacatcagaaaaaccccaaacatacaaaaaaagaagaagaaaattccatgtcttcaaatattgattatgaccccagagagatccgcgacataaagcaggaggagtctatcctgatgaaggagaacgtgctggacgaagtggccaacgctaaacataagaagaaaggcaagctgaagcccgaacagctgacttgtatgccttatccattcgatcagttccacgacagccatagatatatcgagcactacaccctacagcccgaaacaggggcgctcaatttgattgatccgattcatgagtttaaggcacttacgaatacggaaactgccactgaggtcgacatcaagatgaaattttctaacgaagtttttcggtttgctagtgcttgtatgaactcccggaccaacggtactattcactttggtgtcaaagataaaccgcacggggagatcgtaggcgtgaaaatcaccagcaaggctgcattcatcgaccactttaacgtaatgattaaaaaatactttgaggagtcggaaatcaatgaggccaagaaatgcattagagaacctcggttcgtcgaggtgctgctccagaacaacactccaagcgacaggttcgtgattgaagtcgacacaatcccaaaacactcgatctgcaatgataaatacttttacatacagatgcagatctgtaaggacaagatctggaagcagaaccagaaccttagcctctttgtgagggaaggagccagctctcgcgacatcctggctaactctaagcagagggacgttgatttcaaggcatttctgcaaaaccttaaatccctggtggccagccggaaggaggctgaagaagagtacggcatgaaggccatgaaaaaggagagcgaaggcctgaagctggtgaagttactgatcgggaaccgcgattcattagacaacagctactacgactggtacatattggtgaccaataagtgtcatcccaatcagatcaagcacttagacttcttgaaggagataaaatggtttgctgtgctagaattcgaccctgaatcaatgatcaacggagtcgttaaagcctataaagagtctagagtcgccaacctccattttcctaatcaatacgaggacaagaccacgaatatgtgggagaagatctccaccctgaatctctaccagcagccttcgtggatattttgcaacggccgaagcgaccttaagagcgagacatacaaacccttagaaccccatctctggcaacgcgaacgcgcttccgaggtaagaaagctgattctgttccttaccgatgaaaatatcatgaccagaggcaaatttcttgtggtgttcctgcttctcagctccgtggaatctccaggggatcccctgatagagacattttgggcattctaccaggcactcaaggggatggagaacatgctctgcatctcagtaaattcccacatttatcagcgctggaaagacttgctccagactcgaatgaaaatggaggatgagctgacaaaccactccattagtacactgaatattgaacttgtaaattccaccattcttaaattgaagagcgtgactaggtcatcacgacggtttctccctgctcgcggatcctcttcagtcatacttgaaaaaaagaaagaagacgttctgaccgcactggagatattatgcgaaaacgaatgcacagagacagatatcgagaaggacaagagtaaattcctcgaatttaagaagtctaaggaagagcatttctaccgtggaggcaaggtgagctggtggaacttttacttttcttcagagaattattccagcgacttcgttaaacgcgactcctacgaaaagctgaaagacctgatccactgctgggctgagtctcctaagccaatcttcgctaaaattatcaatttataccaccatcccgggtgcggcggcaccaccctcgcaatgcatgtgctttgggatctcaagaagaactttcggtgtgccgtcctgaaaaataagactaccgatttcgccgagatcgccgagcaggtgattaatttagtcacctatcgcgccaagtcccaccaggactacatcccagttttgctgcttgtggatgactttgaagaacaggagaacgtctactttctgcagaatgccatccattctgtgctcgcagaaaaagatctgcgctatgaaaagacattggtcattattctcaattgcatgcgatctcgaaatccagatgagtcagctaagttggctgactccattgccctgaactaccagttgagcagtaaagagcagagagcatttggtgccaagctgaaggagatcgaaaaacaacataaaaactgtgagaatttttatagcttcatgatcatgaagagcaactttgacgaaacatacatagagaatgttgtgcggaacatcctgaagggtcaggacgtcgacagcaaagaggcccagttgatctcctttctcgccttgttatcctcttatgtgacggatagcacgataagcgtgtcccagtgtgagattttcctcggcatcatttacactagtaccccttgggagcctgaatccctcgaggataaaatgggtacctacagtaccctgctgatcaagacggaagtggccgaatatggtaggtatacaggagtgaggatcatccacccgctgatagccttatactgcctcaaggagctggaaagatcttatcacttggacaaatgtcaaattgccctgaatatactcgaggagaacttgttctacgattctggtatcggaagagacaagttccagcatgatgtgcagaccctactgcttaccaggcagagaaaagtgtacggggatgaaactgacactctgttttctccacttatggaagccctgcagaacaaggatatcgagaaagtactttcagccgggtctaggcgcttcccccagaatgctttcatttgtcaagctttggctagacacttttacataaaggagaaggacttcaatactgccttggactgggctcggcaggccaaaatgaaggctcccaagaactcttacatatccgatacgttagggcaggtctataagtccgagattaaatggtggctggatgggaataaaaattgtcgctccatcaccgtgaacgatctgacccacctcctggaggcagctgagaaggcttctagggcgttcaaggagagccaaagacagaccgacagcaaaaactatgagaccgagaactggtcgccccagaagtcccaacggagatatgacatgtataatactgcatgctttctgggagagatagaagtgggcctgtatactattcagatccttcagctgactccgttttttcataaggaaaatgagttgagtaaaaaacacatggtccagttcttgtcaggtaagtggaccataccaccggaccctcggaatgaatgctatctggccttgtcgaagtttacgtcacatctgaaaaacctccagtctgacctaaaaagatgctttgactttttcatcgactatatggttctgctcaaaatgcggtatactcagaaagagatcgccgaaataatgttgtccaaaaaggtatcacggtgttttagaaagtacacggaattgttttgccacctcgacccttgccttctccagagcaaggagagtcaacttcttcaggaagaaaactgccgcaagaagctcgaggcgctcagggcagacaggttcgcaggtcttttggagtacctcaacccgaactacaaggacgccaccaccatggagagcattgtgaacgagtacgcttttctactgcaacagaacagcaagaagcctatgactaatgagaaacagaattccatattggcaaatatcatcttatcctgcttaaaaccaaacagtaaactcatccaacccctcacaacactgaagaagcaacttcgggaagtgctccaattcgtgggcctgagtcaccagtaccctggtccatacttcttggcctgtctgctgttttggcccgagaatcaagagctggaccaggattcaaaacttatcgagaagtatgtgtcctcattgaatcgaagctttcgtggccagtacaagcgcatgtgtagatcaaaacaggcctcgacactgttctacctaggaaagcggaaaggtctcaatagcattgtgcataaggcaaagatcgagcagtacttcgacaaggcgcagaacactaattcactgtggcactctggagatgtgtggaagaagaacgaggtgaaagatctattgagacgtctgaccgggcaggcagagggaaagcttatctccgtggagtatggaacagaggaaaaaattaagattccagtaatcagcgtatattctggccccctcagatctggccggaacatagagcgggtttctttctacctcggcttcagcattgagggaccattggcctatgacatcgaggtcatatag

SEQ ID NO: 207184 - DNA, 213 bp, synthetic construct
  misc_feature 1..213: note = Description of Artificial Sequence: Synthetic coding sequence
  source 1..213: mol_type = other DNA
atgagcaagcaggtgagcctgcccgagatgatcaaggactggaccaaggaacacgtgaagaaatgggttaacgaggacctcaaaataaatgaacagtacggccagattctcctcagcgaggaggtaactggactcgtgctgcaggagttgacagaaaaggatctggtggaaatgggcctaccttgggggccggcgctcctgattaagcgatag

SEQ ID NO: 207185 - DNA, 213 bp, synthetic construct
  misc_feature 1..213: note = Description of Artificial Sequence: Synthetic coding sequence
  source 1..213: mol_type = other DNA
atgagcaagcaggtgagcctgcccgagatgatcaaggactggaccaaagaacatgttaaaaaatgggtgaacgaggacctgaagataaatgagcagtacgggcaaatcctcctgagcgaggaagtaacgggcttggtgcttcaagagctcactgaaaaggatttggtggaaatgggccttccgtgggggccagctctcttgatcaaacgctag

SEQ ID NO: 207186 - DNA, 213 bp, synthetic construct
  misc_feature 1..213: note = Description of Artificial Sequence: Synthetic coding sequence
  source 1..213: mol_type = other DNA
atgagcaagcaggtgagcctgcccgagatgatcaaggactggaccaaggagcacgttaagaagtgggtaaacgaggatctgaagattaacgagcaatacggtcagatcctgcttagcgaggaggtcactggattggtcctccaagaactcacagagaaagacctggtagaaatgggccttccttgggggcctgccctactcattaagcgatag

SEQ ID NO: 207187 - DNA, 957 bp, synthetic construct
  misc_feature 1..957: note = Description of Artificial Sequence: Synthetic coding sequence
  source 1..957: mol_type = other DNA
atggccccctgggccgaggccgagcacagcgccctgaaccccctgagagctgtgtggctgactctcaccgctgcatttctgctaacgttgctcctgcaactcctgccacccgggttgctgcccgggtgtgcaatctttcaggacctaattagatacgggaagacaaagtgtggtgagccgtcccgacctgcagcttgtcgcgcttttgacgtgcccaagagatatttcagccacttctacataatttctgtgctctggaatggcttcctgctctggtgcttgactcaaagcttgttcctcggcgccccttttccgtcttggttgcatggactactgcgcatccttggcgccgcgcagttccagggtggtgaactcgcactgtccgcctttctagtcctggtgtttctctggctgcacagcctgcgacggctgtttgagtgtctctacgtgtctgttttcagcaacgttatgatacatgtggttcagtactgcttcggcctggtgtattatgtcctggtcggtctcaccgtcctgtcacaggtccccatggacgggaggaacgcctacatcactggaaagaacctcttaatgcaggccagatggttccatatcctcggtatgatgatgttcatttggagttcggctcaccagtataagtgtcacgtgatcctcgggaaccttcgcaaaaataaagccggcgtggtcatccattgtaaccataggattcctttcggggactggttcgagtatgtgtctagcccaaattatctcgccgaactcatgatctatgttagcatggcagtgaccttcggatttcacaatctcacatggtggcttgtggtaacgaatgtcttcttcaaccaggcgctctctgccttcctctcacaccagttttacaaaagcaagttcgtgtcttaccctaagcacaggaaagcttttcttcccttcctcttctag

SEQ ID NO: 207188 - DNA, 711 bp, synthetic construct
  misc_feature 1..711: note = Description of Artificial Sequence: Synthetic coding sequence
  source 1..711: mol_type = other DNA
atgacccggtgccccgccggccaggccgaggtggagatggccgagctttatgttaaacctggaaacaaagagagggggtggaatgacccacctcagttttcctatggtttacagacccaagccgggggtcctaggcgctcactgctgacaaagagggtggctgccccacaagacggaagtccacgcgtacctgctagcgaaacatcacctggaccgccccccatgggtccacctccgccctcctctaaagccccccgcagtcctcccgtgggttcagggcctgcttcaggcgtcgaacctacgagcttccctgtcgaatcagaggccgtgatggaggatgtacttagacctctggagcaagccctggaggactgtcgaggacatacccgcaagcaggtgtgtgatgacatttctaggcgcctggctctgctacaagagcagtgggccgggggaaaactgtcaattccagtgaagaagcggatggctctgcttgttcaggagttgagttcccaccggtgggacgctgctgatgacatccatcgcagtttaatggtggatcacgtaactgaggtgagccagtggatggtcggcgttaaacggcttatagcagagaaacggtccctcttctctgaagaggctgcaaacgaagagaagtcagcagccacagcagaaaagaatcacacaatccctggcttccagcaggcttcctag

SEQ ID NO: 207189 - DNA, 681 bp, synthetic construct
  misc_feature 1..681: note = Description of Artificial Sequence: Synthetic coding sequence
  source 1..681: mol_type = other DNA
atggagggctgcgtgagcaacctgatggtgtgcaacctggcctacagcggaaagttggaggagctcaaggaatcaattctcgcagataaaagtctagccacaagaaccgatcaagattctaggaccgcattgcattgggcttgttcggccggacatacagaaatcgttgaatttctacttcagctcggcgtgccagtaaatgataaagacgacgccggatggtcgcctctacatatagccgcctccgctggacgggatgagattgtgaaggcgctgctgggaaagggagcccaggtcaacgcagtgaaccagaacgggtgtacccctctccactatgcagccagcaagaataggcacgagatcgctgtgatgcttttggaggggggagctaatcctgatgccaaggaccattacgaggccacagccatgcaccgagctgctgctaagggcaacctgaaaatgatacacatcctcctctattacaaggcctcaacaaatatccaggataccgagggcaacacccctctccacttagcctgcgacgaggagcgcgtcgaagaggctaagttactcgtgtctcaaggcgccagcatctacattgaaaataaagaagagaagacccctctgcaggttgccaagggcggattaggtctgatactgaaaaggatggtagagggctag

SEQ ID NO: 207190 - DNA, 780 bp, synthetic construct
  misc_feature 1..780: note = Description of Artificial Sequence: Synthetic coding sequence
  source 1..780: mol_type = other DNA
atggccaccgccaccggcgtggccgaggagcggctgctggccgcccttgcttatttgcagtgcgccgttggttgtgctgtattcgctagaaaccgtcagaccaacagcgtgtatggtaggcatgccctgccttctcatcggctcagagtcccggcgcgcgcagcctgggtggtgcaggaactcccctctctggccctgccactgtatcagtacgcttccgagtcagccccgcgactcagatccgcgccgaattgcatccttcttgcaatgtttcttgtgcattatgggcacagatgtctcatttacccctttctaatgcgcgggggtaaacctatgcccctgctggcctgtacaatggccatcatgttctgcacttgtaatggctaccttcaaagccgatacttatcccactgcgctgtgtatgccgacgactgggtgacggacccccggtttctcataggcttcgggctctggctaaccggaatgcttataaacattcactccgatcacatattaagaaatttaaggaaaccaggtgacaccggatacaaaattccgagggggggacttttcgaatacgttaccgctgctaattatttcggggagataatggagtggtgcggatatgcactcgcttcctggtcagtgcagggcgctgcattcgctttcttcactttttgcttcctgagtggcagagctaaggaacatcacgaatggtatctgcggaagttcgaagaataccccaaattccgcaagattataatcccatttctcttttag

SEQ ID NO: 207191 - DNA, 585 bp, synthetic construct
  misc_feature 1..585: note = Description of Artificial Sequence: Synthetic coding sequence
  source 1..585: mol_type = other DNA
atggagcacgccgcccagccctggcggtggcagcggcggcggggctggaggcggagtgcttgttggccaagatcccccacatgtagcgcaccatgggctgcccgaagctcaagggccatcgtgcgacgaactcagtgcactgctgcgacgcgttgtcccgctacagggagcgagtgtcgtagaggaccacctgggtggtgcaggagttgcccgcgatggccctgtcggagcacctcaacgcctgcctcccctcccagagtgagcgctgcccgccctaccgctagttcttggccctgcagtagcagcactactggcatcgggaatgtgggtatgcaagccctggctgtctgtctccaccctaaatgtcaaccgatggtgcccatcgtatgcccggacctgaaccatgactccaagacccaaagagaaattgcgggtatcagatgctcatatagccttctgggcaataccgccgctagccggagaattccaactagcctgatgacccagcacctcaatgcccacttgctggcgaatacatgctttgcagtgaaccagtatgaggtttttctgggagttctggcctag

SEQ ID NO: 207192 - DNA, 639 bp, synthetic construct
  misc_feature 1..639: note = Description of Artificial Sequence: Synthetic coding sequence
  source 1..639: mol_type = other DNA
atggagcacgccgcccagccctggcggtggcagcggcggcggggctggcgacgtagtgcatgctggcccagaagccctacttgttcagccccatgggccgcacgctcaagcagggctattgtcagacggacccagtgcaccgcagctacgaggtgtcctgccaccggcagcgaatgtagacgggggcctccaggctggtgtcgctcatgtccgcggtggccctgccggtccacaagcaccccagcttctccacctagagtgtcagctgcccgccccacagcatcttcatggccatgtagttctagtacgactggcattggtttcggattatggctaacgggaatgctgattaatatccatagcgatcacattctcaggaacctgagaaaaccaggggacacaggctacaagataccacgcggcgggctgtttgaatatgtgacagcggcaaactacttcggggagatcatggagtggtgtggttatgccctagcaagctggtctgtgcaaggggctgcattcgccttttttaccttctgtttcctctctggacgggcaaaagaacaccacgagtggtatctgcggaaatttgaggagtacccaaagtttcgcaagatcatcattccatttctgttttag

SEQ ID NO: 207193 - DNA, 858 bp, synthetic construct
  misc_feature 1..858: note = Description of Artificial Sequence: Synthetic coding sequence
  source 1..858: mol_type = other DNA
atgctgctggccaccttcaagctgtgcgccggcagcagctaccggcacatgagaaacatgaagggtctgagacagcaggcagtcatggccatctcgcaggagttgaatcggagagccctaggcggccccactccgtctacctggattaatcaggtccgccggcggagcagcttgctggggtcccggctggaggagaccctgtacagtgaccaggagttggcctacttgcagcaaggtgaagaagccatgcaaaaggccctgggtattctgtcaaatcaggaggggtggaagaaggagtcccagcaggacaacggcgacaaagttatgtcaaaagtggtgccggatgtggggaaagtcttccggctcgaagttgtcgtggatcagccaatggagcgcctatacgaggaactcgtggaaagaatggaagcgatgggtgagtggaaccccaatgtgaaggaaattaaggtgttgcaaaagatcgggaaggacacctttataacccatgagttagccgccgaagccgccggtaatctggtcgggccccgggatttcgtgagcgtaaggtgtgccaagagaagaggttcaacttgcgtgctcgcagggatggcaacagattttgggaatatgcccgaacagaagggggtgatcagagcggaacacggcccaacttgcatggtactgcaccccttggcaggatcaccctctaagactaagctgacatggctcttgtctatcgatctgaagggatggttacccaaaagcatcattaaccaggtactctctcagacacaggtagattttgctaatcacttgcggaagaggctcgaatcccatccagcctctgaagcccggtgttag

SEQ ID NO: 207194 - DNA, 744 bp, synthetic construct
  misc_feature 1..744: note = Description of Artificial Sequence: Synthetic coding sequence
  source 1..744: mol_type = other DNA
atgctgctggccaccttcaagctgtgcgccggcagcagctaccggcacatgcgtaatatgaagggttctcggctggaggagactctttacagtgatcaagagctcgcttatctccaacaaggtgaagaagcaatgcaaaaggcgctggggattctgagcaatcaagagggttggaagaaggaatctcaacaggataatggagataaagtgatgtcaaaagtggtgccggatgttggcaaagttttcaggttagaggtggtcgtcgaccagcccatggaaaggctgtacgaggagttagtagaaaggatggaagcaatgggagagtggaatcccaatgtgaaagaaattaaagttctccagaagattggcaaggatacttttatcacccacgagctcgccgccgaggcagcgggcaatctcgtcggcccgagggactttgtttctgtgcgttgcgccaagcgacgtggttccacctgcgtgctcgctggtatggcaactgactttgggaacatgccagaacagaagggagtgatccgagctgagcacggtccgacgtgcatggtcctccatccattggctggatctccttccaaaactaaattgacttggcttctctctatcgacctcaaggggtggctgcccaagtctatcattaatcaggtcttgagccaaacccaggtggacttcgctaaccacttaagaaagcggctggagagccaccccgctagcgaggcacgttgttag

SEQ ID NO: 207195 - DNA, 969 bp, synthetic construct
  misc_feature 1..969: note = Description of Artificial Sequence: Synthetic coding sequence
  source 1..969: mol_type = other DNA
atgagcagcagcccctgggagcccgccaccctgcggcgggtgttcgtggttggagtcggaatgaccaaatttgtaaagccaggagctgaaaattctcgggattacccagacttggctgaggaggccgggaaaaaggcactagcagacgcacagatcccctacagcgccgttgatcaggcctgtgtagggtatgtctttggcgtggccgagtgcgttctggcactcgggttcgagaagatgtccaagggctcgctgggcattaaattctccgacaggacaatccccacagacaagcacgtcgatctgctcattaataagtatggcttgtccgctcatccggtggctccgcaaatgttcggctatgccggcaaggagcacatggagaaatatggtactaagattgaacattttgctaagatcggatggaagaaccacaagcacagcgtaaacaatccgtattcacagttccaggacgagtactccctcgacgaggtcatggctagtaaagaggtcttcgactttttaactattcttcagtgctgccccacttcagatggagcagccgctgcaatactcgcttcagaggctttcgttcagaagtacggtctccagtcaaaggcagtcgagattcttgcccaggagatgatgaccgatttgcccagcagctttgaagagaaatccatcatcaagatggtgggatttgatatgtctaaggaagcggcacggaagtgttacgaaaagagtggtctgacaccaaacgatattgatgtcattgaacttcatgattgcttctccacgaacgaactcctaacatacgaggccctgggactgtgtcccgagggacagggggcaacccttgttgacagaggggacaatacctatggggggaagtgggtgattaatccctcaggaggtctgatcagcaaaggccaccccctgggggctacgggaggccattcctgctcctag

SEQ ID NO: 207196 - DNA, 1644 bp, synthetic construct
  misc_feature 1..1644: note = Description of Artificial Sequence: Synthetic coding sequence
  source 1..1644: mol_type = other DNA
atgagcagcagcccctgggagcccgccaccctgcggcgggtgttcgtggtaggcgtgggaatgacaaagttcgtaaaacctggagctgagaactcgagagattaccccgatctggctgaagaagcagggaaaaaggctcttgccgatgcccagattccatattcagccgttgaccaggcttgcgttggctatgtgtttggcgactctacgtgtggccaacgagccatttatcactccctgggtatgacgggtattcccatcattaatgttaataataactgcgcaacaggatccacagccctgttcatggctaggcaactgatccaggggggggtggcagaatgcgtgctcgctctgggctttgagaaaatgagcaagggatctctcggaatcaagttttctgatcgaacgatacctaccgacaagcacgtagaccttttaattaacaaatacggcctcagcgcccacccggtcgccccacagatgttcggctatgccggcaaggaacacatggaaaaatacgggaccaaaatcgagcattttgccaagatcggttggaaaaatcacaaacactctgtgaacaacccctactcccagtttcaggacgagtactcactggacgaggtaatggcatccaaggaggtcttcgactttctgacaatcttgcagtgttgtcctaccagcgatggtgctgcggccgcaattctagccagtgaggcctttgtgcaaaaatatggccttcagtccaaagctgtggagatcctggcacaggagatgatgaccgacctgcccagcagttttgaagagaagagtattataaaaatggtgggctttgacatgagtaaagaagctgcccgtaagtgctatgaaaagagcggcctcactccaaatgatatcgacgtaattgagctgcacgactgcttctccaccaatgagctgttaacctatgaggctctgggtctatgccccgaggggcaaggcgcaaccctggtggatcgcggggacaacacttatggcggcaaatgggtaatcaacccttccggaggcttaatttcaaaaggccacccattgggtgctacgggacttgcacagtgtgctgaactttgctggcagctgaggggagaggcgggcaagcgtcaggtgccaggagcaaaggttgccctgcaacacaacctaggcatcgggggcgctgtagtggttaccctgtataaaatgggcttccctgaggccgcgtcatccttccggactcaccagatcgaggccgttccgacgtctagtgccagcgatggcttcaaggctaacctcgtatttaaggagattgaaaagaagctggaggaggaaggcgaacaattcgtgaagaaaataggggggatcttcgcatttaaggttaaggatgggcctggaggcaaagaggccacttgggtcgtggatgtgaaaaatggaaagggaagcgtgctccccaatagcgataaaaaagctgactgtaccatcacgatggctgattcagacttcctcgctttgatgaccggcaaaatgaaccctcagtcagccttctttcaggggaagctaaaaattacaggcaatatgggtctcgccatgaagctacagaacctgcaattgcagccagggaacgcaaagctttag

SEQ ID NO: 207197 - DNA, 1572 bp, synthetic construct
  misc_feature 1..1572: note = Description of Artificial Sequence: Synthetic coding sequence
  source 1..1572: mol_type = other DNA
atgagcagcagcccctgggagcccgccaccctgcggcgggtgttcgtggtcggggttggcatgaccaagttcgttaaacccggggcggagaactcgagagactatcctgatctcgccgaggaggcgggcgactcgacatgcggacagagggcaatctatcattcactgggaatgactggtataccaataattaatgtaaataataactgtgccacgggctcgacagccttgttcatggcccgccagttgattcagggcggcgtcgccgagtgcgtgctggctctcggattcgaaaagatgtcaaaggggtccctgggaatcaaattcagcgatcgcaccatcccaaccgacaaacacgtggaccttctgataaacaagtacggtcttagtgcccacccagttgccccccaaatgtttggttatgctggcaaggaacacatggaaaaatatggaaccaaaattgaacatttcgccaaaattggctggaaaaatcacaaacactcagtgaacaatccctactcccagttccaggatgagtactccctggatgaggtgatggcctcaaaggaagtattcgatttcttaaccattttgcaatgctgtccaacttctgacggcgcggccgctgcgatactggcatcggaggcgtttgtccaaaagtacggcctgcaaagtaaagctgttgagatcctagcacaagaaatgatgacagaccttccctcttcctttgaggagaaatcaattatcaagatggtgggatttgatatgtcgaaggaagctgcacgcaagtgttatgagaaaagtggtctgacacccaatgatattgacgtgattgaactgcatgactgttttagtacaaacgagttactgacttacgaggctctcgggctctgcccagaaggacaaggagctaccctggtggacagaggtgacaatacctacggaggtaagtgggtgattaatccgagtggcgggttaatttccaaaggtcaccctctcggcgccactggcctggcacagtgtgctgaactctgctggcagttgaggggagaagccggcaagagacaagttcctggggccaaggtagccctgcagcataaccttggcattggcggggcggtagtagtgacactgtataaaatggggttccctgaagccgcatctagtttccgcactcatcagatcgaagccgtccctacatcaagcgcttctgatgggttcaaagccaatctagtcttcaaagagattgagaagaaattggaggaagaaggcgagcagtttgtgaagaaaataggagggatattcgctttcaaagtgaaggatgggcccggtgggaaggaggcaacatgggtcgtggatgtgaagaacgggaagggttcagtactccccaactccgataagaaggctgattgtaccatcacgatggctgactctgattttctggcgctcatgaccggtaaaatgaatccccagtctgcctttttccagggcaagctcaaaatcaccggaaacatgggcctagctatgaaacttcaaaatttgcagttgcaaccaggaaatgcgaagttgtag

SEQ ID NO: 207198 - DNA, 180 bp, synthetic construct
  misc_feature 1..180: note = Description of Artificial Sequence: Synthetic coding sequence
  source 1..180: mol_type = other DNA
atgggcttccccgaggccgccagcagcttccggacccaccagatcgaggccgtgcccacttcatccgcgtcagatggtttcaaagccaatctcgtattcaaagagattgagaaaaagctagaagagatcaggcgcctgaccgctcaatctcagtggctgactcagacgagctggctatag

SEQ ID NO: 207199 - DNA, 423 bp, synthetic construct
  misc_feature 1..423: note = Description of Artificial Sequence: Synthetic coding sequence
  source 1..423: mol_type = other DNA
atgggcttccccgaggccgcccggacccaccagatcgaggccgtgccaactagctccgcttccgacggctttaaggccaatctcgtgtttaaggagattgagaagaaacttgaggaggagggcgaacagttcgttaagaaaataggcggcatctttgcgtttaaagtgaaagacgggccaggcggcaaggaggccacttgggtggtggacgtgaaaaatgggaaggggtccgtgctccccaactctgataagaaagcagattgtacaatcaccatggcagactccgatttccttgctttgatgaccggcaagatgaacccacaaagcgccttcttccaaggaaagcttaagatcacgggaaatatgggcctagcgatgaaactccaaaacctccagctacaacctggcaacgctaagctctag

SEQ ID NO: 207200 - DNA, 432 bp, synthetic construct
  misc_feature 1..432: note = Description of Artificial Sequence: Synthetic coding sequence
  source 1..432: mol_type = other DNA
atgggcttccccgaggccgccagcagcttccggacccaccagatcgaagctgtaccaaccagtagtgcctctgacggctttaaggcaaatttagtgtttaaggagatagagaaaaagctggaggaggagggggagcagttcgtgaagaaaatcggcggaattttcgctttcaaggtgaaggatggccctggcggtaaagaggctacttgggtcgtggatgtgaaaaatgggaaagggagcgtgctacctaactccgacaaaaaagctgactgcaccatcactatggccgactctgactttctggcgctcatgacaggtaaaatgaacccacagagcgccttttttcagggcaagctcaagattacaggcaacatgggactcgctatgaaactgcagaacttacagctgcaaccagggaacgctaagctgtag

SEQ ID NO: 207201 - DNA, 180 bp, synthetic construct
  misc_feature 1..180: note = Description of Artificial Sequence: Synthetic coding sequence
  source 1..180: mol_type = other DNA
atgggcttccccgaggccgccagcagcttccggacccaccagatcgaggccgtacccacctctagcgccagcgacggctttaaggccaacctggtctttaaggaaattgaaaaaaagcttgaagaaatcagaagactgacggcccagagtcagtggctgacacagaccagttggttgtag

SEQ ID NO: 207202 - DNA, 1401 bp, synthetic construct
  misc_feature 1..1401: note = Description of Artificial Sequence: Synthetic coding sequence
  source 1..1401: mol_type = other DNA
atgaccggcatccccatcatcaacgtgaacaacaactgcgccaccggatcaaccgccctatttatggcaaggcagctgattcaaggcggtgttgcggagtgcgtgctcgccctgggattcgaaaagatgtcgaaggggagtctgggcatcaagtttagcgatagaactatccccactgacaagcatgtggacctactgattaacaagtacggattgtcagctcaccccgtggctccccagatgttcggctacgccggcaaagagcatatggagaaatacggaacgaaaatcgagcattttgctaagatcggctggaaaaaccacaagcactccgtgaataatccctactcccagtttcaggacgaatactccctcgacgaggtcatggcctcaaaagaagtttttgactttcttactattctgcaatgttgtcctacttcggacggtgctgcagcagcgattctggcctcagaggctttcgtccagaaatacgggctacagtcgaaggcagtggagattctggcacaggaaatgatgaccgacctaccttcatcttttgaggagaagtcaattattaagatggtggggtttgatatgagtaaagaagccgcgcgaaagtgctacgagaaaagcggactcacccccaacgacattgacgtgatcgaactgcatgactgtttttctacaaacgagctgctcacatacgaagctctgggtttgtgtccagaaggccaaggggcgactctcgtggatcgaggcgataacacttatggtggaaaatgggtcattaaccctagcggtggacttatctcaaaagggcaccccctgggagctaccggcctggcacagtgtgccgaactttgctggcagctgagaggcgaggcgggcaagcgccaggttccaggtgctaaagtggccctgcagcataacctcggcatcggcggcgctgtggtggtgaccttgtataaaatgggcttccccgaagccgccagcagtttccgcactcatcaaatcgaggctgtaccaacatcctccgctagtgatggcttcaaggcgaatttagtgtttaaagaaatcgagaagaagctcgaggaagagggcgaacaattcgttaaaaaaatcgggggtatcttcgccttcaaggtcaaggacgggcccgggggaaaagaagccacatgggtcgtggatgtgaaaaacggcaaaggcagtgtcctacctaacagtgacaaaaaagcagactgcaccattacaatggcagatagtgatttcctcgccctgatgaccggaaagatgaacccacaaagtgctttcttccagggtaagctgaagattaccggaaatatgggcttagccatgaagctgcaaaatctgcaactccagcctggaaacgccaagttgtag

SEQ ID NO: 207203 - DNA, 1512 bp, synthetic construct
  misc_feature 1..1512: note = Description of Artificial Sequence: Synthetic coding sequence
  source 1..1512: mol_type = other DNA
atgagcagcagcccctgggagcccgccaccctgcggcgggtgttcgtggtgggggtgggcatgactaagttcgtcaagcctggtgccgagaacagccgggactatccagacttggcagaggaggcaggaaagaaggcccttgccgatgctcaaataccatatagcgcagtagatcaggcatgcgtgggctacgttttcggcgttgccgaatgtgtactggccctagggtttgagaagatgtccaaaggatcccttggcatcaaattctcagataggacaatccctactgacaagcacgtggatcttctgatcaacaagtatggactatcagcgcaccccgtggctccccagatgtttggctatgccggcaaagagcacatggagaagtacggtacaaaaatagagcattttgccaaaattggatggaaaaatcataagcacagtgtcaacaacccctatagccagtttcaggacgaatactcactcgacgaggtcatggcgtcaaaggaggtgttcgatttcctgacgatccttcaatgttgtccaacatccgacggtgctgcggccgcgattttggcttcggaagctttcgtccagaaatacggcctgcagagcaaagcagtagagatcctggcccaggaaatgatgacagatctgcccagctcatttgaggagaaaagcatcatcaagatggtgggcttcgatatgtctaaggaggcagcccgaaagtgctatgagaagtccggtttaactcctaacgacatcgacgtgatcgaactgcatgactgtttttccacaaacgagctgttgacttacgaagctttgggcttgtgtcctgaaggtcagggggctaccctggtcgatcgcggggacaatacgtatggaggtaaatgggtgataaatcccagtggcgggctcatcagcaagggacatcctcttggtgcgactggactggcccaatgtgccgaactgtgctggcagctcaggggcgaagccgggaaaagacaggtgcccggagctaaagtggctctgcaacacaatttgggcattgggggagccgtggtggtgaccctctacaagatgggttttccagaagcggccagttcttttcgaacccaccagatcgaggccgtgccaacttcaagcgcgagtgacgggtttaaagcaaacctcgtatttaaggagatcgagaaaaaactggaggaggaaggtgaacagtttgtgaagaaaattggcggcatctttgccttcaaagtgaaggatggtccgggcggcaaggaagccacatgggtcgtggacgtcaagaatgggaagggaagcgttcttcctaattcagacaagaaagccgactgtacgataacaatggcagacagcgatttcctggcactgatgacgggcaaaatgaatccccagtctgcattctttcaggggaaattgaagatcacgggaaacatgggtctcgcaatgaagctacaaaacttacaactgcagcctgggaacgcaaaactgtag

SEQ ID NO: 207204 - DNA, 1653 bp, synthetic construct
  misc_feature 1..1653: note = Description of Artificial Sequence: Synthetic coding sequence
  source 1..1653: mol_type = other DNA
atggtgggcgaggagaagatgagcctgcggaaccggctgagcaagtccagagaaaatccagaggaggatgaagatcaaagaaaccccgcgaaggagagtctcgagacgcccagcaacgggagaattgacattaagcagttgattgccaaaaaaatcaagctaactgccgaagcggaggagttaaagcctttcttcatgaaggaggtcgggtctcatttcgacgattttgtgaccaatctgattgaaaagtcagcttcattagataatgggggctgtgccctcacaacattcagcgtgctggagggtgaaaagaacaatcaccgagccaaggacttgagggctcctcccgaacaggggaagattttcattgcaagaagatcacttctcgatgaactgctggaggtagatcacatcaggaccatctaccatatgttcattgcacttctgatcctcttcattttgtctaccctcgtcgttgactatatcgacgagggacgacttgtgttagaattctccctcctgagctacgccttcgggaagtttccaacggtcgtgtggacttggtggattatgttcctcagtacctttagcgtcccatacttcctgtttcagcattgggcaacagggtacagcaagagttcacacccactgatccggtccctgttccacggattcttgtttatgatcttccagatcggagtgctgggattcggccccacctatgtagtgctggcttacacactgcctcccgctagccggttcattattatttttgagcaaatccgctttgtgatgaaagctcactcctttgtcagagaaaacgtcccacgagtgttgaattccgccaaggaaaaaagttccactgtgccgatcccaaccgtcaaccagtacctctatttcctctttgctccaacactgatctaccgcgactcatatccgcgcaaccctacagtccggtggggctatgtggctatgaagttcgctcaagtctttgggtgcttcttctatgtctactatatttttgaaaggttgtgcgcacctctcttcaggaacataaagcaggaacccttcagcgcccgtgtactagttctatgcgtttttaactcgatcttgccgggcgtgctgatccttttcctcacatttttcgcctttctgcactgctggctaaatgctttcgcagagatgttgaggttcggggatagaatgttctataaggactggtggaatagtacttcttacagcaattactacaggacatggaacgtagtagtgcacgattggctgtattactacgcatataaggacttcctgtggttttttagtaagagattcaagtctgcagccatgctggcagtctttgccgtatctgctgtagttcatgaatacgcccttgcagtttgcttgtcgtttttttacccagtgctctttgttttatttatgttcttcggcatggctttcaactttatcgtgaatgacagtcgaaagaagccgatctggaatgtcttgatgtggacttcactgtttcttggcaatggggtgctgttatgcttttatagccaggagtggtacgctagacagcactgtcctctgaagaaccctacattcctggattacgttcgcccacgctcttggacttgcaggtacgttttctag

SEQ ID NO: 207205 - DNA, 783 bp, synthetic construct
  misc_feature 1..783: note = Description of Artificial Sequence: Synthetic coding sequence
  source 1..783: mol_type = other DNA
atggtgggcgaggagaagatgagcctgcggaaccggctgagcaagagccgtgagaaccccgaggaagacgaagaccagaggaatcccgctaaagagtccctggaaacaccttccaatgggagaatcgacattaaacaactgatcgccaaaaagattaagctcaccgccgaggctgaggagttgaaacccttcttcatgaaggaggtcgggtcccatttcgacgatttcgtgaccaacctgatagagaaaagcgcgagtcttgataacggcgggtgcgcccttacaacgttctctgtgctcgaaggtgaaaaaaataaccatcgcgcgaaggacttaagagctccccctgagcagggtaagatatttattgctcgccggtctcttctggatgagctcctggaagtggatcacatacggaccatttatcatatgtttattgccctgctgatcctgtttatcctgtcgactctggttgtggactatattgatgaagggcgcctggttcttgaatttagcctccttagctatgccttcgggaaatttcccacggtggtctggacttggtggataatgttcctgagtacattttccgtgccctatttcctgtttcaacactgggccactggctattccaaatcttcccatcccttgattcgaagcctttttcatgggttcctgtttatgatcttccagataggcgtgttaggatttggtcccacctacgttgttctcgcatacactctgcctccagcatcacggttcatcatcattttcgagcaatag

SEQ ID NO: 207206 - DNA, 861 bp, synthetic construct
  misc_feature 1..861: note = Description of Artificial Sequence: Synthetic coding sequence
  source 1..861: mol_type = other DNA
atgaaggcccacagcttcgtgcgggagaacgtgccccgggtgctgaatagcgctaaagaaaaatcctctaccgttcctatcccgaccgtgaaccagtatctgtatttcctctttgctcccactctgatatatagggacagctacccccggaatcccactgtccgctgggggtacgttgctatgaaattcgcacaggttttcgggtgttttttctatgtgtactacattttcgagcggttgtgtgcacccttgtttcgcaatatcaagcaagaaccttttagcgccagggtgctggtattatgcgtatttaactctattctaccgggcgtgctgatccttttccttacattcttcgcctttctccattgctggctgaacgcgtttgccgaaatgcttcgcttcggcgatcgaatgttctacaaagattggtggaattcaactagctacagcaactattacagaacttggaacgtcgtggtacacgactggttatattattatgcttataaagacttcctctggtttttcagcaagaggttcaagtctgcagctatgctggcggttttcgccgtgagcgcggttgtgcatgagtacgctctcgccgtgtgtctgtctttcttctaccctgtgttgttcgtactcttcatgttcttcggtatggccttcaatttcattgtaaacgactcgaggaaaaaacccatttggaacgtgctgatgtggacatctctgtttctggggaatggggtcctcctgtgtttctattcccaggaatggtacgccaggcagcactgcccgctaaaaaacccgacctttcttgactacgtccgccccaggtcttggacgtgtcgttatgtcttttag

SEQ ID NO: 207207 - DNA, 1458 bp, synthetic construct
  misc_feature 1..1458: note = Description of Artificial Sequence: Synthetic coding sequence
  source 1..1458: mol_type = other DNA
atgaaggaggtgggcagccacttcgacgacttcgtgaccaacctgattgagaagagcgcctctcttgataacgggggctgtgccctgactaccttctcagtattggagggtgagaagaataaccaccgtgccaaggatcttagggcccccccagaacaaggcaagatctttatcgcgcgacggtcccttctggacgaactgctggaagtcgatcatattcgcactatctatcatatgttcattgcgctactgatcctgtttatcctatccacactggttgtcgactatatcgatgagggcaggcttgtgctcgaattttcgcttctctcctacgccttcggtaaattcccaacggtcgtgtggacctggtggataatgtttctcagtacattcagtgttccctacttcctttttcaacattgggcaaccggatacagcaaatcctctcatcccctgattcggtccctgtttcacggctttctttttatgatttttcagataggagtcttggggttcggacccacttatgttgtgcttgcctatacgctaccaccagcatccagattcataatcatttttgagcagatccggttcgtcatgaaagctcatagtttcgttcgagaaaacgtcccgcgtgtgctaaatagcgctaaggagaagagcagtactgtgcctatcccaaccgttaatcagtatctgtactttctgtttgctccaactttgatataccgcgattcttaccctcgtaaccccaccgtccgctggggatacgtggccatgaaatttgcccaagtatttggttgtttcttttatgtttattacatcttcgagcggctctgtgcacccctgttcaggaatattaaacaggagcctttttccgcaagagtgctagttctctgcgtgttcaattccatactgcctggtgtgcttatcctgttccttacctttttcgccttccttcactgttggctgaacgcctttgccgagatgctgagattcggtgatcgtatgttttacaaagattggtggaatagcaccagctattcaaactactacagaacttggaacgttgtcgttcatgactggctgtattattatgcgtacaaagatttcctgtggtttttttccaaacggtttaaatcagccgcaatgctggcggtttttgctgttagcgccgtcgtccatgagtacgccctggccgtgtgcctatcttttttttaccccgtgctgtttgtgttgttcatgtttttcggcatggcttttaattttattgttaatgactcacgtaagaaaccaatctggaacgtgttgatgtggactagtctgtttttggggaacggggtgcttttatgcttttatagtcaggaatggtatgctagacagcattgcccactgaagaaccctacctttctggactatgtccgacctcgcagctggacctgccgttacgtcttctag

SEQ ID NO: 207208 - DNA, 1479 bp, synthetic construct
  misc_feature 1..1479: note = Description of Artificial Sequence: Synthetic coding sequence
  source 1..1479: mol_type = other DNA
atggagctgaagcccttcttcatgaaggaggtgggcagccacttcgacgattttgtcaccaacctcatcgagaagtcagcttccctggataatggcggatgtgcgctcacaaccttcagcgtcctagagggggagaagaataaccacagggctaaagacctccgagcccctccagagcaggggaagattttcatcgctaggcgctcgctgcttgacgagctgctggaagtggaccatatacgcactatctaccacatgttcattgccttgcttattctgttcatcttgtctaccttggtggtggactatatagacgaaggaaggttagttctggaatttagcttgctctcttatgccttcggaaagttccccactgtggtttggacgtggtggatcatgtttctgagtaccttcagtgtcccctattttttgttccagcactgggccacaggctattccaagagctcccaccccctaattcgatccctcttccatggatttctctttatgatattccaaataggcgtactgggctttggacccacttacgttgtactggcctatacattgcccccagcctctcggttcatcatcatttttgaacagataaggtttgtgatgaaggctcactctttcgtgcgggagaacgtgccccgcgtcctaaactcggcaaaagagaaatctagcacagtcccaatcccgacagtcaaccagtacctgtattttttgttcgcccctacacttatatatcgggattcataccctcgtaaccccacagttcgatgggggtatgtggccatgaagttcgctcaggtcttcggctgcttcttctacgtgtactacattttcgaaaggctgtgcgcccctctgttcagaaatatcaaacaggaaccattcagtgcacgagtcctcgtgttgtgcgtgttcaattccatactgccaggggtcctcatcctcttccttacattttttgccttcctacactgctggctgaatgcttttgccgaaatgctccggttcggggatagaatgttctataaggactggtggaattcaactagctattcgaactactatcgtacttggaacgtggtggtccacgactggctgtactattacgcctacaaagacttcctctggtttttttccaagcgctttaagagtgctgcgatgctcgcagtgttcgctgtgagtgccgtcgtgcacgaatatgccctggcggtgtgtttaagttttttctacccagtgctgttcgtgctgttcatgttttttggaatggcgtttaactttatcgtcaacgactcacggaagaagcccatttggaatgttctaatgtggacctcactgtttcttgggaacggcgtcctactgtgcttctatagccaggaatggtatgcaagacagcattgccccctcaaaaacccgacattcctggactatgtgaggccccgctcctggacctgtcgctatgtgttttag

SEQ ID NO: 207209 - DNA, 1569 bp, synthetic construct
  misc_feature 1..1569: note = Description of Artificial Sequence: Synthetic coding sequence
  source 1..1569: mol_type = other DNA
atggagcccggcggcgcccggctgcggctgcagcggaccgagggcctgggcggtgaaagagaacgtcagccatgtggcgacggtaataccgagacacaccgggcgcccgatcttgtgcagtggacacgacatatggaggccgtgaaggctcaactcttggagcaggcacaaggccaactgcgagaactcctggaccgggcgatgagggaagccattcaatcctaccccagtcaagataagccacttccccctccacctcccggctcgttgagtaggactcaagaacccagcctcggcaagcaaaaagtttttattatccggaaatcgcttctggatgagttaatggaagtccagcactttcgaactatataccatatgttcatcgctggtctatgtgtgttcattattagtactctcgctatcgattttatcgatgagggccgcctgctgctggagttcgacctgctgatattctcttttggacaattacccctcgccttggtgacttgggtgcctatgttcctatctacactgctcgcaccataccaggccctgagattgtgggcccggggcacctggactcaggccacaggcctcggatgcgcactcttagctgctcatgccgtggtcctttgcgcactgcctgtgcacgtcgctgttgaacaccagctgccgcccgcctctcgttgcgttcttgttttcgagcaagtgcgctttttaatgaagtcttactcgttccttagggaggcagtgcccggcacattgcgggcccgtcggggagaggggatccaggcacccagtttcagctcctatctgtactttcttttctgccctacactcatctatagagaaacctaccccaggaccccttacgtccgttggaactacgtggcaaagaactttgcccaagccttgggatgcgtgctttacgcctgcttcatcttaggccgcttgtgcgtaccagtcttcgctaatatgtcaagagagccgtttagcacaagagccctggtgctgtcaatccttcatgccactctgccgggaatctttatgctgttgctgatcttcttcgcatttctccattgttggttgaacgcctttgctgagatgctcaggtttggagaccgcatgttctatcgagactggtggaattccacatctttcagcaactactaccggacttggaatgtcgtcgtccacgactggttatactcctatgtttatcaggacggccttagactgttgggtgcccgcgctagaggtgtagccatgctcggtgtcttccttgtgtcagcagtggcccatgaatatatcttttgttttgtgttgggctttttttaccctgtgatgctgattctctttcttgtgatcggcggtatgctcaattttatgatgcacgatcagaggaccggacccgcttggaacgttctgatgtggaccatgctttttctagggcagggcattcaggtttctctgtactgccaagagtggtatgccaggaggcactgcccattgccccaagccactttctgggggttggttaccccgcggagttggtcatgtcatacttag

SEQ ID NO: 207210 - DNA, 3426 bp, synthetic construct
  misc_feature 1..3426: note = Description of Artificial Sequence: Synthetic coding sequence
  source 1..3426: mol_type = other DNA
atggacgacagcggcgagctgggcggcctggagaccatggagacccttacagaactaggagacgagctgactctcggagacatcgatgagatgcttcagtttgtctccaaccaggtaggagagtttccggatttgtttagtgagcagttatgctcaagctttccaggcagtggaggaagcggttcctctagcggcagttccggaagctcatcttcatcctctaacggaaggggctcatcaagtggcgccgtagatccctctgttcagaggagctttacccaggtgaccctcccatcctttagtccaagcgccgcgagccctcaggcccctaccctgcaggtgaaggtgtcccctactagtgtgcccactaccccgagagctactccaatattgcaaccaagacctcaaccacaacctcagccgcagacccagctgcagcagcagactgtcatgattacacccacattcagcactactccacagactagaatcatacaacagcctctcatctaccagaacgctgccaccagcttccaagtgcttcagccgcaggtacaatccctcgtaacctcttcacaggtgcagcccgtgaccatacagcaacaggtccagactgtccaggcgcagagagtgctcactcagaccgcaaacgggaccctgcaaactctcgccccagctacagtgcaaaccgtcgctgccccccaggtacagcaagtgccagtgctggtccagcctcagattattaaaactgactctttggtgctcacaactctcaaaaccgatgggtcacccgttatggcggccgtccagaatcccgccctgacggctctgaccacaccgatccaaacggccgcgttacaagtgcccacactggttggaagctctggaaccatcctaactaccatgcccgtgatgatgggccaagagaaggtgccaattaaacaggtccccggcggagtaaaacaactagaacctcctaaggaaggggagcgtagaaccacgcacaatattatcgagaagagatacagatcatccatcaacgacaaaattattgagctgaaggatctggtgatgggcactgacgcaaagatgcataaaagtggcgtcttacgtaaagcaatcgactatattaagtacctgcagcaggttaaccataaacttcgacaggagaatatggtgttgaaattagctaatcaaaaaaataagctgctgaaaggtattgatctggggtccctggttgataatgaagtagatttgaaaatcgaggactttaaccagaatgtgttactgatgagtcctcccgcgagtgattcaggctcccaggcaggcttcagtccttacagcatagacagcgaaccaggtagtccactcctggatgacgccaaggtaaaggacgagccagattctccaccagtcgctctcggcatggtggataggtccaggatcctgctttgcgttctgacctttttgtgcttgagtttcaacccactgacatcccttctacagtggggcggggcccatgattctgaccagcacccacacagcggcagcgggagatccgttctgtctttcgagagcgggtctggcggttggttcgactggatgatgcctaccctgctgctatggctagtgaatggcgtcattgtcctgtctgttttcgtaaaactgttagttcatggcgaacccgtcatacggccccattccagatcgagtgtaacgttttggcgacaccgaaaacaggctgatctggatctggcacggggcgatttcgccgctgctgccggtaacctccaaacatgcctcgctgtcctgggaagggccctacccacgtcccgtctggatttggcatgttctctatcttggaatgtcatccggtatagcctgcagaagctgagactagtcagatggctcctgaaaaaggtgttccagtgtaggagggctactccagctaccgaggcaggattcgaagatgaggccaagacgagcgctcgggatgccgccctggcataccatagattacatcagctgcacatcaccggcaaattgcccgccggaagcgcatgttccgacgtgcacatggctttgtgcgcagttaatcttgctgaatgtgctgaggagaagatcccccctagcacattggtagaaatccacttgaccgcagcaatggggcttaaaactcgatgtggcgggaaactcgggtttctagcgtcttatttcctgtcccgcgcccagtcactctgcgggcccgaacacagcgccgtgcctgacagcctgaggtggctgtgccacccactgggacaaaagttcttcatggagcgctcctggagtgtgaaatcggcggctaaggaaagcctgtactgcgcccagcgcaaccccgccgatcccattgcccaggtgcatcaggccttctgtaaaaatctcttagaacgggcgatcgagtccttggtgaagccacaggccaagaagaaggctggtgatcaggaagaggagagctgtgaattctcttccgcgctggagtacctgaagctgctacactcctttgttgattcagtgggcgtcatgtctcccccgctatctagatcctccgtgctgaagtcggccctggggccagacatcatttgcaggtggtggacttcagcaatcacagtggcaatctcctggctgcagggtgatgatgcagccgtgcggagtcatttcactaaggtagaaagaatccctaaagccttggaggttactgaaagccccctagtgaaggccatcttccacgcctgcagggccatgcacgcatccctgcctggcaaggccgatggacaacaaagttctttttgtcattgcgagcgggcctccggacacttgtggagctcccttaacgtgtccggggcaacaagcgaccccgcgcttaaccacgtggttcagttgttaacatgcgacctgttgttatctctgaggacagcattatggcagaagcaggctagcgcgagccaggccgtgggagaaacctatcacgcgagtggcgccgagttggctggatttcaaagggacctggggagcctgcgtcgcctcgcacactcgtttcggcctgcatacaggaaagtttttcttcacgaagctactgtgcggcttatggctggagcctctccaacacgtacccatcagctgctcgaacactccctgaggaggaggactacccagtctactaagcacggcgaggttgatgcttggccgggacagagagagagagcaaccgcaatactcttggcctgccgccatctgccgctcagttttctgtcatcacctggtcagcgtgccgtgctcctagccgaagccgcaaggacactggagaaagttggcgaccggagatcatgcaatgattgtcagcagatgatagtgaagttaggtggcggaactgcgatcgccgcgagctag

SEQ ID NO: 207211 - DNA, 2055 bp, synthetic construct
  misc_feature 1..2055: note = Description of Artificial Sequence: Synthetic coding sequence
  source 1..2055: mol_type = other DNA
atggacgacagcggcgagctgggcggcctggagaccatggagaccttaaccgaactaggcgatgagcttacactgggagacattgacgagatgcttcagtttgtgtcaaaccaggttggtgagtttccagacttgttttccgagcagctgtgtagttcctttcccggcagcggcggtagcggatcctcatccggcagttccggaagcagcagcagctcgagcaacggtagaggaagcagttcaggtgctgtcgatccctcagttcagcgaagctttacccaggtgacactgccaagcttctcacccagcgcagcttctccccaggcccctactctgcaggtgaaagtgtctccgactagtgtacctactacccctcgggccacccccatactacaaccacggccacagcctcagccccagccgcagacccaactccaacagcaaacggtcatgatcactccaacgttttccaccacaccccagacccgaatcattcagcagcccttaatctatcaaaacgctgccacctccttccaagtcctccagcctcaggtgcagtcgctggttaccagttcacaggtccaaccggtgaccattcaacaacaagtccagaccgttcaggcccagcgcgtactgacccagacagctaatggcaccttgcagaccctggctccagccaccgtacaaaccgttgctgcgccccaagtgcagcaggtgccagtgctcgtgcagccccaaatcatcaagacagactcattggtgcttactacactgaaaactgatggttctcctgtcatggctgccgttcaaaacccagccctgacagctttgactacccccattcagaccgccgccttacaggtcccaacgcttgtgggaagtagtggtactatccttacaacaatgcccgtcatgatgggccaggaaaaggtgcccatcaaacaggtgcctggcggggtgaaacagctggagcccccgaaagagggagagcggcgaacaactcacaatatcattgagaagagatacagaagttccatcaatgataaaattatagagctcaaagacctcgtcatggggactgatgccaaaatgcataagtctggtgtgttaagaaaggccatcgattacattaagtatcttcagcaggtgaaccacaagctccggcaggagaacatggtcttaaagctcgctaatcagaagaataaactgctcaaggggatagatttaggtagtctggtcgataacgaagtggaccttaagatagaggattttaaccagaacgtccttctcatgagcccaccagcctccgattcgggatcccaggccgggttcagtccttattcgattgacagtgagcctggatcccccttgctagatgacgcaaaggtgaaagatgagcctgattctccccctgtggcactgggcatggtggaccgtagtcggattctgctttgtgtgttgacattcctctgcctgtctttcaatccacttacctcactgctgcaatggggaggtgcccatgacagcgaccagcacccccactctggcagcggacggtccgtattgagcttcgaatccggaagtgggggatggtttgattggatgatgcccacgctgctcctttggctggtcaacggggtcatcgtcctctccgtgttcgtaaaactgcttgttcacggagagccagtgatcaggccccactcaaggtcaagtgttactttctggaggcaccggaaacaggcagacctggacctggctcgcggcgtgtacggtaagaagtctggcgcaactcactccattgaagaagagttgaacattcacatctcaagaggcactcgcacccggacactgctgtctagtcggagattctgttcctgttgtaggcaaccaaccaatctccctggcagctttggacccggtaccgcgcacctccctccaggcccaggcctacagccccttttggaacgggatccactgcaacccgcagaagctacacccggcgccttggcagctcaagagtctctgcctgtaccagcgggccacgcttcacactag

SEQ ID NO: 207212 - DNA, 3309 bp, synthetic construct
  misc_feature 1..3309: note = Description of Artificial Sequence: Synthetic coding sequence
  source 1..3309: mol_type = other DNA
atggacgacagcggcgagctgggcggcctggagaccatggagaccttgacggagctgggagatgaactgactctcggagacattgatgagatgctccaattcgtcagtaatcaagttggagaattcccagacctgttttctgagcagctttgctcaagctttccaggatcgggcggctcaggttcctcctctggcagctcagggagcagctcctctagctccaatggtaggggctcttcgtcgggggcggtagacccctctgtgcagcgctcctttacacaggtgaccctgcccagcttctctccgtcagccgcttccccacaagctccgaccctacaagtcaaggtgagccctacatcggtgcccactactcctcgggccaccccaattctgcagcctcgccctcagccccaaccacagccacagacccaattacagcagcagactgtgatgattacccctaccttctccacaactcctcaaacacggattattcagcagcccctgatctatcaaaacgctgcgacgagttttcaggtgttacagccccaagtgcagtctcttgtcactagtagccaagtccagcccgtgaccatccagcagcaagtccaaactgtccaggcccagcgggtgctgacccagaccgctaatggcaccttgcagactctggctcctgcaactgtgcaaaccgtcgcggctccgcaggttcagcaggtgcctgtgctcgtacagcctcagataattaaaacagactcgctcgtgttgactacactgaagacagacgggagtccagttatggcagctgtccaaaacccagctctgaccgcccttacaacaccaatccaaacagctgctctgcaagtcccaacactagtcggcagttccggcacaattttgactacaatgccggtgatgatgggccaagagaaggtacccatcaagcaggtgcctgggggcgtcaaacagctcgagccaccgaaagagggtgagaggcgtaccactcataacatcatcgaaaagaggtacaggagctcaatcaacgacaaaattatcgagctgaaagatctggtgatggggaccgacgctaaaatgcacaagtccggggtgctccggaaagcgatcgactacatcaagtacctacaacaggtgaatcacaagctccggcaggaaaatatggtcctcaagttagcgaatcagaagaataagttgctcaagggaatcgatctgggctcactcgttgataatgaggtcgacctgaagatagaggacttcaatcagaacgtcttgctcatgtctccccctgctagcgattcaggatctcaggcaggattttctccttactccattgactctgagcccggttccccactcctcgatgatgcaaaagtgaaggacgagcctgactcaccaccagtggctcttgggatggtggatcggtcccgcattctgctttgcgtgttgacctttctttgcctgtcatttaacccactcaccagtttgctgcaatggggaggggcccacgacagtgaccaacacccccatagcggaagcgggcggagcgtgctcagctttgagagtgggagcggaggctggttcgactggatgatgcctacccttctgctgtggctagtcaacggggttattgtgctgtcggtattcgttaagctgctcgtacacggagagccggtgattagaccccattccaggtcctccgtgaccttctggcggcatagaaagcaggccgacctggaccttgctagaggcgacttcgccgcagctgcaggtaatctgcagacatgcttggccgtgctcgggagggctcttccaacaagtcgcctggacttggcttgttctctcagctggaacgtgataaggtactctctgcaaaagctcagactcgtgcgctggctactgaagaaagtgttccaatgtcgacgggccaccccagctaccgaggctggctttgaggatgaagctaagacgagcgcacgagacgccgcattggcttaccacaggcttcaccagctgcacataacagggaaactcccagcgggctcggcctgcagcgatgttcacatggccttgtgcgcagtgaatctcgccgaatgcgccgaggagaaaattcccccaagcaccttggtggagatccacctaacggctgctatggggttgaagacacgctgcggcgggaaactgggcttcctggcctcctattttctgtctagagcacagagcctctgtggccctgagcactctgccgtgcccgattccctccggtggctgtgccacccactgggtcagaaatttttcatggagaggagctggagcgtgaagtcagcagctaaagaaagtctgtactgtgcccaaagaaatcctgccgatcctatcgcccaggtacatcaggctttttgtaagaatctgttggaaagggcaatcgaatcgttagtcaagccgcaggcgaagaaaaaagctggagaccaggaagaggagtcctgcgaattttcatcagctctcgagtatctgaaattgctccactcctttgtggactctgtgggcgtcatgtcacccccattgtcccggtctagtgtgctgaagtccgccctagggcctgatataatttgtagatggtggacctctgctataactgttgctataagctggctgcaaggggatgatgccgcggtgcgcagccattttacaaaggtggaacgcattcccaaggccctagaagtaacagagagcccgctcgtgaaagctatcttccatgcatgtcgggcaatgcacgcatcccttcctggaaaagcagatggtcagcaatcatccttttgtcactgtgaaagggcgtccggacatctgtggtcatccctgaacgtatctggggctacttctgatccggccctgaatcacgttgtgcagttgctgacctgcgacctcctgctttctttgaggactgcattatggcagaagcaagcgtcggctagtcaagcggtgggagagacgtatcatgctagcggagccgaacttgctggctttcagcgagacctaggtagcttgaggcgactcgctcactccttcagacctgcctaccgcaaagtgtttctccatgaggctaccgtgaggctgatggcaggcgcctcgcctacccggacgcatcagttgctcgagcatagtttgcggagacggaccacacaaagcaccaaacacggggaggtcgatgcgtggcctggacagcgtgaaagagctactgccatactgctggcctgccgccacctccctttgtcatttttgccctgcctgcagccgtcctag

SEQ ID NO: 207213 - DNA, 648 bp, synthetic construct
  misc_feature 1..648: note = Description of Artificial Sequence: Synthetic coding sequence
  source 1..648: mol_type = other DNA
atgcacgccagcctgcccggcaaggccgacggccagcagagcagcttttgccattgcgagagggcctccggacacttatggtcatccctgaatgtgtccggggccacatctgatcctgcactgaaccatgtcgtgcaactgctcacttgcgaccttctactgtccttacgtaccgccctgtggcagaagcaggcctctgcttcacaggccgtgggggagacatatcacgcaagcggagccgagctcgctggtttccagagggacttagggtccctgagacgtctggcacattcctttcgtcccgcttatcgaaaagtgttcttgcatgaggcaacggtgcgccttatggcaggggcaagtccaacacgcacacaccaactgctagaacacagcttaagaagacggacgacccagtccactaagcatggagaagtggatgcctggcccggacagagagaaagggccacagcgatactgctcgcctgtaggcacctgcctctgagctttctgtcttcccccgggcagcgcgcggtcctcctggctgaagcggcccgaactctcgagaaagtgggcgaccgacgatcctgcaacgactgccaacaaatgatagtgaagctgggggggggaaccgccattgctgcctcgtag

SEQ ID NO: 207214 - DNA, 900 bp, synthetic construct
  misc_feature 1..900: note = Description of Artificial Sequence: Synthetic coding sequence
  source 1..900: mol_type = other DNA
atggacctggtgctgcgggtggccgactactacttcttcaccccctacgtttatcctgctacctggccagaagacgacattttccgacaggcaatctcattgttgatcgtgaccaacgttggggcttacatactgtactttttttgtgcgacactttcttactatttcgtgttcgatcatgccttgatgaaacaccctcaatttttaaagaatcaggttagacgcgaaattaagtttacggtacaggcgctaccatggatctccattctgactgtggcattgttcctgctggagatccgggggtattccaagctgcacgacgatctgggggaattcccttacggactgtttgaattagtcgtctctatcatctcttttctattctttaccgacatgtttatatactggatccacagggggctccatcaccgtttagtgtataaacgacttcataagcctcatcacatttggaagatccctacgcctttcgcaagtcatgctttccatccgatcgatggctttctccagagtcttccctaccatatatacccattcatctttcctctgcataaagtggtatatctttctctgtatatactggttaacatctggacaatttcaatccatgacggggacttccgcgtacctcaaatcctccagccttttataaacggctctgcacaccacacagaccaccatatgttttttgactacaactatggccaatactttaccttatgggaccgcattggaggatcatttaagaacccaagctcttttgagggtaaggggcccttatcctatgtcaaagaaatgacagagggaaagcggtcatcgcattcaggcaatggatgtaagaatgaaaagctcttcaacggcgaattcaccaagacggagtag

SEQ ID NO: 207215 - DNA, 900 bp, synthetic construct
  misc_feature 1..900: note = Description of Artificial Sequence: Synthetic coding sequence
  source 1..900: mol_type = other DNA
atggacctggtgctgcgggtggccgactactacttcttcaccccctatgtgtacccggcaacgtggcctgaggatgacatctttcgccaagcaatctcactcctcattgtcactaacgtcggcgcatacattttatatttcttttgtgccacactgtcgtattatttcgtgtttgatcatgctctaatgaagcatcctcagtttctcaaaaatcaggtgaggagagagataaaattcactgtgcaggctctgccgtggatatctatactgaccgtcgcactattcctgctcgagatccgcggctattccaaacttcacgacgacctgggcgaattcccctatggcttattcgagttggtggtttcgataattagtttcctgttttttaccgatatgtttatttactggatacatcgtggtcttcaccatcgcttagtgtataaaaggctccataagccccatcatatctggaagatccccacaccttttgcctctcatgcttttcacccaattgatggctttttgcagagcctgccctaccacatctacccgttcattttccctttgcataaagtggtgtacctctctctctacatactcgtgaacatctggaccatcagcatccacgacggcgattttcgcgttccacagatactacagcccttcattaacggcagcgcacaccacaccgaccaccacatgtttttcgattataattacgggcagtacttcacactgtgggatagaatcggaggctccttcaagaacccgtcaagcttcgagggaaagggccccctcagttatgttaaagaaatgactgaagggaagaggagtagtcacagcggtaacggctgtaaaaatgaaaaactgtttaacggagagttcaccaagactgaatag

SEQ ID NO: 207216 - DNA, 192 bp, synthetic construct
  misc_feature 1..192: note = Description of Artificial Sequence: Synthetic coding sequence
  source 1..192: mol_type = other DNA
atggagggcgccggcgccggcagcggcttccggaaggagctggtgagtcggctgctccacttacatttcaaggacgacaaaactaaggaagcggccgtgaggggagtgcgccaggcacaagccgaagacgctctacgcgtggacgttgaccaactcgagaaagtgctgcctcagcttttgctggacttctag

SEQ ID NO: 207217 - DNA, 246 bp, synthetic construct
  misc_feature 1..246: note = Description of Artificial Sequence: Synthetic coding sequence
  source 1..246: mol_type = other DNA
atggagggcgccggcgccggcagcggcttccggaaggagctggtgtcacgcctgctccacctacatttcaaagatgataaaacaaaagttagcggtgatgccctacagctgatggtggaattactaaaggtcttcgtcgtagaagccgcagtaaggggagtccgccaggctcaggccgaagacgctcttcgcgtcgatgtggaccagctggaaaaagtgttgccacagctcctcctggatttctag

SEQ ID NO: 207218 - DNA, 2121 bp, synthetic construct
  misc_feature 1..2121: note = Description of Artificial Sequence: Synthetic coding sequence
  source 1..2121: mol_type = other DNA
atgggcggcaagggcggcggcgacacccggggccccgtgctgttcccctgccagttggcccaggccctctcaccgcgccgtgcgttccctcgggagctgaaagagaaagggcagagaatgtcctcacagccagcaggtaaccaaactagcccgggagctaccgaggattactcctatggatcatggtacattgacgagcctcaggggggggaagagctccagcccgaaggggaggtccctagctgccacacatccatacctccaggcctctatcatgcttgcctcgcttctctttctatcctagtcctccttttgttggcaatgctggtccggcgcagacagctctggccagattgcgtccggggacgacctggactgccatcaccggtagacttcttagctggggatcgccccagagctgtgccagctgccgtgttcatggtgctgctctcatccctctgcctgctgctgcctgatgaagatgcactcccatttctcacgctggcctcggctccaagccaagatgggaaaaccgaagctccccggggcgcatggaagattctgggactgttctactatgccgctctgtattacccactggccgcatgcgccaccgcaggccatactgctgcacacctgttgggctctactttgtcttgggcccacctgggagtccaggtgtggcagcgagcagagtgtccacaagttcccaagatttacaaatactattctctgctagcaagtttgcctctgctgctgggattgggctttttgagcctgtggtatccggttcaattggtcaggtcatttagccgcagaacgggtgcggggagtaagggcctgcagagcagctactccgaagagtatctgcgtaaccttctgtgcagaaagaagctggggtcttcataccatacctctaagcacggtttcttgtcctgggccagggtctgcctacgtcactgcatctataccccacaacccgggttccacctgcctctcaaactcgtgttaagcgcaaccctcactggaacagccatatatcaggttgccttgttactactggtcggcgtggttcccacaattcaaaaagtgcgtgcaggagtcacaaccgatgtgtcctacctcctggcaggcttcggaatcgtgttaagcgaagacaaacaggaggtggtcgaattagtcaagcaccacttatgggctctcgaagtctgctacatcagtgctctggtgctgtcctgcctgcttaccttcttagtactgatgaggtcgttggtaacccacaggacaaaccttcgagctcttcaccgcggggccgcactggatttgtcacctctccatcgaagtccccaccctagccgccaggccatattctgttggatgtcgttctccgcttatcagactgcctttatctgcctcggactcttggtacagcagatcatctttttcttggggacaaccgctctggcctttctggttctcatgcctgtgctgcacggccgtaacctgttgctcttccggtcactagaatccagctggcctttttggctgaccttggccttagcagtgatcctacagaacatggccgcacattgggtgttcctcgagacccacgatggtcaccctcagttgacgaaccgaagggttctctacgcagctacctttctgctattccccctcaatgttctagtgggtgccatggtcgccacttggcgcgtcctcctgtccgctctatataatgcaatccacctgggacagatggatctgtccttgttgcctccacgggccgcaactcttgatcctgggtattatacctatcgcaactttctaaagattgaggtctcacagagccatcctgctatgacagccttctgctctcttctcctccaggcccagtccctgcttccaagaacaatggccgcaccccaggactccctccgacccggcgaagaagatgagggaatgcagcttctgcagactaaagattcaatggccaagggcgcccgccccggagcaagccggggacgggctaggtggggtttggcgtataccctgttacataacccaaccctccaggtcttcaggaagactgccctgctcggggctaatggggcacagccctag

SEQ ID NO: 207219 - DNA, 2004 bp, synthetic construct
  misc_feature 1..2004: note = Description of Artificial Sequence: Synthetic coding sequence
  source 1..2004: mol_type = other DNA
atgagcagccagcccgccggcaaccagaccagccccggcgccaccgaagactactcttatggctcctggtatatcgacgaacctcaagggggagaagagctgcagcctgagggggaagtgcccagttgccacacatctatcccaccagggttatatcatgcctgcttggccagtctttctatattggtcctactgctgctggctatgctggtaaggcgaaggcagctatggccagactgcgtgcgcggccggcccggtctcccctcccctgtggactttctggccggcgaccgcccccgggcggtgcctgcggcagttttcatggtgctgctgtccagtttgtgtctgctgttgcccgatgaggacgcacttccttttttgacgctcgcatccgcgccttcccaggacggcaagactgaggccccccgaggggcgtggaaaattcttgggcttttttactatgctgcgctctactaccctctggccgcctgcgccactgctggtcatactgcagctcacctgttaggctctacgttaagttgggcacatctgggagtacaagtttggcagagggccgagtgtccccaggtgcctaagatctacaagtattactcactcctggcttctctgccactattgctggggctcggctttctgtctctctggtatccagtacagctggtcagatccttttctaggagaactggggctgggtcgaaaggtttgcagtccagctatagtgaggaatatctgagaaacttactgtgcagaaagaagctcggcagctcttatcacacttctaaacacggctttctgtcctgggccagggtgtgcctgagacactgtatatataccccacagcccggttttcatttgccactgaagctggttctgtccgccacactcactgggacagccatatatcaggtggctctgcttctgctggtgggcgtggttccaactattcagaaagtcagggccggggtgacaaccgatgtcagctatctgctcgcaggtttcggtatcgtcctgtccgaagacaagcaggaggtggtagagctcgtgaagcaccacttgtgggcccttgaagtgtgctatatctctgcccttgtgctgtcctgtttactgacttttctggtgctgatgcggtccctggtgacgcatcgaacaaacttgcgggccctgcataggggggcagctctggaccttagtcccttacatagatccccacaccccagtcggcaagcaatcttttgctggatgagcttttcagcctaccaaaccgccttcatatgcctcgggttactcgtgcagcagatcatattcttcctcgggactacagccctggccttcctggtgctcatgccagttctccatgggagaaacctcctgttattcaggagcctcgaatcttcctggccattctggttgacactggccctcgcagtgatactgcaaaacatggccgctcattgggtgttcctcgagacccacgatggtcatcctcagttgacgaacaggcgagtgttgtatgccgctacatttcttctgtttcctctaaacgtgctggtcggcgccatggtcgctacatggagggtcttgttatctgctttgtataacgctatccacctcggccagatggacctatccttgttaccccctcgtgccgctactcttgatcccggttattacacttatcgaaacttcctgaaaatagaggtgtcgcagagccacccggcaatgactgcattctgctctctgctccttcaggcccagtcactcctgccccggaccatggcggcaccacaggactcacttcgccccggtgaggaagatgagggtatgcagctgctgcagaccaaagattctatggccaaaggcgcgcggccaggggcctcccgcggccgagctaggtggggcctcgcttacacactgctgcacaaccctacactacaggtgtttcggaagacggcgcttctcggtgccaatggagcacagccatag

SEQ ID NO: 207220 - DNA, 2004 bp, synthetic construct
  misc_feature 1..2004: note = Description of Artificial Sequence: Synthetic coding sequence
  source 1..2004: mol_type = other DNA
atgagcagccagcccgccggcaaccagaccagccccggcgccaccgaggactattcttacggctcttggtatatcgacgagcctcagggcggcgaggagctgcagcccgagggagaggttccgtcatgtcatacaagcattcctccggggttgtatcatgcgtgcttggccagtctctctatattggtgcttctcctgctggctatgctcgttagacggcgccaactctggcctgattgtgttaggggacgacctggactgccctcccctgtcgacttccttgccggcgatcggcctagagccgttcctgcagcagtgttcatggtcctgctgagcagtctgtgtctgcttctacctgacgaagatgccctcccctttcttacccttgcatctgcgccgagccaggacggaaaaactgaagctccaaggggagcttggaaaatacttggccttttttattacgccgccctttattacccactagccgcctgtgcaacagccggacacacagccgcgcacctcctcgggtcgaccctatcctgggctcacctaggtgttcaggtgtggcagagggccgaatgcccgcaggtaccgaagatctacaaatactactctttactcgcatcactgccgctcctgctcgggctgggcttcctctccctgtggtaccccgtgcaactcgtgcggtcattttcacgacggaccggtgccgggagcaaaggtctgcagagctcatatagcgaagagtacctgcgaaatctcctgtgcagaaagaagttgggctccagttaccatacttctaagcacgggtttctctcttgggcccgggtatgcctgcgccactgcatctacacaccacaaccaggatttcacctccctctcaaattggtcctaagtgccactctgaccggaacagccatatatcaggtggctcttctgctcttagtaggtgtggtaccaactattcagaaggtgcgggcaggcgttaccaccgatgtaagctatctacttgccgggttcgggattgtgctgtccgaagacaagcaagaggtcgttgagctggtaaagcaccacctgtgggcactggaggtgtgttacatctcggccctggtgctcagttgcttgttaacatttctcgtcctgatgagaagtcttgttacccaccgcacaaacttgcgtgccttgcaccgcggggctgcattggacctctctccactccaccggtccccccatcctagtcgccaggccattttttgctggatgtctttcagcgcctaccaaacggccttcatctgcttgggtctgctagtgcagcagattatcttttttctgggcaccactgctctcgcttttcttgtactaatgcctgttctgcatggcagaaaccttttgctctttagatccttggaatctagttggcctttctggctgacactggccctcgctgtgattctccaaaacatggcagcccattgggtctttctcgaaacgcatgacggacaccctcagttaacaaatagacgggtcctttacgcggcgaccttcctgctcttccctcttaacgtgctggtgggagccatggtggccacgtggagagtcctattgagtgctctgtataacgcgattcacctcggacagatggacctcagcttgctgcctccacgggccgcaacgctggaccccggctactacacctacagaaacttcttgaagatagaggtgtcccagagccacccagctatgactgccttttgctccctcctcttgcaggcacagagccttctccctcggaccatggcggctccccaggattctctgcggcccggcgaagaagatgaaggaatgcagctgctgcaaaccaaagactctatggcaaagggtgcaagacctggtgccagtcggggacgggcccgatggggcttggcctatacactgcttcacaatcccactcttcaggtcttccgaaagacggcgctactgggtgccaatggggcccagccttag

SEQ ID NO: 207221 - DNA, 1800 bp, synthetic construct
  misc_feature 1..1800: note = Description of Artificial Sequence: Synthetic coding sequence
  source 1..1800: mol_type = other DNA
atgctggtgcggcggcggcagctgtggcccgactgcgtgcggggcagacctggactgccctctcccgtcgattttttagctggggatcgtccgagggccgttcccgccgcagtgttcatggtcctgcttagcagcctatgcttgctgctgcctgacgaggacgccttgccctttttgaccctcgctagcgctccttctcaggatggcaaaaccgaagcccctcggggcgcctggaagatcctcggactgttttactatgcagctctgtattacccgctggccgcctgtgcaacggctggtcacaccgccgctcatctcctggggagcacactgtcatgggcccatcttggtgtgcaggtgtggcagcgcgctgagtgtcctcaggtgccaaaaatctacaaatactattcactcctggctagcctcccactgctgcttggactgggctttctgagcctctggtaccccgtacaactagtccgctcattctctcggcgaacaggcgccgggtctaaaggcctccagtctagttactccgaggagtatctgcgcaatttgctgtgccggaaaaagttaggatcctcttaccacaccagcaaacatggatttctgtcctgggccagagtctgtcttcgccattgtatttacaccccccaacccggattccatctacctctcaagctcgtgttatccgcgactctgaccggaacggccatttaccaggtcgccctgttgttattagtgggcgtagtgcctactatccagaaggttagggccggcgtgaccacagatgtttcctacctcctcgcgggctttggaattgtgctgagtgaggataagcaggaggtggttgagctggtgaaacaccacctgtgggctctggaagtgtgctacatttccgctctcgtactcagttgcctgctgacttttttggtgttaatgagaagtctggtcactcaccgaaccaatctgcgggcactgcatcgcggcgctgccttggatttgtcacccctccatcgttctccccacccatcgcgtcaggccattttctgttggatgtccttctcagcgtaccagaccgccttcatatgcctgggcctgctggtccagcagataattttcttcctgggaactactgccctggcattcttggtgctcatgcctgtgctgcacggaagaaaccttctcctctttcggtcactggaatccagctggcccttttggttgaccctggccttagccgttattttgcagaatatggctgcacattgggtgtttctggaaacgcatgatggccatccccagcttacaaatagaagagttctgtacgcagctacctttctgctttttcctcttaatgtgctcgtaggcgctatggttgctacctggagggtcctcctctcagcactgtacaatgctattcacctcggacaaatggacctgagccttcttcccccgcgtgccgccaccctcgatcctggctattatacatataggaacttcctcaagattgaagtgtctcagtctcacccagcgatgaccgccttctgctcccttttattacaggcccagtccctattgcccaggacaatggcagcgccccaggattctcttaggccaggagaagaggacgaaggaatgcagctgctgcagacgaaggattctatggctaaaggggcacggccgggtgcgtcacgcggacgggcacgctggggccttgcctacacccttctgcacaaccccacactccaggtctttcgcaagaccgccctacttggcgctaacggtgcccagccttag

SEQ ID NO: 207222 - DNA, 1977 bp, synthetic construct
  misc_feature 1..1977: note = Description of Artificial Sequence: Synthetic coding sequence
  source 1..1977: mol_type = other DNA
atgagcagccagcccgccggcaaccagaccagccccggcgccaccgaagattattcctatggctcatggtacatagatgagccccaggggggcgaagagctgcagcctgaaggggaggtgccttcttgtcatacaagcatcccccccggcctgtaccacgcctgtctagcaagtctcagcatactcgtattgttactgcttgcaatgctggtgcgcaggagacagctctggccagactgcgtgagaggaagaccaggactaccccgccccagagccgtgcctgctgcggtgtttatggttctactctcttctctatgtctcctattacccgatgaggatgccctcccattcctgacgcttgcttctgcaccgtcacaggacggaaagacagaggcacccagaggcgcctggaagatcctcggcctattctactacgcagccctgtattaccccctcgctgcctgcgctactgctggtcatactgccgctcacttgctcggcagcacactgtcgtgggcccatctaggcgttcaggtctggcagcgcgcagagtgtcctcaggtgccaaagatttataaatactattccctgctggcttccctgccactcctgctgggattagggttcctgagcctatggtaccccgtacaattagtccgatcctttagtcgccgtaccggtgccggtagtaagggcctgcaatcttcttattcagaggagtacctgcggaacctcctttgcagaaaaaaactgggaagcagctaccacaccagtaagcacggatttctgagctgggctcgagtgtgcctgagacactgtatctacactccgcagccaggctttcaccttccacttaagttggtgttgagtgccactcttacagggactgcaatataccaagtagccctattgcttctcgtcggcgtggtgccaacaatccagaaggtgcgcgccggcgtgacaacagacgtctcctaccttctggccggttttggtatcgtcttgagcgaggacaagcaggaggtggtcgagctggttaaacaccacctgtgggccttggaagtgtgctacatttctgcccttgtcctgtcatgtctcctcacatttctcgtcctgatgcggtcccttgttacacaccgtaccaacctgagggcgctgcacaggggagccgctctagatctgtccccactgcaccgaagtccacatccaagccggcaggctattttttgttggatgtcattttctgcctatcaaacagccttcatttgtttgggactgcttgtgcaacagattatattttttttggggaccaccgcgctggccttcctagtcctcatgccagtgctacatgggcgtaacctgctgctcttcagaagtctcgagagctcttggccattctggttgacactggccttggccgttatcttgcagaatatggcagcccattgggtgtttctggagacccacgatggacatccacagctgacgaatagaagagtgctctacgcagcgaccttcctgctgttccctctgaacgtactcgtgggggctatggtcgctacatggcgagtactactgagtgctttatataacgccatccatttaggtcaaatggatctgagcctgctcccccctagggcagccaccctggacccagggtactatacgtatcgaaatttcctgaaaatcgaagtgagtcagtcccaccctgcgatgactgctttctgctctttactccttcaggcgcaatctttgttgcctagaacaatggctgccccacaggactccctgagaccaggcgaagaagacgaaggtatgcaactgctgcagactaaagacagtatggcaaaaggtgcacgccctggggcatctcgcgggcgggcaagatggggtttggcgtatacactattgcacaaccctactctgcaagtctttagaaaaactgcactgctaggggccaacggggcccagccttag

SEQ ID NO: 207223 - DNA, 480 bp, synthetic construct
  misc_feature 1..480: note = Description of Artificial Sequence: Synthetic coding sequence
  source 1..480: mol_type = other DNA
atgagcagccagcccgccggcaaccagaccagccccggcgccaccgaagattattcatatggaagttggtacattgacgagcctcagggcggcgaagagctgcaacccgagggcgaggtgccatcatgccatacgtctatccctccaggcctgtatcatgcgtgcctggcgtcgttatcaattttagtactgctgcttcttgccatgcttgtacgaagacggcagctttggcccgattgtgtgcgaggccgacccggccttccaagtcctgtcgattttcttgctggcgatcgcccaagggctgtgcccgcagccgtctttatggtgctgcttagttcactctgtctgctgctgcccgacgaagatgccctgccatttctaaccctggccagtgcgcctagccaagacgggaagaccgaggccccaagagggaacttgcctaagatcacagagcttcgcctggtccgcgcctggatctag

SEQ ID NO: 207224 - DNA, 2121 bp, synthetic construct
  misc_feature 1..2121: note = Description of Artificial Sequence: Synthetic coding sequence
  source 1..2121: mol_type = other DNA
atgggcggcaagggcggcggcgacacccggggccccgtgctgttcccctgccagctagcccaagcgctgtcacccaggcgagcctttcctcgcgaacttaaagagaagggccagcgcatgagctcccagcctgccggaaatcagacctcacccggcgcaacagaggactactcatacggttcgtggtacatcgatgaaccccaggggggtgaggagctccagccagagggcgaagttccatcctgccatacatccatcccaccagggctgtaccatgcctgcctggcctctttgtccattctcgttcttctcctgctcgcaatgcttgttaggagaaggcagctctggcccgattgtgtacgggggcgacccgggcttccttcacctgtggattttttggctggggaccgacctcgcgcggtacctgccgccgtgtttatggttttgctaagtagcttgtgtctgttactgccagacgaagatgctctacccttcctaactctggccagcgcaccctcccaggacggcaaaacggaagcacccagaggcgcctggaaaattctgggcctgttctactacgccgccctctattacccactggccgcctgtgccactgccggccataccgcagcgcacctgttgggatctacactatcgtgggcacacctgggggtgcaggtttggcagcgagccgaatgccctcaggtaccaaagatctacaaatattatagcctgcttgcaagcctgccgctgctgcttggcctgggctttctgagcctgtggtatccggtgcagctggtgcggtctttctcgcgccggactggcgctggatctaaggggctccaatcatcctactccgaggaatacctacggaatctgttatgccgtaaaaagcttggttcaagttatcacacatcaaaacacggatttcttagctgggcccgggtctgtcttcggcactgcatttacacgccgcaacctggatttcacttaccactaaaactcgtcctgagtgccaccctcactggcacagctatctaccaagtcgcactgctgcttctcgtgggagtggtaccaaccatccagaaggtgcgtgctggggtgacaaccgatgtgagctacctgctggctggattcggcattgttttgtcagaggataagcaggaagtggtggagctcgttaaacatcacctgtgggccttggaagtctgctatattagcgccctagttttaagctgtctcttgacctttttggtgctgatgcggtcgctggtgacgcatcgcaccaaccttcgggccctgcacagaggggcagctctcgacctgagccctcttcatcgttccccccacccttcccgccaagcaattttttgttggatgtcttttagcgcttatcagacggcgttcatttgcctgggcttgctcgtgcaacaaatcattttctttctgggcaccaccgctcttgctttcctggtactgatgcccgtgctgcacggacgcaacctgctgctttttcgatccctcgagtcgagctggcccttctggctcaccctcgccctggctgtcatactccagaatatggctgcccattgggtatttttagaaacccatgacggacaccctcagctgaccaataggagagtactgtacgccgctacttttttattatttcctctcaacgtgcttgtgggtgcaatggtggccacctggcgtgtacttctgtcagccctgtacaacgcgattcaccttggtcagatggacctgagcctgttgcctccacgagcagctacactcgatcccgggtattacacatacaggaactttctgaaaatagaagtttctcagagccaccctgccatgactgctttctgtagtctcctcctgcaggctcagtctctattgccacgtaccatggcagcccctcaggacagtttgcgccctggtgaggaggacgagggaatgcagctgctgcagactaaggacagcatggctaaaggcgctcgaccaggcgcatcaagagggcgggcacgctgggggctggcttacacattgctccataatcccaccttacaggtcttccggaagaccgcccttcttggagccaatggcgcacaaccatag

SEQ ID NO: 207225 - DNA, 2115 bp, synthetic construct
  misc_feature 1..2115: note = Description of Artificial Sequence: Synthetic coding sequence
  source 1..2115: mol_type = other DNA
atgcagatccggctgctgcgggccgagctggtggtgcccctgtggcagtttatccgacagtggccacccggcagcgatgggtggggccaaatggaagagaaggggcagaggatgagcagtcaacctgctggaaatcaaacatctcctggagcgaccgaagattatagctatggcagctggtacatagacgaaccccaaggcggcgaggagctgcagcccgaaggcgaagttccctcctgccacacatccatcccacccggactataccatgcttgtctggccagtctgtccattctggtactcttgctgcttgccatgttagtgcgcaggcgtcagctctggcccgattgtgtccgcggaagacctggcctgccatccccagtggatttcctagctggagataggccacgtgccgtcccagctgcagtctttatggtgctcctatctagcctgtgtctgcttcttccagatgaagacgctctgcctttcctgacacttgcctccgcgccatcacaggatggtaagacagaagcgccgagaggcgcgtggaaaattctaggcctgttttattacgctgctctgtactaccccctcgctgcatgtgccaccgccggccacaccgccgcccatctcttaggatctacactgtcctgggctcacctgggcgtgcaagtgtggcaacgcgcggaatgtcctcaggtacccaaaatatacaaatactacagtcttctcgcgtcccttcccctgctcctgggcctgggattccttagcctctggtaccctgtgcagcttgtgagatctttctcccgtaggacaggcgctggatctaaggggcttcagtcgtcatactccgaagaatacctgcggaatttgttatgccgcaagaagctgggtagttcttatcatactagtaaacacggttttctaagttgggcacgggtgtgcctcagacactgtatatataccccgcagcctggattccatctcccactgaagctagtgctatctgcgacattgacaggaaccgcaatctatcaggtggcactgctactgctcgtcggcgttgtacccaccatacagaaggtgagagctggcgttacaactgacgttagttatctgctagctggtttcggaatcgtgctgtctgaagataagcaagaagtggttgagctagtaaagcaccatctgtgggcacttgaagtctgctacatctctgctctggtgctgagttgccttcttacttttctggtgctgatgagaagcctcgtcactcaccgtactaacctgagggctctccatcgaggcgccgctctggatttatcccctctccataggtccccgcatcccagtcgccaagccatcttttgttggatgagcttttccgcatatcagaccgcttttatctgtctcggtctgctggtgcagcagataatcttctttctggggacgaccgcccttgcattcctcgtgctcatgccagtgctgcatggaaggaatctgttgttgtttcgtagtctggaaagcagctggcctttctggctgaccttggcgctggcagtgatcctccagaacatggccgctcactgggtattccttgagactcacgacggacatccacaacttacaaaccggagggtcctttatgccgcaacattcctcctgttcccactcaatgtgctggtgggggccatggttgcaacttggagggtgctactgagtgcactatataatgctattcacttggggcagatggatttgagcctgctgcctccaagagcagcgactctcgaccccggatactatacctataggaactttctcaaaatcgaggtttcacagtcccatcctgccatgaccgctttctgttcgctactgttgcaagcccagtccttgttgcctcggactatggccgcccctcaagattcactgagacccggcgaagaagatgagggaatgcaacttttgcaaaccaaagacagtatggcaaaaggggcaagacctggggcaagccgtgggcgtgcaagatggggccttgcctacaccttgctgcacaatccgaccctgcaggtgtttagaaagaccgcactgcttggcgctaatggcgcacagccatag

SEQ ID NO: 207226 - DNA, 1674 bp, synthetic construct
  misc_feature 1..1674: note = Description of Artificial Sequence: Synthetic coding sequence
  source 1..1674: mol_type = other DNA
atggccgccggcaccagcatgagccccgacgaggacgccctgccctttctgacactggcgagtgcgccctcccaggacgggaagacggaggcacccagaggggcatggaaaatattaggattgttctactacgcagctctctactacccactggcagcatgtgcaaccgccggacacacagctgctcacctcctcggtagtactctgtcttgggcccacctcggggttcaggtttggcagagagcggaatgcccccaggtaccaaagatctataaatattatagtcttctggcatctctgccgctgcttctcggactgggctttctttcactgtggtaccccgtacagctggtgcgttctttcagccgacggacaggcgctggcagcaaagggctacaaagttcctatagcgaagagtacctgcggaacttgctgtgtcggaagaaactcggctctagttatcacacctccaaacacggttttttatcctgggcgagagtgtgcctgaggcattgtatttatacacctcagccaggtttccacctgcccctgaagctggtcctttcagcaacactgaccgggactgcaatctatcaggtggctctactcctgctggtgggggtagtgcctaccatccaaaaggtgagggcaggggtgacaactgacgtaagttacctcctggcaggatttggcatcgtgctgtccgaggataagcaggaggtggtggaactcgttaagcaccacctttgggctctggaagtgtgctacatttccgctctcgttctcagttgcctgctgacctttctggtgctgatgcggtccctcgtgacccatcgaacaaacctgcgggcccttcatcgcggggccgcactggacctttctcctttgcaccgaagccctcaccccagtaggcaggcaatcttttgctggatgagcttctctgcgtatcagactgcctttatttgtctcggtctactggttcagcaaatcatcttctttctcggcactacagctctggcctttcttgtgcttatgccagttctacatggaagaaacttgttgctgtttcgttcgctggagtcatcgtggcctttctggctcacattagcactggcggtgattttacaaaacatggccgctcattgggttttcttagaaacacacgatggccacccccagctgactaaccgaagagttctctacgccgcaactttcttgctctttccactaaatgtgctcgttggggccatggtggccacgtggcgcgtgctgctctcagccctgtataatgcaattcacctggggcagatggacctttctctactccccccccgcgccgctactctggaccctgggtattacacttacagaaactttctaaaaatagaggtttcacagagtcatccggcgatgaccgcattctgctctctcctgcttcaggctcagtctctcctgcctcgcacaatggccgccccccaggatagcttgcgccctggggaagaagacgaggggatgcaactgctgcagaccaaagacagcatggcaaaaggcgctcggccaggtgctagtagggggcgggcccgctgggggctggcgtacacgctgttgcacaatcccacactgcaggtctttcggaaaacagcccttttgggagctaacggagcccagccatag

SEQ ID NO: 207227 - DNA, 1431 bp, synthetic construct
  misc_feature 1..1431: note = Description of Artificial Sequence: Synthetic coding sequence
  source 1..1431: mol_type = other DNA
atgggcaagctgcggctgcaggagatctacaagtactacagcctgctggccagccttccgttgctgctcggcctcggctttctgtctctctggtatcctgtgcagttggtaagaagtttctctcgaaggactggcgcaggcagtaagggtttgcagtcgtcgtatagcgaggaatacctacgcaatttgttgtgcaggaaaaagttgggttctagctaccatacaagcaaacacggcttcctttcgtgggctcgcgtgtgcctgcggcattgcatttacaccccccagccggggtttcatctgccactgaaactggttctgagcgctacactgacagggactgcaatctatcaagttgccctgctactcctggtgggagttgtgcccactattcaaaaggtgagggccggagtcaccacagatgtaagctacttgctggcgggattcggaattgtcttaagcgaagataaacaggaagtagttgagctcgtcaagcaccacctttgggccttggaagtctgctatatcagtgcacttgtgctctcatgtctgctgacattcttagttctgatgcggagcttggtcacccacagaacgaatctgagggctctgcacaggggagcagccctcgacttaagtccactgcaccgctcaccccacccttctagacaggcaattttttgctggatgagtttttccgcttaccagacggcattcatctgcctgggactcttggtccaacagattatcttcttcttaggcacaacagcacttgcctttctggtcctaatgcccgttttgcacgggcgaaacttgttgctcttcagaagtctcgagagctcatggcctttctggctgacacttgcgctggcggttatccttcaaaacatggccgctcactgggtgttcctggagacgcatgacggacaccctcaactgaccaacaggcgcgttctatacgccgcaacctttcttctgtttcccctgaatgttttggtgggggccatggtggcaacttggcgggtgcttttgtccgccctgtacaacgccatccatctcgggcagatggacctgagtttgctgccaccgagagccgctactttagatcccggctactacacatacagaaacttcttgaagattgaggtgtcacagtcccatcccgccatgactgccttctgtagcctgctgctccaggctcagagtcttctgcccagaactatggccgcacctcaagactccctccggcctggagaggaggacgaagggatgcagcttctgcagaccaaggacagcatggccaaaggggcaaggccaggagcctccagaggtagagccaggtgggggctcgcctacaccctgctacacaatcctacgttacaggtcttccgcaagaccgcacttcttggggcaaacggcgctcagccctag

SEQ ID NO: 207228 - DNA, 993 bp, synthetic construct
  misc_feature 1..993: note = Description of Artificial Sequence: Synthetic coding sequence
  source 1..993: mol_type = other DNA
atgggcaagatcgacgtggacaagatcctgttcttcaaccaggagataagattgtggcaactaatcatggccacaccggaggaaaactctaatcctcacgaccgcgcaactccccagctgcccgctcagctgcaagagctggagcatagggtggcccgccggaggctctcacaggctcgccaccgcgccactttggccgcgctgttcaataatctgagaaaaacagtgtattcccagtcggatctgatcgcaagcaagtggcaagtgcttaacaaggcaaagagtcacatacctgagctggaacagactttggacaacctccttaagcttaaggctagcttcaacctggaagacggacatgcctccagtctcgaagaggttaagaaagaatacgcatcaatgtactctggcaatgactcctttcctcagaatggatcttccccctggtacctgaatttctacaaacagacaatggatctcctaacgggctccggtatcataactccccaagaggccgccctgcccattgtgtcagccgccatcagccatctgtggcaaaatctctcagaggagcgaaaagcgagtttgcggcaagcctgggcccagaaacatagaggcccggccacccttgccgaggcatgtagggagcctgcctgtgccgaagggtccgtcaaagacagcggtgttgattctcagggggcttcgtgcagcttggtttcaactcccgaagagatactcttcgaggacgccttcgacgttgcgtctttcttggataagagcgaagttcccagcacaagtagctcttcttccgttctggccagttgtaaccccgaaaacccagaggaaaaatttcagctgtacatgcagatcatcaactttttcaaagggctctcttgcgcaaacacccaagttaagcaggaggcatccttcccagtggacgaggaaatgatcatgctgcagtgtaccgaaacattcgatgacgaggatttatag

SEQ ID NO: 207229 - DNA, 882 bp, synthetic construct
  misc_feature 1..882: note = Description of Artificial Sequence: Synthetic coding sequence
  source 1..882: mol_type = other DNA
atgggcttccccgccgccgccctgctgtgcgccctgtgctgcggcctgctggctccggctgccagagcaggctattcagaggaacgctgctcctggaggggaagtgggctgacgcaggagcctggatctgtgggacagcttgccctcgcctgtgccgagggggccgttgaatggttataccccgctggcgctctgagactaacgttgggcggtcccgatcctcgggccagacccggcatagcatgcctgcgcccagtccggccgtttgccggcgcacaagtgtttgctgaaagggccggaggagcactggaactcttgctagctgaaggccccggaccagctggagggcgctgtgtgcgctggggtcctcgggagcgccgggctctgtttctacaggccaccccacaccaggacatctcacgtagggtggcagcatttcggttcgagctcagagaggatggacgtccggagctgccaccgcaggcccatggattgggcgtagacggcgcatgcaggccgtgttccgatgccgaactattacttgcagcttgcacctctgactttgtgatccatggcatcatacacggagtcacgcacgacgtggagttgcaggaatctgtgatcacagtggtcgcagctcgggtattgcggcagacaccaccccttttccaggctggtaggtctggcgaccagggccttacctcgatcagaaccccactgaggtgtggcgtccatccgggcccgggaacgttcctgtttatgggatggagcagattcggtgaagcccgcttgggctgtgcacccagattccaggaatttagacgagcatacgaggccgccagagcagcgcatctgcacccatgcgaggttgccctacattag

SEQ ID NO: 207230 - DNA, 1197 bp, synthetic construct
  misc_feature 1..1197: note = Description of Artificial Sequence: Synthetic coding sequence
  source 1..1197: mol_type = other DNA
atgctgggccggagcggctaccgggccctgcccctgggcgacttcgatagattccaacagagttcctttgggtttctcggatcacaaaaaggctgcctctccccagagcgcgggggagtgggtaccggtgcagacgtcccacaaagctggcccagttgtctctgtcatggattgatttcctttctcggcttcttgctattattagtgacattcccaatttctgggtggttcgccctgaaaattgttcccacttacgaacgaatgattgttttcagactaggccggatccgcaccccgcaggggcccggcatggtgctgctgctgcccttcattgactccttccagcgcgtggacctccgtactagagcttttaacgtgcctccttgtaaactagccagcaaagatggggcagtgctctcagtgggagcggatgtccaattccgcatctgggatcccgtgctgtctgtcatgacagtcaaagacctcaacaccgccacccgcatgaccgctcagaatgccatgaccaaagctttactaaaacgtcccctccgcgaaattcagatggagaaacttaagatcagtgaccagctcctactcgaaattaacgacgtaacaagggcctggggtctggaagttgatcgagttgaactggccgttgaggctgttcttcagccaccacaggactcccctgctgggccaaacctcgactccacactgcagcagctcgcgcttcatttcctcggagggtccatgaatagcatggccggaggagccccctcccctggccccgctgatacagtcgaaatggtcagcgaagtggagcctcctgctccccaagtgggggcccgcagctcaccaaagcagccactggcagagggactactgaccgcgctgcaacccttcctgtccgaggctctggtgagccaggttggcgcgtgttaccagtttaatgtggtgttaccttctggaacccagagcgcttactttttggatctgaccacagggaggggtagggtgggacacggcgtcccggatggaattcctgacgttgtggtggaaatggccgaagctgatctcagagccctgctgtgtagggagctgaggccactgggggcatacatgagcggccggctcaaagtaaaaggtgatctggcaatggccatgaagttagaagccgtcctgcgcgctctgaagtag

SEQ ID NO: 207231 - DNA, 1047 bp, synthetic construct
  misc_feature 1..1047: note = Description of Artificial Sequence: Synthetic coding sequence
  source 1..1047: mol_type = other DNA
atgctgggccggagcggctaccgggccctgcccctgggcgacttcgatcgcttccagcagtcctcgttcggatttttgggcagccagaagggatgccttagtcctgaaagagggggggtggggacaggcgccgacgttccccaatcgtggccaagctgcctctgtcacggcctcatttccttcctgggttttctccttttgctcgtgacctttcccatatctggatggttcgcactgaaactagcgagcaaggatggtgcagtgctcagcgttggcgctgacgtccaattccggatttgggaccccgtgctgtccgtaatgaccgttaaagatctgaatactgccactaggatgacagcccagaacgccatgaccaaagccctgttaaaaagacctctcagggagattcagatggaaaagttgaagatatccgaccaactcctgcttgaaattaatgacgtgacaagggcctggggcctggaggtggacagggtcgagctagccgttgaggcggtgctacagcctccgcaagactcacctgcaggccccaacttggatagtacacttcaacagctcgccttgcactttctcggaggaagcatgaattccatggctggaggagccccaagcccaggtccagcggataccgtggagatggtcagtgaggtggagccccctgcccctcaggtgggcgcccgatcttcccctaaacaacccttggctgaagggcttctgaccgccctacaaccatttctgtccgaggccttggtgtctcaagtcggcgcctgctatcagtttaacgtggtgcttccatccggcactcagtcagcttacttcctagacctcaccactggccgaggtcgcgtcgggcatggcgtccctgatggtatccctgacgtggtggtagagatggctgaggcggacctcagagccttgctgtgtagagagctgagaccgctcggtgcatacatgtcaggcaggctcaaggtgaagggcgatctcgctatggcaatgaagcttgaagccgtgttgagagctctaaagtag

SEQ ID NO: 207232 - DNA, 984 bp, synthetic construct
  misc_feature 1..984: note = Description of Artificial Sequence: Synthetic coding sequence
  source 1..984: mol_type = other DNA
atgctgggccggagcggctaccgggccctgcccctgggcgacttcgatcggtttcagcagtcctcctttggcttcttgggttcacagaaggggtgcctgtcccccgagagagggggggtaggcactggggccgatgtgccacagtcatggcctagctgtctttgtcacgggcttatatcctttctagggtttcttcttctcctggtgactttcccaatttctgggtggtttgcactgaagatcgtgcccacttacgagcgcatgatagtcttcaggctgggtcgcattcggacccctcaaggacccgggatggtgctgctcttgccattcatcgacagcttccagcgagtggaccttagaactcgcgcgtttaacgtgcccccctgtaagctcgctagtaaggacggtgccgtgcttagcgttggagctgatgtgcagtttcgcatttgggatcctgtactgtcagtaatgactgttaaagatctgaacacagccacccgcatgaccgctcagaatgccatgacgaaagcgctgttgaaaaggcccctccgggagatacagatggagaaactcaaaatttctgatcaactcctactagaaattaacgatgtaacaagagcgtggggtctggaggtcgatcgagtcgagctggctgtggaagccgtacttcagcccccacaagattccccagccggccccaacctggactctaccctacagcagttggctctgcacttcctcggtggaagtatgaactccatggctgggggtgcaccctccccagggccaggtcgcggtagggtgggccatggagtgcccgacgggattccagacgttgttgtagaaatggccgaggccgacctgcgagccctgctttgccgggagcttcgtcctctgggagcttatatgagtggtagattaaaggtgaagggcgatctcgccatggctatgaaactcgaagctgtcttgcgagccttgaagtag

SEQ ID NO: 207233 - DNA, 1068 bp, synthetic construct
  misc_feature 1..1068: note = Description of Artificial Sequence: Synthetic coding sequence
  source 1..1068: mol_type = other DNA
atgcccgacgtgccccagagctggcccagctgcctgtgccacggcttgatcagcttcctgggatttttgctcctgctggtcacctttccaatttctggctggttcgccttgaagattgtcccaacctacgaacggatgatagtgttccgactggggcgcattaggactccacaggggccaggcatggtgttgttactgcctttcatcgactctttccagcgggtggacttgcgaactcgggcattcaatgtccccccttgtaagctcgcatccaaggatggcgccgtgttgtccgtgggcgcagacgttcagtttaggatatgggatccggtgctgtcagtgatgactgtcaaagacctgaacaccgctactagaatgacagcgcagaatgcaatgaccaaggcactactgaaacggccactccgggagattcagatggaaaagctgaaaatttctgatcaacttctactagagatcaacgacgtcactcgggcatggggactggaggtggaccgcgtggagttggccgtcgaagccgtccttcagcccccccaggattcaccagcagggcctaatctggatagcaccctacagcagctggccctacacttcctgggcgggtctatgaactccatggcgggaggagcccccagccccgggcctgataccgttgagatggttagcgaagtcgaacctccagcacctcaggtaggggcacggtcatcacctaagcagcccctagctgaggggcttttgacggctcttcagccatttctctcagaagcactggtcagccaggtgggggcttgctaccagttcaacgtagtgttgccatccggcacccagtccgcctatttcctcgacctcaccaccggcagaggaagggtcgggcatggagtgccagacgggattcccgacgtggtcgtcgagatggccgaagccgatctacgagcgctgctgtgcagagaactgaggcccttaggggcttacatgagtggcagactgaaagttaagggcgatctggccatggcaatgaagctggaggccgtactacgcgctctgaaatag

SEQ ID NO: 207234 - DNA, 933 bp, synthetic construct
  misc_feature 1..933: note = Description of Artificial Sequence: Synthetic coding sequence
  source 1..933: mol_type = other DNA
atgatcgtgttccggctgggccggatccggaccccccagggccccgggatggtactgctcctcccttttattgacagtttccagcgcgtagacctaagaacgcgcgcctttaatgtcccaccttgcaagctcgcgtctaaagacggtgccgtgctgtcagtaggagcggacgtacagtttaggatatgggatcctgtgctgtccgtgatgacggtgaaggatttgaatacggcaacccgcatgacggcccaaaacgcaatgactaaagctctccttaaaagacccttgagggagattcagatggaaaagctcaagatctctgaccagcttttgttagagatcaacgatgtgacaagagcctggggcctggaagtggatcgagtggagttggctgtggaagccgtgctgcaaccccctcaggacagtccagccggccccaatctggatagcaccctgcagcagttggctctgcattttcttggaggttcaatgaatagcatggctggcggggcccccagcccaggccccgacaccgtggagatggtgagcgaggtcgagccaccagccccacaagtgggcgctagatccagccccaaacaacccctggctgaaggactgcttacggcactccagccctttctgtcagaggcattggtgagccaggtaggggcctgttaccagtttaacgtcgttttgcctagcggaacacagagtgcttattttctcgatctgacgaccggccgagggcgggttgggcacggcgtgcctgatggaattcccgatgtcgtggtggaaatggccgaagctgatttgagggcattgctctgcagggaactgaggccacttggtgcctacatgtctggtcgtcttaaggtgaagggcgatcttgcaatggccatgaaattagaggccgtcctgagagctctcaagtag

SEQ ID NO: 207235 - DNA, 1044 bp, synthetic construct
  misc_feature 1..1044: note = Description of Artificial Sequence: Synthetic coding sequence
  source 1..1044: mol_type = other DNA
atgctgggccggagcggctaccgggccctgcccctgggcgacttcgaccgctttcaacagtcttcctttggtttcctgggaagtcaaaagggatgcctctcacccgagagaggaggagttgggactggtgcggatgtgcctcaatcctggcctagttgcttatgtcacggtctgattagctttctgggctttttgctccttctggtgacatttcccatttcagggtggtttgcgttaaaactcgctagtaaggatggcgccgtcctgtctgtcggtgcagacgtgcagtttagaatttgggatccggttctgagcgtgatgactgtgaaggacctcaataccgcaactagaatgacggcgcagaacgctatgacaaaagcgcttctcaaaaggccccttagggaaatccaaatggaaaagctcaaaatttcggaccagctcttgctggagataaacgatgtcacccgggcttgggggttggaggtggatcgcgtcgaactggctgtcgaggcagtgctccagccaccgcaggactctcccgcgggccccaacctggattctactttgcagcagctggcgctgcactttctcggtggctctatgaatagtatggcaggaggggctcccagtcctggcccggacacggtcgagatggtgtctgaagtcgagcccccagcacctcaggtaggggctcgttcttctcctaaacagccactggccgagggcctgctgaccgctctgcagccatttttgtccgaggccctggtgtcccaggttggtgcttgctatcaatttaacgtcgtgcttccaagtggtacacagagtgcatactttctggatctgacaacaggcaggggacgcgtgggccatggtgtgcccgacggaattcctgatgtcgtggtggagatggccgaagctgacctcagagccttattgtgtcgcgagctgcgtccgcttggcgcatacatgtcaggtcgactgaaagtaaaaggtgatctcgctatggccatgaagcttgaagctgtgctccgtgccctgaaatag

SEQ ID NO: 207236 - DNA, 1071 bp, synthetic construct
  misc_feature 1..1071: note = Description of Artificial Sequence: Synthetic coding sequence
  source 1..1071: mol_type = other DNA
atgctggcccgggccgcccggggcaccggcgccctgctgctgcggggctcattgctggctagtgggcgggctcccaggagggcttcctctggcctgccgcggaacaccgtcgtgcttttcgtgcctcagcaggaagcatgggtggtggagaggatggggcggttccatcgtatcctcgagccaggactgaatattctgattcccgtcctggatcgaattaggtatgtgcagagtctcaaggagattgtgattaacgtgcctgagcagtccgcagtgaccctcgacaatgtcacactgcagatcgatggagtgttgtatcttcgcatcatggacccgtataaagctagctatggagtcgaagacccagagtatgcagtgactcagctggcccagactactatgaggagcgagctcggcaagctgagcctggataaagtgtttagggagcgggaatcactcaacgcttcgatagtggacgctattaatcaagccgcagactgctggggcatccggtgcctgcgatacgagattaaggatatccatgttcccccgcgagtgaaggaatcaatgcaaatgcaggtcgaagcagaacgccgtaagcgcgccacagtcttagagtccgagggtacaagggagtcagccataaacgtggccgaaggtaaaaagcaggctcagatcttagcatcagaggcagaaaaggcagaacaaatcaatcaggcagctggagaggcgtcggccgttctggcaaaagctaaagccaaggctgaggctataagaattctggcggcggcattgacccagcacaacggcgatgctgccgcctccctgaccgtggccgagcagtacgtgtctgcattctccaaactggcaaaagactccaacaccatactgctgcccagtaatcccggcgatgtgaccagtatggtagcacaggctatgggagtttacggtgcccttactaaggcaccagtaccaggaacgccagatagtctcagctccggcagcagccgcgacgtgcagggcacagatgcatctttagatgaggaactggatcgggtgaagatgagttag

SEQ ID NO: 207237 - DNA, 936 bp, synthetic construct
  misc_feature 1..936: note = Description of Artificial Sequence: Synthetic coding sequence
  source 1..936: mol_type = other DNA
atgctggcccgggccgcccggggcaccggcgccctgctgctgcgggggtccttgctagcctcaggtcgagcgccacgccgggctagcagtgggctgcctcgcaacacagtcgtgttgtttgtgcctcagcaggaggcgtgggttgtggagagaatgggcaggttccatagaattttggaaccagggcttaatatcctgattccggttttggatcggattaggtatgtccagagtctgaaagaaatcgtgattaatgtgcctgagcagagcgctgtgacactggataatgttactctacagattgacggcgtcctctacctacgcatcatggacccctataaggcctcctacggggtcgaggatccagagtacgcagttacacagctggcccaaacgaccatgcggagtgaactgggtaaactgtccctcgacaaagtcttccgggtggaagcagagcggagaaagagagccaccgtgctggagtccgaaggcacccgcgagagcgctatcaacgtcgcagaaggaaaaaagcaggcccaaattctcgcctcagaggctgaaaaagctgagcaaatcaaccaggcagctggggaggcctcggccgtgctcgccaaggcaaaagcgaaagcagaggccataagaatactggcagcggcccttacccagcacaacggtgacgccgcagctagtctaacagtggccgagcaatacgtaagcgcgttctccaaactggccaaagacagcaataccatcttactgccgtcgaaccccggcgacgtcacctctatggtggctcaagcgatgggggtttacggagccttaaccaaggctcctgtgccgggcacacccgattctcttagctcggggtcctctcgcgatgtgcaagggacagatgcaagtttagatgaggaactcgacagggtgaagatgtcctag

SEQ ID NO: 207238 - DNA, 876 bp, synthetic construct
  misc_feature 1..876: note = Description of Artificial Sequence: Synthetic coding sequence
  source 1..876: mol_type = other DNA
atggacagccgggtgagcagccccgagaagcaggacaaggagaacttcgtgggtgttaataataaacgattaggtgtttgtgggtggatcctgttttcccttagcttcctgctggtcataatcacctttcccatttctatctggatgtgtctaaaaataataaaggagtacgaacgggccgtagtgttccgacttggccgcattcaggctgacaaagcaaagggccctggactcatactggttttaccatgtatagacgtcttcgtaaaagtcgacctgcgcaccgtgacgtgtaacatccctcctcaggaaatcctgaccagggactcagttaccacacaggtggacggtgtggtctactaccgaatctattcagccgtgtccgctgtcgctaatgtcaacgacgtccaccaagccacatttctgctcgcccagaccaccctcagaaatgtcttggggactcagaccctatcacaaatccttgctgggcgcgaggaaattgcacacagtatccagaccctgctggacgatgccaccgaactgtggggaattagagtcgctcgagtcgagatcaaggatgttcggattcccgtgcagctgcaacggtccatggccgccgaggccgaagccactcgcgaagctcgcgcaaaggtcctcgctgcagagggcgagatgaatgccagtaaatcactgaagtctgctagcatggtgctggccgagagcccaatagctcttcagctgagatacctacagacgttgagtacggtcgcaactgagaaaaatagcacgattgtgtttccactcccaatgaacatattggaaggcataggaggtgtctcctacgacaaccacaaaaagctgccgaataaggcctag

SEQ ID NO: 207239 - DNA, 849 bp, synthetic construct
  misc_feature 1..849: note = Description of Artificial Sequence: Synthetic coding sequence
  source 1..849: mol_type = other DNA
atgaacagccggggcgagctggtgggcgtgaacaacaagcggctgggagtgtgcgggtggatcctcttttctttgtcattcttactcgtcattatcaccttccccatcagtatttggatgtgcttaaagataatcaaggagtacgaacgcgccgtagtttttcgtctgggacgaattcaggccgataaagccaagggccccggacttatcctcgtgcttccctgtatcgatgtgtttgttaaagtggatctcagaacagtgacctgtaatatcccccctcaggagattctgacacgggatagcgtgacgacacaggtcgatggtgttgtgtattacagaatctatagcgctgtgagcgcagtggcaaatgttaacgacgtacatcaggccacctttcttctggctcagacaacgttgagaaacgtcctgggaacccagacactgtctcagatcctggccggaagagaagaaatcgcacatagcatacagactctgctggatgacgccacggaactttggggaatcagagtggcacgggtggagattaaggacgttcgaatccccgtccagcttcagaggtccatggcagccgaggcagaggccacacgggaagctagagctaaggtgcttgcagcggaaggagagatgaatgcgtctaaaagcttgaagagcgcttccatggtgctggctgagtctccgattgctttacagttacgttatctgcagacgctatccacagtggcaaccgaaaaaaacagtacgatagtgttccccctgccaatgaacatcctcgagggcattggaggggtgagctacgacaatcacaagaagctgcctaataaggcctag

SEQ ID NO: 207240 - DNA, 2970 bp, synthetic construct
  misc_feature 1..2970: note = Description of Artificial Sequence: Synthetic coding sequence
  source 1..2970: mol_type = other DNA
atggcccggcccgtgcagctggcccccggcagcctggccctggtgctatgtcgcctcgaggcccagaaagccgcaggcgccgctgaggaacccgggggacgggccgtcttccgagcatttagaagggcaaatgcacgttgtttttggaatgcaaggttggccagggccgcttctagactcgccttccagggatggctccgacggggagtcctattggttcgcgcacctcctgcttgtcttcaggttcttcgggacgcctggcgtcgccgggcactgcgacccccacggggatttcgtatacgggccgttggagacgtctttccagtccagatgaaccccattacccagagtcaattcgtgcccctgggcgaggtgctctgttgtgctatctctgatatgaacaccgcccagatcgtggtaacccaggaatccctgctggagagactgatgaagcactacccaggcattgctataccatccgaagatatactttatacaaccctggggaccctcatcaaggaacggaagatctatcatacgggcgaggggtacttcattgtcaccccacagacctactttattacaaacacaaccactcaggagaacaagcggatgctgccgagcgacgagagcaggctgatgcctgcgtcaatgacatacctggtgtcaatggagagctgtgccgagtccgcacaggagaatgcagctcccatcagccactgccaaagttgtcagtgcttcagggatatgcacacacaggacgtgcaagaggccccggttgcagccgaggttactcgcaaatcgcatcgcggcctgggcgaatctgtctcttgggtccagaatggtgcagtgtctgtctcagctgagcatcacatctgcgagtccactaagccacttccctatactcgtgataaagaaaagggaaaaaagtttgggttttcactcctgtggcgctctctatccaggaaggagaaacctaagacagagcatagttccttttcagcccagtttccaccagaggaatggcccgtgagagatgaagacgacctggacaatattcctagagacgtcgaacacgagatcataaaaaggatcaatccaatccttacagtcgataatctgatcaagcatactgtcctgatgcagaaatacgaagagcaaaaaaagtataatagccagggaacctccactgatatgctgactattggccataagtatcccagcaaagagggcgtgaagaaaagacaggggctctctgcgaagcctcaaggacagggccactcaaggcgcgacagacacaaggcacggaaccagggatcggaatttcagcctgggagcatcagattagaaaaacatccaaagctgcccgccacccagcctatacccagaattaaaagtcccaatgagatggtcggccagaagcctctgggggaaataacaactgttctggggtctcacctgatctataagaagaggatcagtaatccgtttcaggggttaagccacagaggtagcaccatctccaaaggccataagatacagaagactagcgacttaaagccaagtcagaccggtcctaaggaaaagccctttcagaaacctagaagcctcgactcaagtagaatcttcgatggcaaagccaaagagccatacgcggagcaaccaaatgataagatggaagcggagagcatctatatcaacgatcctacggtcaagccaattaacgatgacttccgcggacatttgttctcacacccacaacaatccatgttgcaaaatgatggcaagtgctgtcccttcatggaatctatgttgaggtacgaggtatacgggggcgagaacgaggttatccctgaggtcttgagaaagtcacattcacactttgataagcttggagagaccaaacagactccccattccttgccttcacgcggagcatcgttctccgaccggaccccgagcgcctgcagattagtggataataccattcatcaattccagaacctcggtttgctggactatccagtcggggtgaatccattgcggcaggctgcaagacaagacaaggactccgaggaactgctccgaaagggattcgtgcaggatgccgagactacctccctggaaaatgaacaattgagcaacgacgaccaagcactttaccagaatgaagtagaagacgatgatggagcctgtagctcactctaccttgaggaggacgatattagcgagaacgacgacctgagacagatgctcccaggccattcccagtactcttttacaggcggtagccagggcaatcaccttgggaaacaaaaggtaatcgagcgatccctaacagagtacaatagcactatggagagagtggagagccaggttttgaagagaaatgagtgttataagcccacgggcctgcacgccaccccaggcgagagccaggagcccaacctgtccgcagagtcttgcggcttaaactccggtgcccaatttggattcaattatgaggaggagcccagtgttgccaagtgcgtgcaagcaagcgcgccagcggacgagaggatatttgactattattctgctagaaaagcctcgttcgaggcagaggtcattcaggacaccataggagataccggcaagaagccggcctcctggtcccagtccccacaaaatcaagagatgagaaagcatttccctcagaagttccagctgtttaacacatcccacatgcccgtccttgcccaggacgttcagtatgagcactcacacttggaggggaccgagaaccactccatggccggagactcaggcatagactcccctagaactcagagtctcgggagcaacaacagcgtgattctggatggtctgaagcggcggcaaaattttctacaaaacgtcgaggggacaaaaagttcgcagccactcaccagcaactctctgctgcccctgacaccagttatcaatgtttag

SEQ ID NO: 207241 - DNA, 510 bp, synthetic construct
  misc_feature 1..510: note = Description of Artificial Sequence: Synthetic coding sequence
  source 1..510: mol_type = other DNA
atggcccggcccgtgcagctggcccccggcagcctggccctggtgctttgtaggttggaggctcaaaaagcagcaggcgccgctgaagagccgggtggacgggctgtgtttcgggctttcaggcgcgccaatgcccgttgcttctggaacgcacggctcgccagagctgcctcccgcctggcatttcagggctggctcagacgtggggtcttgctggtgcgcgcccctccggcttgtctgcaggtgttgcgcgatgcctggagacgcagggctctgcgccctccacgcggctttagaatccgcgccgtaggcgacgtgtttcccgtgcagatgaacccaatcactcagtcacaatttgttcccctgggtgaggtgttgtgttgtgccattagtgacatgaataccgctcagatcgttgtgactcaggagagcctgctggagcgtctgatgaaacactacccagggcaccgcgtctgggacctgatcatccagtcattctggatggactag

SEQ ID NO: 207242 - DNA, 684 bp, synthetic construct
  misc_feature 1..684: note = Description of Artificial Sequence: Synthetic coding sequence
  source 1..684: mol_type = other DNA
atggcccggcccgtgcagctggcccccggcagcctggccctggtgttatgtcggctagaggcacagaaggcagccggagcagccgaagagcccggggggcgcgccgtttttcgggccttccgcagggctaacgcgagatgtttctggaatgcgcggctggcccgcgctgcttccagactcgcatttcagggatggcttagacgaggcgtgctcctcgtcagagcccctcccgcctgtctgcaggtgctgcgcgatgcatggcgccgacgggccctgagaccccctcgaggctttagaatacgcgcagtgggtgatgtatttccggtgcagatgaaccctattacccaaagccaattcgttccattgggagaagttttgtgctgtgcgatttctgacatgaacacagcccaaatcgtggtcacgcaggagagcctgctcgagcgacttatgaaacattacccggggattgccatcccgtcggaagacattctatatactacactgggcacactgataaaggagcggaagatctatcacaccggagagggctacttcatcgtgaccccacagacttactttatcaccaatacaaccacccaggagaataaaagaatgcttccatctgatgagtcccggctcatgcctgcatctatgacatacctcgatacagagagcggcatatag

SEQ ID NO: 207243 - DNA, 2970 bp, synthetic construct
  misc_feature 1..2970: note = Description of Artificial Sequence: Synthetic coding sequence
  source 1..2970: mol_type = other DNA
atggcccggcccgtgcagctggcccccggcagcctggccctggtgttatgtcgtctggaagcccaaaaagctgctggcgctgcagaggaaccagggggcagggctgtctttcgcgccttcaggcgggcaaacgccaggtgcttttggaacgcccgactcgcgcgtgcagcgtccaggctggcttttcagggttggctgaggaggggggtcctcttggtgcgcgctccccctgcatgtctgcaagtgctgcgcgatgcctggcggcggagggccctgaggccacccagaggtttccgtattcgcgccgtgggtgatgtcttcccagtgcagatgaatccgattacccagagccagttcgtgcctcttggcgaagtactatgctgcgccatctcagacatgaatacagcccagatcgtggttactcaggaaagcctgctggagagattaatgaagcactatcctgggatcgctattccttcagaagacattctgtataccactctggggacattaattaaggaaaggaaaatataccataccggtgagggttactttattgttacgccccaaacctactttatcacaaacactacaacccaggagaacaaacgcatgctccccagcgacgaatcccgactgatgccagcctctatgacgtatctggtttcgatggaaagctgcgccgagagcgcccaagagaacgctgcccccatttcacactgtcaatcctgtcagtgttttcgggacatgcatactcaggatgtccaggaagcaccagtcgcagcagaagtcactcggaagagccacagagggctaggcgaaagtgtgagttgggttcaaaacggtgctgtgtcagtctctgccgaacatcacatctgtgaatcaaccaaacctttgccatataccagagataaggagaaaggtaaaaaatttggtttttccctcctatggcgcagtttatccaggaaggagaagccaaagaccgagcactcttccttctcagctcagttccctcctgaggagtggcctgtgcgagacgaggacgacttagacaacatcccaagggacgtggagcatgagatcatcaaaaggatcaatcctatcctgaccgttgataacctgattaaacacacggtgcttatgcagaagtatgaagagcagaaaaagtacaactctcaggggacgtcaacggatatgctgaccattggtcacaaatacccctccaaggagggtgttaagaagcggcagggcttatccgccaagccgcaaggacaagggcacagcaggcgagaccggcacaaggcccgcaatcaaggttctgagtttcagcctggaagcattcggcttgagaagcatccaaaactccccgcgacccagcccatacctcgcatcaagtctcccaacgagatggtcgggcaaaagccactcggcgagatcacgactgtgctgggctcacacctcatttacaaaaagagaatctctaatccttttcaaggactgagccatcgtgggagcaccatcagtaaagggcacaaaatccagaaaacgtcagacttgaagcctagccagaccgggccaaaggagaaaccatttcagaagccacggtccttagactccagcaggattttcgatggaaaggccaaggagccctatgccgagcagcccaacgacaagatggaggcggaaagcatctatatcaacgatcctaccgtgaagccaattaatgacgactttcggggacacctattctcccacccacagcagtcaatgctgcagaatgacggaaagtgttgtcctttcatggagtcaatgctgcgctacgaggtgtatggtggcgagaacgaagtgattccagaagtgcttagaaagagtcactcgcatttcgacaagcttggagaaaccaagcaaacccctcactcactcccgagccgcggggcatctttctctgaccggacgccgtccgcctgccgactcgtcgacaacacaatacatcaattccagaacctgggcctactggattaccccgtgggagtcaatccgctgcgacaggcggcgcggcaagacaaggactctgaagagctgctcaggaagggcttcgtccaggacgccgagacaacttctctggagaatgaacagttgagcaacgacgatcaggccctctaccaaaacgaggtggaggacgacgacggagcctgttcttctctttatctggaagaggatgatatttccgaaaacgatgacctgagacaaatgctaccaggacatagccaatacagtttcacggggggcagccaggggaaccacttgggcaagcagaaagttatagaaaggagtttaacagagtataacagtacaatggagagggttgaatcccaagtgcttaaacgcaacgaatgttacaagcctactggtcttcacgcaaccccaggcgagtctcaggagcccaatcttagcgcagaatcctgcggtctcaatagcggtgcccagttcggatttaattacgaggaagagccaagtgtggctaaatgtgtgcaagcctcggcccctgctgacgagcgcatattcgattactacagtgcccggaaagcctccttcgaagccgaagtaatccaggacactataggcgatactggtaagaagcctgccagctggtcccagtccccccagaatcaggagatgaggaaacatttcccgcagaagttccagctgtttaacaccagccatatgccggttctagcccaagatgtgcagtacgagcactcacacctcgaagggacagaaaatcactcaatggctggggattctggaatcgactcccctaggactcaatccctgggcagtaataactctgttatactcgatggcttaaagcgccgccagaactttcttcagaatgtggagggcaccaaaagcagtcaaccactgacctcgaatagtctgctgcctctaacacctgtaattaacgtgtag

SEQ ID NO: 207244 - DNA, 2640 bp, synthetic construct
  misc_feature 1..2640: note = Description of Artificial Sequence: Synthetic coding sequence
  source 1..2640: mol_type = other DNA
atgaaccccatcacccagagccagttcgtgcccctgggcgaggtgctctgctgtgcaatttccgatatgaataccgcgcagatagtcgtgacacaggagagtctgctcgaacgcctcatgaagcattaccctggcatcgctatccccagtgaggatattctgtatacaactcttgggacgctgattaaggaacgaaagatctaccacaccggggaaggatacttcattgtgactccccagacctattttatcaccaatacaacgacccaagagaacaagagaatgctgccctccgatgagagtcgcttgatgcctgcaagcatgacatacttggtttctatggagtcttgtgctgagtcagctcaggagaacgcagctcccatttctcactgccaatcctgccagtgcttccgtgatatgcacacccaggatgtgcaggaggctcctgtggccgccgaagtaacgagaaagagccaccgtggcttaggtgaatctgtgagctgggtgcagaacggagctgtaagcgtttcagctgagcatcatatttgtgagtctaccaagccccttccctatacccgcgacaaagaaaagggcaaaaaattcgggttttcactcctgtggcggtctttgtcacgtaaagaaaaaccaaagactgagcactcgtcgtttagtgcacagtttccaccagaggaatggcctgttcgcgacgaggatgatttggataatatccctcgcgacgtggagcatgaaataatcaagcggatcaacccgatcttgacagtggacaatttgatcaagcacacggtccttatgcagaaatatgaggagcagaaaaaatacaactcacaaggtacaagtacagatatgcttacaatcgggcataagtacccgtccaaggaaggggtgaagaaacggcaaggtttgtctgctaagccacagggacaaggtcattcgcgtcgcgataggcacaaggcccgcaatcagggtagtgaattccagcctggttcaattagactagaaaagcaccctaagctcccggccacgcagcccatcccccgcattaaaagccctaatgaaatggtgggacagaagcccctcggggagatcacgaccgttctcggctcccacctaatctataaaaaacgaatatccaacccgtttcaggggttatctcaccgcggtagcaccattagtaaagggcacaagatccagaaaacctccgatcttaaaccgtcgcagaccgggccaaaagaaaagcctttccagaaaccacgctcacttgattcatctcgcatcttcgacggtaaggccaaggaaccctatgctgagcagcctaatgataagatggaagccgagagcatctacatcaatgacccaaccgttaaaccaatcaacgatgacttccgtggccacttgttcagccacccacaacagtccatgctccagaacgacggcaaatgctgtcccttcatggaatctatgctaaggtacgaggtgtacggaggcgagaacgaggtgattcctgaggttctgcgaaaaagccacagccatttcgataagctgggtgaaacaaagcagactccccattctttgcccagtaggggggcctccttctctgaccgaacgccgtcagcctgtagattagtggataacactatccatcagtttcagaacctggggctgctggactaccccgtcggggtgaaccccctaaggcaggcagccaggcaggataaagatagcgaggaactcctcagaaaagggtttgtgcaggacgccgagacaaccagcctagaaaacgagcaactctctaacgatgaccaggcactataccagaacgaagtggaggacgatgacggagcctgttccagcctatatctggaggaggatgacatctcagagaatgacgatctgagacagatgctgcccggacacagccagtacagttttacgggaggcagtcagggcaaccaccttggcaaacagaaagtgatcgagaggtctctgacggaatacaactctactatggagcgcgtcgagagccaagtgctcaaacgcaacgaatgctataaaccaactggacttcacgcgacccccggggagagccaagaaccaaacttgagtgccgaaagctgtggcctgaacagtggagcccagttcggatttaattacgaggaggagccttctgtggccaagtgtgtgcaggcttccgcaccagctgatgaacggatctttgactattactccgctaggaaagcaagctttgaagcggaagtcattcaggacacaatcggcgatactgggaagaaacctgcctcatggtctcagagtccccagaatcaggaaatgcggaaacattttccccagaagttccaactctttaatacttcccacatgccagttctggctcaggatgtacaatacgagcacagtcatctggaaggaacggagaatcattccatggctggggactccggcatcgatagcccccgcactcagtccctgggttctaacaacagtgtaattctggatggactaaagcggcgccaaaactttcttcagaacgtcgagggcaccaaatcctcacagcccctgacgtccaacagcctcctccccctgacgccagtgattaatgtgtag

SEQ ID NO: 207245 - DNA, 4179 bp, synthetic construct
  misc_feature 1..4179: note = Description of Artificial Sequence: Synthetic coding sequence
  source 1..4179: mol_type = other DNA
atggtggagcccggccaggacctgctgctggccgccctgagcgagtcgggaatttctccaaatgatctatttgacattgatgggggtgatgctggccttgctactccaatgcccaccccaagtgtccagcagtctgtgcctctgtcagcattagaactgggcctggaaacagaagcagctgtccctgtgaagcaggaacccgaaacagtgcccacacctgccctgttaaacgtgagacagcctccttctaccaccacctttgtgctgaatcagattaatcatttaccaccactgggctcaaccattgtgatgacaaaaacacctccggtaacaacaaaccgacaaaccatcaccctgactaagttcatccagaccacggcatccaccaggccttccgtaagtgctcctacagtgcgtaacgcaatgacctcggctccttcgaaagaccaggtacagctaaaagatctcctaaagaataactctcttaacgaactgatgaaactgaaacctccagccaatatagcccagcctgtggctacagctgccaccgatgtgagcaatggtaccgttaaaaaggaatcatccaacaaggagggtgcccggatgtggataaacgacatgaagatgagatcattttcccccaccatgaaagtgcctgtggtcaaagaagatgacgagcccgaggaggaggacgaggaagaaatgggacacgccgaaacatacgcggaatacatgccaatcaaactaaagatcgggctcagacatcctgatgccgtggtcgagacctcttctctgagctcagtaacaccgccagacgtgtggtataagacatcaatctccgaagagactatcgataacgggtggttatccgccctccagttggaagccatcacctacgccgcccagcaacacgagacgttcctccccaatggggatagagcaggcttcctcatcggtgacggtgctggggtcgggaaagggaggaccatcgctggaattatctacgaaaattacctcctgtcacgcaagagagcactatggttttccgtatcaaatgatttaaagtatgacgcagagcgggacctgcgagacatcggcgccaaaaacattctggttcatagtctcaataagtttaaatatggaaaaatcagctccaagcataatgggagcgttaagaagggagtgattttcgctacctattcttcactgatcggtgagagtcagagtggaggaaagtacaagaccagactgaagcagcttctgcattggtgcggcgatgacttcgatggggtgatcgtgttcgacgagtgccacaaggccaagaatctctgccccgtcggatccagcaaacctacaaagaccgggctcgctgtgctggagctgcagaacaagctgccaaaggcgcgagttgtctacgccagtgctactggcgcctccgaacctagaaatatggcttatatgaatagactgggtatttggggcgaaggcacaccattcagagagtttagcgatttcatccaggcagtggaaaggcggggagtgggggctatggaaattgtggccatggacatgaaactacggggaatgtacatcgcccggcaacttagttttaccggcgttaccttcaaaattgaggaggttctcctcagtcagtcctacgtgaagatgtataacaaagctgttaaactgtgggtgattgcccgcgaaagatttcagcaagcggccgacttgattgacgccgagcagcgtatgaagaagtctatgtgggggcagttctggtccgctcaccagaggtttttcaagtatctgtgcatcgccagcaaggtgaagagagtcgtgcagctggctagagaagagattaagaatggcaagtgcgttgttatcgggctacagtcaacaggagaagctaggactttggaggccctcgaagagggcgggggggaactcaacgattttgtgagcacagctaagggagtgttgcagtcccttatcgaaaagcatttccctgctcccgaccgcaaaaaattgtattctctgctcggcatcgacttgaccgcacccagcaacaatagctcccctagggattcaccctgcaaagagaacaaaatcaagaagagaaagggggaagagatcactagggaggccaagaaggctcgtaaggtgggggggctcactggatcctccagtgatgatagcgggagcgagtcagacgcctccgataacgaggagtccgattacgaaagctccaaaaatatgagctccggtgatgacgatgatttcaacccgttcctggatgagtctaatgaggatgacgagaatgacccttggctgatcagaaaagatcacaagaaaaataaagaaaaaaagaagaagaagtctattgatcccgatagtattcaatcagccttactcgcgagcggcctgggtagcaagcgcccaagcttttcatccacacccgtgatctcacccgcacctaacagtaccccagctaatagcaataccaacagcaattccagcttgattacatcccaggacgccgtggagagagcacaacaaatgaagaaagaccttttagacaagctggagaaacttgctgaagacctgccccctaacacactggatgagctgatcgatgaactcggagggcctgaaaacgtggctgaaatgaccgggcgcaaaggacgtgtcgtgagtaatgatgatggtagtatttcatacgaatccagaagtgagctggacgtccccgttgagatacttaacataaccgagaagcaacgcttcatggatggagataagaatatcgcaataatcagcgaagccgccagcagcggaatcagtctgcaggctgacagacgcgcaaaaaaccaacgaagacgggtgcatatgaccttggagctgccctggtccgccgatcgcgccatccagcagttcggacggacccatcggtccaaccaggtaaccgctcctgagtacgtcttcctaatttcagagttagctggggaacagaggtttgcgagcatcgttgccaagcgactggagtctctcggagccctgacacacggggatagacgcgccactgagagccgcgatcttagtcggttcaacttcgataacaaatacggaagaaacgccctagaaattgttatgaagtccattgttaatctagattcacctatggtttcgcctccccctgactacccgggcgagttctttaaagatgtgcggcagggattaataggagttggactgatcaacgtggaggaccggtcaggcattcttacactggacaaagactacaataatataggtaaattcctcaaccgtatcttaggaatggaggtccatcagcagaacgcactgttccaatacttcgcagacaccctgacggctgtggtccaaaacgctaaaaagaatggccgctatgatatggggatactagatctagggagtggagacgagaaagtgagaaagagtgatgtcaagaagtttttaacacctggatactcaacatcggggcacgtggaactgtacacaatctctgtcgagagaggcatgagctgggaggaagcaactaaaatctgggctgagctcaccggtccggatgatggattttacctcagcctacagattcggaacaataagaagacagccatactggtgaaagaggtcaaccctaagaagaaactttttctcgtgtataggccgaatacagggaaacagctcaaactggagatctacgcagatttgaaaaaaaagtacaaaaaggtcgtgagcgatgacgccctgatgcactggttagaccagtacaatagcagcgcagatacgtgtacccatgcctactggcgggggaattgcaagaaggctagcctggggctagtctgcgaaattggcctgagatgccgcacgtactatgtcctgtgcggtagcgttttgagcgtctggaccaaagttgaaggagtcctggcaagcgtctcaggcacaaacgtaaagatgcaaatcgtacgattaagaacagaagacgggcagcgaattgtcgggttaattatccccgctaattgcgtctcacctctggtaaaccttctgtcaacaagcgatcagtctcagcaactggctgtccagcagaagcagttgtggcagcagcaccatccacagagtatcactaatttgagtaatgcttag

SEQ ID NO: 207246 - DNA, 4182 bp, synthetic construct
  misc_feature 1..4182: note = Description of Artificial Sequence: Synthetic coding sequence
  source 1..4182: mol_type = other DNA
atggtggagcccggccaggacctgctgctggccgccctgagcgagtccggaattagcccaaatgatctattcgatatcgacgggggagacgccggtctcgccacacctatgcctacaccttcagtacagcagtctgtgccccttagcgcactggagcttgggctcgaaaccgaagccgccgtccccgtcaaacaggagcccgaaaccgtccccacgcctgccttactaaatgtccgccagcaacccccaagcactaccacttttgtgctgaaccagataaatcacctccctccgctcggcagcaccatagttatgacaaaaacacctccggtcaccactaatcgccagaccattactctcacaaaattcatccagacaactgcttccacacggccgtctgtgagtgcccccaccgtccgaaacgccatgacttctgccccctcaaaggaccaagtacaactgaaagatttactgaagaacaattcgctaaatgaactcatgaaactgaagccaccagccaacattgctcagcccgtagccacagccgccaccgatgtttcaaatggaactgtaaagaaagagtcatccaataaagagggcgccaggatgtggattaatgacatgaagatgcgcagcttttctcccaccatgaaggtgcctgtggtgaaggaagacgacgagccggaggaagaagacgaagaagaaatgggccatgccgagacctatgcagagtacatgcccataaaactgaagataggtctgcggcacccagatgcagtagttgagacctcgtcgctgtcttcagtgactcccccagacgtctggtacaagacatcaatttcagaggaaaccatcgataatggctggctgtccgctctgcagcttgaggcaataacctatgccgcgcagcagcatgaaacattcctcccaaacggcgaccgggcagggttcctgatcggcgatggtgctggtgtcggcaaggggcgaaccatcgctggcatcatatatgaaaactacctgctctcccggaagcgagccctgtggttcagtgtgtctaatgacctcaaatatgacgccgagcgcgacctccgcgatattggtgcaaaaaatattttggtgcactccctgaataagttcaagtatggaaagatctcttctaagcacaatggttctgtcaaaaaaggggtgatttttgcaacatatagcagtctgattggtgagagccagtcgggcggaaagtacaagacacgcctcaaacaactcctccactggtgtggagatgactttgatggcgtgatagtgttcgacgaatgtcataaggccaaaaatctttgcccagtcggcagtagcaaacccaccaagactgggctggccgtgctcgaactccagaacaagctgcctaaggctagggtggtgtacgccagtgccaccggtgcatcagagccccgaaatatggcctatatgaaccggctcgggatctggggggagggaacacctttcagggagttttccgacttcattcaggccgtcgaacgacgcggcgtcggagccatggagatcgttgcgatggacatgaaactgcgaggaatgtacattgcccggcagctctctttcaccggggttacattcaaaattgaagaagtgttgctgagtcagagctacgtgaaaatgtataataaggccgtgaaattatgggtcatagctcgtgaaaggtttcagcaggccgctgacttaattgacgctgagcagaggatgaaaaagagtatgtggggccagttctggagtgctcatcagaggttcttcaaatacttgtgtatcgcgtcgaaggtgaaacgggtcgtacagctggctcgcgaggaaattaagaacggcaaatgtgtcgtcatcggcctgcaatccactggtgaggctaggacattggaagccctggaggaaggtggcggagagctgaacgactttgtttcaacagcaaaaggtgtgctccaatcattgatagagaagcacttcccagcgccagaccggaagaagctgtatagcctcctgggaatagacttgactgctccctctaacaattcctcacctcgagacagcccctgcaaggagaacaagattaagaagaggaagggcgaggaaattactcgcgaggccaagaaggctcgcaaggtcggagggcttaccggatcctcaagcgacgatagcgggagtgaaagcgatgcatcagacaacgaggaaagtgactatgagtcttccaaaaacatgtcttccggggacgatgatgatttcaatcccttcctggatgaaagcaacgaagatgacgaaaacgacccatggttgatccggaaagatcataagaagaacaaagagaagaaaaaaaagaaatctatcgacccggactcaattcagtccgctctcctggccagcggcttgggctccaaacggccgtcattctcaagcacccccgtcatcagccccgctccgaacagtacgcctgctaatagcaatacaaactctaactcaagcctcatcaccagtcaagatgcagtagaacgtgcacaacagatgaaaaaggacctactcgataaacttgaaaagctggccgaagacctgcctcccaataccttggacgaactcatcgacgagttaggaggccccgagaacgtagccgagatgacggggagaaagggcagggttgtctcgaatgacgatggtagtatatcttatgagagcaggtccgaactggatgtccccgtcgagatactgaacatcaccgagaaacagcggtttatggacggcgataagaatattgccattatcagcgaagcggccagttcaggtattagtctacaagccgatagaagagccaagaaccagagaaggagggttcacatgaccctcgaacttccatggtccgctgatcgcgcaatacaacagttcggacgcactcaccggtctaatcaggtgactgctcccgagtacgtctttctgatttcagagctggcaggcgaacaacgattcgcgagcatagtcgcaaaaaggctggagagcctgggtgctttgacacatggggaccgccgcgcgaccgagagccgcgacctgtcacggtttaatttcgacaataaatatggcagaaatgccctggaaatcgtgatgaagtctatcgtgaatttggatagtcccatggtgtccccgcctcctgattatccaggggaattcttcaaagacgtccgccagggactaatcggcgtcggactcatcaatgtggaagataggtccggtatactcacactggacaaggattataacaacattggcaaattcctgaatcgtattttagggatggaggttcatcaacagaacgccctcttccagtatttcgctgatacgctgactgcggtggtgcagaacgctaaaaagaacggaaggtacgatatgggcatcctggatttgggctcaggcgacgagaaggtacgaaagagcgatgtaaagaaatttctgacacccggatactctactagtgggcacgtcgagctctacacaatttctgtggagcgcggaatgtcctgggaagaggccacaaagatctgggctgaactaaccggccctgacgatggattctacctctccttgcagataagaaataataagaaaactgccatcctagttaaagaagtcaacccaaagaaaaaactgtttttagtgtatcgtcccaatactggaaagcaactcaaactggaaatttacgcggatctaaagaagaaatacaagaaggtggtaagcgatgatgcccttatgcactggctagatcagtacaattcatcagcagatacctgtactcacgcttattggcgcggaaactgtaaaaaagcctctttggggttggtctgcgagattgggctgagatgtaggacttactatgtgctctgcggcagcgtgctatcagtgtggaccaaggtcgaaggggtcctggccagtgtttctggtacaaatgtcaaaatgcaaatcgtcagactgcggaccgaggacggccagcggatagtgggcctcattattcctgcgaactgcgtctctccacttgtgaacctgttatctacaagtgatcagtcgcagcagctggccgtgcagcagaagcaactgtggcagcagcatcacccacagtctatcactaatctttctaatgcctag

SEQ ID NO: 207247 - DNA, 2199 bp, synthetic construct
  misc_feature 1..2199: note = Description of Artificial Sequence: Synthetic coding sequence
  source 1..2199: mol_type = other DNA
atggtggagcccggccaggacctgctgctggccgccctgagcgagtccggcatctcccctaacgatttgtttgatattgacggaggggacgccggtcttgccacaccaatgcccacaccatccgtgcagcagtctgtgccactgtctgcattagagttagggcttgagaccgaggccgccgtacctgttaaacaggagccagagacagtgcctacgccggccctcctgaatgttcggcagcccccttctacaaccaccttcgtcctcaatcagattaaccacctgcccccacttgggagcaccatcgtcatgacaaaaaccccccccgtaaccactaaccggcagacaatcacactgacaaaattcattcagacaaccgcatccactagacctagcgtttcagctccgacagttagaaatgcaatgaccagtgcgccctccaaagaccaagtgcaattgaaagacctgttgaaaaataacagtctaaacgagctgatgaagctgaagcccccagccaacatcgctcagcctgtcgccaccgctgcgaccgatgtgtccaatggtaccgtcaagaaggagtcaagtaacaaggaaggggcgagaatgtggatcaacgacatgaaaatgagatccttcagtccaactatgaaggtgcctgtcgttaaagaagacgatgagccagaagaagaagacgaggaggagatggggcacgccgaaacttacgccgagtacatgcccattaaactaaagatcggcctgagacatcccgatgccgtggtggagacgtcgtcactctcgtccgtgactcctcctgatgtctggtacaagacatcaatctccgaggaaacaattgacaacgggtggctgtccgccctgcagctggaagctataacgtacgctgctcagcagcatgaaacatttttacccaatggcgatcgggccggatttctcattggggacggagcaggtgtaggcaagggccgcactattgcagggattatatacgaaaactacctgttatcccgaaagcgcgcgctctggttttcagtatctaatgacttaaaatacgatgctgagagggacctgcgggacatcggcgcaaaaaacattcttgtgcactctttgaacaaattcaaatacggaaagatttctagtaagcacaatgggtctgtgaaaaaaggagtgatatttgcgacgtactcctctctgataggggaatcgcagtctggaggcaaatacaagacaagactcaaacagctgctgcattggtgtggcgacgatttcgacggtgtgatcgtgtttgatgagtgccacaaagctaaaaacctgtgtcccgtgggctcaagtaaaccaaccaagacagggctggcggtgctggaattgcagaacaaactccctaaagctcgagtggtatatgcctcagcaaccggcgcttcagagccgagaaatatggcatacatgaaccggttaggaatttggggggaagggacccctttcagagaattttccgatttcatccaggccgtggaaagaagaggcgtcggagctatggaaattgtggcaatggacatgaagctgcgtggaatgtatatcgcacggcaactgagcttcaccggagtcaccttcaaaattgaggaggtgttactgtcacagagctatgtgaaaatgtacaataaagctgtcaagctatgggtcatcgctcgtgagcgctttcagcaagcagccgacctcatagacgccgaacagagaatgaagaagagcatgtggggccaattctggtccgcacaccagagattcttcaaatacctgtgcatagcctctaaagtgaaacgcgtcgtacagttggcaagggaggaaattaagaatgggaaatgcgtggtcatcgggctgcaatccactggtgaagccaggaccctcgaggctctagaggaaggcgggggagaattgaatgactttgtgagcacagctaaaggggtgctccagagccttatagagaaacactttcccgcccccgaccgaaaaaagctgtactctctcctgggtattgacctgacggcaccttcaaacaattcctctcctcgggactccccgtgcaaagagaataagattaagaagcggaaaggagaggagattactcgtgaagccaagaaagcacggaagatgtccctcatgcgcatgatgaagatggtgtcatcatag

SEQ ID NO: 207248 - DNA, 1632 bp, synthetic construct
  misc_feature 1..1632: note = Description of Artificial Sequence: Synthetic coding sequence
  source 1..1632: mol_type = other DNA
atggagcaggtgaacgagctgaaggagaagggcaacaaggccctgagtgtggggaacatcgacgatgccctgcaatgttattctgaagccatcaagctcgatcctcacaaccacgtgctttatagcaatcggagcgcagcctacgctaaaaagggggattatcagaaggcctacgaggatggttgtaagacagttgatctgaagcctgactggggcaaaggatactcaagaaaagcagccgctctggagtttttgaaccgcttcgaagaagccaaaagaacctatgaagaggggttaaaacacgaagccaacaatccccagctgaaagaggggctgcagaacatggaggctagactggccgagaggaaattcatgaacccattcaacatgcctaacctgtaccagaagctcgagagcgaccccagaaccaggacacttctgtctgacccaacttatcgggagttgattgagcagctccgcaacaagccttcggatctgggtacaaaattgcaggacccccgcataatgaccaccctgtctgttctgctcggagtcgaccttggttcaatggatgaagaagaagaaattgccacgccacctccccctccccctccaaagaaagagaccaagcctgagccaatggaggaggacctcccagaaaacaagaagcaagccctaaaggagaaggagctagggaacgatgcatataaaaagaaagattttgacacggctttgaaacactatgataaggctaaagagttggatcctactaatatgacatacatcaccaatcaggcggccgtgtatttcgagaagggggactataacaagtgcagggaattgtgtgagaaggccattgaagtgggacgtgaaaacagggaggattatcgacagattgcaaaggcatatgccagaattggtaactcttacttcaaggaagagaagtataaggacgccatccatttctacaataagtctttggccgagcatagaacacctgacgtgctgaaaaaatgtcagcaagctgaaaagatactaaaggagcaggaacgcttagcatacatcaaccccgatcttgcattggaagagaagaacaagggcaacgaatgtttccagaaaggcgactacccccaagctatgaagcactatacggaagccatcaagcgcaatcccaaggacgcaaagctatactcaaaccgggctgcttgttacacaaaattactggagttccagctggcgttgaaggactgcgaggagtgcattcagctcgagccgaccttcatcaaaggctacaccagaaaagctgcagcgctggaggctatgaaggactatacaaaggccatggacgtttaccagaaggctttggacctggatagctcctgtaaggaagctgctgatggttatcagcggtgcatgatggcacaatacaatagacatgattccccagaagatgtgaaaagaagggcgatggccgatcccgaggtacaacagatcatgtcagatccggcgatgagactaattctggaacagatgcagaaggatccgcaggcgttaagcgaacaccttaagaacccagtgatcgcccaaaaaatccaaaaactgatggacgtcgggttgatcgccatacggtag

SEQ ID NO: 207249 - DNA, 1359 bp, synthetic construct
  misc_feature 1..1359: note = Description of Artificial Sequence: Synthetic coding sequence
  source 1..1359: mol_type = other DNA
atgaaccggcagctggtgaacatcctgaccgccctgttcgccttcttcctggagacaaaccatttcagaaccgcattctgcaaggaccacgactcaaggagcgggaagcagccctctcagaccctatccccgtcagatttcttagacaagctgatgggtaggacttccgggtacgacgcccggatcaggccaaactttaagggcccacctgttaacgtcacttgcaatattttcattaattcgtttgggagcgttactgagaccaccatggactatcgagtgaatatctttctacgccaacagtggaacgattcccggctggcctattccgaatatcccgacgacagcctggatcttgacccctctatgctcgactctatatggaagcctgacctgttctttgccaatgagaaaggcgcaaactttcacgatgtcacaactgataacaagctattacgcatttcgaaaaatggaaaggtcctatactctatcagactcaccttgacgttaagttgtcctatggatctaaagaatttccctatggatgtacagacatgcacaatgcagctggagagttttggttatactatgaacgacttgatatttgagtggctgtccgacggccctgtccaggtcgcggagggattgacacttcctcagtttatcttgaaggaggagaaagagctcggctattgtaccaagcattataacaccggaaaatttacttgcatagaggtgaagttccatctggaacgtcagatggggtactaccttattcaaatgtacattccctcccttcttatcgtgattctgagctgggtgtccttctggattaacatggatgccgcaccagctcgtgtggctctgggaattacaacagtactgacaatgactacccagagcagcgggtccagagcctcgttgcccaaggtatcttacgtgaaggcgatcgatatctggatggctgtgtgtctcctttttgttttcgctgctctgttagagtatgccgccgtgaacttcgtgtctagacaacacaaagaattcctgaggcttaggaggcgtcaaaagcggcagaataaagaagaagatgtgacccgggagtcgagattcaatttttccggttacggtatgggccactgtctccaggtgaaagatggcaccgccgtcaaggccacccccgcgaatcccctgcctcagcctccgaaggatggggatgctattaagaagaagtttgtggatagagccaagagaatcgacacaataagtagagccgcctttcctctggcgtttttgatctttaacattttttactggatcacttataaaataattaggcacgaggacgtccataaaaaatag

SEQ ID NO: 207250 - DNA, 3489 bp, synthetic construct
  misc_feature 1..3489: note = Description of Artificial Sequence: Synthetic coding sequence
  source 1..3489: mol_type = other DNA
atgaacggccaccaccagcagaacggcgtggagaacatgatgctgtttgaggtggtgaaaatggggaaatccgccatgcagagtgtggtggatgactggatagagagttacaaacacgatagggatattgccctattggacttaataaacttctttatacagtgcagtggctgtaaaggcgtagtaacggccgagatgtttcgccatatgcagaatagcgagataatccggaagatgactgaggagttcgatgaggatagcggggactatcctcttacaatggcaggcccacagtggaaaaagtttaagagttctttttgcgagttcatcggagtgctagtgcgccaatgtcagtattccataatctatgatgagtacatgatggacacagtcattagcctcctgactggccttagcgattcccaggttcgggcatttcgccatacttcgaccctagctgcaatgaagttaatgaccgctctggttaacgtggctctgaatctatccataaatatggacaacacccagcgtcagtatgaagcagagcgaaataaaatgatcggaaagagagcgaacgagagactggagctcttgttacagaagcggaaggaactccaggagaatcaggatgagattgagaatatgatgaacgccatctttaaaggtgtatttgtgcaccgatatagagacgcgattgccgagatccgcgccatctgtatagaggaaattgggatctggatgaagatgtacagcgacgcttttctgaacgatagctatctgaaatatgtgggttggactatgcacgataaacagggcgaggtgcgcctaaagtgtctcacggcactgcagggcctgtattacaataaagagctgaattccaagctggagctattcacctcccggtttaaggaccggattgtgtccatgactctcgacaaggagtacgatgtcgccgtgcaggccatcaagttgctaacactcgtcctgcagagcagcgaggaagtgctgactgccgaagactgcgaaaacgtttaccatttggtttactccgctcacagacccgttgccgttgcagccggcgagtttctgtacaagaagttgttttctagaagggatccggaggaagatggcatgatgaagaggaggggccggcaaggtccaaatgctaatcttgtgaaaaccctggtttttttctttctggagagcgagctccacgagcatgctgcctatcttgtggactccatgtgggattgtgcaacagagcttctcaaggattgggagtgtatgaattctctgttactggaggagcctctgtccggagaagaagcactcaccgaccggcaggagagcgctctaatagagatcatgctgtgtacaataaggcaggccgctgagtgccacccacctgtaggaaggggtaccgggaagcgggtactgaccgccaaggagaaaaagactcaactggacgaccgcacgaaaattactgagctcttcgcggtggcgttaccacaacttctagccaagtatagcgtcgacgccgaaaaagtaaccaacctgctccagctgccccagtacttcgacttagagatctataccacggggcgtttggagaaacatttagacgctttgttgaggcagattaggaacattgtggagaagcatactgacacagacgtcctcgaagcctgttctaaaacttaccatgctctctgtaatgaggaatttaccatctttaatagggtcgacatctccagatcgcagctaatcgatgagctcgctgataagttcaaccgtctgctggaagacttcctccaggaaggtgaagagcccgatgaggatgacgcctaccaggttttatccacactcaaaagaataaccgcatttcataacgcccatgatttaagcaaatgggatctgttcgcatgcaattacaaactgctgaaaaccggtattgaaaacggagacatgccagagcagatcgtgatacacgccctgcagtgcactcattacgtgatactatggcagctcgccaagatcaccgagtcgtcttctacaaaggaagacttgctccggctgaagaaacagatgagggtcttttgccaaatttgccagcactatctgactaacgtcaacactacagtcaaggagcaggcgttcacaatactgtgtgacattctgatgatattctcccaccagataatgtctggagggagggacatgctagaaccgttggtttatacacctgattcctctctccagtctgaactcctgtcctttattctcgatcacgtattcatagaacaagatgacgacaataactcagccgacggccagcaggaggatgaggcgagcaaaatcgaagccttgcacaagaggcgaaatcttctggctgcattctgcaagctaattgtgtataccgtggtggaaatgaataccgcagctgacatatttaagcagtatatgaaatattataatgattatggagatattattaaggaaactatgtcgaaaactcggcagatcgacaaaattcagtgcgccaaaacattgatactctcactgcagcagttgttcaatgagatgattcaggaaaatggatacaactttgacaggagctcttctaccttctccggtattaaagagcttgcaagacgctttgcccttacatttgggttagatcagctgaagactcgggaggcaattgcaatgctccataaagacggaattgaatttgccttcaaagaaccaaatcctcagggagagtcccaccctcccctgaacctggcgttcctcgatatactatctgagttcagctccaaattgttacggcaggataaacgaaccgtgtatgtttacctcgagaaattcatgaccttccaaatgtctctccgccgggaagatgtgtggttaccgctgatgtcctaccggaatagtctcctggcagggggggacgacgacaccatgagcgtgatctcaggtatctcgtcaaggggctcaacagtaagaagcaagaaatccaaaccatccacggggaagaggaaggtagtggaaggtatgcagttatcacttactgaagagagttcatctagcgactcaatgtggctctctcgggagcaaacgttgcatacacccgtgatgatgcagacaccacaactcactagcacaattatgcgggagccaaagagactgcgcccagaggattccttcatgtcagtgtaccccatgcagaccgagcaccaccagaccccactggactataaccgacgggggacatctctgatggaggatgacgaggagcctatcgtggaagatgtcatgatgagtagcgagggacgcatcgaagatctgaacgaaggcatggatttcgatacgatggacatcgacctgccaccatccaagaaccggcgggagagaaccgagctcaaacctgatttttttgatcctgcctcgatcatggatgagagcgtgcttggtgtgtccatgttttag

SEQ ID NO: 207251 - DNA, 3696 bp, synthetic construct
  misc_feature 1..3696: note = Description of Artificial Sequence: Synthetic coding sequence
  source 1..3696: mol_type = other DNA
atgatcgccgcccccgagatccccaccgacttcaacctgctgcaggaatccgagacacactttagctctgacactgactttgaagatatagaaggcaaaaaccagaagcaagggaagggcaagacctgtaaaaagggaaaaaagggcccagcggaaaaagggaaaggaggtaatggcggggggaaacctcctagcggcccaaatagaatgaacggccaccaccagcaaaacggcgtcgaaaacatgatgctgttcgaagtcgttaagatgggtaaatctgccatgcagagtgttgtcgatgactggattgagtcttacaagcatgaccgcgacatagcattgctggacctcatcaactttttcattcagtgctccggctgtaagggtgtggtcacagccgagatgtttagacacatgcagaacagtgaaatcattaggaagatgaccgaggagttcgatgaagactctggagattatcccctcacgatggctggaccacaatggaagaaattcaaaagtagtttttgtgaatttatcggcgtgctggtccgtcagtgccaatattccatcatttacgacgagtacatgatggacactgtcatttctctgttgactgggttgtccgactctcaggtgagggcattccgacacaccagcactctcgctgctatgaaactgatgaccgccctcgtaaatgtcgccctgaatcttagcatcaacatggataatacccaacgccagtacgaggctgaaagaaataagatgattggcaaaagggcaaacgagcgtctggaattactgctacaaaagaggaaggagctgcaggagaatcaggatgaaattgagaatatgatgaacgctatctttaaaggagtatttgtccatcgatatcgtgatgctatcgccgagattagagccatctgtatcgaagagattggaatctggatgaaaatgtacagcgatgcattcctcaatgactcttacctgaagtatgtcggttggacaatgcacgacaaacagggggaggtcagacttaagtgccttaccgccttgcagggcctgtattacaacaaagagctgaattccaaattggagctgttcacatcgcggttcaaggataggatcgtgtcaatgacgcttgataaagagtacgacgtggctgtgcaagctattaaactgctcactcttgtcctgcagtcttcggaggaggtcctcaccgccgaggactgcgaaaatgtttatcacttagtttattctgcacaccgtcccgttgccgtcgcagcaggagagttcctctacaaaaaattgttctccagacgggaccccgaagaagatggaatgatgaagcgcaggggtcgccaaggcccgaacgccaacctggtcaaaacacttgtatttttctttctggagtctgaactgcatgagcacgcagcctatttagtagatagtatgtgggactgcgccacagagcttcttaaagattgggagtgtatgaactctcttctgctagaagagcctttgtccggagaggaggctctgacagaccgccaggaatctgcactgatagaaatcatgttgtgtacaattaggcaggcggccgaatgccaccctccagtggggcgagggacaggaaagcgcgtacttaccgccaaagagaagaaaacccagctagatgatcgtaccaagatcactgagctctttgccgtggccctaccccagttacttgcaaagtattctgtggacgctgagaaagtgactaatcttctccagttgccacagtacttcgacctggaaatatacactaccggcagattggaaaaacacctagatgccctgcttcgacaaatccggaatatagtggagaagcatactgacacagacgttcttgaggcctgtagcaagacctaccacgctctttgcaacgaggagttcacgatcttcaaccgggtggatatcagccgctctcagctgatcgacgaactcgccgacaaatttaatcgcctccttgaggacttcttacaagagggcgaagagccagacgaggacgacgcttaccaggtcctctcgacgctgaaaagaatcacagctttccataatgctcacgacttgtcaaaatgggatctgtttgcctgtaactacaaattacttaagacaggcattgaaaacggcgacatgccagagcagatagttatccacgccctgcagtgtacacactacgtgatcctgtggcagctggctaagataactgaaagctcctcaactaaggaggacctgttgagactcaaaaagcagatgagagtgttttgccagatctgtcaacattacctcaccaacgtgaacactacggtcaaagagcaggcattcacgatcctatgcgacatcctgatgattttttctcaccaaataatgagcggtggacgcgacatgctcgagcccttagtctacacgcctgacagttctttgcagagcgaactgttgtcattcatcctggaccacgtatttatcgagcaggatgatgacaataactcagctgatgggcagcaagaggatgaggctagcaaaatagaggccttgcataagaggaggaatctactggcagccttctgcaagctgatcgtgtacacggttgtggagatgaacacggctgccgatattttcaagcagtatatgaaatactataacgactacggggacattattaaggaaacaatgtcgaagacgagacaaattgataagattcagtgcgctaagactctaattctgtctttacagcagctgtttaatgaaatgattcaggagaacgggtacaatttcgaccgcagtagctccacttttagtggaatcaaagaacttgcccgccgattcgccctgacctttggacttgatcagttaaaaacacgtgaggcaattgctatgctccacaaagatggtatagagtttgcttttaaggagcctaaccctcagggcgagtcccacccacctctcaatctggcattcctggacattctctctgaattctcttctaaacttctgcgccaggataagagaacagtgtatgtgtatctcgaaaagtttatgaccttccagatgtccctgcgaagggaggacgtttggttgccactgatgtcttaccgcaattccctgctggccggtggcgatgatgacactatgtccgtgatcagcggtataagcagcagaggttctactgtgcggagcaagaaaagtaagccaagcaccggcaaacgtaaggtcgtggagggcatgcagctgagcctcacagaggaatctagttccagcgactctatgtggctgtcacgggagcagaccctgcatacccccgtgatgatgcagacaccgcaactcacatccaccattatgagggagcccaaacgtctgcgacctgaagattcttttatgtcagtgtaccccatgcaaacagagcatcatcaaacccccttggattataaccgcagaggaacgtccctaatggaggacgacgaggagcccatcgtggaggacgtgatgatgtcgtccgaaggacgaatagaggacttgaatgaggggatggattttgataccatggacatagatctgccgcctagcaaaaacagacgtgagagaactgaattgaagcctgacttttttgatcccgctagcatcatggacgaatcagtactcggagtctccatgttttag

SEQ ID NO: 207252 - DNA, 3807 bp, synthetic construct
  misc_feature 1..3807: note = Description of Artificial Sequence: Synthetic coding sequence
  source 1..3807: mol_type = other DNA
atgatcgccgcccccgagatccccaccgacttcaacctgctgcaggaatcggagacacatttctcatccgatacagacttcgaggatatcgaaggtaaaaaccaaaagcagggtaagggcaagacctgcaaaaagggcaaaaaaggccccgcagaaaagggtaagggagggaacggtggggggaagcctccgtcaggacctaaccggatgaacgggcaccatcagcagaacggtgtcgagaacatgatgctattcgaggtggtgaaaatgggcaagagtgccatgcagagcgtggttgatgactggatcgagtcttacaaacatgaccgagatattgcactgttagacctcataaactttttcatccagtgcagtggatgtaaaggggtggtgaccgccgagatgttccgccacatgcagaatagtgaaatcatccggaagatgacagaggagtttgacgaggatagcggcgattacccgctgaccatggccggaccccagtggaaaaagttcaaatccagcttctgtgagtttatcggggtgctggtgcgtcagtgccagtattccattatctacgatgaatatatgatggacaccgtcatcagcctgctgacgggtctgtcagattctcaggtgcgggcgtttagacatacgagcacactggcggccatgaaactgatgaccgctctggtaaatgtagcactcaacctgtctattaacatggataacacacagcggcagtatgaggccgagcgtaacaaaatgatcggaaagcgggcgaatgagcgcttggagctgcttctgcaaaagagaaaggagctccaggagaatcaggatgaaattgagaatatgatgaatgccatcttcaagggtgttttcgtccacaggtatagggatgctatagctgagatccgcgcaatctgtattgaagaaattggcatctggatgaaaatgtactcagatgccttcctgaacgattcctacttgaagtacgtgggctggacaatgcacgacaagcagggcgaggtgagactgaagtgtctgaccgctctgcaaggcttgtattataacaaggagttaaatagcaaactcgagctcttcacttcgaggttcaaagacagaatcgtcagtatgaccctggataaagaatatgacgtcgccgtgcaggcgatcaagctgctgacattagttctgcaatcatcagaggaggtattaaccgctgaggactgcgaaaacgtgtaccacctggtgtattcggctcataggccagtcgctgtggcagccggcgagtttttatataaaaagctgttctcccggagggaccctgaggaagacggaatgatgaaaaggagagggcgacagggccctaatgctaacctggtaaaaactctcgtcttcttcttcctggaatccgagctgcacgagcacgccgcttatttggtcgactctatgtgggactgcgcaacagagctcctgaaggattgggagtgtatgaactctcttctgctcgaggaaccattgagcggcgaagaggcattgaccgacaggcaggagtccgcattgatagagatcatgctatgtacaattaggcaggctgccgagtgccatcctcccgtcggaaggggtactggcaagcgagtactcacagccaaagaaaagaagacccagctggacgacagaacaaagatcacggaactgttcgctgttgctctacctcagctgttagccaagtacagcgtcgacgcagagaaagtgaccaacctcctgcaactgcctcaatactttgatcttgaaatctacacaacaggacggttggagaaacatttagacgcacttcttagacaaatccgcaacattgtggagaagcacactgatactgacgtgcttgaggcctgctctaagacctaccacgccctgtgcaatgaggagttcactattttcaaccgcgtggacatctcgagatcacagctgattgacgaactggcagacaaatttaaccgcctcttggaggattttctgcaggaaggggaggagcccgatgaggacgacgcctatcaagtactttctacactcaagcggataactgcattccacaatgcgcatgatttgtctaaatgggacttgtttgcttgtaactacaaactactgaaaaccggtatcgaaaatggggatatgcccgagcaaatcgtaatccatgctctccagtgcacacattacgtgattctgtggcaacttgccaaaattacagaatctagttccactaaggaggacctcctccgactgaagaagcagatgagagtgttctgtcagatttgtcagcactacttgacaaatgtaaacacaaccgttaaggagcaagctttcacaattctgtgtgacatcctcatgatcttttcacaccagatcatgtccggtgggcgggatatgcttgagcctctggtttacacccctgacagctctctccagagcgaactcctatccttcattttggaccacgtttttattgagcaagacgatgacaataactcagcagatggacagcaagaagacgaggcgtctaaaatcgaagccctgcataagcgacgtaatctgttggccgccttttgcaagcttattgtgtacaccgtggtcgaaatgaacaccgcagccgacatattcaaacagtacatgaaatattataacgattatggggatataataaaggagaccatgagcaaaactcgccagatcgacaagatccagtgcgctaagacactgatcctgagtctgcagcaactgtttaacgagatgatccaggagaacggctacaattttgaccgcagcagtagtaccttttctgggatcaaggagctggccagacgttttgcccttacctttggcctggatcagctcaaaaccagagaggcaattgctatgctccataaggatggaatcgaattcgccttcaaggaacctaatcctcagggcgagtctcaccctcccctgaatttagcctttctggatattctaagcgagttcagtagtaaactgttgaggcaggataaaagaacggtgtatgtgtacctggagaaattcatgaccttccagatgtccctgcggcgggaagacgtgtggcttcccctgatgtcttatcggaatagcctcctcgccggaggagacgatgacactatgagcgtcatcagcgggatttcctcacgcggaagtaccgtgagatcaaagaagagtaaaccatccacaggaaaacgcaaagtggtggagggaatgcaactgtctctcacagaggaaagctcctcaagcgattctatgtggcttagccgtgagcagacactgcacacacccgtgatgatgcagactccacagttgacatctaccatcatgagagagcctaaacgactgcgtcctgaggactctttcatgtccgtgtaccccatgcagacagaacatcatcaaacgcctctggactataatacccaggtaacatggatgttggcacagcgtcagcaagaggaggccagacaacagcaggaacgtgcagcaatgagctatgtaaagttgcggaccaacctccaacacgctatcagaagaggaacctccttaatggaggatgacgaggaacctatagtagaagacgtgatgatgtcctcagagggtcgaatcgaagatttgaatgaggggatggacttcgacacaatggatatcgacttaccacctagcaaaaacaggagggaacggaccgagctgaaacctgatttttttgaccctgccagtattatggatgagtccgtgctgggggtctcaatgttttag

SEQ ID NO: 207253 - DNA, 3696 bp, synthetic construct
  misc_feature 1..3696: note = Description of Artificial Sequence: Synthetic coding sequence
  source 1..3696: mol_type = other DNA
atgatcgccgcccccgagatccccaccgacttcaacctgctgcaggagtcagaaacccactttagttcggatacagactttgaggacattgaagggaaaaaccaaaagcaggggaagggcaagacatgcaaaaagggcaagaaggggcctgctgagaaagggaagggtggcaatggagggggaaagcctccctccggcccaaaccggatgaatggtcaccatcagcagaatggggtcgaaaacatgatgttatttgaagtggtcaaaatgggcaaaagcgccatgcagagcgttgtggatgactggatcgaatcctacaagcatgatagagatatcgcattacttgatcttatcaatttcttcatccaatgtagcggctgtaagggagtggtaacggcggaaatgttccggcatatgcagaactctgagattattcgcaagatgacagaagaattcgatgaggatagtggggactatccacttaccatggcaggcccacaatggaagaagtttaagagctccttctgcgagtttattggagtgctggtacgacagtgccagtatagtattatttatgatgagtatatgatggataccgttatcagtctgctcactggactctctgattcccaggtgcgtgcgttccgccatactagcactctcgccgccatgaaacttatgaccgctttagtcaatgtggctttgaatttatccatcaatatggataacacccagcggcagtacgaagcagagagaaataagatgattggcaaacgcgcaaatgaacgcctggaattactgctgcaaaagagaaaggagcttcaggagaaccaagatgaaatcgaaaatatgatgaacgctatctttaagggtgtattcgtccaccggtaccgtgatgcgattgcagaaatacgtgctatctgcatcgaggagatcggcatctggatgaagatgtattctgacgcatttcttaatgacagttacttgaaatacgttggctggaccatgcacgataagcagggcgaagtgaggttaaagtgcctgaccgcattgcaaggcttgtattacaacaaggaattgaactctaaactggagctcttcacctcgaggtttaaagatcggattgtatcaatgaccttggataaggagtatgacgtggccgtacaggcgatcaagctccttaccctagtgctgcagagcagcgaagaggtcctgaccgctgaggattgcgaaaatgtctaccatttggtttattcagcacataggcccgtcgctgtcgcagccggggagttcctgtataagaagcttttctcaaggcgcgacccagaggaggatggtatgatgaaacgccgggggcgacagggtccgaacgccaacctggtgaagaccctggtgtttttttttctcgagtctgaacttcatgaacacgctgcctaccttgtggatagcatgtgggactgtgctaccgaactgcttaaggactgggaatgcatgaattcgttgttactggaagaaccactgtcaggcgaagaggccctgactgaccgccaggagtcggcactgatcgagattatgctttgtacaattagacaagccgccgaatgtcatcctcctgttggcaggggtactggaaagcgcgtgttaacagccaaagaaaaaaagactcaactcgacgatcggaccaaaattacagagctatttgcggtggccctgccacagttgcttgccaaatactctgtagatgccgaaaaggtcacaaatctgttgcagctacctcagtattttgaccttgaaatttatacaacaggccgcctggagaaacatctcgacgcattgctcaggcagattaggaatatagtggagaagcatactgatactgacgtgctggaggcctgctccaaaacataccacgctctgtgcaatgaagagttcactatctttaaccgtgtggatatttcaaggtcgcaactgatcgacgagctcgctgacaagtttaatcgcctgcttgaagattttttgcaggaaggcgaagagcccgatgaggatgacgcctaccaggtgttgagcacattgaaacggatcactgcatttcataacgcccacgacctgagcaagtgggacctctttgcctgtaattataaattactaaagacaggaattgaaaatggagatatgcccgaacagattgtgatccacgccctgcagtgcacccattacgtgatcttgtggcaactcgccaaaatcactgagtcttcctctacaaaggaggacctgttgcggctaaagaagcagatgcgcgtattctgtcagatctgccaacactatttaaccaatgtcaacactacggtcaaggaacaggcattcactattctctgtgacatcctcatgatattttctcaccagattatgtcaggtggaagggatatgctcgaaccactggtgtatacacccgattcatcactccaatctgaactactctcttttatactggaccacgtgttcatagagcaggatgatgacaacaatagtgccgatggtcagcaggaagatgaggcatccaagattgaggcactgcataagaggaggaacctgctggcagcattctgtaagctgatcgtgtatactgtggtggaaatgaatacagcagccgacatttttaagcagtatatgaaatactacaacgattatggtgatattattaaggagaccatgtcaaaaaccagacagattgacaagatccagtgcgctaaaacactgatattgtctctgcaacagctgttcaatgagatgatccaggagaatggatacaatttcgaccggagctcctctactttctctggaatcaaggagctggctcggaggttcgctttaaccttcggcctggaccagcttaaaacacgagaagctatcgcaatgctgcataaagatggcattgagtttgctttcaaggaacctaatccccagggggagtcgcatccgccccttaacctggccttcctagacatcctgtctgagttctcgagcaagctcctgagacaggataaaaggactgtgtacgtgtacctggaaaaattcatgactttccaaatgagtctacgccgggaagacgtctggttgcccctgatgtcataccgtaacagtctcctggccgggggcgatgacgacaccatgtccgtgatatctggcattagtagcagaggttcgactgtgcgatccaaaaagtctaaaccttctactggaaagcgcaaggtagtggagggcatgcagctgtcgctaactgaggaatcttccagcagcgattcaatgtggctgtcccgtgaacagacactacacacaccagtcatgatgcagacccctcagcttacgagtactattatgcgagaacctaaacgcctgcgcccagaggactcttttatgagcgtttatccaatgcaaaccgagcaccatcagacccccctggactataatcgccgtggtacctccttaatggaggacgacgaggagcctattgttgaagatgtgatgatgtcttctgaagggagaatcgaggacctgaacgaaggtatggattttgacactatggacatagacctgccacctagcaaaaatcgcagggaacgtaccgagctcaaacccgatttcttcgaccccgcaagtattatggacgaatctgtgttgggcgtttcaatgttttag

SEQ ID NO: 207254 - DNA, 3696 bp, synthetic construct
  misc_feature 1..3696: note = Description of Artificial Sequence: Synthetic coding sequence
  source 1..3696: mol_type = other DNA
atgatcgccgcccccgagatccccaccgacttcaacctgctgcaggagagcgaaactcatttcagttctgacactgatttcgaggatatcgaaggcaaaaatcagaaacagggcaaggggaagacatgcaagaaggggaaaaaaggccccgcagaaaagggcaaaggagggaatggagggggcaagccgccttccgggccgaatagaatgaatggccaccaccagcagaatggggtcgaaaacatgatgttattcgaggtggtgaagatgggaaagagcgccatgcaaagtgttgtggatgactggatcgagtcctataagcatgatcgggatatcgccttactggacctgataaacttcttcatccagtgttccgggtgcaaaggggtagtgaccgccgaaatgttcaggcatatgcagaattcggagatcatccgtaaaatgaccgaggagttcgacgaggatagtggagattaccctctgaccatggccgggccacagtggaaaaaatttaaatcaagcttctgcgagttcatcggagtcctagttcggcagtgccagtatagtatcatttacgatgagtacatgatggacacagtgatttctttactgacaggactttctgacagtcaggtcagggcctttagacatacatcaacgttagccgcgatgaaactgatgactgcactcgtgaatgtcgccttgaacctgtccattaacatggacaacacacagagacagtatgaggcagaaaggaataagatgattggcaaaagggctaacgagaggctagagctcttgctgcagaagcgaaaagagttgcaggaaaaccaagacgagatcgaaaatatgatgaacgcgatctttaagggggtgttcgtgcaccgctacagagatgccatagcggaaatcagagcaatctgtatcgaagagatcggtatttggatgaaaatgtacagcgacgcgttcctcaacgattcctatctaaaatacgtcggatggacaatgcatgataaacagggggaggttcgtctgaaatgtcttactgccttgcagggcctgtactacaacaaggagctaaatagcaagcttgaactattcacgtcccggtttaaagatcgcatagtgtccatgacactcgataaagagtatgatgtggccgtgcaggcaatcaaactgcttacgctggttctacagtcttcggaggaagtccttacagcggaggattgtgaaaatgtgtatcatctagtatacagcgcccaccgacccgtagccgtagcagcaggggaattcctgtacaagaagctgtttagtcggagggaccctgaggaggatggtatgatgaaaagacgaggtcggcagggccccaacgccaacctggttaaaaccctggtctttttttttctcgaatcagaactgcatgagcatgcagcatacctcgtggactctatgtgggattgtgcgaccgagcttctgaaagattgggagtgtatgaactcactcctgctggaggaacccctgagtggtgaagaagctcttaccgatcggcaggaaagcgcattgattgagatcatgctgtgcacaattcggcaggcagcagagtgtcatccacccgttggccgggggaccggtaaaagagtgctgactgctaaagagaagaagacccaattggacgacaggacaaagataactgaattatttgccgttgcgctgccccagctactggctaagtattctgtcgatgctgaaaaagttacaaatcttctgcaattgccccagtacttcgatctggagatctataccaccggaagattagaaaaacaccttgacgcattgctccgccagatccggaacattgttgaaaagcataccgatactgatgtgctggaagcctgttccaagacgtatcatgccctttgcaatgaagagtttaccatttttaatcgggtggacattagtagaagccagctgatcgatgaactggcggacaaattcaaccggctgctggaagatttcctgcaggaaggagaggagcctgatgaagatgacgcctaccaagttctcagtacactgaagcgcattactgcttttcataacgcccacgacctctcaaagtgggatctctttgcgtgtaattataagcttttaaagacagggattgagaacggtgatatgcctgagcagattgtcattcacgcgctacagtgtactcactacgtcatcttgtggcagctcgctaagataaccgaatcttcctccacaaaagaagacctgctgcggctaaagaagcagatgcgagtattttgccaaatttgccagcattatctcaccaatgtgaacaccacagtcaaggagcaggctttcactattctctgcgatatactcatgattttctctcaccagatcatgagcggggggcgggatatgctggaacctctggtttacacgcccgatagctctttgcagagcgagctgctgtcctttatcttggaccacgtattcattgagcaggatgacgacaataactccgcagatggacaacaagaagacgaagcttccaagatagaagctctgcacaagcggaggaacctactggccgcattctgcaagttgatcgtgtatactgttgtggaaatgaacactgccgctgatatctttaagcagtacatgaagtattacaacgattacggagatatcatcaaagagacgatgagcaagacccgccagatcgacaaaatccagtgcgcgaaaacccttatattgtcacttcaacagctgttcaacgagatgatccaagaaaacggatacaatttcgacagaagtagttcgacatttagtggaattaaagaactggcacgacgcttcgccttaacattcgggctggaccagctaaaaacaagagaggcaatcgctatgttgcacaaggatggcatcgagtttgcatttaaggaaccaaacccgcagggagaatcacaccccccattaaatctggcttttctcgacattctcagcgaattctcatctaagcttctgagacaggacaagaggacagtttacgtgtatctagagaaattcatgacatttcagatgagtctgcgccgagaggatgtgtggctccccctgatgagctaccgaaacagtctgctagccgggggggatgatgataccatgagcgttatcagcgggatttccagccgggggagtacagtgcgatcaaagaaatccaaaccctcaaccggaaaacgtaaggtagtcgagggtatgcagctgtcactaacggaggagagctcaagtagtgatagcatgtggctcagcagggagcagacgctacacacccccgtgatgatgcagacccctcagctaacatctactatcatgagagagccaaaacgcctcaggccagaggatagtttcatgagcgtgtacccgatgcagacagagcatcatcagacccccctggattacaaccgtcgagggactagcttaatggaggacgacgaggaaccaatcgtagaggacgtgatgatgtcatccgaggggaggatcgaagacttgaatgaaggcatggacttcgacactatggatatcgatctgcctcctagcaaaaaccggcgcgaacgaacagagttgaagcccgattttttcgaccctgccagtatcatggacgaatcagttctgggcgttagcatgttctag

SEQ ID NO: 207255 - DNA, 213 bp, synthetic construct
  misc_feature 1..213: note = Description of Artificial Sequence: Synthetic coding sequence
  source 1..213: mol_type = other DNA
atgatcgccgcccccgagatccccaccgacttcaacctgctgcaggagtctgagactcactttagctctgacaccgactttgaggatatcgaggggaagaatcagaagcagggaaaagggaaaacttgtaaaaaaggtaagaaagggcccgcggagaaagggaaaggagggaacggcggaggtaagccccctagcgggccgaatagaatgtag

SEQ ID NO: 207256 - DNA, 348 bp, synthetic construct
  misc_feature 1..348: note = Description of Artificial Sequence: Synthetic coding sequence
  source 1..348: mol_type = other DNA
atgatcgccgcccccgagatccccaccgacttcaacctgctgcaggaatctgaaacccacttttcatcagatactgatttcgaagatatagaggggaaaaatcagaaacaggggaaaggcaaaacatgcaaaaaagggaagaaaggccccgccgagaagggtaagggcgggaacggcggcggcaaacctccctctgggccaaataggatgaacgggcatcaccagcaaaatggggtggagaatatgatgcttttcgaggtggtgaagatgggcaagagcgctatgcagtccgtagttgatgattggatcgaatcatataagcatgatcgtgatattgccctcctgtag

SEQ ID NO: 207257 - DNA, 510 bp, synthetic construct
  misc_feature 1..510: note = Description of Artificial Sequence: Synthetic coding sequence
  source 1..510: mol_type = other DNA
atgatcgccgcccccgagatccccaccgacttcaacctgctgcaggagagcgagactcattttagctccgacactgattttgaggatatcgaagggaaaaatcagaagcagggcaagggaaagacatgcaaaaaaggcaaaaagggccctgccgaaaaaggcaagggtggcaatggaggcgggaagcccccgtctggccctaacaggatgaacggccaccaccaacaaaatggagttgaaaatatgatgctattcgaggttgttaaaatgggcaaatcagctatgcaatccgtcgttgacgactggatcgagtcgtacaagcatgatcgtgacattgcgctcctcgaccttatcaacttcttcattcagtgctccggttgtaaaggcgtcgttactgctgaaatgttcagacacatgcagaactcagaaatcatcagaaagatgacagaggagtttgatgaggactccggggactaccctctgaccatggccggacctcagtggaaatag

SEQ ID NO: 207258 - DNA, 465 bp, synthetic construct
  misc_feature 1..465: note = Description of Artificial Sequence: Synthetic coding sequence
  source 1..465: mol_type = other DNA
atgatcgccgcccccgagatccccaccgacttcaacctgctgcaggaatccgagacacatttctcctccgataccgactttgaggacattgaagggaagaatcagaaacaagggaagggaaaaacgtgcaagaaaggtaagaagggacctgcagagaaggggaagggagggaatggtgggggcaaacccccttccggcccgaaccggatgaatggccatcatcagcagaacggcgtcgaaaacatgatgctgttcgaggtcgtgaagatgggaaagtccgctatgcagtctgtagtagacgactggattgagagttacaagcacgacagagacattgcactccttgacctgatcaacttttttattcaatgcagtgggtgtaaaggcgtcgtcaccgccgaaatgttcagacacatgcagaactctgagatcattagaaaaatgacagaggagtttgatgaatag

SEQ ID NO: 207259 - DNA, 627 bp, synthetic construct
  misc_feature 1..627: note = Description of Artificial Sequence: Synthetic coding sequence
  source 1..627: mol_type = other DNA
atgatcgccgcccccgagatccccaccgacttcaacctgctgcaggaatctgagacgcacttttctagcgacaccgatttcgaagatattgagggcaaaaaccagaaacagggaaagggaaagacctgtaagaaaggtaagaagggacccgctgagaaaggcaaggggggcaacggaggaggtaagcctccgagcgggcccaaccgcatgaatggacatcaccagcaaaatggggttgaaaatatgatgctcttcgaagtggtgaaaatgggtaaatccgccatgcagtctgtcgtggatgattggatcgaaagttacaagcacgatagagatattgctttgctggatctgattaatttcttcatccaatgctccgggtgcaagggggttgtgactgcagagatgtttcgccacatgcagaactcagaaatcattcgtaaaatgacagaggaattcgacgaggattcgggagactatcctctcactatggccgggcctcagtggaagaagttcaaatctagcttctgcgagttcataggtgtactggtcaggcagtgtcagtactcaattatctatgatgagtatatgatggatactgttatcagtcttctgaccgggctgtcatag

SEQ ID NO: 207260 - DNA, 1647 bp, synthetic construct
  misc_feature 1..1647: note = Description of Artificial Sequence: Synthetic coding sequence
  source 1..1647: mol_type = other DNA
atgatcgccgcccccgagatccccaccgacttcaacctgctgcaggagagcgagactcatttcagttctgacacagacttcgaggacatcgagggcaaaaatcagaagcagggcaagggcaaaacatgtaagaagggaaagaaaggtccagctgagaagggaaagggcgggaacggcggcggaaaacctccatcgggtcctaataggatgaacggacatcaccaacaaaacggtgtggagaatatgatgctgtttgaagtcgtgaaaatgggcaagtccgcgatgcagagcgtcgtggatgactggatcgagtcttacaagcatgaccgcgacatcgcccttcttgatctcataaatttttttatccagtgcagtgggtgtaagggggtagtcactgctgagatgttcaggcatatgcagaattctgagatcatccggaagatgacagaggagtttgatgaggattctggcgactatcccttgacaatggccggcccccagtggaagaaatttaagagctcgttttgcgagtttattggagtgcttgttcgacaatgtcagtactccattatttatgatgaatatatgatggacactgttatatccctactgacgggactgtccgatagtcaggttagagctttcagacacacctccacactggctgcaatgaagttaatgaccgctttggtgaacgttgccttgaacttgtcaattaatatggataatacacagcgacagtatgaggcggaacgaaataagatgatcgggaaacgcgctaacgaacgcttagagctcttacttcaaaaacgaaaggaattgcaggagaaccaagacgaaattgagaatatgatgaacgccattttcaaaggcgtgtttgtgcacagataccgcgacgctatcgcagagataagagctatctgcatcgaagaaattggtatttggatgaaaatgtatagtgacgcttttttgaacgacagctacctgaagtacgtggggtggacaatgcatgacaagcagggagaagtgagactgaaatgtctcacggcgctgcaaggcctttactacaataaggaactcaactctaaacttgaactcttcacttccaggttcaaagaccgtatagttagcatgaccttggataaggaatatgatgtggcggtgcaagccattaagttactgacccttgtccttcagagctctgaagaagtgctaactgccgaggactgcgaaaacgtctaccacctagtctatagcgctcaccggcctgtggccgtcgccgcaggggaattcctgtataagaagctcttctcacgtcgggaccctgaagaagacgggatgatgaagcgccgcgggcgacagggacctaatgccaatcttgtgaaaaccttagtcttctttttcctggaaagcgaactgcacgaacatgcagcttatcttgtggactccatgtgggactgtgcaacagaacttctgaaggattgggaatgcatgaattctctgctgttggaggaaccactatccggagaagaagcacttacggaccgccaggagtcagcactcatcgaaattatgctatgcactatcagacaggcagccgagtgccaccctccagtgggacgcggcacaggtaaacgggtgctgtag

SEQ ID NO: 207261 - DNA, 123 bp, synthetic construct
  misc_feature 1..123: note = Description of Artificial Sequence: Synthetic coding sequence
  source 1..123: mol_type = other DNA
atgatcgccgcccccgagatccccaccgacttcaacctgctgcaggaatccgaaacccacttctcctccgatactgactttgaggacatagaaggtaaaaatcagaagcagggtaaaggctag

SEQ ID NO: 207262 - DNA, 3678 bp, synthetic construct
  misc_feature 1..3678: note = Description of Artificial Sequence: Synthetic coding sequence
  source 1..3678: mol_type = other DNA
atgagcagccccctgcagcgggccgtgggcgacaccaagcgggccctatcagctagctccagctcgtctgcatccctgccctttgacgaccgggactccaatcatacttccgagggaaatggtgactctctgcttgcggatgaagacacggacttcgaggactctttgaaccgcaatgtaaagaagcgcgctgcaaaacggccccccaagaccacgccagttgccaagcaccctaaaaagggcagccgggtggttcataggcatagccgaaagcaatctgagcctcctgcaaatgaccttttcaacgctgttaaggctgctaagtctgatatgcagagcttggtcgacgagtggctagattcgtacaaacaggaccaagatgccggcttcctcgaattggtcaattttttcatccaatcatgcggttgtaaaggcattgttacaccagagatgttcaaaaagatgagtaactctgagattatccagcacctgaccgagcagttcaatgaagactctggagattaccccctgatcgcccccggaccatcgtggaaaaagttccagggatctttttgcgagttcgttcggactctggtgtgccagtgtcagtattcattgctgtacgacggttttcccatggacgatttgatctcgctgctcacgggtctcagtgatagccaagtcagggcctttcgacatactagcacactcgccgcaatgaagctcatgacttcactggtaaaggtcgcgttgcaactctcagtgcatcaggataacaatcagcgtcagtacgaggcggagcgtaacaagggcccaggacagagggcccctgagagacttgagagcttgctggagaagaggaaggagttacaagagcaccaggaagagattgagggaatgatgaatgccctttttcggggggtgtttgttcataggtaccgagacgtgcttccggagatcagagcaatttgcattgaagagattggctgctggatgcagtcatattctacttctttcctgaccgactcctatctgaaatacatcgggtggacactgcacgataagcacagagaagttagattgaaatgtgtgaaggcactgaaaggcctatatggtaaccgggacttaacaaccagacttgaactatttacatcaagatttaaggaccgtatggttagcatggttatggatcgcgaatatgacgtggccgtggaggcggtgcggttgttgatcctgatcctcaaaaatatggagggcgtactcacagacgccgactgcgagtccgtgtacccggtggtgtatgcttcccacagaggattggcttccgcggccggtgaattcctgtactggaagctgttttatccggagtgtgagattagaatgatgggaggacgtgagcagcggcagtctcctggggctcaaagaacattctttcagctgctcctgagtttcttcgtagagagcgagctgcatgaccacgccgcttatctcgtcgacagcctgtgggattgtgctggagcgaggttgaaggattgggagggattgacttctctcttactggagaaggaccaaaatttgggagacgtgcaggaaagcacgttgatcgaaatccttgtttccagtgcccgtcaagctagcgagggccacccccccgtcggtagagtgacaggtaggaagggactgacctccaaagaaaggaagacccaggccgacgacagagtgaaactgaccgagcacctgatcccgcttctaccccaactgcttgctaaattctccgccgacgccgagaaggtgactccactgctgcagttgctgtcttgttttgatctgcatatttattgtacaggacgcctggagaaacacctcgagctgtttttacagcagctgcaagaggtggttgtgaagcatgccgagcccgcagtgctggaggctggagctcatgccctttatctgttgtgtaatccggagttcaccttcttcagccgcgctgacttcgcccgaagtcagctagtggacctcctgaccgatcggtttcaacaggagttggaggagttgttgcaaagtagcttcctggacgaagatgaggtttacaacctggctgctacactcaagcggctcagcgcgttctacaacacccatgacctcactagatgggaactgtacgagccatgctgtcagctgttacagaaagccgtggatactggggaagtgccgcaccaagtcattctgcccgcactaacgctcgtatacttcagcattctgtggaccttgacccacatctcaaagtccgatgcatcccagaagcagttgtcatcactgcgagacaggatggtcgccttctgtgaattgtgtcagtcctgtctctctgatgtggataccgagatccaggagcaggcctttgtgctgctgagcgatctgctcctcatcttctccccgcaaatgatcgtggggggaagagattttctgaggccattagtctttttccccgaagccacattgcagtcagaactggcatccttcctgatggaccacgttttcatccagcctggcgacctcggctccggagacagccaggaggatcacctacaaatagagaggttacaccagaggagaaggcttctggcaggattctgtaaacttttactctacggcgtcctcgagatggacgcagccagcgatgtgttcaaacattacaacaaattctataatgactacggagatattataaaagagaccctcacacgagcacggcagattgaccggtcccattgttcaaggatactgctgcttagcctgaaacagctgtacactgaactgctgcaggagcacggcccgcaagggctgaatgaactgcctgctttcatcgaaatgagagatcttgcccggcgctttgcactgagtttcggtcctcagcagctgcagaaccgggatctggtggttatgctgcacaaggagggcattcaattctcgctgtccgagctaccacccgctggctctagtaaccagccacctaatctcgcattcctggaacttttatctgagttttctccccgcctatttcaccaagataaacaacttctgctgagttatctagaaaagtgcctgcaacacgtgtctcaggccccggggcatccctggggcccggttaccacttactgtcacagtctgtcacccgttgagaacacagccgaaacctctccccaggtcctcccttcatctaagcgccgaagagtagaagggccggcgaagcctaatagggaggacgtgagctcctcccaggaggagtccctacagctgaacagcataccacctacgccaacgttaacatctactgccgtcaagtcgagacagccgctgtggggactgaaggaaatggaagaggaggatgggtctgagctcgacttcgcccaaggccaacctgtggcagggacagaacgttcgcgcttcctgggccctcagtattttcagaccccacacaatccctccggacctgggttggggaatcagctgatgcggttaagcttgatggaagaggatgaggaggaggaattggaaatacaggacgaatccaatgaagagagacaagatactgatatgcaggcttcctcttactcatcaacctccgaacgtggcctcgacctcctggatagcaccgaactcgacatcgaggacttttag

SEQ ID NO: 207263 - DNA, 2667 bp, synthetic construct
  misc_feature 1..2667: note = Description of Artificial Sequence: Synthetic coding sequence
  source 1..2667: mol_type = other DNA
atgagcagccccctgcagcgggccgtgggcgacaccaagcgggcccttagtgctagcagttctagttctgcctcgcttcccttcgacgatcgagactccaaccatacatctgagggtaacggagattccttgctggctgacgaggatactgacttcgaagattcattaaaccggaacgtgaagaaaagggccgcaaagcggccacccaaaaccactcccgtggcaaagcacccgaagaaaggctccagagtcgtccatcggcacagtcgtaaacagtccgagccgcctgccaacgacctgttcaatgcagtgaaggctgctaaatcagacatgcagagcctcgtggacgaatggctggattcttataagcaggatcaggacgccggctttctggagctggtgaacttttttatacagtcatgcggatgcaaaggtatcgtgacgccagaaatgtttaaaaaaatgagcaatagtgagatcatccagcacctgaccgagcagtttaatgaaatggacgacctcattagtcttttgactggactttcagacagccaggttcgcgcttttagacacacgagcacattggccgcaatgaagctgatgacctcactggtgaaggtcgccctccagttgtcggtacatcaggataacaatcagcggcagtatgaagctgagcggaacaagggacccgggcagcgggcacctgaacggctagagtcgctattagagaagagaaaagaactccaagagcatcaggaggagatagaggggatgatgaatgccctgttcagaggggttttcgtgcaccgttaccgagacgttctgcctgaaatcagagctatctgtatcgaagaaatcggttgctggatgcagtcatactcaactagctttttaaccgactcttatttgaagtacattggctggacactgcacgacaagcatcgtgaagtcaggctgaagtgcgtgaaggccctcaaagggctgtatggaaatcgggatctgaccaccaggctggagctgtttacgagtaggttcaaagaccgtatggttagcatggtgatggatagagaatacgatgtagctgtcgaagccgtgaggctgttgatcctgatacttaaaaacatggaaggggttctgactgatgccgattgtgagtccgtgtaccccgttgtgtacgcttcgcacagagggctggcgagcgccgcaggcgagtttttatattggaagctgttctaccctgagtgtgagatcagaatgatgggaggccgggaacagcgccagagccccggggctcagagaaccttttttcagttgttattaagcttttttgtggaatccgagctgcacgaccatgccgcataccttgtagactcactgtgggactgtgccggtgctcgcctgaaggactgggagggtttgacaagtttactgttggaaaaagatcagaatctgggcgatgtccaggaatctacattaatcgagattctcgtctctagcgctagacaggccagcgaagggcacccgcccgtgggaagagttacaggaagaaagggccttacatccaaagaacggaagactcaggccgacgaccgagtcaaattgactgagcacctaatccccctgctcccgcaactgctggccaagttctctgcagatgccgagaaagtcactccattattgcagctgctctcgtgctttgatcttcatatatattgtaccggccgtcttgagaagcatctggagctttttttgcagcagttgcaggaggtcgtagtgaagcacgctgaaccggcagtgttggaggctggcgctcatgcgctgtacctactgtgcaaccctgagtttacatttttttccagagccgacttcgcaagaagtcagctggttgacctgctgacagaccgattccaacaagaactggaagagctattacaaagtagctttttggatgaagacgaggtttataacctggccgccactctgaagaggctttctgcattctataatacacacgaccttacacgttgggagctctacgaaccttgctgtcagttgctccaaaaagctgtcgataccggggaagtgcctcatcaagtgattctgcccgctctgacgctggtttacttctccatcctttggactctcactcactcattgtcccccgtggaaaacactgcagaaaccagcccccaggtgcttccatccagcaaacgacgtcgcgtcgagggacctgctaagccaaatcgggaagacgttagctcttcacaagaagaatcgctccagctcaatagcatccctcctactccaacacttacctctacggcagtgaagagtaggcagccactgtggggattaaaagaaatggaagaggaggacggtagtgagctggattttgctcaggggcagcctgtggcgggaacggagcgctcaaggttcttggggccacagtatttccagacaccgcataacccaagcggcccggggctaggtaatcagctgatgcggctgtcacttatggaggaagatgaggaagaggaattggaaattcaagacgaatccaacgaggaacggcaagataccgatatgcaagcctcttcttacagctctacctcagagcggggacttgacctcctggacagcaccgaacttgacattgaggacttttag

SEQ ID NO: 207264 - DNA, 789 bp, synthetic construct
  misc_feature 1..789: note = Description of Artificial Sequence: Synthetic coding sequence
  source 1..789: mol_type = other DNA
atgctgcacaaggagggcatccagttcagcctgagcgagctgccccctgccggcagttccaatcaacctccaaacctggccttcttggaactgttatccgagttctcaccacgcctttttcaccaggataaacaattgttattgtcctacctggagaagtgtctccaacatgtgagccaggctcccgggcatccctggggacccgtgacaacctactgtcacagtctttctcctgttgagaacacagctgagacatcacctcaagtgctaccatccagtaaacggagaagggtggaaggacctgcaaaaccaaatcgtgaagacgtttcgtccagtcaggaagaatctttacagttaaattcgatcccaccaacgcctactctcacgtccacagccgtaaaaagcagacagcccctgtgggggctgaaagagatggaagaggaggatggtagcgaactggactttgcccagggctcccagccagtggcgggaactgagaggtcgaggtttctgggaccccagtattttcagaccccgcacaacccgtccggacccggactgggcaatcagctaatgagactttcacttatggaagaggacgaagaagaagaactggagattcaagacgagagcaacgaagagcggcaagatacagacatgcaggcaagcagctactccagtaccagcgagcggggactggacctgttggattctacagaactagacattgagattactgagagtctccctctgctggggaagtccccccacccctacaacagccgttag

SEQ ID NO: 207265 - DNA, 438 bp, synthetic construct
  misc_feature 1..438: note = Description of Artificial Sequence: Synthetic coding sequence
  source 1..438: mol_type = other DNA
atgagcagccccctgcagcgggccgtgggcgacaccaagcgggccctgtcagcctcttcgagtagttcggcctcccttccattcgatgatagagattccaatcacacatcggaaggtaatggcgactctctgctcgccgacgaagatacagatttcgaagactccctcaatagaaacgtgaagaaaagagccgccaagcgcccacccaaaactacccctgtggccaaacaccctaagaaagggtccagggtggtgcatcgccacagtcgcaagcaaagcgaaccccctgctaacgatttattcaacgcagtaaaagccgccaaaagtgatatgcagtccctcgtggatgaatggctggattcttataaacaggaccaggatgctggctttctggagttagtgaatttctttatccagtcatgcggttgcaaaggttag

SEQ ID NO: 207266 - DNA, 339 bp, synthetic construct
  misc_feature 1..339: note = Description of Artificial Sequence: Synthetic coding sequence
  source 1..339: mol_type = other DNA
atgagcagccccctgcagcgggccgtgggcgacaccaagcgggccctaagcgcctcatctagttcgtcggcttctctgcctttcgatgatcgcgactctaatcatacgtcagagggaaacggggattcgcttcttgccgatgaggacactgactttgaagacagcctcaataggaatgtcaagaagcgagccgccaagaggccgccgaagaccacacctgtggccaagcaccccaagaaaggctcgagagtggttcacagacatagtcggaagcaaagcgagccccccgctaacgatcttttcaatgcggtgaaagctgctaagagcgatatgcaatag

SEQ ID NO: 207267 - DNA, 3678 bp, synthetic construct
  misc_feature 1..3678: note = Description of Artificial Sequence: Synthetic coding sequence
  source 1..3678: mol_type = other DNA
atgagcagccccctgcagcgggccgtgggcgacaccaagcgggccctgagcgcaagttccagcagttccgccagtctgccttttgacgatagagattctaaccacacctctgaaggtaacggcgattccctgctcgctgatgaggataccgacttcgaggacagcttgaataggaacgtcaagaaacgcgctgccaagcggcccccaaagactactccagtggccaaacatcctaagaaggggtctcgagtcgtccacagacatagtaggaaacagagcgaaccccccgcaaacgatctgtttaatgcagtgaaagccgccaagagcgatatgcagtcattagtcgatgaatggctggactcctataaacaggaccaggacgctgggttcttggagttggtcaattttttcattcaatcttgcggttgtaagggaatagtgacacccgagatgtttaaaaagatgagcaattcggaaatcattcaacacctgactgagcagtttaatgaggatagcggggattacccactgatagctcccggccccagctggaagaaattccagggatccttctgtgagtttgtgcggaccctggtgtgtcagtgtcagtacagtctcctgtacgatgggttcccaatggacgacctgataagcctgctcactgggttatctgactcacaagtccgagcctttcgccatacatccactctggctgccatgaagctgatgacatcgctggtgaaggtggccttacaactttcggttcaccaggataacaaccagcgacagtacgaggcagaaagaaataagggaccgggacagcgggctcctgaaagattggagagtttgctagaaaagcgcaaggaacttcaggaacaccaggaagagatcgagggcatgatgaatgccttattccggggcgtcttcgtccaccggtacagagacgtgttacccgagataagagccatctgtattgaagaaataggatgttggatgcagtcctacagtaccagttttttaacagactcctacttgaagtatattggctggacacttcacgacaagcatcgggaagttagactgaaatgcgtgaaggccctcaaagggctgtacggaaacagggacctgaccacccggctcgaactgtttacatctcggtttaaggaccgcatggtatcaatggtcatggatcgagaatatgacgttgccgtcgaagcggtcagattgttgatccttatactgaaaaatatggaaggcgtgctaaccgacgctgactgcgagtctgtctaccccgtagtatacgcctctcaccgcgggttggctagcgcagcgggtgagttcctttactggaaactgttctatcccgaatgtgagattcggatgatgggcggccgcgaacaaaggcagagccctggagctcagagaactttctttcagctgctgttgagctttttcgtcgagtccgagttacatgatcacgctgcataccttgtggactcactctgggattgcgcaggcgcccgcctcaaagattgggaaggtttgacctctttactgctggaaaaagaccagaacttgggagatgtccaagagtctactctgattgaaattttggtctctagtgcacgtcaggcctctgagggtcatccccccgtgggtcgggtgacaggaaggaaggggctcactagcaaagagaggaaaacacaggcagatgatcgggtcaagctgaccgaacatcttatcccactcctgccccagctactggctaagttctcggcggatgcggagaaagtaactcctttattgcaactgctgagttgttttgacctgcacatttactgtaccgggcggctggagaaacacctggaactgtttctacaacaactgcaggaggtggtggtgaagcatgctgagcctgcagtcctggaggcaggggcccatgctctgtacctgctctgtaaccccgagtttacttttttctctcgagccgactttgcccgctcgcagctggtggatttgctaacagaccgattccagcaggagcttgaagagctgctgcagtcttcttttctagacgaagacgaggtgtataacctcgccgcaacccttaaacgtctgagtgcgttttataacacccacgatctgacgagatgggaactatatgaaccgtgctgccagctcctgcagaaagccgtcgatacgggcgaggtacctcaccaggtgatcttgcccgctctcaccttagtctatttcagcattctgtggacactcacacacatttctaagtctgacgcctcccaaaaacagctgagctctctgcgggatcggatggttgctttttgtgagctgtgccagtcctgcctaagcgacgtggacactgagattcaggagcaggcatttgtgcttctgtctgacttgctgttgattttctcaccgcaaatgatcgtcgggggcagagatttcttaagaccattggtatttttccctgaagccaccttacagagtgagctggccagctttctgatggaccacgtgttcattcagccaggggacttagggagcggggacagccaagaagatcatctgcagatcgagaggcttcaccaaagacgcagactgctggccggcttctgtaaactgctactgtacggcgtattggagatggacgctgcgtcagacgttttcaaacactataataaattctataatgattacggagacatcatcaaagaaactctgacccgggcccgtcagattgaccggtcacattgtagccgaatattgctgctttcacttaagcagttgtataccgagctgcttcaagaacacggacctcaagggctgaatgagctcccggcattcatagagatgagagatctggccaggcgcttcgccctctcctttggaccccaacagctgcaaaatagggatcttgtagtgatgctgcataaagagggaatacagttctccctgtctgagttgcctccagcagggagctcgaaccagccacctaatctagccttcctcgagctgctgagcgaattttctcccaggctcttccaccaggacaagcagttactcctgtcttatcttgagaagtgcctccagcacgtaagtcaggctccgggccacccatgggggcccgtgacaacgtactgccattccttgtctccagtggagaatacagccgaaacctcacctcaggtcctgcctagctctaaaagaaggagagtcgagggccccgcgaagccaaacagggaggacgtgagttcgtcgcaagaagagagcttgcaacttaactcgattccccctacccccacccttactagtacggccgtgaaatctcgtcaacccttgtggggcctgaaagaaatggaggaggaggatggctcggaattggattttgctcagggtcagcccgttgctgggacggaacgcagtagatttcttggcccacagtattttcaaaccccacacaacccttctggaccggggctaggaaaccagctgatgaggctgtcattgatggaggaagacgaggaagaggagctggagatccaggatgagagcaacgaggagagacaggatacggacatgcaggcctcaagttactcaagcaccagcgagcgaggactcgacctgctggactctactgaactggacattgaagacttttag

SEQ ID NO: 207268 - DNA, 567 bp, synthetic construct
  misc_feature 1..567: note = Description of Artificial Sequence: Synthetic coding sequence
  source 1..567: mol_type = other DNA
atgagcagccccctgcagcgggccgtgggcgacaccaagcgggccctgagcgcttcttccagctcgagcgcgtccctcccgttcgacgatagagatagcaaccacacttcagaggggaacggagattcactgctcgcggatgaggacacagactttgaagatagcctgaataggaatgtgaagaagcgggcagcaaagcggccacccaaaaccacccccgtggccaagcatcccaagaagggcagccgggtggtgcaccgtcactcaagaaagcagagtgagccacctgccaatgacctgtttaacgcagtgaaggccgctaaatcagacatgcaggattctggagattatccattgattgcccctggcccctcttggaagaaattccagggatcattctgtgaattcgtccgtacactggtgtgccagtgccagtattccctgctatatgacggttttcccatggacgaccttatttctctgctgacaggcctcagtgacagccaggtgagagcttttaggcatacgagcacactggcggcaatgaagctcatgacctctctatag

SEQ ID NO: 207269 - DNA, 1047 bp, synthetic construct
  misc_feature 1..1047: note = Description of Artificial Sequence: Synthetic coding sequence
  source 1..1047: mol_type = other DNA
atggtgtggccctgggtggccatggccagccggtggggccccctgatcggactggcgccttgctgcctgtggctcctgggggcagtgctgctcatggatgccagtgcgaggcccgccaatcattctagcacacgagaacgcgtcgccaaccgcgaggagaacgagattttacctccagaccacctgaatggtgtgaagttagagatggatggccatttaaacagaggatttcaccaggaagtatttttggggaaggatctggggggattcgatgaggacgctgagccgcgtcgttctcggcgcaagctgatggtgatctttagcaaggttgacgttaacaccgacaggaaaatttctgcgaaggaaatgcagaggtggatcatggagaagaccgcagagcactttcaagaggctatggaagaatccaaaacccattttagggccgtcgaccctgacggcgacgggcatgtttcttgggacgagtataaggtcaaattcttggcctccaagggtcactctgagaaagaagtggccgacgcaattaggctgaatgaagagttgaaggtcgacgaggaaacccaggaggttctggaaaatttgaaagacagatggtaccaagccgattccccccccgcagacttgctgctcaccgaggaggaatttctatcctttctgcatcctgaacacagccgggggatgttgcgctttatggtgaaagaaatagtgcgggatcttgatcaggacggcgacaagcagctgtcagtcccagagtttatttccttgccagttggtactgtggagaaccagcagggacaagacatcgacgataactgggttaaggaccgtaaaaaggagtttgaggaattgatagattccaaccacgatggaatagttacggctgaagagttggaaaatgtgccgaccctcccattgcagccgataggaacccttaattctcacttcgtgaggcttgcagccgagcttggcgggggcaaggccaccctgacgtgtgcacccttagctagaagggcgacctggactccctag

SEQ ID NO: 207270 - DNA, 1089 bp, synthetic construct
  misc_feature 1..1089: note = Description of Artificial Sequence: Synthetic coding sequence
  source 1..1089: mol_type = other DNA
atggtgtggccctgggtggccatggccagccggtggggccccctgatcggactggccccctgttgcctgtggctgctcggcgctgtgcttctgatggatgctagtgcgcgacctgcgaatcacagctccacccgtgaaagggtggcaaatcgtgaagagaacgagatcctgccaccggatcacctgaacggtgtgaaactggagatggacggacacctgaatcggggattccaccaagaggtgtttttaggaaaagacctcggtggcttcgatgaggatgctgagcccagacgaagcagaaggaagctgatggtgatcttttccaaagtagacgtgaacactgacaggaagatctctgctaaagagatgcagcgatggatcatggagaagaccgctgaacactttcaggaagccatggaagaatctaagacgcacttcagagccgtggatcctgacggagacggccatgtgtcctgggacgaatataaggttaagttcctcgcaagtaagggtcatagtgagaaggaggtcgccgatgcaatcaggctgaacgaggaactgaaggtcgacgaagagacacaggaagtgcttgagaacctgaaggaccgatggtaccaagccgactcaccccccgctgatctcctgttgaccgaagaggaatttctttccttcctccacccagagcatagcagggggatgctgcggttcatggtgaaagagatcgtacgcgatttggaccaggacggcgataagcagctgagtgtgcccgagtttatctctcttccagttggtacagtagagaatcagcagggccaggacatcgatgacaattgggtcaaagaccgcaagaaagaatttgaagaactgatagacagcaatcacgatggaatcgtcacagccgaagagttggagagttacatggaccccatgaacgagtataatgccctgaacgaggctaaacagatgatcgccgtggccgatgagaatcagaatcatcatctggaaccggaggaggttcttaagtactccgagttttttactggcagtaaattagtagactatgctaggtcagtgcacgaagaattttag

SEQ ID NO: 207271 - DNA, 732 bp, synthetic construct
  misc_feature 1..732: note = Description of Artificial Sequence: Synthetic coding sequence
  source 1..732: mol_type = other DNA
tgactggagatggacggccacctgaaccggggcttccaccaggaggtctttcttggaaaggatctcggagggttcgatgaagatgcggagccccgccgaagtagacggaaacttatggttatttttagcaaagtagacgtaaatacggaccgcaagatttctgcaaaggagatgcaaaggtggatcatggaaaagaccgccgaacattttcaggaagccatggaggaaagcaaaacccattttcgagccgtcgatcccgacggcgatggacatgtgagctgggacgagtacaaggtgaagttcttggctagcaaggggcacagtgagaaggaggtggcagacgctattagactgaacgaggagttaaaagtggacgaagagtccagcacgagccggaactttctagacctacgcgccggcgtttgtcgcccgaggtatccccaggctgctcccctcagcgcccaggaggtgctggagaacctgaaggacaggtggtaccaggccgatagccccccggcggacttgctgttaactgaggaagaatttttgagcttcctgcacccggagcattcacgcggtatgctacggttcatggtgaaagaaatagtccgcgaccttgaccaggacggcgacaagcagctaagcgtgcccgagttcatatccctacccgtgggtaccgtagaaaatcaacagggacaggacatcgatgacaactgggttaaagacagatag

SEQ ID NO: 207272 - DNA, 609 bp, synthetic construct
  misc_feature 1..609: note = Description of Artificial Sequence: Synthetic coding sequence
  source 1..609: mol_type = other DNA
atggtgtggccctgggtggccatggccagccggtggggccccctgatcgggctcgcaccgtgttgcctttggctgctgggcgccgtgttgttaatggatgccagtgcgaggccggctaaccatagctccacgcgggaacgagtcgccaatagggaagaaaatgaaatcctgccaccagatcacctgaacggcgtgaaacttgaaatggacggccatctgaataggggcttccatcaggaggtgttcttgggcaaagacctcggggggttcgatgaggacgcggagccccggcgctcccgaagaaagctgatggtcattttcagcaaggtcgacgtgaacaccgaccgaaaaatcagtgccaaggagatgcaaagatggattatggaaaaaaccgccgaacacttccaggaggcaatggaagagtctaagacacactttagagcagtggaccctgatggcgatggccacgtgtcctgggatgagtacaaagttaagtttttagctagtaagggacatagtgaaaaagaagtggccgacgctatccgcttgaatgaagaactgaaagttgacgaggagagacatgggccaccgggacctcgggcactgtag

SEQ ID NO: 207273 - DNA, 636 bp, synthetic construct
  misc_feature 1..636: note = Description of Artificial Sequence: Synthetic coding sequence
  source 1..636: mol_type = other DNA
atggccgtggtgcccctgctgctgctgggcggcctgtggagcgccgtgggtgcttctagtttgggcgtcgtgacttgtgggtccgtagtgaaacttttgaacactcgtcataacgtgcggctgcactcccatgacgtcagatatggaagcgggtcaggacagcagtccgtgaccggcgttacgtcagttgatgacagcaattcttattggaggatcaggggcaagagcgctaccgtgtgcgagcgtggaactccaattaagtgcggtcagcccattaggctgacccatgtaaatacaggccgcaacctgcactctcatcactttaccagtccgcttagcgggaaccaggaggtgtctgcgttcggggaagaaggggaaggagattatctggacgactggacagtattatgcaacggaccatattgggttcgagatggcgaggtgagattcaaacattcctctactgaggtccttctgtcagtaaccggggaacaatacgggcgaccaatcagcgggcagaaagaagttcacgggatggcccaaccttcacagaacaattattggaaggcaatggagggaatatttatgaagccgtcagaattactaaaagccgaagcccaccacgctgaactgtag

SEQ ID NO: 207274 - DNA, 666 bp, synthetic construct
  misc_feature 1..666: note = Description of Artificial Sequence: Synthetic coding sequence
  source 1..666: mol_type = other DNA
atgtggagcgccggccggggcggcgccgcctggcccgtgctgctgggcctactcctcgcccttctggttccagggggcggagctgcaaagaccggtgccgaactcgttacttgtgggagcgtgctgaaactgttaaatacgcaccatcgagttcgtcttcatagccacgacatcaagtacgggtccggaagtggccagcagtccgtaactggtgtagaagcttcagatgatgccaattcttactggcgcatccgggggggatcagagggaggctgtcccaggggtagccctgttaggtgtggccaggctgtgcggctaacccacgtacttacaggcaagaacttgcatacacaccactttcctagccctcttagtaataatcaggaggtctccgcattcggggaggatggcgagggcgacgatctggacctgtggaccgtacggtgcagcggtcagcattgggagcgcgaggccgccgtcagatttcagcatgtaggcacaagcgtcttcctgagcgttacaggcgagcagtacggctcccccattcgcggtcagcacgaagtccatggaatgccttcagcgaatacccacaatacctggaaggcaatggagggtatctttataaaaccaagcgttgagcccagcgcgggacacgatgagctttag

SEQ ID NO: 207275 - DNA, 2058 bp, synthetic construct
  misc_feature 1..2058: note = Description of Artificial Sequence: Synthetic coding sequence
  source 1..2058: mol_type = other DNA
atggacgtgtgcgtgcggctggccctgtggctgctgtggggcctgttgctgcaccaaggccagtccctttcacattctcactcggagaaggcgaccggtacttcctccggtgcgaattccgaagagtccaccgcagctgaattctgccgcatcgacaagccactgtgccactctgaggatgaaaagctgtcttttgaggccgtacgaaatattcacaagctcatggatgatgacgccaacggcgatgttgatgtggaagagagcgatgaatttctccgtgaagacttaaattaccacgaccctaccgtgaagcactcaacctttcatggagaagataaattgatctccgtcgaggatttgtggaaggcctggaaatcaagcgaggtatacaactggaccgtggacgaagttgtgcagtggctgattacctacgttgaactgccccagtacgaggaaactttccggaagttgcaactatccggtcacgctatgccacggctggccgttaccaataccacaatgaccgggaccgtgttgaagatgaccgaccgctcacataggcagaagttacagctgaaggctcttgacacagtcctttttggcccccccctcctgacccggcacaatcatctgaaggatttcatgctcgtagtgtcaatagtgatcggggtggggggatgttggttcgcctacatccagaaccgctattcaaaagaacatatgaaaaagatgatgaaagacctggaaggactgcatagggccgagcagtcactccacgatttacaggagagactgcataaggctcaggaagagcacagaacagtcgaggtagagaaggtgcatctggagaagaagttgcgggatgagattaacctggccaaacaggaggctcagagactgaaggagctccgagaaggtacagaaaacgagagatccagacagaagtacgctgaggaggagctcgagcaagtccgagaggcattgaggaaggccgagaaggaattagaatcccacagtagctggtatgcccccgaagcgcttcagaagtggttgcaacttacccacgaagtggaggtacagtattacaatatcaaaaagcagaatgctgaaaagcagctgctggtcgccaaagagggcgccgagaagatcaagaaaaaacgtaacaccctgtttggcaccttccacgtagcccattcatcatctctcgacgacgtcgatcataaaatacttactgctaaacaggccctgagcgaagtgactgctgcactgagggagcgactgcatcgctggcagcagatcgaaattctctgcggattccaaattgtgaataaccctgggattcatagcttggtcgctgccttgaacatcgacccctcatggatgggctctacccggcctaatcccgcccacttcataatgacggacgatgtggacgacatggacgaggaaatagtatcccctctcagtatgcagtccccaagtctgcagagttccgtgcgccaacgattaaccgagcctcagcacgggcttggatcccaacgagacttgacccattctgactctgagtcatctttgcacatgtctgacaggcagcgggtcgcccctaaaccgccccagatgtctagggccgcagacgaggcacttaacgcgatgacttccaatgggagccatcgcctgattgaaggagtgcaccctggcagtttggtagaaaaactgcccgatagcccagccctcgcaaaaaaggcgctgcttgccctgaaccacggattggataaggcccattcactgatggagctctctcctagcgcgcccccaggaggctctccacacctggatagttcccggtcccactcacctagcagtcctgaccctgacacacctagccctgtgggagattctcgagccttgcaggccagcaggaacacccggattccccacttggccggcaagaaggccgttgcggaagaggataacgggagtattggagaagaaaccgactcaagccctgggcgtaagaagttcccgctcaaaatttttaaaaagccgttaaaaaaatag

SEQ ID NO: 207276 - DNA, 2502 bp, synthetic construct
  misc_feature 1..2502: note = Description of Artificial Sequence: Synthetic coding sequence
  source 1..2502: mol_type = other DNA
atgaacgccgccggcatccgggcccccgaggccgccggcgccgacggcaccaggctggcccccggcggcagcccatgtctacggaggcgggggcggccagaggagagccccgctgcggtggttgccccacggggcgctggagagttacaggccgcgggcgcccccttgagattccaccctgcatctccgcggagattgcacccagcatcgacacctggccccgcctggggttggctcctgcgccggcgacgatgggccgccttgctcgtgctgggactccttgttgccggcgccgctgatggatgcgaattggtcccccgccacctcagggggcgacgtgccacaggatccgccgctaccgctgcatcttcccctgctgcagctgctggggacagcccagcccttatgacagatccctgcatgagcctgtcccccccatgcttcactgaggaagatcgcttttcactggaagccctgcagacaattcacaagcagatggacgacgataaagatggcggtatcgaagtcgaagagtccgacgagtttatcagggaagacatgaaatacaaagacgccaccaataaacattcgcacctgcacagggaggataagcacattacaatcgaagatctttggaagcgatggaagacgtctgaagtgcataattggacccttgaggacacactccagtggctgatcgagtttgtcgagctgccacagtacgaaaaaaatttccgcgacaataatgtgaaaggcactactctccccaggatagccgtgcacgaacccagttttatgattagccagttgaagatatcagatagatcccatagacagaagctccagctcaaggcccttgacgttgtactctttggacctctgactcggccaccccataattggatgaaagactttattctgaccgtatccatcgtcattggagtcggaggatgttggtttgcttacactcaaaataaaacctcaaaagagcatgtggctaagatgatgaaagacctggaaagtctgcagaccgccgagcaaagtttgatggatctgcaggaacggcttgagaaagcccaggaggagaataggaacgtagccgttgagaaacagaaccttgaacggaagatgatggatgagattaactacgccaaggaggaggcttgtagactgcgcgagctacgcgagggagctgaatgtgaactcagccgccgtcagtatgccgaacaagaactggagcaagtacgaatggcccttaaaaaggcagaaaaagagtttgagctgagatcaagctggagcgtgcctgacgctctccagaagtggttacagctgacgcatgaggttgaggtacagtattacaacatcaaacggcagaatgcggaaatgcagttagcgattgcaaaagatgaagcggagaaaataaagaaaaaacggtctaccgtgttcggtaccctgcacgttgcgcactcatcctcactcgatgaagtggaccacaagattctggaggctaaaaaagccctctccgaacttacaacctgcttgcgggaacggttatttcgctggcagcaaatcgaaaaaatttgcggatttcagatagcgcacaattcgggccttcctagcctgacttcttcgctctactctgatcattcctgggtggttatgccacgagtctctatcccgccgtatccaatcgccggtggggttgacgacttggatgaggatacaccccctattgtgtcacaatttcctggtaccatggctaaacctccgggctccctggcaaggagttcttcactctgccgctccaggagatccattgtcccctcgagtcctcagcctcagagagcccagctcgctcctcacgccccacatcctagtcatccgcggcacccccatcatccacagcataccccccactctctgccaagccccgacccggacatcttgtcggtcagctcctgcccggccctttacaggaatgaggaggaagaggaggctatctatttttctgccgaaaagcagtgggaggtgccagatactgcaagtgaatgcgactcattgaacagcagcatcggaaggaaacagagtccgcccctgtccctcgagatatatcagacactgagtccacggaaaatcagcagagacgaagtctccctcgaggacagcagccggggagactctcccgtgacggtggatgtgtcttggggcagtccagattgcgtgggactgacagaaacgaaaagtatgatcttctccccagccagtaaggtctacaacggtatcctggaaaaaagctgcagtatgaatcaactcagttcagggattcctgtacccaaacctcgccacacatcctgttcaagtgccgggaatgattccaaacctgtgcaggaggcgcctagcgtcgcgagaataagttcaatccctcacgacttgtgccacaacggcgagaagtccaagaaaccgagtaaaattaaaagcctcttcaagaagaagtcaaagtag

SEQ ID NO: 207277 - DNA, 2526 bp, synthetic construct
  misc_feature 1..2526: note = Description of Artificial Sequence: Synthetic coding sequence
  source 1..2526: mol_type = other DNA
atgaacgccgccggcatccgggcccccgaggccgccggcgccgacggaactaggctggctcccggcggctccccctgccttaggaggaggggcaggcccgaagagtccccggctgcagtggtcgctcctcggggagccggcgaactgcaggcagccggggctcccctgagattccatcctgcaagtccaaggcgcctgcatcctgcgtccacccctgggccagcatggggctggctactgcggagacggcggtgggctgctctgctggttttgggccttttggtcgctggcgctgccgacggttgcgagcttgtcccccgccacctgcgcgggaggcgtgccacagggagcgccgccacagccgcgtcctcccccgcggctgccgctggcgatagcccggcgctgatgacagacccctgtatgagcctgtctccaccttgtttcactgaggaagaccgcttctccctggaagctctacaaactatccataagcaaatggacgacgacaaggatggcggaatcgaggtggaggaatctgatgagttcatcagggaggacatgaagtacaaagatgctacaaataagcatagccatctgcatcgcgaagacaagcacatcaccatagaggatctttggaaaaggtggaaaaccagcgaggtgcataattggactctcgaagacacccttcagtggctcatcgagtttgtggaactcccccagtacgagaagaattttagagacaacaacgtgaagggaactaccctgcccaggattgctgtccatgagccctccttcatgatttcccagcttaagatcagcgaccggagtcatcgccagaagctgcaattgaaggctctcgatgtcgtcctgtttgggccactgacccgacccccgcataactggatgaaggactttattctcaccgtatccattgtgatcggagtgggaggctgttggttcgcctatacacagaacaagacatccaaggagcacgtggctaaaatgatgaaggaccttgagagcctgcagaccgccgaacagtctctcatggacctacaggagcgattggaaaaggcacaggaagagaatagaaatgttgccgtggaaaagcagaacctcgaacgcaagatgatggacgagattaactacgccaaggaagaagcttgcaggttgcgtgaactgagagaaggcgctgaatgcgagctgtcccgcaggcaatacgcagagcaggaactcgagcaggtgcggatggctcttaaaaaggccgagaaagagttcgagttgaggtccagttggtcagtccctgacgccctacagaagtggttgcagctcacccatgaggtggaggtccaatactacaacatcaaaagacagaacgcagaaatgcaactcgccatcgctaaggacgaagttgcagcctcctaccttattcaagctgaaaaaatcaaaaagaagcgcagtacagtgtttggcactcttcacgttgctcattcttcaagtctagatgaggtggatcataagatcctcgaggcaaagaaggccttgtccgagttaaccacttgtttgagagagcggctcttcagatggcagcagattgagaagatctgcggtttccaaatcgcacataattcaggtctaccctccttgacgagctccctgtactccgatcacagctgggttgttatgccccgggtgagcatccctccatacccaatcgccgggggcgtggacgacctcgatgaggacacacctcccatcgtaagtcagtttccaggaactatggccaagccccccggatccctagctaggtctagtagcctgtgcagaagccggcgtagtattgtcccatcaagcccacaaccacagagggcacagctggctcctcatgccccacaccccagtcatccaaggcatccacaccatcctcagcacactcctcatagtcttcctagtcctgatccagatatcctttccgtctcatcgtgtcctgctctgtatcgtaatgaggaagaagaagaggccatatattttagtgccgagaaacagtgggaggtccccgacacagccagcgagtgtgactctctgaatagctctatcgggagaaagcaaagccccccactcagtctagagatttaccagactctatctccgcgcaagatctcacgggacgaagtgagtttggaagacagctcccgcggggactctccagtgacggtagacgtgtcttgggggagccctgattgcgtaggattaacggagaccaagagcatgattttcagtcctgcttcaaaggtatacaatggaatcctggagaaatcgtgctcaatgaaccagttgtcaagcggaatccccgttccgaagccccgccatacatcgtgctctagcgccggcaatgacagtaagccagtccaggaggctccatcagtcgccagaatctcaagtatcccccatgatctgtgccacaatggcgaaaagtccaaaaagcccagcaagatcaaatcactgttcaagaaaaagtccaaatag

SEQ ID NO: 207278 - DNA, 2061 bp, synthetic construct
  misc_feature 1..2061: note = Description of Artificial Sequence: Synthetic coding sequence
  source 1..2061: mol_type = other DNA
atgaacgccgccggcatccgggcccccgaggccgccggcgccgacggcacacgcctggcccctggaggctctccctgcctgcggagacggggccggccagaggaatctcctgcagctgtggtggccccaaggggagccggcgagcttcaagcagctggggctcccctgcgttttcatccagccagtcccaggagattacaccctgcctctacccccggccccgcctggggatggcttttgcggcggagaagatgggccgcactgctcgtccttgggctgctcgtagcaggcgcagcagacgggtgcgaactggttcccagacacctacgtggaagaagggctaccggctctgctgccaccgccgcttctagcccagcagccgctgccggcgacagcccagccctgatgacagacccgtgtatgtccttatctcctccctgtttcacagaagaagatcgctttagcttggaagccctccagaccatccacaagcaaatggacgacgacaaggacggtggcatcgaggtggaggaatcagacgagtttatcagggaggatatgaagtacaaagacgccactaataagcatagccatctgcatcgggaagataagcatattacgatcgaggatttgtggaagcggtggaaaacctcagaggtacacaactggacgctggaggacactttacagtggctgatcgaattcgttgagctgccccagtacgaaaagaattttcgcgataataatgtgaaaggtacaacactcccgcggatcgccgtacatgaacctagttttatgatctctcaactgaaaatcagcgatcggagtcataggcagaaacttcagttaaaggcgctggacgtggtgttgtttggccctctcactaggccaccacacaactggatgaaagactttatcctgaccgtgtcaatagtcatcggcgtaggagggtgttggttcgcttatactcagaacaaaacttcaaaggagcacgtggcgaagatgatgaaagatctggagagcctgcagactgccgagcagtcactgatggatcttcaggagaggttggagaaggcccaagaggagaaccggaatgtcgctgtagagaaacagaacctcgagcgaaagatgatggatgagatcaactacgccaaggaggaggcctgcaggcttcgcgagctgcgggaaggggctgaatgcgaactgagtcggcgccagtacgcagagcaggaacttgagcaggtgagaatggccctcaagaaggcagagaaggagttcgagctgcgctcatcttggtccgtgcctgacgcactgcagaagtggctacaacttacccacgaggtggaggtacaatattataatattaagagacagaacgccgagatgcaactcgccattgctaaggacgaggccgagaagattaaaaaaaagaggtctacagtatttggcactctgcacgttgcccactcaagcagcctggatgaggttgatcacaaaatccttgaggctaaaaaagctcttagcgagctgaccacatgtctgcgcgagcgcctatttcgctggcagcagattgagaaaatttgtggtttccagatcgcacacaacagcggactccctagcttgacatcatcgctgtactccgatcatagttgggtagtcatgcctcgggtcagcatcccaccttatcccatagctggcggcgtagacgatctggacgaagacacaccccccatcgtttcacaatttcccgggaccatggcaaagccacctggcagcctggcccgctcctcctcgctctgccgcagccgaaggtctatcgttccctcctcgccacagccccaaagagctcagctcgctcctcatgctccacatccgtctcacccgaggcatccacatcacccccaacacaccccacactctctgcctagccccgaccccgacatcctctcagtttcctcatgccctgctctgtatcgaaacgaagaggaggaagaggcaatatacttctccgccgagaaacagtgtatacacctaggactaggcgcctgcaaatcagagtag

SEQ ID NO: 207279 - DNA, 2241 bp, synthetic construct
  misc_feature 1..2241: note = Description of Artificial Sequence: Synthetic coding sequence
  source 1..2241: mol_type = other DNA
ctgctggtgctgggcctgctggtggccggcgccgccgacggctgcgaacttgttcctcgccacttgagagggcgacgggctaccggaagtgccgctaccgccgcgagctcacctgctgcagcggccggagatagcccagccttgatgaccgacccatgcatgtctctctccccaccatgcttcactgaagaagataggttctccctggaggctctgcaaactatacataagcagatggacgatgacaaggatggcgggattgaggttgaggagagcgatgaattcattcgtgaagatatgaaatataaggatgccacaaataagcactcacatcttcacagggaggacaagcacataacaattgaggacctgtggaagaggtggaagaccagtgaagtccataactggaccctcgaagacacgctgcaatggttgatcgaattcgtggaactgccgcagtatgaaaagaacttccgagacaacaatgtcaaaggaacaacgctcccaagaatagcggtccacgagccatcttttatgatcagccagctcaagatcagtgataggagccaccggcagaagttgcagctgaaggctctggatgtcgttcttttcggcccactgacaaggcctccacacaactggatgaaagacttcatcttgaccgttagtatagtgataggtgttgggggttgctggttcgcatacacccagaacaaaacctcaaaggagcacgtggcaaaaatgatgaaagacttggagagcctgcagaccgctgagcaatccctgatggacctgcaagaaaggctggagaaggcccaggaagagaatcggaatgtggctgtggaaaagcaaaacctagaacgcaaaatgatggatgagatcaactatgcaaaggaagaagcgtgcagattgcgggaacttcgagaaggggctgagtgcgagctgtcccggaggcagtacgcagagcaggaactggagcaggtacggatggcactgaaaaaagcagagaaggagtttgaacttaggtcttcttggtccgttccagacgcactccaaaagtggctgcagctcactcatgaagtggaagttcaatattacaacatcaaacgccagaatgctgaaatgcagttagctatcgctaaggatgaggccgagaaaattaagaagaagagatctacagtctttggtaccctgcacgtcgcccattcttcgtctctggacgaagtagaccataaaatccttgaagccaagaaggccttgtccgaacttaccacctgcctcagagagcggttattccgttggcagcagatagaaaaaatttgcgggttccagatcgcccataattccggtctgccaagcctgacatcctccctttacagcgaccattcatgggtggtgatgccccgcgtaagcatcccaccatacccaattgccggtggcgtggatgacttggacgaagacaccccaccaatcgtgagtcagtttcctggtaccatggcaaaaccaccgggtagtcttgctaggtcttcctcgttgtgccgctcgcgccggagtatagtcccttcgtccccccagccacagagggctcagttagccccacacgctcctcacccttcccacccgcgccatccccaccacccccaacacactccacattccttaccctcacccgatccggatatcctcagcgtgtcgagctgtcctgcgctgtaccggaacgaggaggaggaggaggctatttatttttcagctgagaagcagtgggaggtgcccgacaccgcatccgaatgcgactctctaaactcaagcattggaaggaagcagtcccctcctttaagcctcgaaatttaccagacactttccccacggaaaatctctcgcgacgaggtatctcttgaagatagttcccgtggcgacagccccgtcactgttgatgtcagttggggcagcccggattgcgtcggcctaacagagaccaaaagcatgatcttctcccctgccagcaaagtctacaatggcatcctggagaagtcctgttcaatgaaccagctctcgtcggggatacccgtccctaaacctaggcacacctcttgtagctccgccggtaacgactctaaaccagttcaggaagcgccgtccgtggcccgaatttcttctattcctcacgacctgtgccataacggcgaaaaaagcaagaagccaagtaagatcaaaagtcttttcaaaaagaaaagtaagtag

SEQ ID NO: 207280 - DNA, 2265 bp, synthetic construct
  misc_feature 1..2265: note = Description of Artificial Sequence: Synthetic coding sequence
  source 1..2265: mol_type = other DNA
ctgctggtgctgggcctgctggtggccggcgccgccgacggctgcgaattggttccaaggcacttaagaggccggcgggcaacgggctcagctgctaccgctgcctcgagccctgcagcggccgccggtgactccccggcccttatgaccgatccttgcatgtcactgtcccccccgtgcttcaccgaggaggaccgtttttctctcgaagcgttgcaaacaatacacaagcagatggacgatgacaaggatggcggaatcgaggtcgaggaaagtgatgagttcataagggaagacatgaaatacaaggacgctacaaataaacacagccacctgcacagagaggataaacatatcaccattgaggatctatggaagcggtggaaaacatctgaggtccacaactggaccctggaggacactctgcagtggctcattgagtttgttgaacttccccagtatgaaaagaacttccgtgataataatgtgaaaggaacaacacttccacgtattgcggtacatgagcctagcttcatgattagccaactgaagatttcggatcgttcccatcgccagaagttgcagctgaaagcattggatgtggtgttattcgggcccttgactcggcctccacacaattggatgaaggattttattctgacggtgtctatcgtcatcggcgttggtggatgctggtttgcttatacccagaacaagacgagcaaggagcatgtagccaaaatgatgaaagacctagagagtctgcaaactgctgagcagtctctgatggatctgcaggaacggttggagaaggctcaagaggaaaacagaaacgtagccgtagagaagcaaaaccttgagagaaagatgatggacgaaatcaattatgcaaaagaggaggcatgcagactgagggagctgcgtgagggagccgagtgcgagttaagtagacgacagtacgccgaacaggagcttgaacaggtgaggatggcgctgaagaaggcagagaaggagttcgaactgaggagttcgtggtctgtgcctgatgcactgcagaagtggttgcagctgactcacgaggtggaagttcagtactataacatcaagcgccagaatgctgaaatgcagctggccattgctaaggatgaggtcgctgcttcttacctcattcaggcggagaaaataaagaagaagcgatcaacagtgtttggcactctccatgtcgcccacagctcctccctggatgaggttgatcacaaaattctcgaggcaaagaaggccttgagcgagctgacaacctgcctacgtgagaggctgttccggtggcaacagattgagaaaatctgcggtttccagatagctcacaactccggactgccctcccttacgagcagcctgtatagcgatcactcttgggtggtcatgcctagggtctccatcccaccctaccccatagccggcggcgtggacgatttagacgaagataccccacccattgtgagtcagttccccggtactatggcaaagccccctggctcgcttgcccgcagttcaagcttatgcagatccagacggagcattgtaccaagctcaccacaaccccagcgcgcccagcttgcacctcacgccccacacccgtcccatcctcggcacccccaccacccgcagcacacacctcactctctcccgagtcccgatcccgatatcctcagcgtgtcatcttgcccagccctgtaccgcaatgaggaggaggaggaagccatctacttcagtgctgagaagcagtgggaagttcctgacacagcctctgagtgcgactctcttaacagcagtatcggtagaaaacagtcaccacctctaagtctcgaaatctaccagactctttcgcctagaaaaattagtcgggatgaagttagcttggaggattcatcccgcggcgacagtccagtgaccgtcgacgtgagttgggggtctccagactgcgtaggattaactgagacgaagagcatgatcttctcaccggctagcaaggtgtataacggtatcttagaaaagtcatgttctatgaaccagctgtcttcaggcatcccagtcccaaaacctcggcacaccagctgttcctccgctggaaatgactccaagccagttcaggaggcacctagtgtggccaggatttcatcgattccccatgacctgtgccacaatggcgaaaagagtaaaaagccatcaaagataaaaagtttgttcaaaaagaagtccaaatag

SEQ ID NO: 207281 - DNA, 1800 bp, synthetic construct
  misc_feature 1..1800: note = Description of Artificial Sequence: Synthetic coding sequence
  source 1..1800: mol_type = other DNA
ctgctggtgctgggcctgctggtggccggcgccgccgacggctgcgaactggttcccagacacctgaggggtcgccgggctaccggcagtgcggcaactgccgcaagttccccggcggctgccgcgggtgatagccctgccttgatgactgatccgtgcatgtctctgtcccccccctgcttcacagaggaagacaggttttctcttgaagctttgcagaccattcacaagcagatggatgatgataaggatggcggcattgaggtggaagagagcgacgaattcatcagggaagacatgaaatacaaggatgcgacaaacaagcatagtcatctccatcgcgaggacaagcatataaccattgaggacttatggaagagatggaagacatctgaggtgcacaactggactctggaggacacactccagtggctgatagaattcgtggagctcccacagtacgagaagaattttcgggataataacgtaaaaggaaccactctcccaagaatcgctgtgcatgagccctccttcatgatatcccagcttaaaatctccgataggtctcatcgccagaagctccaactgaaggcactcgacgttgtgctgtttggtccactgacacggcccccacacaattggatgaaagacttcattttaactgtgagcattgtgattggcgtaggggggtgctggttcgcatatacccagaataagacttcgaaagaacatgttgcgaagatgatgaaagacctggagtcacttcagacagcggagcaatccttgatggacctccaggaaaggctcgagaaagcacaggaggagaacaggaatgtagcagtagaaaagcagaacctggagcggaagatgatggacgaaatcaactatgcaaaggaagaagcatgcaggcttcgcgagcttagggaaggcgccgagtgtgagttgtctcgcaggcaatacgcggagcaggagttggagcaggttaggatggcccttaaaaaagcggagaaagagttcgaactcaggagtagctggtcagtgccagatgctctgcagaagtggctgcagctgacacatgaggtggaggtgcaatattacaacattaagcgacaaaatgcggaaatgcagctggccatagctaaagatgaagcggaaaagattaaaaagaagaggtctacagtgtttggaacacttcatgtggcgcactcatctagtctggacgaggtagatcacaaaatcctcgaagccaagaaggccctctccgaactgacaacatgtttgagggagcgcttatttcgctggcagcagattgagaagatttgcggcttccagatcgcccacaattcagggcttccctcactgacttccagtctgtattcggaccactcatgggttgtgatgccaagggtctccatcccaccttacccaattgccgggggtgtcgatgatctggatgaagacactccccccatagtgtcgcagttcccggggactatggccaaacctccaggaagtctcgcgcgatcttcaagcctgtgtcggtccaggaggagcattgtaccatcgtctcctcagccgcagagggctcagttggctcctcatgctcctcatccgtctcatcctcgacacccccatcaccctcagcatactcctcactctctgcctagcccagatcccgacattctgtctgtgagtagttgccctgccttgtacagaaatgaagaggaggaggaggcaatttacttcagcgcggagaaacaatgcatacaccttggcttgggagcttgcaaatctgagtag

SEQ ID NO: 207282 - DNA, 3654 bp, synthetic construct
  misc_feature 1..3654: note = Description of Artificial Sequence: Synthetic coding sequence
  source 1..3654: mol_type = other DNA
atgtacatcaagcaggtgatcatccagggcttccggagctaccgggaccaaacgatcgtggacccattttcttcaaagcataatgttattgtgggacgcaacggcagcggtaagtccaacttcttttatgcaatccaatttgtcctctccgacgaatttagtcaccttagacccgaacaacgcctggcgctgctccatgaaggcactgggccacgggtcatatcggcttttgttgagatcattttcgataatagcgataatcgcctgcctatcgataaagaagaagtcagcctcaggcgggttatcggagccaaaaaggaccagtatttcctggataagaaaatggttacaaaaaacgatgtcatgaatttgctcgagagcgcaggattttctcggtcgaatccgtattatattgtgaaacaggggaagataaaccagatggccacagctcctgatagtcaaagactgaaactcctgagggaagtggctggaacacgagtgtacgatgaaaggaaagaggagagtatctctctcatgaaggagacagaaggcaaaagggaaaagatcaacgagctgctgaaatatatagaggaaagattacacactctggaggaggaaaaggaagagcttgctcagtatcagaagtgggataaaatgcgtcgtgctcttgaatataccatctacaatcaagagctcaatgaaacacgggcgaaactcgacgagctgtctgctaaacgagaaacaagtggcgaaaagtctcgacaactgcgcgatgcccagcaagatgctcgggataagatggaagatattgaaaggcaagtccgagagctaaagacaaaaatctccgcaatgaaggaagagaaggagcagttaagtgcagaacgacaagagcaaattaagcagcgtacaaaattggagttgaaagcgaaagacttacaagacgagcttgccggaaattccgagcagaggaagagactgctgaaggagaggcagaaattgcttgagaaaattgaggagaaacagaaggagctggccgagaccgaaccaaaattcaattctgtcaaggaaaaagaagagaggggaatcgcacgacttgctcaggctacccaggagaggactgatctatacgcaaaacaaggacggggttcacaattcaccagcaaggaagaaagagacaaatggatcaaaaaagagctcaagtcactggatcaggccattaacgataagaaacgtcaaatcgccgccatacataaagatctggaggataccgaggccaacaaggagaaaaatcttgagcaatataataagctcgatcaggacctgaatgaggtgaaagcccgcgtcgaagagttggaccgaaagtactacgaggtcaagaacaaaaaggatgagctgcagtctgaaaggaactatctctggagagaggaaaacgccgaacagcaggctttagccgccaagcgcgaagatcttgaaaagaagcagcagttgctgcgggctgcaacaggcaaggctattctgaacgggatcgacagtataaataaggtgctggaccacttccggcggaagggaatcaaccagcatgtgcagaacggatatcacggaatcgtgatgaacaatttcgaatgtgaaccagcattttacacctgcgtcgaagtcacagcaggcaaccgattattctatcacatcgtggacagtgacgaagtatcaacaaagattctcatggagtttaataagatgaatttgccgggcgaggtcaccttccttcctcttaacaagctcgacgtgcgggacactgcatatcccgaaacaaatgacgccatccctatgatcagcaagctacgatataacccccgattcgataaggcttttaaacacgtattcggtaagacgctcatatgtaggtccatggaagtcagtacgcagctagcccgggcctttacaatggactgcatcactttggaaggcgatcaggtgtcccataggggagctttaactggtggatattacgacactaggaagtcacgtttggaactgcaaaaggatgttcgcaaagccgaggaggaactcggggagctggaggccaaattaaacgaaaatctgaggaggaatatagaacgaataaataatgagatcgaccaactcatgaatcaaatgcagcagatagaaacacagcagagaaaatttaaagcatctagggattctattctatccgagatgaaaatgctaaaagaaaagcggcaacagagcgagaagaccttcatgcccaagcagcggtccctccagtcgcttgaagccagcctgcacgcaatggagtcaacaagggagagtctaaaagcggaacttgggacggatctcttgtcacaactgtctctggaggaccagaagagggtggatgctcttaatgatgagattcgtcagcttcagcaggagaaccgacagcttcttaacgagaggatcaagcttgaggggatcatcacaagagtggaaacctacctcaacgagaacttgaggaaaagattagatcaggtcgagcaggaactcaacgagctgcgcgaaacagagggggggactgttctcacagccaccaccagtgaattagaagcaatcaacaaacgcgtaaaggatactatggcaaggagcgaggatttggacaactctatagataagaccgaggctggcattaaagagcttcaaaaaagcatggaaagatggaagaacatggaaaaggaacacatggacgcgatcaatcatgacactaaagaactggaaaagatgaccaacagacaaggcatgctgttaaagaagaaggaggagtgtatgaagaagatcagagagcttggctccctgccccaggaggccttcgaaaaataccagacactgtcccttaaacagcttttccgcaaactggaacagtgtaataccgaactcaagaagtacagccatgtaaataagaaggcactggaccagttcgtcaatttctcagaacaaaaggaaaaactcattaagagacaagaggagctggatcgaggttacaaaagcatcatggagttaatgaatgtgctcgagctgagaaagtacgaagccatccagttgactttcaaacaagtgtccaagaactttagtgaagtcttccagaagcttgtccctggagggaaagccaccctcgttatgaaaaagggcgacgtcgaaggcagtcaatcgcaagatgaaggcgaagggagtggggagtcagagagagggagcggctcacagagttcagtgcccagtgttgaccagttcaccggggtggggattcgcgtgtccttcacagggaaacaaggcgagatgagggaaatgcagcagctcagtggtggccaaaagagtcttgtcgcactcgctctgattttcgctattcagaaatgtgatccagccccattctatttgttcgacgaaattgatcaggctctggatgcccagcacaggaaagccgtgtctgacatgattatggaacttgctgttcatgcacagttcatcaccacgacctttcgccctgaactgctcgagtctgccgataagttttacggtgtgaaattcaggaacaaagtaagccacatcgacgtgattacagcagagatggccaaggacttcgtggaagacgacaccactcacggctag

SEQ ID NO: 207283 - DNA, 3306 bp, synthetic construct
  misc_feature 1..3306: note = Description of Artificial Sequence: Synthetic coding sequence
  source 1..3306: mol_type = other DNA
atggccacccccagcaagaagaccagcacccccagcccccagcccagcaaacgggccctccctagggacccaagtagtgaagtgccctctaaacgaaaaaactccgccccccagcttccacttctgcagtcttccggccctttcgtcgagggcagcatcgtgaggatctctatggagaactttctaacttacgacatttgtgaggtctcccctggccctcacctgaatatgattgtgggcgctaatggtactggcaaatcctctatcgtctgtgcaatttgtttggggttagccgggaaaccagccttcatgggcagggccgacaaagtcggattctttgtgaagaggggatgttcccgggggatggtggagattgaactctttcgcgcatctggtaatttggtcatcacccgcgaaatcgatgtcgcaaaaaatcagtcgttttggtttattaacaagaaaagcactactcaaaaaatcgtggaggaaaaagtagccgccctgaacatacaggtgggcaatctttgtcagttcctgcctcaggacaaggtgggcgaatttgcaaagttatccaagatcgaactgctggaagccacggaaaagtctatcggacccccagaaatgcacaagtaccactgtgagctgaagaacctgcgggagaaggagaaacagctggaaacttcttgtaaagaaaagactgagtaccttcaaaagatggtgcaacgtaatgaaaggtacaaacaggacgtagagcggttttacgagaggaaacgccatctcgacctaattgagatgcttgaggcaaagagaccttgggtggagtatgagaatgtgcgtcaggaatacgaggaggtgaaactggtccgggacagagtgaaggaagaggtgcgcaagttgaaagaagggcagattcccgtcacctgcagaatagaagagatggagaacgaaaggcataatctcgaggcacgaattaaggagaaagccactgatatcaaagaagccagccagaagtgcaaacagaaacaagatgtaatcgagagaaaggacaagcacattgaggagttacagcaagctctgatagtgaagcaaaatgaggagctggatcgccagagaagaatcgggaacacaaggaaaatgattgaagatttgcagaatgagcttaagactactgagaactgcgaaaatctccagccccaaatcgatgcaattacaaatgacttacgccgaattcaggacgaaaaggcactgtgtgagggcgaaatcatcgacaaacggcgagagcgagagacgcttgagaaggagaagaagagcgtcgacgaccatatcgtgcggttcgacaacttaatgaaccagaaagaggataaactgaggcagaggtttagagatacttacgatgccgtgctctggcttcgcaacaaccgcgacaagttcaagcagagagtctgtgagccaatcatgctcactattaacatgaaagacaataaaaatgcgaagtatattgagaaccacataccctctaacgatctgcgcgcctttgtcttcgaaagtcaggaagacatggaggtatttctgaaagaagtccgagacaataagaagctaagagttaatgcagttatcgccccaaagagttcatatgcggacaaagctccatcaaggtctctgaacgaactcaaacagtacggcttctttagctatctgcgggagctgtttgacgctccagatcctgtgatgagttatctgtgttgccaatatcacatccacgaagtgccagtgggaacggaaaagacaagagagaggatcgagcgcgtcatacaggagacaagactcaagcagatatataccgccgaggaaaaatacgtggtcaagacatcattctattctaataaggtgatctcttccaatacctccctgaaagttgcccaatttctgacagttaccgttgacttggaacagcggcgccacctcgaggaacagctgaaggaaatacacaggaagttacaggcagtagattctggactgatcgcactgagggagacatctaagcacctcgagcacaaggataacgaactcagacagaagaagaaggaacttctagagaggaagaccaaaaaacggcaacttgagcaaaagatcagctcgaagctgggcagcttaaaactgatggaacaagatacttgcaacctggaagaggaggagcgcaaggcgagcacaaagatcaaagaaatcaacgtgcagaaagctaagttggttaccgagctcacaaacctgatcaagatctgcacatcactgcacatccagaaggtggacctgatccttcagaatactactgttatcagcgaaaaaaataaattggagtccgattatatggccgcatccagccagttacggctaactgaacaacacttcatcgaacttgatgagaatcgccagcgacttctgcagaagtgtaaagaactcatgaaacgggctcggcaggtttgcaatttgggcgcggagcagacacttccccaggagtaccaaacccaggtgccaaccattcccaatggccataattcctcactccccatggtcttccaggatctgcccaatactctcgacgagattgatgctctactcacagaggagaggagtagagcctcctgtttcaccggcctcaaccctaccatcgttcaagagtatactaagcgggaagaagaaatcgagcagctaacggaggagctgaaaggtaagaaagtagagctggaccagtaccgggaaaacatcagccaggtcaaagaacgatggctcaaccccttaaaggagctcgtcgagaagatcaatgaaaagttttcgaacttctttagctccatgcagtgtgcgggggaggtagatctccataccgaaaacgaggaggattacgataagtacggtatccggatcagggtgaaattccgtagtagcacacagctccatgagctgactccccaccaccaaagtggaggcgaacggagcgtaagcaccatgttgtatctcatggcccttcaggaactgaacagatgcccctttcgtgtagttgacgaaatcaaccagggaatggacccaattaacgagagacgggtgttcgaaatggtggtgaataccgcctgcaaagaaaatacttcacagtatttctttatcactcctaaattgcttcagaatctcccttactctgaaaagatgacggtgctttttgtgtacaatggtccgcacatgttagagccaaatacctggaatctcaaagcctttcagcgccgcaggcgccgcatcacgttcacccaaccttcctag

SEQ ID NO: 207284 - DNA, 3276 bp, synthetic construct
  misc_feature 1..3276: note = Description of Artificial Sequence: Synthetic coding sequence
  source 1..3276: mol_type = other DNA
atggccaagcggaaggaggagaacttcagcagccccaagaacgccaagcgaccgcgccaagaggagctcgaggactttgataaagacggggatgaggacgagtgtaaggggaccaccttgactgccgctgaggtggggatcattgagtctatccatctgaagaattttatgtgccacagcatgctcgggccgtttaagttcggctcgaacgtcaacttcgttgtaggcaacaacgggagtgggaagtctgcagtgttaaccgcactgatcgtcgggttgggcgggcgcgcggtcgcaacaaatcggggaagcagtctgaaagggttcgtaaaggacgggcagaactctgccgatatctcgataaccctgagaaataggggggatgacgcattcaaagcatccgtgtatggtaacagtatcttaatccagcagcacatatccatcgacggcagcaggagttacaaactgaagtctgccaccggatcggtcgtgagcacacgcaaagaagaactaatcgcaatactggatcactttaatatacaagttgacaatcctgtttccgtcctcacccaggagatgtcaaagcagttcctgcagtctaaaaacgaaggggacaaatacaaattctttatgaaggccactcagctggagcagatgaaggaggattatagctacatcatggaaacaaaggaacgtacgaaggagcagattcaccagggagaggaaaggttgactgaactgaaaaggcaatgcgtagagaaagaagagagattccagtctatcgcgggcttgtccacaatgaaaaccaatctcgagtccttgaagcacgaaatggcttgggcagtggtgaatgagattgagaaacaattgaatgccatcagagacaacattaaaatcggtgaagaccgggctgctagattggaccgcaaaatggaggagcagcaagtccgtctgaatgaagccgagcagaaatacaaggacatccaagataagttagaaaaaatcagtgaggagacaaatgctcgtgctccagagtgtatggccctgaaagcggatgtggtcgccaaaaagcgcgcctataacgaggccgaggtgttgtacaaccgctccctgaatgagtataaggctcttaagaaggacgatgaacagctgtgcaagcggattgaagagttgaagaagtcaactgatcagagcctcgagccagagaggttagagcgacagaagaaaatctcttggttgaaggagcgcgtgaaagctttccaaaaccaggagaactctgtgaaccaggagatcgaacagttccagcaggctatcgagaaagataaggaggagcacgggaagattaaacgggaggaactcgacgtgaagcatgccctgtcctacaatcagagacagttaaaggagctcaaggactcaaagactgatagactaaaacggttcggtccaaacgtacctgcactactggaagcgattgacgacgcctacagacagggacatttcacttataagccggttggcccacttggcgcatgtattcaccttagggatccggagctagcccttgcaattgagtcttgcctcaaggggctgctccaagcttactgctgccacaatcacgcagacgaaagagtcctgcaggcattgatgaaacgcttttacctgccggggacttcacgcccccccatcattgttagtgaattccgcaatgagatctacgacgttcgacacagggctgcctaccacccagattttccgacagtcttgaccgcccttgagatcgacaatgccgtggtggctaatagtctgatcgatatgagaggaatcgagaccgtacttctgattaagaataattcagtagctcgggctgttatgcagagccagaagcctcctaagaattgtcgcgaggcattcaccgctgatggagaccaggtctttgcagggcgatactattcatccgagaatacccggcctaagtttctgagccgcgatgtggacagcgaaatatcggacctggagaatgaagtggagaacaagaccgctcaaatcctgaacctccagcagcacctgagcgctctagaaaaagacattaaacataacgaagagctgctcaagcgctgccaactgcactataaagagctcaagatgaagatccgaaaaaacatcagcgaaataagggaactagagaacattgaagaacatcagtccgtggatattgccactctggaagacgaggcccaagagaataagagtaaaatgaaaatggttgaagagcacatggaacaacagaaagagaacatggagcatttaaagtccctgaagatagaggcggagaacaagtacgatgctatcaagttcaaaatcaaccaactgagcgagctggcagatcccctcaaggatgagctgaacctcgctgactccgaggtcgacaaccagaagaggggaaagcggcactatgaagagaaacagaaagagcacttagatactttaaataaaaaaaaacgagagctggacatgaaggagaaggagctggaagagaagatgtctcaagctagacagatctgccccgagcgcatcgaggtggagaaatccgccagtatcctggacaaagagatcaaccggcttcgtcaaaaaatccaggccgagcacgcaagccacggtgacagggaggaaatcatgagacagtaccaggaagcacgcgaaacatatctagaccttgactcaaaagtccgcactttaaaaaagtttataaagctgctgggcgaaatcatggagcatcggtttaaaacctatcagcagttcaggcgttgcctgacactgaggtgtaagctgtactttgacaatctcctctcccagcgagcttattgcggcaagatgaactttgaccacaagaatgaaacactatccatctcagtgcagccaggtgagggcaacaaggccgcgttcaatgatatgagagccctttccggaggagagaggagcttttctacagtgtgtttcatcctctccctctggagcattgctgagtcaccgtttcggtgcctggacgagttcgatgtgtatatggacatggtaaacagaaggatcgctatggacctgatactgaagatggccgactctcagcggtttcgacagttcattctgctgacacctcagtctatgtcatccctcccatcctctaagttaatccgcattttacggatgtcggaccccgagagagggcagaccaccctacccttcagaccagtcacccaggaagaggacgatgaccagagatag

SEQ ID NO: 207285 - DNA, 3354 bp, synthetic construct
  misc_feature 1..3354: note = Description of Artificial Sequence: Synthetic coding sequence
  source 1..3354: mol_type = other DNA
atggccaagcggaaggaggagaacttcagcagccccaagaacgccaagcgccctcgtcaggaagaacttgaagattttgacaaggacggagatgaggatgagtgtaagggtacaaccctgactgcagccgaggtcggcatcatcgaaagcatccacctcaagaatttcatgtgtcattctatgctcggaccatttaaatttggatcgaatgtcaatttcgttgtgggcaataacggttcctggtctgccgttgtgagaagcagactgaacgccactagcgcttcgcaggtccaggctatccttctgttccagccatgcggaaagagcgccgtgctcacggcgctaatcgtgggccttggtggccgggccgtggccaccaaccggggttctagccttaagggctttgtcaaggacggtcagaactcggcagatatcagcatcacattgcgcaatcggggagacgacgcctttaaggcgtctgtgtacggcaacagtatattaatccagcaacatatatccatcgatgggtcaagatcatataaactcaaatctgcaacaggatccgtggtttccacgaggaaggaagagttgatcgccatcttggaccactttaacattcaggttgataaccctgttagcgtcctgacgcaagagatgtcaaagcagttcctgcagagcaaaaatgagggagacaagtacaaatttttcatgaaggccacccagctggagcagatgaaagaagactattcatatattatggaaactaaagagaggaccaaagagcagatccaccagggagaagaaaggcttaccgaattgaagcgacagtgcgtcgagaaagaggaacgatttcagagcatagcaggtttaagcacaatgaagacaaatctcgagagcctgaagcatgaaatggcgtgggccgtggtaaacgaaattgagaaacagctgaatgcaataagggacaacattaaaatcggtgaggacagggcagcgagactggaccggaaaatggaggaacagcaggtgagattgaatgaagcggagcaaaagtataaagatatccaggacaaattagagaagattagtgaggaaaccaatgccagagcccctgaatgtatggcgctgaaggcggacgtggtggccaagaaaagagcctataacgaggcggaggtgttgtacaatcgcagtttaaatgagtataaggccctcaaaaaggacgacgagcagctgtgtaagcgcatcgaagagcttaagaagtcaacagaccagagtctggaaccagagagactggagaggcagaagaagatttcttggttgaaagaaagggttaaagcctttcagaatcaggagaacagcgttaaccaggaaattgagcagtttcagcaggccatagagaaggataaggaggagcacgggaaaattaaaagagaggagctagatgtgaagcacgcgctctcatacaaccaacgccagttgaaagaacttaaggacagcaagacagacagactcaagcggttcggccccaacgtcccagccctcctagaagctatcgacgatgcttatcgccaaggacatttcacttacaaaccagtcggtccgctgggagcctgcattcatctcagagaccctgagctggctctagcaatcgagagttgtctgaaaggactattacaagcttactgttgtcacaatcacgccgatgaaagagtgctgcaggcactaatgaagcggttctacctacccggcacgagcaggcctccgatcatcgtcagtgagtttagaaacgagatctatgatgtgagacatcgggcagcctatcacccagatttccccactgtcctgactgcacttgagatcgataacgccgtggtggccaactccttgatagacatgcggggcatagaaacagtattactcattaagaacaatagcgtggcaagggcggtgatgcagtcacagaagcctccaaaaaactgccgagaggctttcactgcggacggcgatcaagtgttcgccggtcgatactattcatcagaaaatacacggcctaaattcctgtcccgtgatgtggatagcgagatctcagacttagaaaatgaagttgagaacaaaaccgcccaaattctaaatctccaacaacacctctcagctctggagaaagacataaaacacaacgaggagctgctaaaacggtgtcagctgcactacaaggagctgaaaatgaagatcaggaaaaatatttccgaaataagagagctagagaacattgaagagcaccagagcgtagatattgccacactggaagacgaagcccaagagaataaatccaaaatgaagatggttgaggagcatatggaacagcaaaaagaaaacatggagcatctgaagagtcttaaaattgaagccgagaacaagtatgatgcaattaaattcaagataaaccaattaagtgaactcgccgatccacttaaagacgaacttaacctggccgatagcgaggtggataatcagaagcgggggaaaagacattacgaggaaaagcagaaagagcatctggatactttgaataaaaaaaagagagaactggatatgaaagagaaagagttggaagagaagatgtctcaggctaggcaaatctgtcccgagcgtatcgaagttgagaagtccgcatccatactggacaaagaaattaaccgacttcgtcagaagattcaggctgaacacgcatcccacggcgaccgcgaggagattatgcggcaataccaggaggctagagaaacgtacctggacctggactcaaaggtaagaactctgaaaaagttcatcaagttgctgggagaaattatggaacatcggtttaaaacctaccagcagtttcgacggtgtttaacactgcgctgcaaactttatttcgataacttattgtcacaaagagcctattgcggaaagatgaacttcgaccataagaacgaaactttaagcatcagcgtgcaacccggtgagggcaataaagccgcctttaatgacatgcgcgcgttgtctggaggagagagaagcttcagcaccgtatgttttattctgagcctctggtccatcgctgaatcccccttcagatgccttgatgagtttgatgtgtatatggacatggtgaatagaagaattgctatggacctcatcttgaagatggcggactcacagcgattccgccagtttatattattgacaccacaatctatgtcctctttaccatctagcaaactaatccgaatcctaagaatgagcgaccccgaaagaggtcagactacactgccattccgccctgtgacccaggaagaggacgatgatcagcgatag

SEQ ID NO: 207286 - DNA, 3276 bp, synthetic construct
  misc_feature 1..3276: note = Description of Artificial Sequence: Synthetic coding sequence
  source 1..3276: mol_type = other DNA
atggccaagcggaaggaggagaacttcagcagccccaagaacgccaagaggcctcggcaagaggagttagaggacttcgataaggatggggacgaagatgagtgcaagggtactaccctgacagctgccgaggtgggtattatcgaaagcattcatctgaaaaattttatgtgtcacagtatgctcggaccatttaagttcgggagcaacgtgaattttgtcgtgggcaacaatggctctggcaagtccgcagtcctgaccgcacttatcgtggggctgggagggagagccgtggctaccaatcgcggctctagtttaaaggggttcgttaaagatggacagaattctgccgatatctccatcaccctgagaaatagaggcgatgacgctttcaaggcaagtgtttatggtaatagcattctgattcagcagcacatatccattgacggctctaggagctataagctgaagtctgctacagggtccgtggtatctacaaggaaggaggagctcatagcaatactggatcacttcaacattcaggtggataatccggtgagcgtgctgacccaggagatgagtaaacaattcctacagagcaagaatgaaggcgacaagtataagttcttcatgaaagccacccagctcgagcagatgaaagaagattatagttacatcatggagaccaaagaacgcactaaggaacagatccatcagggagaagagcggctaactgaactcaagaggcagtgcgtcgagaaagaagaacgatttcagtccatagctggactatccaccatgaaaactaatcttgaatcactaaaacacgagatggcctgggccgtggtaaacgaaatcgagaagcaattaaatgcaatccgtgataatattaagattggggaagatcgagccgccagacttgacaggaagatggaagaacaacaggtaaggctgaatgaggctgagcagaagtataaggacattcaggacaagttggagaagattagtgaagaaaccaatgcaagggcaccggagtgcatggctttgaaggcggacgttgtggctaagaagagagcgtacaatgaagctgaagtactgtacaaccgtagtctaaacgaatataaagccctgaaaaaagacgacgaacagttgtgtaagcgcattgaagagttaaagaagagcactgaccagtccttagagcctgagaggctcgaacgtcaaaagaagatctcttggctaaaagagcgtgtgaaggctttccaaaaccaagagaatagtgtcaatcaggaaatcgagcagttccagcaggccattgagaaggataaggaagaacacgggaagatcaaacgagaggaactcgatgttaagcacgccctgagttacaatcagcgacagttaaaagagttaaaggatagcaagaccgacaggctaaagcggttcgggcccaacgtccccgccttgctggaagccatcgacgatgcctaccggcaaggtcactttacctacaagcctgttggacccctgggggcctgcatccatttacgggaccccgagctagctttagcgatagagagctgcctcaaaggcctgctgcaggcctattgttgtcacaaccatgctgacgagagggtgctccaggctctaatgaaaaggttctaccttcccggtacctcccggccccccatcatcgtatcagagttccgcaatgagatctatgacgtgcgccacagggctgcctaccaccccgatttcccaaccgtgctgacagcactggagattgacaatgcagtggtggctaattccctgatagatatgcggggaatcgaaacagtgcttctcatcaaaaacaatagcgtcgccagggccgtgatgcaatctcagaaacctcccaagaactgccgggaagcattcacagcagatggcgatcaagtgttcgccggcaggtactacagctcggagaatacgagaccaaagttcctgtctagggatgttgattctgaaataagtgatctagagaacgaagtcgaaaacaaaactgcacagattctcaacctacagcaacatctgtcagcgcttgagaaagatattaaacataatgaagagctactcaaacgctgccagctgcattataaggaattgaagatgaagatcaggaagaacatatcagagattcgggaactggagaatattgaagagcaccagagcgtggatattgctactctggaggacgaggcacaggaaaacaaaagcaaaatgaaaatggtggaggaacatatggagcaacagaaagaaaacatggaacacttgaagtccctcaaaattgaggccgaaaataagtatgacgctattaaattcaagatcaatcagcttagtgagctggccgacccactgaaagacgagctgaacctcgcagattcagaggtcgacaatcagaaaagaggcaaaagacactacgaagaaaagcaaaaggaacatttggataccctaaataagaaaaaaagggaactggacatgaaggagaaagaactggaggagaagatgtctcaagctcgacagatctgtccagagcgcatcgaggttgaaaagagcgcctctattctggataaggagattaatcgtctgcgacaaaagatacaggccgaacatgccagtcatggggaccgggaagagatcatgagacagtaccaggaagcccgagagacctatctggatctcgattccaaagtgcgcaccctgaagaagttcattaagctgctgggtgagattatggaacaccgatttaaaacgtaccagcaattccggcgttgtctgactttgcgttgtaagttgtactttgataacctgttaagccaacgcgcatactgcgggaagatgaattttgatcataaaaatgaaacactgtctatcagtgtacaaccaggggaaggaaacaaggctgcatttaatgacatgagagctctctccggaggtgagaggtcctttagtacagtgtgtttcatccttagcctctggtccatagcagagagtccgtttaggtgtctggacgaattcgacgtttacatggatatggtgaaccgcaggatcgcgatggatcttatcctgaaaatggcggatagtcagcgctttaggcagtttatactgcttacacctcagtccatgtcgagtctcccttccagtaaactcattagaatcctgcggatgtccgaccccgaacgcggccagaccacactgcccttccggccagtcacacaggaagaggatgacgaccaacgctag

SEQ ID NO: 207287 - DNA, 174 bp, synthetic construct
  misc_feature 1..174: note = Description of Artificial Sequence: Synthetic coding sequence
  source 1..174: mol_type = other DNA
atggccaagcggaaggaggagaacttcagcagccccaagaacgccaaaaggccacgtcaagaggagctggaagattttgataaggacggggatgaagacgaatgtaaaggcaccacactcactgccgccgaggttggaattatcgaatccatccatttaaaaaactttatgtag

SEQ ID NO: 207288 - DNA, 3276 bp, synthetic construct
  misc_feature 1..3276: note = Description of Artificial Sequence: Synthetic coding sequence
  source 1..3276: mol_type = other DNA
atggccaagcggaaggaggagaacttcagcagccccaagaacgccaaacgaccaaggcaggaagagctcgaggacttcgacaaagacggagacgaagatgagtgtaagggcaccactttaacagcggccgaggtgggaatcatcgagtctatccatctgaaaaatttcatgtgccatagcatgttaggtcctttcaagttcggcagcaacgtgaacttcgtcgtgggaaataatggttctggcaaaagtgccgtgcttaccgccctcattgtaggtcttggcggcagggccgttgcaacaaacagagggtcctcactcaaaggcttcgtgaaggacggtcaaaattccgccgatatctcaatcactcttcgcaaccggggggatgatgcctttaaagcatctgtgtacggtaattctatcctgatccagcagcatatctcaatagatggttcacggtcttacaagctaaagtctgccacaggcagcgttgtttccaccaggaaggaggaattgatagccatcttagaccacttcaatatacaggtggacaaccctgtctcagttctcacacaggagatgagcaaacagtttctccagtcaaagaatgagggagataaatataagttcttcatgaaagccactcagctcgagcagatgaaagaggattactcctatattatggaaaccaaggaacggactaaagagcaaattcatcagggggaagagagattgactgagctcaagaggcagtgcgtggaaaaagaggagagattccagtctatcgctggtttgtcaactatgaagaccaacctggaatccttaaagcacgagatggcgtgggccgtggtcaacgagattgagaagcagttgaatgccatccgcgacaacattaagatcggcgaagaccgggcagccagactcgatcggaagatggaggagcaacaggtccgcctgaacgaggccgagcagaagtataaggatatccaggataaactcgaaaaaatatccgaggaaacaaacgcccgggcacccgagtgcatggcccttaaggctgatgtggttgcaaaaaagcgcgcatacaatgaagcggaggtgctgtacaaccggagtttaaatgagtacaaagcgctgaaaaaggatgacgaacaactatgtaaacggatcgaagagctgaagaagtccactgaccagagcctggagcctgagaggctggaacgccagaagaagataagctggttgaaagagcgggtgaaagcgtttcagaatcaggagaattctgtaaatcaggagattgagcaatttcaacaggccattgaaaaggataaagaggaacacgggaaaattaagcgagaagaactagacgtcaaacacgcactgtcttataaccagaggcaactgaaggaactgaaggattccaagaccgatcggctcaaacggttcggtcccaacgtgccagctctgctcgaagcaatcgatgatgcctatcgccaaggccactttacttataagcccgtgggtcccctgggcgcctgcatccatctccgggatccggagcttgcgttggccatagagagttgtttgaaagggctgctccaggcttattgttgccacaaccacgctgacgaacgggtgctgcaagccttgatgaagcgcttctacttacccggcacgagtcggcccccaattatcgtgtccgagttccggaatgaaatctatgatgtgcggcacagagccgcctaccaccccgactttcccacggtgttaacggcactggaaattgacaacgctgtggtagctaactctctcatcgatatgcggggtattgagactgtgctgctgattaagaacaactctgtcgcccgggctgtaatgcagagccagaagccacctaagaattgccgtgaagcattcactgcagatggcgaccaagtgtttgctgggcgctattacagttcggagaacacacgccctaagtttctttcccgcgacgtggacagcgagattagcgatctggagaacgaagtcgagaacaagaccgcccaaatcctgaatctgcagcagcacctctctgcattggaaaaggatatcaagcataatgaggagctcttgaaacgctgccagttgcactataaagaacttaaaatgaagattcgtaaaaatatcagcgaaatacgggaactcgaaaatattgaagaacaccagtcagtggatatcgcaactctggaggatgaggcccaggaaaataagtccaagatgaaaatggtggaagaacacatggagcaacaaaaagaaaatatggaacatttgaaaagcctgaaaattgaagctgagaacaagtatgacgcaatcaagttcaaaattaaccagctgtcagagttagccgatcctcttaaagatgaactcaatctggctgattccgaggtagataatcagaagagagggaagcgacattatgaggaaaaacagaaggaacacctggacactctgaacaaaaagaaacgagaattggatatgaaagagaaggaactcgaagaaaaaatgagccaggctagacagatctgcccagagaggatagaagtggaaaaatccgcctcaattctggacaaagaaattaatcggcttagacaaaagatccaggctgaacatgcgtcccatggcgaccgggaagagatcatgaggcagtaccaggaagctagggagacttatctcgacctggattcgaaggtcagaacgttaaagaagttcattaagcttctgggtgagattatggaacatcggttcaagacataccagcagttccgccggtgcctgacactgaggtgtaaactctatttcgataatctgctttcacagcgggcttactgtgggaaaatgaacttcgaccataagaatgagactctcagcatcagcgtgcagcctggtgaaggaaacaaagccgcttttaatgatatgagagcactgtccgggggagaacggtccttcagcacagtgtgcttcatcctctctctgtggtcaattgctgaatccccatttagatgtctggacgagtttgacgtctacatggatatggtgaacaggagaattgcaatggacctgatcctgaagatggcagactctcagcggtttaggcaattcatactgctgacgccccagagtatgtcttcacttccaagctctaaactcattagaatattacgcatgagcgatccggaacgcggccaaacaacccttccattccggccagtgacccaggaagaagacgatgatcagcgatag

SEQ ID NO: 207289 - DNA, 2130 bp, synthetic construct
  misc_feature 1..2130: note = Description of Artificial Sequence: Synthetic coding sequence
  source 1..2130: mol_type = other DNA
atggccgagaccctggagttcaacgacgtgtaccaggaggtgaaggggtctatgaacgacgggcgccttcggctttcacggcagggcatcatcttcaaaaacagcaagaccggtaaagtggacaacatccaggcaggagaactgacggaaggtatctggagaagggtggcgttgggacatggactgaaacttttgaccaaaaacggccacgtgtacaaatacgatggcttcagggagagtgaatttgagaaacttagcgatttctttaaaacccactaccgattggaactgatggagaaagatctgtgcgtcaagggctggaactggggcaccgtgaaattcggaggacaactgctctcttttgacataggagatcagcccgtcttcgaaatacccctgagtaatgtttcccagtgcacaacgggcaaaaatgaggtgacccttgaatttcatcaaaacgacgacgccgaagtgagcttaatggaggttcgcttttacgtgccacccacccaggaagacggcgttgatccagtcgaagcgttcgcccagaatgtcttgtccaaagccgacgtcatccaagccacaggggatgctatctgtatatttagagagttacagtgtctgaccccacggggtcggtacgacatcaggatttaccctacattcctacacttgcatggaaagacatttgattacaagataccctatactaccgtgttacggctgttcctcttaccccacaaggaccagcgccagatgttctttgtgatcagtttggacccccccataaagcagggacaaacaagatatcactttcttattctgctgttctctaaggatgaggatattagccttacacttaatatgaatgaggaggaggttgagaagcggtttgagggccggctgaccaagaacatgagcgggagcctatacgagatggtgtcaagggttatgaaagccctggttaacagaaagatcactgtgcctgggaattttcagggacacagcggggctcaatgtatcacttgtagctataaagcatcgtcagggctcttatacccacttgaaagagggttcatctacgttcacaagcctcctgtccatattcgcttcgacgagatttcttttgtaaacttcgcgaggggaacaactaccacacgatcttttgattttgagattgagaccaaacaggggacgcagtatacgttttcctctatcgagagagaagagtatggcaaactcttcgactttgtgaacgccaagaagctgaatattaaaaacaggggcctaaaggaaggaatgaatcccagctatgacgaatatgctgattcagatgaggatcagcacgatgcctaccttgaacggatgaaagaagaagggaaaatccgagaggagaacgcgaacgacagctctgatgattccggcgaagagaccgatgaaagctttaacccgggtgaggaggaagaagacgttgctgaggaattcgactccaacgctagtgcctcctctagttcaaatgagggggactctgatcgtgatgagaagaagcgcaagcagcttaaaaaggccaagatggctaaagaccggaagtcccggaagaaaccagtcgaggtgaagaaaggcaaggaccccaacgcccctaagcgcccgatgtcagcatacatgttatggcttaacgccagcagggaaaaaattaaatccgatcaccccgggataagcatcacagatttatccaagaaggccggagagatctggaaaggtatgtctaaagaaaagaaagaagaatgggaccgaaaagccgaggatgctaggcgcgactatgaaaaggcaatgaaggagtatgaaggaggacgaggcgaatccagtaagagagacaaatccaaaaagaagaagaaggtgaaagtcaaaatggaaaagaagagtacaccttcacgcggctccagcagcaaaagcagcagcaggcagttatcagagtcttttaaatcaaaggaattcgtctcgtccgacgaaagcagctcgggggagaataagtccaaaaagaaaagacggcgctccgaggacagcgaggaggaggagttggctagcactcccccctcaagcgaggattccgcttcaggaagtgacgagtag

SEQ ID NO: 207290 - DNA, 240 bp, synthetic construct
  misc_feature 1..240: note = Description of Artificial Sequence: Synthetic coding sequence
  source 1..240: mol_type = other DNA
atgaagagcctgacctggatcctgggcctgtgggccctggccgcctgctttacccccggagagtcccagcgcggtcccagagggccatacccacctggacctctggcccctcctcagcctttcggccccggctttgtccctcccccaccgccacctccctatggaccaggccgcattcctccaccacccccggcaccctatggacccgggatattcccacctcctccacctcagccttag

SEQ ID NO: 207291 - DNA, 324 bp, synthetic construct
  misc_feature 1..324: note = Description of Artificial Sequence: Synthetic coding sequence
  source 1..324: mol_type = other DNA
atgaagagcctgacctggatcctgggcctgtgggccctggccgcctgcttcactccaggcgagtcacagcgcggcccacggggcccatacccaccagggcccctggccccaccccagccgttcggccctggatttgtgccccccccccctccccccccatatggtcccggacgcattccacctccaccatactcatgcacacccaacatgaacaactgcagtcggtgccatcaccatcacaaaaggcaccactacccctgtaactattgcttttattatccaaaatacgagttccagcactgttttcaagagacattcacttag

SEQ ID NO: 207292 - DNA, 240 bp, synthetic construct
  misc_feature 1..240: note = Description of Artificial Sequence: Synthetic coding sequence
  source 1..240: mol_type = other DNA
atgaagagcctgacctggatcctgggcctgtgggccctggccgcctgctttactcccggggagagccagcgggggccaagagggccctatcccccaggccccctggctcccccacagcccttcggtccaggttttgtgccccctcctcctccacccccctacggtccaggcaggattcctccaccccctcctgccccgtacggtcctggaatcttcccgccacctccaccacaaccgtag

SEQ ID NO: 207293 - DNA, 348 bp, synthetic construct
  misc_feature 1..348: note = Description of Artificial Sequence: Synthetic coding sequence
  source 1..348: mol_type = other DNA
atgagccggcacagccggctgcagcggcaggtgctgagcctgtacagagacttgctcagagctggacgtgggaagccaggggccgaagctagggtgagggccgagtttagacagcatgcagggctaccccgatccgatgttctgcgtatcgaatatctttatcggcgcggacgcagacagctacagctgctaagatccggtcatgcaactgcaatgggcgctttcgtgcgcccacgggccccgactggtgagcccggcggggtggggtgtcagcctgatgacggggattctcccagaaacccacacgattccacgggggcacccgaaactcggcctgacggccgatag

SEQ ID NO: 207294 - DNA, 501 bp, synthetic construct
  misc_feature 1..501: note = Description of Artificial Sequence: Synthetic coding sequence
  source 1..501: mol_type = other DNA
atggccgtgagcaccgtgttcagcaccagcagcctgatgctggccctgtcacgccactcattattgtcaccattactctccgttacgtcattccggcggttctacaggggtgatagtcccacagatagtcaaaaggacatgattgagattccactgcctccatggcaggagagaaccgatgaaagcatagagactaagcgggccaggttgctgtacgagagtagaaagcgcggaatgctggagaactgcatccttttatctcttttcgccaaggagcatttgcagcatatgaccgagaagcagttgaacctgtatgatcgactgataaacgaaccaagtaacgattgggatatttattactgggccaccgaagccaagcccgctccagagatttttgagaatgaggtgatggcactcctgcgagactttgctaagaacaagaacaaggaacaacgccttcgcgccccggacctggaatacctcttcgaaaaaccccggtag

SEQ ID NO: 207295 - DNA, 843 bp, synthetic construct
  misc_feature 1..843: note = Description of Artificial Sequence: Synthetic coding sequence
  source 1..843: mol_type = other DNA
atggccgccgtggtggccctgagcctgcggcggcggctgcccgccactaccttgggaggcgcatgtctccaagcctccaggggcgctcaaaccgcagccgcaaccgcaccaagaatcaagaagttcgccatttaccgctgggacccggataaggccggtgataagccacatatgcagacttacgaggtcgaccttaataaatgcggaccaatggtgctggacgcactgattaagattaagaatgaagtggactctacactcacatttaggagaagctgcagggaggggatctgcggcagctgtgcgatgaacattaatggcggtaatacattagcctgcaccaggcggattgacacaaacctgaataaggtgtcaaagatatacccactgccacatatgtacgtcattaaggacctcgtccctgatctgagtaatttttacgctcaatataaaagcatcgaaccctacttaaagaagaaagatgagtctcaggaagggaaacagcaatacttgcaaagcattgaggaacgggagaaactggatggattgtacgagtgcatactgtgcgcctgctgctccacatcatgcccatcctactggtggaacggggataagtatctgggccccgctgtccttatgcaggcgtatcggtggatgattgatagcagagacgactttaccgaggagagactcgccaagctgcaggatcctttttctttgtatcgctgtcacaccattatgaactgtacccgaacatgccccaaaggcctgaacccaggcaaggccatagccgaaattaaaaagatgatggctacgtacaaagaaaaaaaagcttcagtctag

SEQ ID NO: 207296 - DNA, 453 bp, synthetic construct
  misc_feature 1..453: note = Description of Artificial Sequence: Synthetic coding sequence
  source 1..453: mol_type = other DNA
atggccgccctgctgctgcggcacgtgggccggcactgcctgcgggctcacttcagcccccagctgtgtatcagaaatgctgtccctttaggaacgacagcaaaagaggagatggagaggttttggaacaaaaacataggctcgaaccgcccccttagtccacacataactatctattcctggagcctccccatggctatgagcatctgtcacaggggaacagggatcgctttgagcgcagacgtgggtccacggaagagaccagaggatagtcctgcaattccagtgtggtccgggtgccccggatcgtactgcgtagtactgtatggggccggttctcacgtgaaaaaaggcgggtcccaacaccacctgcccactcattactacattcatcctagtttttgcttgtccttcctgagtccagcttgggagaagttttcgctcttcgtttag

SEQ ID NO: 207297 - DNA, 510 bp, synthetic construct
  misc_feature 1..510: note = Description of Artificial Sequence: Synthetic coding sequence
  source 1..510: mol_type = other DNA
atggccgccctgctgctgcggcacgtgggccggcactgcctgcgggctcacttctcacctcagttgtgcatccgaaatgctgttcccctgggtactactgctaaggaagaaatggagaggttctggaacaaaaacatcggctccaaccggcccctctctccacacatcacaatctactcgtggtcattacccatggcgatgtcaatatgtcatagagggacaggcatcgccttgagcgcaggtgtctcgctgtttggcatgagtgccctgctgttgcccggaaacttcgaatcttacctggaactcgtgaaatccctttgcctggggccggccttgatccacacagccaagttcgcccttgtatttcccctcatgtatcacacatggaatggtattcgccatctgatgtgggatcttggtaagggactgaagattccacagctgtaccagagcggagttgtcgtgctcgtgctcacggttctgtcttcgatgggcctggctgccatgtag

SEQ ID NO: 207298 - DNA, 351 bp, synthetic construct
  misc_feature 1..351: note = Description of Artificial Sequence: Synthetic coding sequence
  source 1..351: mol_type = other DNA
atggccgccctgctgctgagctggagcctgcccatggccatgagcatttgtcatcggggaaccgggatagcactgagtgctggtgtgtccctgtttgggatgtctgcgctattactccctggaaacttcgagtcctacctggagttggtaaaaagtctatgcctgggcccagccctgatacataccgcgaaattcgccctggtttttcctctcatgtaccatacttggaatgggatccggcacttaatgtgggatctgggaaaggggctgaaaatccctcagttatatcaaagtggagttgtggtccttgtcctgaccgtgctgtcgtcaatggggctcgctgctatgtag

SEQ ID NO: 207299 - DNA, 408 bp, synthetic construct
  misc_feature 1..408: note = Description of Artificial Sequence: Synthetic coding sequence
  source 1..408: mol_type = other DNA
atggccgccctgctgctgcggcacgtgggccggcactgcctgcgggcccacttctcaccccagttatgcatcaggaactggtccctccctatggccatgagtatttgccatagaggaactggtatcgcactgagcgcaggtgtttcactatttggcatgagtgcgttgctgttgcccggcaatttcgagtcctatctcgagctggtcaagtctctctgccttggccctgcccttatccatactgcgaagttcgcactggtattcccattgatgtaccacacctggaacggcatccgccacctaatgtgggatctgggcaagggattgaagattccccagctttaccagtccggcgtcgtggtgctcgtgctgaccgtgttaagctcgatgggattggccgctatgtag

SEQ ID NO: 207300 - DNA, 480 bp, synthetic construct
  misc_feature 1..480: note = Description of Artificial Sequence: Synthetic coding sequence
  source 1..480: mol_type = other DNA
atggccgtgctgtggcggctgagcgccgtgtgcggcgccctgggcggcagagctctgctgctgcgcacacctgtagtgcgtcccgctcatatttcggcattcctccaggatcggcccatcccagagtggtgcggtgtacagcacatccacctgtctccctcacaccattctggctctaaggctgccagtttgcactggacgtctgagcgggtagtctctgtactgctgctgggtctgctccccgctgcatacttgaatccatgttctgcaatggactactccctggccgccgctctaacactgcacggacactgggggctcggacaggtagtgacagactacgtgcatggtgacgccttacagaaggctgctaaggctggcttgctggcactctctgctctgaccttcgccgggctctgttacttcaattaccacgatgtgggcatatgcaaggccgtcgccatgctttggaagctatag

SEQ ID NO: 207301 - DNA, 465 bp, synthetic construct
  misc_feature 1..465: note = Description of Artificial Sequence: Synthetic coding sequence
  source 1..465: mol_type = other DNA
atggccgccagcatgttctacggccggctggtggccgtggccacccttcggaatcaccgcccaagaacagcccaacgtgctgctgctcaggggccagtgctgatcgggtctagtcacggcggggtgaacatcgaggatgtggctgcagagtctcccgaagcaatcatcaaagaacccattgacatagaagaagggataaaaaaagagcaggccctgcagctggcccaaaagatggggtttcccccaaacattgtagagtctgctgcggaaaacatggtgaagctatacagcctgttcctgaagtacgacgctacaatgatagagattaatccaatggtagaggattcagacggagcagtgctgtgcatggacgcaaaaatcaacttcgattccaatagcgcttacaggcagaagaaaatctttgacttgcaggactggacccaggaagacgagcgggacaaatag

SEQ ID NO: 207302 - DNA, 897 bp, synthetic construct
  misc_feature 1..897: note = Description of Artificial Sequence: Synthetic coding sequence
  source 1..897: mol_type = other DNA
agcggccggggccaccccagcgagccccccgccagcgacggccccgccgggtgctgttccgggtctaaggatgtggttataaaagcgcaggtacttgcaggaggaagggggaaggggacctttgagtctggccttaaaggaggcgtgaaaatagtgttcagtcctgaggaggccaaagctgtctcttcacagatgatcggcaagaagctgttcactaagcagaccggagagaaaggtaggatttgtaaccaagtcttggtgtgcgagcggaagtaccctcgacgcgagtactactttgcaatcacgatggagcgcagttttcaaggacctgtgctcatcggaagcagtcacggtggtgtgaacatcgaagacgtggccgcagaatcgcccgaggcaattatcaaggagccaattgacatcgaggagggtatcaagaaggagcaagcactgcaactggcccagaaaatggggttccctcccaatattgtggagtcagccgccgagaacatggttaaactttattccctcttccttaagtatgatgccacaatgattgagattaacccgatggttgaagactctgatggtgcagtgctatgcatggacgctaagatcaactttgatagtaatagcgcttaccgtcagaaaaagatttttgatctgcaggattggacccaggaggatgagcgggataaggacgctgccaaagctaacctcaattacatcggactggacggcaatatcggatgccttgtgaacggagccggtttagccatggctaccatggacattattaagctacacggagggactccggcaaactttctcgacgtgggcggaggagccaccgttcaccaggtcactgaggcgtttaagcttatcaccagtgataagtag

SEQ ID NO: 207303 - DNA, 1326 bp, synthetic construct
  misc_feature 1..1326: note = Description of Artificial Sequence: Synthetic coding sequence
  source 1..1326: mol_type = other DNA
atggccgccagcatgttctacggccggctggtggccgtggccacccttcgcaatcaccggccgcggacagcccagcagcaacaacggaatttgtctttacacgagtatatgagcatggagctcctgcaagaggccggcgtctctgtgcccaaaggatacgtggcaaaatcgcctgatgaagcatacgccattgctaaaaaactggggagcaaggatgtggtcattaaggctcaagttcttgccggtgggaggggcaaaggcacgttcgagagtggcctgaaggggggagttaaaatcgtgttctcacctgaggaggccaaagctgtgtcctctcagatgatcgggaagaagctgttcactaagcagactggtgagaaaggcagaatctgcaatcaagtactcgtctgcgagcgtaaatatcccaggagagaatattacttcgccatcacaatggaacgctcgtttcagggcccagtgcttatcggcagctcccatggtggggttaacatagaagatgtggccgccgaatcccccgaggctatcatcaaagagccaattgacatcgaagaagggatcaaaaaagagcaggctctccaactggcccagaaaatgggcttccccccgaacatcgttgaatccgcagcagagaatatggtgaagctctacagtcttttcctgaaatacgacgcaacaatgatcgagatcaacccaatggtcgaggattcggatggcgcagttctatgcatggacgccaaaatcaactttgatagtaacagcgcctaccggcagaaaaaaatcttcgatctccaagattggacacaggaggatgaacgggacaaggatgcagctaaagcaaacctgaattacattggccttgatggcaacatcggctgtctggtgaacggcgctgggctcgccatggctacgatggacataatcaagctccatggaggaacaccggccaattttctcgacgtgggaggaggagctaccgtccaccaggttacagaggcatttaaattaatcactagcgataaaaaagtgctcgcaatactggtgaatatattcgggggcatcatgaggtgtgatgtcattgcacaaggtatagtgatggccgttaaggatctggaaattaagatcccagttgtcgtgagactgcagggcacccgggttgacgatgctaaagcgttaatcgctgactcaggcctgaaaatcttggcatgtgatgatttggatgaggccgcgcgcatggtggtcaagctcagcgagatagtgacgctagctaagcaggcacatgtcgacgtgaaatttcaactgccaatatag

SEQ ID NO: 207304 - DNA, 1392 bp, synthetic construct
  misc_feature 1..1392: note = Description of Artificial Sequence: Synthetic coding sequence
  source 1..1392: mol_type = other DNA
atggccgccagcatgttctacggccggctggtggccgtggccaccctgagaaaccatagacctcgaacagcgcagagagcggcagcgcaggttctgggttctagtgggctgttcaataaccacggccttcaggtgcagcagcagcagcagcggaatctgagtttgcatgagtatatgtctatggagttgctgcaggaagctggcgtctcggtaccgaagggctatgttgcgaagtcccccgacgaggcctacgcaatcgcaaagaagctgggaagcaaggacgtcgtgataaaagcccaagtgcttgccggaggtaggggcaaggggacctttgaatctggcctcaagggaggggtcaaaatagtgttcagtccagaagaagctaaggccgtgtctagtcaaatgataggcaagaaattgtttactaagcagacaggggagaagggacgcatctgtaaccaggtgctggtgtgtgagagaaagtaccccagacgggaatattattttgctatcaccatggaacgaagctttcagggcccagtgttgatcgggtcctcacatggtggcgttaacatagaggacgtggcagccgagtcacccgaagccataatcaaggaacctatcgatattgaggagggaatcaagaaagaacaggcccttcaactggcccagaaaatgggtttccctccaaatatcgtggaaagtgcagcggaaaacatggtcaagctttatagcctcttcctgaaatacgacgcgacaatgatcgagataaatcccatggtggaggactcggacggggcagtactttgcatggatgccaagatcaacttcgacagtaacagtgcctacagacagaaaaagattttcgacctgcaagactggacgcaggaggatgaacgagataaggatgccgctaaggccaacctcaactatataggactggacggaaacatcgggtgccttgtaaatggcgccggtctggctatggccacgatggacatcatcaaactgcacgggggaaccccagcaaactttttagacgtgggaggtggcgctaccgtgcaccaggtaacagaagccttcaagcttatcacttccgacaagaaggttttggccatattagtcaacatctttggtggtataatgaggtgcgacgtgatcgcgcagggcatcgtcatggctgtcaaagacctggagatcaagattccagtggtggttcgtttgcagggcactagggtcgatgacgctaaggctctcatcgccgacagcggcctcaagatcctggcgtgtgacgacctggacgaagcagctagaatggtcgtcaaacttagtgaaatcgtcaccctggcaaaacaagcccatgtcgacgtcaaattccaacttccaatatag

SEQ ID NO: 207305 - DNA, 1218 bp, synthetic construct
  misc_feature 1..1218: note = Description of Artificial Sequence: Synthetic coding sequence
  source 1..1218: mol_type = other DNA
atgagcatggagctgctgcaggaggccggcgtgagcgtgcccaagggctacgttgcaaagtctcccgatgaggcctatgcaatcgcgaaaaagctcgggtcgaaggatgtggtaatcaaagcccaggtcctggcgggcggccgcgggaagggcaccttcgagtcgggcttgaagggcggcgtgaagattgtgttctctccagaggaagcgaaggccgtctcaagtcagatgatcgggaaaaaactgtttaccaagcagactggggaaaagggaaggatctgtaatcaggttctggtatgtgaacgtaaataccctaggcgcgaatactactttgcaatcacaatggagaggagtttccagggacctgtcttaatcggctcatcccacgggggggtgaacattgaggacgtggcagcagaaagccccgaagctatcatcaaggaacctattgacatcgaagagggtatcaaaaaagagcaggctctgcaactcgctcagaagatgggttttcctccaaacattgtggagagcgcagccgaaaacatggtgaaactctattccctatttctaaagtatgacgcaacgatgatcgagattaatccaatggtggaggacagcgacggcgccgtactgtgtatggacgccaagataaactttgactcaaactccgcctaccgacagaaaaaaattttcgatctccaagactggacgcaggaggatgagagggacaaagacgccgcaaaagccaacttgaattatatcggactggacggaaacataggatgtttggtgaacggcgctggactggcaatggcgactatggacattatcaagctgcatggcggaacgccagctaacttcctcgacgtcgggggtggtgcaacggtgcatcaggtgacagaggcctttaagctgattacctcagataaaaaggtgctggctattctggtaaacatcttcggaggcattatgaggtgcgacgtgatcgcacagggcatagtgatggccgtaaaagatctggagattaaaatccctgtggttgtaaggctgcagggaactcgagtggatgatgccaaagccctgattgccgatagtgggctcaaaatactggcctgcgacgatttggatgaagcagccagaatggtcgtgaaactatccgaaattgtcaccctggccaagcaggcacacgtggacgtgaagtttcaactgccaatttag

SEQ ID NO: 207306 - DNA, 876 bp, synthetic construct
  misc_feature 1..876: note = Description of Artificial Sequence: Synthetic coding sequence
  source 1..876: mol_type = other DNA
atggagcggagcttccagggccccgtgctgatcggcagcagccacggcggagtcaacatagaagatgtcgcagccgaaagccctgaagcaattatcaaggagcctatcgatattgaggaaggcataaagaaagaacaggcactacagctggcgcaaaagatgggatttccccccaacatcgttgagtccgcagccgagaatatggtgaagttgtacagtctgttcctgaagtatgatgccactatgatagaaattaacccgatggtcgaggattctgatggtgccgtactgtgcatggatgcaaagattaacttcgattctaatagcgcctatcgacagaaaaagatcttcgacctccaggattggacccaggaggacgagagagataaagatgcagccaaagccaatctcaactatattggtcttgacggcaacattggctgccttgtcaatggcgccgggctggccatggctactatggatattatcaagctgcacggaggcacgccagcaaattttctggacgtcggcggaggcgccacagtgcaccaggttaccgaagcgtttaaattgatcacttctgataagaaggtgctggccatactggtaaacatattcgggggcattatgcggtgcgacgtgatcgcccaaggtatcgtaatggcggtaaaagacctcgagatcaagatccccgtggtggttcggttacaggggactcgagtggacgatgccaaggcgctcatagctgactcgggtctcaagatcttggcatgtgatgatctcgacgaggccgctcggatggtggtaaaactgtccgaaattgtgactctggctaaacaggcccacgtggatgttaagtttcaactgcccatatag

SEQ ID NO: 207307 - DNA, 1218 bp, synthetic construct
  misc_feature 1..1218: note = Description of Artificial Sequence: Synthetic coding sequence
  source 1..1218: mol_type = other DNA
atgagcatggagctgctgcaggaggccggcgtgagcgtgcccaaggggtatgtggcgaagtccccagacgaggcttatgctatcgccaaaaagctggggtctaaggatgtggtcattaaggcccaggttctggctggcggaagaggcaaaggaactttcgaatccggcttaaagggcggggtgaagatcgtcttttctccagaggaagctaaggccgtgagcagccagatgatcgggaagaaattgttcaccaagcagactggtgagaagggcagaatttgcaaccaggttcttgtgtgcgagcgcaagtatcctaggcgagaatattactttgctatcaccatggagcgctctttccaagggccagtccttataggctcttcccatgggggggtgaacatcgaagacgtggccgcagaaagcccagaggccattattaaggaacctattgacatcgaagaggggatcaagaaagagcaggccttgcagcttgcacaaaaaatgggattccctcccaatatcgtggaatctgcggctgagaatatggtgaagctctactccctatttctgaaatatgacgcaactatgattgagatcaacccaatggtggaggattcagatggagctgttctgtgcatggatgcaaagatcaacttcgatagcaactccgcttatcggcagaagaaaatattcgacctgcaggactggacacaagaggacgagcgggacaaggacgcggccaaggccaatctcaactacataggactggacggcaacattggatgccttgtgaacggggcaggtttggccatggcaacgatggatataattaagcttcatgggggcacgcctgccaacttcttggacgtcgggggcggcgcaaccgtgcaccaagtgaccgaggcatttaagctgattactagcgacaagaaagtgttagccattctggtgaacatcttcggggggatcatgcggtgcgatgtgattgctcaggggattgtgatggccgtgaaggacctggagattaagatcccagttgtcgttaggctgcagggtacaagagtggacgatgccaaggctcttatcgctgactccgggctgaagatccttgcgtgtgatgacttagatgaggcagcccggatggtcgtgaaactgtctgaaatcgtgaccctagcgaagcaagcacacgtcgatgtaaaatttcagttgcccatctag

SEQ ID NO: 207308 - DNA, 990 bp, synthetic construct
  misc_feature 1..990: note = Description of Artificial Sequence: Synthetic coding sequence
  source 1..990: mol_type = other DNA
atgatcggcaagaagctgttcaccaagcagaccggcgagaagggccgtatctgtaaccaggtcctggtctgtgaaaggaaatatccgagacgggagtattacttcgctattactatggaaagaagcttccagggacccgttcttatagggtcttctcacggaggagtgaacatcgaggacgtagcagccgagtccccagaggcaattataaaggagcctattgatatagaggagggaatcaaaaaagagcaggccctgcagttagcccagaaaatggggttccctcccaacatcgtggaatcagccgcagaaaatatggtgaagctgtactcactatttctgaagtatgacgccacaatgattgagattaatcccatggtagaggatagcgacggcgccgtcctatgtatggatgctaaaataaatttcgactctaactctgcatataggcaaaagaaaatttttgacttgcaggattggacccaggaagacgaacgagacaaggatgccgctaaagccaacctgaactacataggccttgatgggaacataggctgtctcgtaaacggggccggccttgccatggctacaatggatatcattaaacttcacggtggcacacccgccaattttctcgatgtggggggtggtgcgactgtccaccaggtcaccgaggctttcaaactcatcaccagcgataagaaagtgctcgcgatcttggtcaatattttcgggggaatcatgcggtgcgacgtaatcgcccagggcattgttatggctgttaaagatctcgaaatcaagatccccgtcgttgttagactccaaggtactcgagtcgacgatgccaaagctctgatcgccgacagcggtctgaagatattggcctgtgacgatcttgatgaggccgcacgcatggtagttaagttatccgagattgtgactcttgccaagcaagcccatgttgatgtgaaattccagcttcccatctag

SEQ ID NO: 207309 - DNA, 1041 bp, synthetic construct
  misc_feature 1..1041: note = Description of Artificial Sequence: Synthetic coding sequence
  source 1..1041: mol_type = other DNA
atgaccgccaccctggccgccgccgccgacatcgccaccatggtgtccggctcgtctggtctggctgccgctaggctgctgtcgagatcatttctcctgccccaaaatggaatcagacactgctcttatacagcatcccgacagcatttgtacgtggataagaataccaagatcatctgtcagggctttaccggtaagcagggcacattccacagccagcaagctcttgagtatgggaccaaacttgttggggggaccactccaggtaaaggggggcagacacacctcggactgcctgtattcaatacagtcaaggaggccaaggagcaaactggagcaacggcttccgtgatatatgtgccacctccatttgcagccgcagccattaatgaagcaattgaggctgaaattccactggtggtgtgtattacggaaggtatcccacagcaggacatggtcagagtgaaacacaaactgctgaggcaggaaaagacgaggctgatcgggcctaactgccccggggtaatcaacccgggcgaatgtaaaattggaataatgcctgggcacattcacaaaaagggcagaatcggcattgtgtcacgcagtggcaccctgacctatgaagcagtgcatcagacgacacaggtgggccttggacagtccctttgtgtcggtatcggaggcgaccccttcaatggaaccgacttcattgactgtctagaaatcttcctgaacgatagtgcaacagagggaatcatcttgatcggagagatcgggggtaatgctgaggagaacgcagctgagttccttaagcaacataattctgggccaaacagtaagccagtagtctctttcattgcaggtctgaccgcacctcccggtagaagaatgggccatgctggggccatcatagccggaggcaagggcggagcgaaggagaaaattagtgccctgcaatctgcgggcgtcgtggttagcatgagtccagcccagctgggaaccactatctacaaggagttcgagaaacggaaaatgttgtag

SEQ ID NO: 207310 - DNA, 5484 bp, synthetic construct
  misc_feature 1..5484: note = Description of Artificial Sequence: Synthetic coding sequence
  source 1..5484: mol_type = other DNA
atggcccggaagaagttcagcggcctggagatcagcctgatcgtgctctttgtgattgtgactatcatcgctattgccctcatcgtggttttagctactaaaaccccagccgtcgatgaaatcagcgacagtactagcactccagcgacgaccagggttactacgaaccccagcgatagtgggaaatgcccaaatgtgctgaacgaccctgtgaatgtgagaataaactgtattccagaacagttccccacagagggaatttgcgcccaaagagggtgctgctggaggccttggaatgactccttgataccttggtgttttttcgtggacaaccacgggtacaatgtacaggacatgaccaccacttccattggggtggaagccaagctcaacagaatcccgtcgccaacgctctttggaaacgatatcaacagcgttctcttcactacgcagaatcagactcccaatagattccggttcaagattactgatcctaataaccgtcggtacgaagttcctcaccagtatgtgaaggaatttacaggccctaccgtctcagataccctatatgatgtaaaggtggcgcagaacccgttcagcattcaagtgatcagaaaatccaatgggaagactctttttgacactagtataggccctcttgtctatagcgatcagtacctgcagatttccactaggttacccagtgactacatttatggtatcggggagcaggtccacaaacgtttcaggcatgacctgagttggaagacctggcctatatttacaagggaccaactgccgggcgataacaacaacaacctctatggtcatcagacattctttatgtgcatagaggataccagcggaaagagtttcggcgtattcctgatgaactcaaacgcaatggagatttttatccaacctaccccgattgtaacctatagggtgaccggcggtattctagatttttatattctgttaggagacacacccgaacaggtggtacaacagtatcagcagttggtcgggctgccagccatgcctgcatactggaacctgggatttcaactgtcaagatggaattacaaaagcctggacgtcgtgaaagaagtggtccggaggaatagagaggccggtatccccttcgatactcaggtaacagacatcgactatatggaagataagaaagacttcacctacgaccaggttgcatttaacgggttaccacagtttgttcaagacctgcatgaccacggccaaaaatacgtcataatactggacccagctatcagtataggccgacgcgccaacggaacaacctacgctacgtacgaacgcgggaatacccagcacgtctggattaatgaatctgacggatccacacccatcatcggtgaggtttggcctgggctcacagtgtatcccgattttacgaacccgaactgcattgattggtgggctaacgaatgttctatcttccaccaggaggtgcagtatgatggcctgtggattgacatgaacgaagttagcagcttcatccagggtagtacgaagggctgtaatgtgaacaaattgaactatccccctttcacccctgacatactggacaagctgatgtattctaaaaccatatgcatggacgccgtgcagaactgggggaagcagtacgacgttcattcactgtacgggtacagcatggcaatagcaaccgaacaggcagtccagaaagtgtttcccaataaaaggagcttcattctgactaggtctacgttcgcgggatcgggacgccacgccgcgcactggcttggtgataataccgctagttgggaacagatggaatggtctatcactggtatgctggagttttccctttttgggataccgctcgtgggcgccgacatttgtggctttgtggcagagacaactgaagaactctgccgtaggtggatgcagctgggcgcattctacccgttctccaggaatcacaactcagacggctacgagcaccaagacccagctttcttcgggcaaaactctctcctggtcaagtcttctaggcagtacttgaccatcagatacactctcctcccctttttatataccctgttctataaagcccacgtgttcggggagaccgtcgcccgaccggtgctgcatgagttctatgaggatacaaactcctggatcgaagatactgagtttctttggggacctgcacttctgattacaccagtgctgaagcagggggcggataccgtgagcgcttatattccggatgcaatctggtatgattatgagtccggggccaagaggccctggagaaaacagcgggtggatatgtatctgccagcagacaagatcggtttacatcttcgtggaggctacatcattccaatccaggagcccgatgtgactaccacagcctccaggaagaatccattgggtctgatcgtggcgctcggtgagaacaacaccgctaaaggggattttttctgggacgatggtgaaaccaaggacactatccagaatggtaattacatattgtatactttcagcgtttctaataataccttggatatcgtgtgcacacatagtagctatcaagaaggcactactctagcctttcagactgtgaagatcctaggactcacagacagcgtgaccgaagtcagggtagccgaaaacaaccagcctatgaatgcccacagtaacttcacgtacgacgctagcaatcaggtcctccttatcgctgatctcaagctgaacctcggaagaaatttctctgtgcaatggaaccagattttttccgagaatgaaaggtttaactgctaccctgatgctgatcttgcaactgagcaaaaatgtacccagcgcggatgtgtctggcgaactggcagctctcttagcaaggcaccagagtgttactttcccagacaggacaactcttactctgtgaactccgctaggtactccagtatggggattacagctgatttacaacttaacaccgccaacgcccgcattaaactaccatcagatcccatctcaaccctgcgggtagaagttaagtaccacaaaaatgacatgctgcaattcaagatatatgacccgcagaagaagcgttatgaagtgcctgtcccattgaacattcctacaacccccatatcgacctatgaggatcgattgtatgacgtggagatcaaggagaatccattcggcatccaaatccggcgacggagctctggccgcgtcatctgggacagttggctgcctggctttgccttcaatgatcagttcatccagatcagtaccaggctccctagcgagtatatttatgggttcggagaggtcgaacacacagccttcaagagagatttgaactggaacacatgggggatgtttacacgcgatcagcccccgggttataagctgaacagctatggcttccacccgtactacatggcccttgaagaagaaggcaacgcccacggtgtttttctgcttaactctaacgctatggacgtgacctttcaaccaactcccgcactgacctaccgaaccgtcggcgggattctggacttctatatgtttctcggccctacacctgaggtggccactaaacagtatcatgaggtgatcggtcacccggtgatgccagcttactgggcacttgggttccagctttgtcgctacggctacgccaacactagcgaggttcgagagctgtatgatgccatggtggcagccaacataccctacgacgtgcaatacacagacattgactacatggaaaggcagctggattttaccattggtgaggccttccaggacctgccccaatttgtcgacaagatcagaggtgagggcatgagatatattatcatcctcgaccctgctatctccggcaacgagaccaagacgtatcctgccttcgagcgtggccagcagaatgacgtgttcgtaaagtggcctaacacaaacgatatctgctgggccaaagtgtggcctgatttgcccaacattaccatcgacaaaactctgaccgaagacgaggccgttaacgcttcccgggcccacgtggccttcccagacttctttcggacctccactgcagaatggtgggcccgagaaattgtggatttttacaacgaaaaaatgaagtttgacggactgtggatcgatatgaacgagccaagcagcttcgtgaacgggacaaccacaaaccagtgcagaaatgatgagctgaattacccgccatattttcctgaacttacgaaacgtactgacggcttgcacttcaggaccatttgcatggaagcagaacaaatactctccgatggaacttctgtgctgcactacgatgtgcacaacctctacggatggtctcagatgaagccaacccacgatgccctgcaaaagactaccgggaagcggggaattgtaatttccagaagtacctacccaactagtggacgctgggggggccactggctgggcgacaactacgccaggtgggacaacatggacaaaagcatcatcgggatgatggagtttagcctgttcgggatgtcatacacgggagctgacatctgtggcttctttaacaattcagagtaccatttgtgtacgagatggatgcagctaggggcgttttatccatacagtcggaaccataacattgccaatacacggcgacaggaccccgcatcctggaacgaaaccttcgccgagatgtcccgcaacatcctaaatattcggtatacattgctaccctatttctatacccagatgcacgagatccatgctaacggaggcacagtgatcagacccctccttcacgaattcttcgatgagaagcccacttgggacatcttcaaacagttcctatggggacccgcctttatggtgacccccgttttggagccctatgtccagacggtcaatgcctacgtgcccaacgcacggtggtttgactaccacacaggcaaggacatcggagtccggggccagtttcaaacctttaacgcatcatatgatacgattaatctccatgtcaggggagggcacattctgccttgtcaggagcctgcgcagaacaccttttattcacggcagaagcatatgaagttaattgtggcagccgatgacaatcagatggcccaggggagcctgttttgggacgatggcgagtccatagacacctacgagcgcgatttatatctcagcgttcagttcaatctgaaccagacaactctgacttcaaccatactcaagcgcggctatattaacaagtcagaaacccggctgggctctctccatgtatggggaaagggtactacccctgtgaacgccgtaactctgacctataatgggaataagaacagtcttcctttcaacgaggacaccacgaacatgatcctccggattgatctcaccacccacaatgtgacactggaggagccaattgaaataaactggagctag

SEQ ID NO: 207311 - DNA, 2616 bp, synthetic construct
  misc_feature 1..2616: note = Description of Artificial Sequence: Synthetic coding sequence
  source 1..2616: mol_type = other DNA
atgaagtacagctgctgcgccctggtgctggccgtgctgggcaccgaattgctgggaagcctgtgctcaactgtgcgaagtcctagatttaggggtcggattcagcaagagaggaagaatattagacccaacattatactcgtactaaccgacgaccaggatgttgaactggggtcattgcaggtgatgaacaaaacccgcaaaatcatggaacacggcggagcaaccttcatcaatgcattcgttacaaccccaatgtgttgcccatctcgctctagcatgctgaccggcaaatacgtccataatcataacgtctataccaacaatgagaattgtagttctccctcttggcaggccatgcatgagccgagaaccttcgccgtatacttgaataacacaggttaccgcacggctttttttggcaaatatttgaatgagtataacggcagctatataccccctggatggcgggagtggctgggtctcatcaagaattctcgcttttacaattacacagtgtgcaggaacggcatcaaggaaaagcacggattcgactacgctaaagattattttactgacctgatcaccaatgagagcatcaattattttaaaatgagcaaacgaatgtatccccacaggccagtgatgatggtaatcagccacgccgcaccccacggccccgaggatagcgcaccccagtttagtaagttgtatcccaatgctagtcagcatatcacacccagctataactacgcaccaaatatggataaacactggatcatgcaatacacaggaccgatgcttcccatccacatggagttcactaacattctgcagcggaagcgcctacagaccctgatgtccgtagatgattccgtggagcgcttatataatatgcttgtggagaccggggaactcgagaacacttacatcatctacactgcagatcacgggtaccatattggacagttcggcctggtgaagggtaagtcaatgccttacgattttgatatccgcgtgcccttcttcatccgagggccgagtgtcgagccaggttcaatcgtgcctcaaattgtattgaacattgacctggctcccaccattcttgatatcgcaggactggacacccctccagatgtagacggaaagtcggttctaaagctgctcgatccagagaagcccggtaatcgatttaggaccaacaagaaagcaaagatatggcgggacaccttcctcgtagagcgtgggaagttcttgagaaagaaggaagagagcagtaagaatattcagcagtccaatcacctgccaaagtacgagagggtgaaggagttgtgccagcaggccaggtatcaaaccgcgtgtgaacaacccggccagaagtggcagtgtattgaggatacatcgggtaagctgaggattcacaagtgcaagggcccaagcgacctgctgaccgttagacagtccacacgcaatctgtacgctcgtggattccacgacaaagacaaggaatgtagctgtcgggagtccggttacagagcgtctagaagccagagaaaaagccagaggcagttcttaagaaaccagggaactcctaagtataagcctcgttttgtgcatacgcgacagacacgatccctatcggtcgaatttgaaggggaaatttacgacatcaacctggaggaagaagaggagctccaggtactgcagcctaggaatatcgcgaagcgacacgatgagggacacaagggacctcgagacctacaagctagcagtggtggcaaccgaggacgcatgttggcagacagtagcaacgccgtggggcctccaactacagtaagagtgacgcacaaatgttttatcctgcctaatgacagcatccactgcgagcgggaattgtatcagagcgcgcgggcatggaaggatcacaaggcgtatattgataaagagattgaggctctgcaagataagattaaaaatttgagagaggtgagggggcatttgaaaagacgcaagccggaggaatgttcctgctcaaaacagtcctattacaataaggaaaagggggtaaaaaagcaggagaaattaaagtcgcacctgcatcccttcaaggaagccgcacaggaggtggacagtaagctgcagctcttcaaagaaaataaccgccggcggaagaaggaacgcaaagagaagaggagacagcgcaaaggcgaggaatgtagccttcccgggctgacatgttttacccacgataacaatcactggcaaaccgctcctttctggaacctcggctctttctgcgcttgtacctccagcaacaataatacctactggtgcctcaggactgtcaatgaaactcacaactttttgttctgcgagtttgccacaggcttcttggagtattttgatatgaatacggatccctaccaactgactaatactgttcacaccgtcgagaggggcatcctgaaccaactgcatgtgcaattgatggagttacggagttgccagggctacaaacagtgcaatccaaggccaaaaaacctggacgtgggcaacaaggatggcggttcctatgacctccatcgcggtcaactatgggacgggtgggagggctag

SEQ ID NO: 207312 - DNA, 2616 bp, synthetic construct
  misc_feature 1..2616: note = Description of Artificial Sequence: Synthetic coding sequence
  source 1..2616: mol_type = other DNA
atgaagtacagctgctgcgccctggtgctggccgtgctgggcaccgaattgctcggttcactgtgtagcacagtgcggtctcccagatttcgggggagaatccagcaggaaaggaagaatatccggcccaatatcatcctggttttgacagatgaccaagacgttgagctgggtagtctacaagtgatgaataagacacgcaagattatggagcacggcggggctacgttcatcaacgcctttgtgaccacacccatgtgctgccccagccgctcttcgatgctgactggtaaatacgtgcataaccataacgtgtacacaaataacgaaaattgctctagcccttcatggcaagccatgcacgaaccacgaacctttgccgtgtacctcaataataccgggtacaggaccgccttcttcgggaagtatttaaatgagtacaacgggagctatatcccgcccgggtggagggagtggctgggcttgatcaagaatagccggttttacaactatacagtctgtagaaacggaattaaagaaaaacacgggtttgactatgcaaaagattatttcactgacctgattacaaacgagtcgatcaactattttaagatgtctaagagaatgtacccccataggccagtcatgatggttatttcacacgccgctcctcatgggcctgaggatagcgctccacagttctcaaagttatacccgaatgccagccagcacattaccccaagctataattatgcacctaacatggacaaacattggattatgcagtacacagggcccatgctgcctatccacatggaattcaccaacatcttgcagcgcaaaagactgcaaacactaatgtccgtcgacgacagcgtcgagcgcttgtacaatatgctagttgaaactggtgagctcgaaaacacctatatcatttataccgccgatcatggctaccacatcggccaattcgggctggtaaaaggtaaatccatgccatacgatttcgacattagagtgccatttttcatccggggaccatccgttgagccaggttcaattgtgccccaaattgtgttaaacatagacctcgctcccacaatcctcgatattgcagggctcgacaccccgcctgatgtggatggcaagagcgttctcaagctgctcgaccctgagaagccgggaaaccggtttcgtacaaacaaaaaagccaagatatggcgggacaccttcctagtggaacgcggcaagttcctgcggaaaaaggaggagagctcaaagaacatccagcagagcaaccatctacctaagtacgagagggtaaaggaactgtgccagcaggcccgctaccagaccgcctgcgagcagccaggtcagaaatggcagtgtatcgaggacacttctggaaagctgcggatacataagtgcaagggcccctcagacctgctgaccgtcaggcagtctactcggaatctttatgctaggggatttcacgacaaggataaggaatgcagctgtcgcgaaagcggataccgcgctagtcgaagccagcgcaagtcacagagacagtttctgcggaaccagggcaccccaaaatacaagccaaggttcgtgcatactcgccagacaagatccctgtcggtggagttcgagggcgagatttacgatattaacctggaggaggaagaagaactgcaggtgcttcagccccgcaatattgcaaagcgccacgatgagggccataaaggtcctcgggacttgcaggcttcatccggtgggaatagaggacgcatgctggccgactcgtccaatgctgtgggcccacctacaacagtgagggtgacacataaatgctttatcctgcctaacgactccattcattgcgagagagagctgtaccagtccgctcgcgcctggaaggatcataaagcatatatagacaaagagatcgaagccttgcaggataaaattaagaacctcagggaggtgcgcggacacctcaagaggagaaaacccgaggagtgtagctgctccaaacagtcctactacaacaaggaaaaaggggtgaaaaaacaggaaaaactgaagtcccacttgcaccccttcaaagaagccgcgcaggaggtagacagtaaactgcagctgttcaaggagaacaacagaaggaggaagaaagaaaggaaagaaaaacggcggcaaagaaagggggaggagtgttctttgcctgggctgacctgcttcacacacgataacaatcattggcagaccgcaccgttttggaacttaggcagcttctgcgcctgtacatctagtaataataacacgtactggtgcctgaggacggtcaatgagacacataacttcctgttctgtgagttcgccaccggcttcttagagtatttcgatatgaatacagacccatatcagctgacaaataccgtccacactgtggagcgggggattctgaaccagctacacgtgcagctgatggagctaaggtcctgccaagggtacaagcaatgcaatcctagaccgaaaaatctggatgtcggtaataaggatggtgggtcctacgacctacaccggggacaattgtgggacgggtgggagggctag

SEQ ID NO: 207313 - DNA, 2616 bp, synthetic construct
  misc_feature 1..2616: note = Description of Artificial Sequence: Synthetic coding sequence
  source 1..2616: mol_type = other DNA
atgaagtacagctgctgcgccctggtgctggccgtgctgggcaccgagcttctcggttcactctgttccaccgtgagaagccctagatttaggggtaggattcagcaggaacgtaaaaacatccggcctaatattatcctggtgctgacggatgaccaggacgtcgaacttggctctctgcaggtgatgaataaaactagaaaaatcatggagcatggcggcgcgaccttcatcaatgcctttgtgacaacaccaatgtgttgcccttccaggtcgagcatgctgaccggcaaatatgtacacaaccacaacgtgtacacgaacaacgaaaattgttctagtccctcctggcaggcaatgcacgagccccgcacgttcgccgtgtacttgaataacaccgggtatcgcaccgcattctttggaaaatacctgaacgaatataatggcagctacatcccacctggttggcgggaatggctggggctgattaagaattccagattttacaactacacggtgtgcagaaatggtattaaagaaaagcatgggtttgattatgcaaaggattattttactgacctgatcacgaatgagtctataaactattttaaaatgagcaagaggatgtacccacacagaccggtcatgatggtgataagccatgcagccccgcacggccccgaggacagcgcccctcaattctccaagctttaccccaacgcatctcaacacatcactcccagctacaactacgctccaaacatggacaagcattggattatgcagtacacagggcctatgctgccaattcacatggaatttacgaatattcttcagaggaaaaggctccaaacacttatgagtgtcgatgactcagtggagcgtctttacaacatgctggttgaaacgggtgagctggaaaatacatacattatttacacagccgaccacggatatcacatcggccagttcggactggtgaaagggaaatcgatgccatatgacttcgatattagggtgccatttttcatcagggggccttccgtcgagccaggaagcatcgtccctcagattgtgctcaacattgacctggccccaacaatcctcgacattgccggcttagacaccccccctgacgtggatggtaaatccgtacttaagctgctcgaccccgaaaaacccggcaatcgctttagaacaaataaaaaggcgaagatttggcgcgacacatttttagtagagcgtggcaaatttcttcgcaaaaaggaggagtccagtaagaacatccagcagagcaaccacctcccgaagtacgaaagggtaaaagagctttgccagcaggcgcgctaccagacagcatgcgagcagcccggtcaaaagtggcagtgcattgaggatacatcaggcaaattgcgtatccacaagtgcaagggcccgtctgacttgctgaccgtgagacagagcaccaggaatctctatgctcggggttttcatgacaaggataaagagtgcagttgtcgagaaagcggatatcgagcttctagatcacaaagaaagtcacagagacagttcctcaggaatcaagggacccctaagtacaaaccaaggttcgtgcacactagacaaacaagatccctgagcgttgagttcgagggggagatctatgacattaaccttgaggaagaggaggagttacaggtcctgcagcctaggaatatcgcgaaacggcacgatgagggacacaagggaccaagagacctgcaggcctctagcgggggtaaccgcggaagaatgctggccgactccagtaatgccgttggtcctcccaccactgtgcgagttacacacaagtgcttcattctgcccaatgattctattcactgcgagagagaactctaccagtccgccagagcttggaaggatcataaggcctacatagacaaagagatcgaggcgctccaggataaaataaaaaatctacgggaggtgagaggtcacctaaaaaggcgcaaaccggaagaatgcagttgctctaagcaatcatattataataaagaaaagggggtgaagaagcaggaaaagttgaaaagccacctacatccattcaaagaggcggcacaggaggttgactccaagctgcaactgtttaaagagaacaaccggagacggaaaaaggaaagaaaagagaagcgcaggcagaggaaaggtgaggaatgctccctacctggccttacctgcttcacacacgataacaaccattggcagaccgcaccattctggaacctgggcagcttctgcgcctgtactagctctaacaataacacctactggtgtttgcgcactgtgaacgaaactcacaatttcctgttttgtgagttcgctacaggattcttggagtattttgacatgaatacagacccctatcagctaacaaataccgtacacacagtggagcgcggcatattgaatcaactccatgttcagctgatggagctgcgaagttgccaggggtacaaacagtgcaacccccggccaaagaatttggacgtcgggaacaaggacggtggatcctacgacctgcaccgaggccagctatgggacggttgggaagggtag

SEQ ID NO: 207314 - DNA, 2616 bp, synthetic construct
  misc_feature 1..2616: note = Description of Artificial Sequence: Synthetic coding sequence
  source 1..2616: mol_type = other DNA
atgaagtacagctgctgcgccctggtgctggccgtgctgggcaccgagctgctgggcagcctatgcagcacggtgcgcagcccccgttttcgagggcgtattcagcaggagcgcaagaatatacgccctaacatcatcttggttctcacggatgaccaggatgtcgaactgggttcgctgcaagtgatgaacaaaacccgcaaaatcatggagcacggcggggctacgtttattaatgcattcgtcacgacacccatgtgttgcccatcgcgatccagcatgctgaccggaaaatacgtgcacaatcacaacgtgtacactaataacgagaactgcagtagcccaagctggcaggcaatgcacgagcccaggacattcgcagtttacttgaacaatacaggttacagaaccgcgttctttggtaagtaccttaatgagtacaacggcagttatattccacccggatggagagagtggctcggcctgatcaaaaacagtcgattctacaattatacagtttgccgtaatggtattaaggaaaaacacggcttcgattacgctaaggattacttcacggacctcatcaccaacgagagcataaactatttcaaaatgagcaaaagaatgtatccccaccgacctgtgatgatggtgatctcacatgctgccccccatggccccgaagacagtgcgcctcagttcagcaaactgtatccgaacgcttctcaacatatcacaccatcatacaattacgccccaaatatggataagcactggattatgcagtacacaggtcccatgctaccaatccatatggaattcaccaatatattgcagcggaagcggctgcagaccttgatgtccgtggatgactctgtagaacgtctatacaacatgcttgtggagacgggcgagctagagaatacttacatcatctatacagctgaccacggttaccacattgggcagtttggacttgtaaagggaaagtctatgccctacgacttcgacattcgagtgcccttcttcataagaggaccctcagtcgagccaggaagcatcgtccctcagattgtactcaacattgatctggcccccacaatcctcgatatcgctggtctagacacgccacctgacgtcgatggcaagtcagtcctaaaacttttggaccccgagaaaccagggaataggttccggacaaacaaaaaggccaagatctggcgcgatacatttcttgtggaacgcggcaagtttctgcggaagaaagaagagtcaagcaaaaatatccagcaaagcaaccatttgccaaagtatgagcgcgtgaaggagctttgccaacaggctcggtaccaaactgcttgtgagcaacctggccagaagtggcagtgtatcgaagacacgtccggcaagctgagaatccacaagtgcaagggacccagcgacctgctgacagtgcgccagtccaccaggaacctctatgcacgaggcttccatgataaggacaaagagtgctcttgtcgtgaatcaggctacagggccagccggagccagagaaaatctcagcgccagtttcttcggaaccaaggcacccctaagtataagccacgctttgtgcatacacgacagacccgcagcctttctgtggagtttgaaggcgaaatttacgatatcaatctggaggaggaggaggaactgcaggtccttcagccaagaaatattgccaaaaggcacgatgagggccacaaggggcctcgggacctgcaggcatcaagtgggggcaaccgtggacgcatgttggccgacagcagcaacgcagtggggccacccaccacagtgcgcgtgacccataagtgttttatccttcctaatgattcaattcactgcgagagagagctctatcagtctgcccgagcctggaaggaccataaagcttacatcgacaaagaaatcgaggcactgcaggataaaattaagaatctacgcgaggtgcgagggcacctcaaacggcggaagcctgaggagtgtagctgttccaaacagagctattataacaaggagaaaggagtgaaaaaacaggaaaagctgaagagtcacctgcaccccttcaaggaagcggctcaggaggtggactccaagctgcaactgttcaaagagaataacagaaggcgcaaaaaggaaaggaaggagaaaagaaggcagcggaaaggcgaggaatgtagtctgcccggcctcacttgctttacacatgacaacaatcactggcagaccgcccctttctggaatttgggctcattttgcgcttgcacttcctccaataacaacacttattggtgcctcagaacagtgaatgaaacacacaacttcctattctgcgagttcgccactgggtttctcgaatatttcgacatgaacaccgatccctaccagctgacaaacaccgttcacacagtagaacggggaatcctgaaccagctacatgtccagctgatggaactcagatcatgccagggttacaaacagtgtaacccccgtccaaaaaatctggacgtgggcaataaagatggcggctcatatgatctccatagaggacagctgtgggacggctgggagggatag

SEQ ID NO: 207315 - DNA, 90 bp, synthetic construct
  misc_feature 1..90: note = Description of Artificial Sequence: Synthetic coding sequence
  source 1..90: mol_type = other DNA
atgaagtacagctgctgcgccctggtgctggccgtgctgggcaccgaactgctgggatccctgtgctctacagtgaggagtccccgatag

SEQ ID NO: 207316 - DNA, 519 bp, synthetic construct
  misc_feature 1..519: note = Description of Artificial Sequence: Synthetic coding sequence
  source 1..519: mol_type = other DNA
atgaagtacagctgctgcgccctggtgctggccgtgctgggcaccgagctgcttggaagcctttgctcaacagtccgcagccctcggttccgcggcaggatacagcaggaaaggaaaaacattcgaccaaacattatcctagtcttaaccgacgaccaggacgttgaactggggtcccttcaagtgatgaacaaaacccgtaagattatggagcatggaggagccacttttatcaacgcgttcgtaactactccaatgtgctgccccagccgatcttccatgttgacgggaaagtacgtgcacaatcataacgtttacacaaataacgaaaactgcagcagcccttcttggcaggccatgcacgagcctcgcacattcgcggtctacctgaacaatacagggtatcggaccgcgttcttcggtaaatacttgaacgagtataacggaagttacatcccccctggttggcgggaatggctcggcctgattaaaaactctagattttacaattacacctag

SEQ ID NO: 207317 - DNA, 231 bp, synthetic construct
  misc_feature 1..231: note = Description of Artificial Sequence: Synthetic coding sequence
  source 1..231: mol_type = other DNA
atgaagtacagctgctgcgccctggtgctggccgtgctgggcaccgaactcttgggttccctgtgtagcactgttcggagccctcgttttagaggcagaattcaacaggaacgaaagaatatcagacccaatattatcctggtacttacagatgaccaggatgtcgagctcggatctctgcaggtaatgaataaaacacgcaagattatggagcatggcggggctacatag

SEQ ID NO: 207318 - DNA, 258 bp, synthetic construct
  misc_feature 1..258: note = Description of Artificial Sequence: Synthetic coding sequence
  source 1..258: mol_type = other DNA
atgaagtacagctgctgcgccctggtgctggccgtgctgggcaccgaactgcttggttccctctgctcgaccgtacgctctcccaggtttcgaggtcgcatacagcaagagaggaagaacatcagacccaatataattttggtcctgactgatgaccaggatgtcgaactgggttctctgcaggtgatgaataaaaccagaaagatcatggagcatgggggcgcaaccttcatcaatgcctttgtcaccacaccttag

SEQ ID NO: 207319 - DNA, 171 bp, synthetic construct
  misc_feature 1..171: note = Description of Artificial Sequence: Synthetic coding sequence
  source 1..171: mol_type = other DNA
atgaagtacagctgctgcgccctggtgctggccgtgctgggcaccgagctacttggttctctttgcagtacagtgcggtcacctagatttcgaggcagaatccagcaggagcgcaagaacattaggcccaacattatcctggtcctgaccgatgatcaggacgtggaatag

SEQ ID NO: 207320 - DNA, 2613 bp, synthetic construct
  misc_feature 1..2613: note = Description of Artificial Sequence: Synthetic coding sequence
  source 1..2613: mol_type = other DNA
atgggcccccccagcctggtgctgtgcctgctgagcgccaccgtgttctctctgctggggggctcctccgcattcttgagtcaccaccggcttaagggacggtttcagcgagaccgtcggaatattaggcctaatatcattctggtcttaacagacgaccaggatgtggagttgggatcgatgcaggtcatgaataaaacacggagaatcatggagcaggggggagcccatttcattaatgcattcgttactacgccaatgtgctgtccgagcagaagctccattctgactggaaagtacgtgcacaaccacaacacttatacgaacaacgaaaactgcagttccccttcgtggcaggctcaacatgagtccaggacattcgccgtttacctcaatagcacggggtatcgtaccgcattttttggtaagtacctaaacgaatataatgggagctacgtgcctcccggctggaaagagtgggtgggtctgctcaaaaactcccgcttctataattacacattatgcaggaatggcgtaaaagagaagcatggatctgactactctaaggactacttgacggatctgatcaccaatgattctgtcagcttcttccgcacatcgaaaaagatgtacccacaccgccccgttctgatggtgatttctcacgccgccccccatggtcccgaggactccgccccccagtactccaggctgttcccaaacgctagtcagcatatcactcccagctacaactacgccccaaacccagataaacattggattatgcgatatacaggtccaatgaaaccgattcatatggaatttactaacatgcttcagcggaagcggcttcagactctgatgtccgtagacgattctatggaaactatctataacatgcttgtcgagactggtgagttagacaatacatacatagtatataccgctgaccatggctatcacataggacagtttggccttgtcaaaggaaagtcgatgccctatgagtttgatatccgcgtcccattctacgtgagggggccaaacgtcgaggcgggttgcttgaaccctcacattgtgctcaacatcgacctagcacccactatacttgatatcgcaggcctggatatcccagctgacatggacggaaagtccattctgaagttgctggacacagagagacctgtgaatcgttttcatttgaagaagaagatgcgggtctggcgtgattctttcctggtcgaaagaggcaagctcctgcataagcgggataacgataaagtcgatgcccaggaagaaaacttccttccgaagtatcagagggtgaaggatctctgtcagcgagctgagtaccagactgcatgtgagcagctcggccagaaatggcagtgtgtagaagacgctaccggtaagcttaagctacacaagtgcaaggggccgatgagattgggaggatcccgggctctttctaatctagtgcccaagtactatggccaaggcagcgaagcatgcacctgcgactcgggagactacaaactgagtctggcaggaagaagaaagaagttatttaagaaaaaatataaggcgagttatgtccgaagtcggtccattagaagcgttgctattgaggtggatggtcgtgtgtaccacgtgggtttgggcgacgctgcccagccaagaaatcttacaaagaggcattggcctggcgcccctgaggatcaggatgacaaggacggtggcgatttttcagggacaggcggacttcctgactacagcgctgcaaatcccatcaaggttacccaccgctgctacatcctggaaaacgataccgtgcagtgtgatcttgacctgtataagagcctccaggcgtggaaagaccataaacttcacatcgaccatgaaatagaaacgctgcagaataaaataaaaaatctcagagaggtgcggggccacctgaagaaaaagagacctgaagaatgtgattgtcacaagatctcctaccacacacagcacaagggaagattgaagcatcgcgggagttcgttacacccatttaggaagggtctacaggaaaaagataaggtgtggctcctgcgcgaacagaagcgcaaaaagaagctgagaaagctgttaaagcggctccagaataacgacacctgtagcatgcctggattgacatgtttcacccatgacaaccagcactggcagactgctcctttttggacactcgggcccttctgtgcgtgtacgtccgcaaataataacacctactggtgcatgagaacaatcaacgaaacacacaatttcctgttttgtgagtttgccactggctttcttgagtatttcgatcttaatactgacccttatcagctgatgaatgctgtgaacacgctcgaccgcgacgtattaaatcagcttcatgttcagctgatggagttgaggtcgtgcaaagggtacaagcaatgtaatccccgcacccgcaacatggacctggggctcaaagatggtggaagctacgagcagtatcgccaatttcagcgtaggaagtggcctgagatgaaaaggccctcgagcaagagtttaggccagctctgggagggttgggaaggctag

SEQ ID NO: 207321 - DNA, 2559 bp, synthetic construct
  misc_feature 1..2559: note = Description of Artificial Sequence: Synthetic coding sequence
  source 1..2559: mol_type = other DNA
atgggcccccccagcctggtgctgtgcctgctgagcgccaccgtgttcagcttacttggaggaagcagtgccttcctgtctcaccatcggcttaaaggccgcttccaacgagacaggcgcaatatccgcccaaacattatcttagttctcacagatgatcaagacgtggaactggggtcaatgcaggtcatgaacaagactaggaggatcatggagcagggcggcgcacatttcatcaacgccttcgtgacaacacccatgtgctgtccatcgcgctcttcgatcctgaccggcaaatatgttcacaaccacaacacctataccaataacgaaaattgttccagcccttcttggcaggctcaacacgaatccagaacttttgcagtatacctcaacagcactgggtacaggacagcattttttggaaagtacctgaacgagtacaatgggagttacgtccctcccggatggaaagagtgggtaggtctgttaaaaaactctaggttctacaattacaccctgtgtaggaacggagtgaaggagaagcatggcagcgattactcgaaagactatttaactgatctcatcacaaacgacagcgtttcctttttccgcacctctaagaagatgtacccccacaggccagtgttgatggtgatttcacacgccgcaccacacggtcctgaggactccgccccccagtattcccgcctcttcccaaatgcaagccagcacattactccctcttacaactatgcacctaatcccgacaaacattggatcatgcgctacaccggacccatgaagccgattcatatggagttcaccaacatgctgcagcgcaagcgcctgcaaacactcatgtcagtggacgatagtatggaaaccatctacaacatgctggttgagacaggagagctggataacacgtacatagtgtacacagctgaccacgggtaccatatagggcagttcggtctggtcaagggtaagagcatgccctacgagtttgatatccgcgtccccttttatgtgaggggtccgaacgtggaagccggctgtctcaatccacatatagtgctgaatatcgacctcgctcctacaatcttggacattgccggcctggatattcctgctgatatggatggcaagtcgatcctaaagctcctggacacggaacggcccgtcaaccgttttcacctgaaaaaaaaaatgcgcgtctggcgtgatagttttcttgtcgagagaggtaagcttctgcataagcgggacaacgacaaggtggatgcccaggaagaaaatttcttaccaaaatatcaacgggtcaaggacttgtgtcagagggcggaataccaaaccgcttgcgagcagttggggcaaaagtggcaatgcgtcgaagacgctaccggtaagctgaaacttcataagtgtaaaggccccatgcgtctgggagggtcaagggccttgtccaatttggtgccaaaatattatgggcagggatctgaggcatgtacatgtgattccggcgattacaagttgagtctggccgggaggcgcaagaaattgtttaagaagaaatacaaggccagttacgtacgctctagatcaattaggagtgttgccatagaggtggacggcagagtgtaccacgtggggctcggtgacgctgcacagccgagaaacctcacaaaaagacattggcccggggctccagaggatcaagatgataaagatggaggtgacttctcaggaaccgggggattacccgactattccgccgctaatcctatcaaagtgacacacaggtgctatattttagagaatgacaccgtccagtgcgatctggatctctacaaaagtcttcaggcgtggaaggaccacaagctgcacatcgaccacgagattgagacgcttcaaaacaaaatcaaaaaccttagagaggtccgcggacacttgaaaaaaaagaggccggaggaatgtgactgtcacaagatcagctaccacactcagcacaaagggcgcctgaaacaccggggttcttcgcttcatccttttaggaagggcctccaggagaaggacaaagtgtggctcttgcgggagcagaaaagaaaaaaaaagctgcggaagctcctgaagcgtctccaaaataacgatacttgcagcatgcccgggctgacatgttttactcatgataaccaacactggcagacagcaccattttggacactgggaccgttctgcgcatgtacttccgcaaataacaatacttactggtgcatgaggaccatcaatgaaacccacaacttcctgttctgcgaattcgccacgggatttcttgagtacttcgacctcaataccgacccctatcaactcatgaatgcggtaaatacgctggatcgggatgtgttaaaccagctgcacgtgcagcttatggaactccgttcttgcaagggctacaagcaatgtaacccccgcacaagaaacatggatcttggacttaaggatggtggaagctatgagcagtatcgggggcagctatgggagggatgggaagggtag

SEQ ID NO: 207322 - DNA, 870 bp, synthetic construct
  misc_feature 1..870: note = Description of Artificial Sequence: Synthetic coding sequence
  source 1..870: mol_type = other DNA
ttcagcggcaccggcggcctgcccgactacagcgccgccaaccccatcaaggtgactcaccggtgctacattctagagaacgatacagttcagtgtgatctggacctgtataagagccttcaggcctggaaggaccataaactgcacattgaccatgaaatagaaaccctgcagaataagatcaaaaacctcagggaagtgagaggccatctgaaaaagaagcgcccagaggaatgcgattgccacaagattagctaccatacgcagcacaaaggccgcctcaagcatagagggtccagtctgcatccatttcgtaagggcctgcaggaaaaagacaaggtgtggcttctgagagaacagaagaggaagaaaaagctgcgcaaactgctgaaacgactccagaacaacgatacatgttccatgcccgggctgacttgtttcacacacgacaaccaacactggcagacagccccattttggacacttgggcctttttgtgcatgcacctctgccaacaacaacacctattggtgcatgcgaacaattaatgagacccacaatttcttgttttgcgaattcgccacggggtttctggagtactttgacctgaataccgacccataccagctgatgaacgccgtcaatactcttgaccgtgatgttctaaaccagcttcatgtgcaattgatggaactgcgcagttgcaaaggctataaacagtgcaatccgcgcacccgcaatatggacctagggctgaaggacggcgggagttatgagcagtaccgacagtttcagcggagaaaatggcccgagatgaagaggccttcatccaagtctttaggacaactgtgggagggttgggagggttag

SEQ ID NO: 207323 - DNA, 2604 bp, synthetic construct
  misc_feature 1..2604: note = Description of Artificial Sequence: Synthetic coding sequence
  source 1..2604: mol_type = other DNA
atgggcccccccagcctggtgctgtgcctgctgagcgccaccgtgttctctctgctgggaggctcttctgccttcctgtcccaccacagacttaaaggaagatttcagagagatcgacggaacattagaccaaacattatcctggttttgacagatgatcaggacgtcgagctggggtccatgcaggtcatgaacaagacccggcgcatcatggagcagggaggagctcattttataaatgcattcgtcactacccctatgtgctgcccttctcgaagctctatcctgacagggaagtatgtgcacaaccacaacacatatacaaataatgaaaattgctctagcccgagttggcaggctcagcacgagtcacggactttcgccgtgtacctgaattctacagggtatcgcactgcattttttggcaaatatctgaacgaatataatggtagctacgttcctccaggttggaaggaatgggtgggtctgttgaagaattctagattttacaattatactctgtgccgcaatggcgtcaaggaaaagcacgggagtgattacagcaaagactatctcaccgacttgatcaccaatgactcggtttcattctttagaacatccaagaagatgtacccacacaggcctgtgctcatggtaatctcccatgctgcgcctcacggcccagaagattccgccccccagtatagccgcttgttccctaatgctagccagcatataaccccatcctacaactatgcccccaaccccgataagcactggataatgaggtacaccggacccatgaaacccatacacatggaattcaccaacatgctacagcgcaagcggcttcagacactgatgtcagttgacgactcaatggaaaccatttacaatatgctagtggagacaggggagctggacaatacttatatcgtgtataccgcggatcatggctatcacataggacagtttggcctcgtgaagggcaaatccatgccatacgagtttgatatcagggtcccattctatgttcggggaccaaatgttgaagcaggctgcctgaaccctcacatcgttctgaatatcgacctggctcccaccatcttggatatagccggcctcgacatccccgccgacatggacggcaaaagcatcctcaagctgctggacacggagcggcctgtcaacagatttcacctcaaaaagaagatgagagtgtggcgcgatagtttcctggtggagcgcgggaaattgttgcataagcgtgacaatgacaaagtcgatgcccaggaggagaatttcctgccgaaatatcagagagtgaaagacttgtgccagcgggcagagtaccagacagcttgtgaacaactgggacagaagtggcagtgcgtggaagacgccactggcaagcttaagctgcataaatgcaaaggtcctatgcgccttggaggcagccgagctctatcgaacttggttcctaagtactacggccagggctctgaggcttgcacttgcgatagtggcgattataagctgagcctggccggtaggagaaagaagctatttaagaagaaatacaaagcctcttatgtgaggagcagatccatcagaagcgtggccatcgaagtcgatggccgcgtttaccatgtgggcctgggggacgccgcgcagccacgtaacctcacaaagcgccactggcccggcgcgcctgaagaccaggatgacaaggacggcggggacttttctgggaccggaggactgcctgattattcagctgccaaccccatcaaagtgacccatagatgctacatcctagaaaacgacacagtccagtgcgatttggatttatacaaatctctgcaggcatggaaggaccataaactgcatatcgaccacgagattgagacgctccaaaataagattaaaaatctgcgggaggttcggggccacctcaagaagaagcgccccgaagaatgcgattgtcataaaatcagttatcatactcagcacaagggccgactgaagcaccggggtagttccctccatccgtttaggaagggcctgcaggagaaagacaaggtgtggttgctgagagagcagaagaggaagaagaaactcaggaaactcctcaaacggctgcaaaataacgatacatgcagtatgccaggattgacctgcttcacccacgacaatcagcactggcagactgcccctttctggacgcttggcccgttttgcgcctgtacatccgctaacaacaacacttactggtgtatgcgcaccattaatgagactcataattttctgttttgcgagtttgcgactggattccttgaatacttcgacctgaacacggacccctatcagcttatgaacgcggtcaacaccctcgatcgcgatgtactgaatcaacttcacgtgcagctcatggagctccgatcttgtaagggttacaaacagtgcaaccccaggacccgaaacatggatctagacggggggagttatgaacagtaccggcagttccagaggcgcaagtggcccgagatgaagcgaccttcaagcaagagtctgggccagctgtgggagggatgggagggatag

SEQ ID NO: 207324 - DNA, 2613 bp, synthetic construct
  misc_feature 1..2613: note = Description of Artificial Sequence: Synthetic coding sequence
  source 1..2613: mol_type = other DNA
atgggcccccccagcctggtgctgtgcctgctgagcgccaccgtgtttagcctgcttggggggtcttccgcatttctcagccatcatcgcctcaagggtagattccagcgggatcggcgcaatatccgacccaatattattttggtcctaaccgacgatcaggacgttgaactggggagtatgcaggtgatgaacaagacgcggagaataatggagcaagggggagcccatttcattaatgcattcgtaaccacccctatgtgctgtccatcaaggtcatctatccttactggtaagtacgtgcataatcacaacacatacaccaacaacgagaactgttcctcacccagctggcaggcccagcacgagtctagaactttcgccgtgtacctgaatagcacaggatatcggacagccttctttggcaaataccttaatgagtataacggaagctacgtcccccccggatggaaggaatgggtgggtctgctcaagaactctaggttttacaactataccctgtgtaggaacggcgttaaggagaaacatggcagtgactactcaaaggactaccttacggatctgattaccaacgattccgtgagtttcttcagaacatccaagaagatgtacccccaccgcccagtattgatggttattagccatgccgctccccacggccccgaggattcagctccccagtactccaggctcttcccaaacgcaagccagcatattaccccgtcttacaattatgctccaaatcctgacaaacattggatcatgaggtacacagggcctatgaaaccaatccatatggaatttacgaatatgttacagcgcaagcgcctccaaaccctaatgtcggtggatgacagcatggagaccatctacaacatgcttgttgagacaggtgagcttgataacacctatattgtgtataccgcggaccatggataccatataggccaattcgggctggtcaaggggaaaagcatgccttatgagttcgatattcgcgtgcctttttacgttcgaggacctaacgttgaggcaggctgtcttaatcctcatatagtgctgaacattgacctggccccgaccatccttgacatcgcaggacttgacatccctgccgatatggacggcaaaagtattctgaaattacttgatactgaacgccctgtcaacaggtttcatctgaaaaagaagatgcgggtctggagggactcatttctggtggaaagaggcaagctgctccacaagcgggataacgacaaagtggacgcacaggaggaaaactttttgcctaagtatcagcgggtcaaagacttatgccaacgggccgaatatcaaacagcatgtgagcagctggggcagaagtggcaatgtgtcgaggatgcaacagggaaactcaaactccacaagtgcaaaggccccatgcgattaggagggagccgagcgctttccaacctggtgccgaagtactatggtcagggcagcgaagcatgcacttgtgactctggcgactacaagctgtcgcttgcaggccgcagaaagaagctcttcaagaaaaagtataaggcttcatatgtaaggtctcggtcaattcggtctgtcgctatcgaggtggatggccgagtgtatcatgtcggcctgggcgatgcggcacagccccgcaacctgacaaagcgacactggccaggtgcaccagaagaccaggatgataaggacggtggtgatttctccggaactggaggccttcctgactactccgcggctaacccaataaaggtgacgcatagatgctacatcctggagaacgacacagtccagtgcgacctggatctgtataagagcttgcaggcttggaaagaccacaaactgcatatcgatcacgaaattgaaaccctacagaataagatcaaaaatctaagagaggtgaggggtcacctgaagaagaaaagacctgaggagtgtgattgtcacaagatctcatatcatacacagcacaaagggagactgaaacacagaggcagcagtctccacccattcaggaagggactgcaagagaaggataaggtgtggctcctgagggaacaaaagcgcaagaagaagttgcgtaagctgctgaaacgtcttcagaacaacgacacgtgtagtatgcctggcctgacatgctttacccatgataatcaacactggcagacggcgccgttctggaccttgggacccttctgtgcctgtacatctgcgaacaataatacctactggtgcatgaggacaataaatgagactcataacttcctcttctgcgaatttgccaccgggtttttggagtactttgatctgaacactgatccctatcagctgatgaacgctgttaacactctggatcgtgacgtgctcaatcagctgcacgtgcagttgatggaattaaggagttgtaagggctataaacaatgcaatccgcgcactcggaatatggacctgggtcttaaagacggaggatcttatgaacagtaccgccaattccagaggagaaaatggcctgagatgaagaggccaagtagcaaaagtctcgggcagctatgggagggatgggagggatag

SEQ ID NO: 207325 - DNA, 1125 bp, synthetic construct
  misc_feature 1..1125: note = Description of Artificial Sequence: Synthetic coding sequence
  source 1..1125: mol_type = other DNA
atggccgcccccgccctgggcctggtgtgcggccggtgccccgagttggggctggttctgcttctgctgttgctctctcttctgtgcggcgcagcaggcagccaagaggccggcacgggtgctggagctgggtcgttggctggaagttgtgggtgtggcactccacagagacctggtgcccatgggtcatctgctgccgctcaccggtactctagagaagccaacgctcccggtcctgtaccgggagagcgtcagctggctcacagcaaaatggttccaatcccggctggagttttcacgatgggaacagacgacccccaaatcaagcaggacggcgaggcccccgcacgtcgcgtcactatcgacgctttttatatggatgcttacgaagtgtcaaataccgaatttgagaagtttgtaaattcaacaggctatctgacggaagccgaaaagtttggtgactcctttgtttttgaaggtatgctttccgaacaggtaaagaccaacatccagcaggcagtagctgctgccccttggtggctgcccgttaagggggcaaattggagacacccagaaggacctgactccacaattttgcaccgcccagaccacccggtgttgcatgtgtcctggaacgatgccgtggcctattgcacttgggcaggcaagcggctccccacagaagccgaatgggagtacagctgccggggcgggcttcataacaggctgttcccctggggaaacaaattgcagcccaagggtcagcattatgctaacatttggcagggcgagttccctgtgactaataccggtgaggacggcttccagggcactgcaccagtagatgcttttcctccaaatgggtatgggctgtataacatcgtgggaaacgcctgggagtggaccagcgactggtggactgtgcaccatagtgtggaagagacgcttaaccccaagggacctccgtccgggaaggatagggttaagaaagggggaagttatatgtgccaccgatcctattgctataggtatcgctgtgcggcccgatcacagaatacaccggattcctcggcttcaaatctggggtttaggtgcgcagctgacaggttgcctaccatggactag

SEQ ID NO: 207326 - DNA, 1281 bp, synthetic construct
  misc_feature 1..1281: note = Description of Artificial Sequence: Synthetic coding sequence
  source 1..1281: mol_type = other DNA
atggccgcccccgccctgggcctggtgtgcggccggtgccccgagctcggtttggtgctgcttctactcctgctgagcttgctgtgtggagccgcaggctcccaggaggcgggcaccggcgccggtgcagggtcattagctggaagttgtggatgcggcacaccccagagacctggtgcacacggctctagtgcagccgcacaccggtatagtcgtgaggctaatgccccaggtccagtaccaggagaaaggcagctggcacactcaaaaatggttcctatcccagctggcgtgtttaccatgggcaccgacgacccgcagataaagcaagatggcgaagccccagccagacgggtcaccatcgatgccttctacatggacgcatatgaagtgtctaataccgaatttgagaagtttgtgaatagtaccgggtatctcaccgaggcagaaaaattcggcgattcttttgtctttgaaggcatgttaagtgagcaggtgaaaaccaacattcagcaggctgtagccgccgcgccttggtggcttccggtgaaaggggcaaactggcggcatcccgagggcccagatagcactattcttcacaggccagaccaccctgtgctacacgtgtcttggaacgatgccgttgcttactgtacttgggccggcaagaggctgcccacagaggccgagtgggagtacagttgtcgcggcggtctccacaacaggctcttcccgtggggtaacaagttacagccaaagggccaacactacgctaatatttggcagggagagtttcccgtgacaaatacaggcgaggacggtttccagggaaccgcgcctgtggatgcctttccgccaaacggatacgggctctataacattgtagggaatgcttgggaatggacgtccgattggtggaccgtgcaccacagtgttgaagagaccttgaaccctaaaggccctccttcaggtaaagacagggtgaaaaagggtggcagctacatgtgtcataggtctcaagaatattatgatccctacttccaggacgtggcttctgagatgctgcgaagacatacagcttctcgatggaaagcatttagcagcctggagccatgctgcagcattcggcgccaccagcaatacgcagccattgaaaggcttacctgtggaaagttcgagctgcgctgcgctagcttgcgtaagattgactgcctgaacaccaacatagcttgcagctactcaatgcgacaagacggtccccgcttgcattgtgtcgactag

SEQ ID NO: 207327 - DNA, 1287 bp, synthetic construct
  misc_feature 1..1287: note = Description of Artificial Sequence: Synthetic coding sequence
  source 1..1287: mol_type = other DNA
atggccgcccccgccctgggcctggtgtgcggccggtgccccgagctcgggttagtgctgctgcttctcctgttgtcgttgctgtgcggcgctgctggcagccaggaagctgggactggcgctggggctggttctctggcaggatcgtgtggatgtggaacgccacagcgaccaggagcacacggtagttccgcggccgcccatcgctactcaagggaggccaatgctcctggccccgtaccaggggagcgtcagctggcacacagcaagatggtgcccattcccgctggcgtctttaccatgggtaccgacgacccgcagatcaagcaggatggggaggccccagctagaagggtcaccatcgatgctttctacatggatgcatacgaagttagtaacacagagttcgagaagttcgtgaactcaaccggataccttaccgaggcggagaaatttggcgacagtttcgtcttcgaagggatgctctctgaacaggtcaagacaaatatccagcaagctgttgctgcagccccatggtggcttcctgtcaagggcgcaaattggagacaccctgagggccccgactccaccatcctgcaccggccggaccacccagttctccatgtgtcctggaacgatgcagtcgcttactgcacgtgggctggtaaacggctcccaacagaggctgagtgggagtactcctgtcgtggagggctacataaccgactctttccctggggcaacaagttgcagcccaaaggccagcactacgcaaacatctggcaaggcgagtttcccgtgacaaatacaggggaagacggctttcagggtacggctcctgtggacgcgttcccacccaacggctacggcttatataacatcgtgggtaacgcctgggagtggacttcagactggtggaccgttcaccactctgtggaagaaacactgaacccaaaggggccaccatctggcaaagatagagtcaagaaggggggcctgagtaaagcccaccagagaattagccaggagtactatgacccttattttcaggacgtggccagcgagatgttaaggcgtcatacggcctcccgctggaaagcattctctagcttagaaccatgctgctcgataagaagacatcagcagtatgcggcaatcgagcggctcacatgtggcaagtttgaattgagatgtgcatccctccggaaaatcgactgcctgaataccaatatcgcgtgttcgtactcgatgcgacaggacggcccaagactgcattgcgtggattag

SEQ ID NO: 207328 - DNA, 1050 bp, synthetic construct
  misc_feature 1..1050: note = Description of Artificial Sequence: Synthetic coding sequence
  source 1..1050: mol_type = other DNA
atggccgcccccgccctgggcctggtgtgcggccggtgccccgagctggggctcgtgcttctgcttctactcctgtcactgctatgtggtgcagctggaagccaagaggccgggaccggggctggggctgggagcctggccggtagttgcggatgtggaactccccagcgccccggcgcacacgggagcagtgccgctgcccatagatactcccgtgaagccaatgcgccaggacctgtgcccggcgaaagacagctggcccattccaagatggtacctatacctgccggagtttttaccatgggaaccgatgacccacaaatcaagcaggatggcgaggcccctgcacgtcgcgtaacgattgatgcattttatatggatgcctacgaggtgtccaacacggaattcgagaagtttgtaaacagtactggatatctgaccgaagtggccgcggcgccctggtggctcccagttaagggggctaactggagacaccctgagggccctgactccactattctccatcggcccgatcatccagttctacacgtctcttggaacgacgcggtggcatattgtacctgggctgggaagaggctccccaccgaagccgagtgggaatattcatgcagagggggcctgcataataggctcttcccctgggggaacaagctgcagcccaagggtcagcactacgccaatatttggcagggcgagttcccagttacaaacaccggagaagacggattccagggtaccgcacctgtggatgcgtttccgccaaacgggtatgggctctataatattgtaggaaacgcatgggagtggactagtgattggtggaccgtccatcacagtgttgaagagacacttaatcccaagggaccgccctccggaaaagatcgggtgaagaaagggggttcatacatgtgccatcggtcttattgctaccgttaccgctgcgccgcccgatcccagaacactccagattcctccgccagtaacctaggatttcgatgtgccgctgacagactgccaactatggattag

SEQ ID NO: 207329 - DNA, 1065 bp, synthetic construct
  misc_feature 1..1065: note = Description of Artificial Sequence: Synthetic coding sequence
  source 1..1065: mol_type = other DNA
atggccgcccccgccctgggcctggtgtgcggccggtgccccgagcttggcctcgtgctgctgttattattgctcagtctgctctgcggagctgcggggtcccaggaggccggcacaggcgcgggcgctggttccctggccggctcatgcggctgcggaacaccccaaagaccaggcgcccatgggagttcagctgccgcccaccgatatagcagagaggctaacgccccagggccagttccaggagaaaggcagctcgctcattctaagatggtcccgatccctgcaggtgtgttcactatgggcactgatgacccacagatcaagcaggatggggaggctcccgctcggcgcgtcaccatcgacgcattttacatggatgcctatgaggtctccaatacagagtttgaaaagtttgtcaactctaccgggtacctgaccgaggctgagaaattcggcgactcatttgtattcgaaggtatgctttccgagcaagtgaaaactaacattcaacaggctgtggcagcggctccgtggtggttgcctgtgaaaggggctaattggcgacatcccgagggacccgacagcactattctgcatagaccggaccaccctgtgctgcatgtgtcctggaacgatgctgtcgcctactgtacctgggctggcaaaaggttgccaaccgaggctgagtgggaatacagttgcaggggggggttgcacaacagactgtttccgtgggggaataagctccagcccaagggacagcattatgctaacatatggcagggggaatttcctgtgacaaatactggcgaagatggctttcagggaactgcaccagtggacgcatttccacctaatggttacggactgtataacatcgttggcaatgcgtgggaatggacgagtgactggtggactgtgcaccactcagtggaagagaccctgaacccgtcctactgctatcgataccgatgcgctgctagaagtcaaaacaccccggacagctctgcttctaatctcggtttccgctgcgctgctgatcgtcttcccacaatggattag

SEQ ID NO: 207330 - DNA, 1638 bp, synthetic construct
  misc_feature 1..1638: note = Description of Artificial Sequence: Synthetic coding sequence
  source 1..1638: mol_type = other DNA
atgctgctgctgcaccgggccgtggtgctgcggctgcagcaggcctgccgactgaaatccatcccctccaggatctgcatccaagcttgcagcacgaacgatagctttcagccccagagacccagcctaacattttcgggcgacaatagctccacacaagggtggcgtgttatgggcacgttgttgggtctgggggcggtcctggcctatcaggatcaccgatgtagggccgcacaggagagtacgcatatctatactaaggaagaagtctccagccacacctcgcctgaaactggcatttgggtgacactgggaagtgaggtatttgacgttaccgagtttgtggaccttcaccccggaggaccgagtaagctgatgttggccgcagggggaccattagagcccttttgggcgttgtacgccgtgcacaatcaaagccacgtgagagagctgctggcccagtataagatcggcgagctcaacccggaagacaaggtcgccccaacagtggaaacatctgacccctacgctgacgatccagtacgacatccagccctgaaggtgaactctcaacggccctttaatgccgagccaccccctgaactgctcactgaaaattacataacaccaaatcctatcttttttacacggaatcacttgccagtgcccaacttggatccggacacatacaggctccacgtcgttggcgcgccgggtggccagagcctcagtttgtcccttgacgatctacacaatttcccccggtatgaaattaccgttactctgcagtgtgccggcaacagacgaagcgagatgacccaagtgaaggaggtgaaggggctggagtggaggacaggggccatcagcactgccaggtgggctggagcgagactgtgcgatgttctggcacaggccggacaccagttatgcgaaacggaggcccatgtctgctttgagggactcgactctgatcccacaggcaccgcatatggggcctccattcccttggcacgggctatggacccagaggctgaggtactgctggcctacgagatgaatggtcagccgctgccccgggatcacgggtttcccgtaagagtcgtggtaccgggtgtagtcggagcacgacatgttaaatggttgggcagggtgtctgtgcaacccgaggagtcctacagccactggcagaggcgagactacaagggattcagtccgtcggtggattgggagactgtcgacttcgactctgcaccttctattcaggagttgccggttcagagcgccattactgaacctcgcgacggtgaaaccgtggagtctggtgaagtaactatcaaaggatatgcctggtcaggcggggggcgtgctgtgataagagtggacgtaagtttggacggcggtttaacttggcaggtggctaaactcgacggggaagagcagagaccgcggaaagcttgggcatggagactgtggcagttgaaagctccggttcccgcgggccaaaaagagctcaacatagtctgcaaggccgtcgacgatggctacaatgtccaacctgacacagtagccccaatttggaatttgcggggggtgctttcaaatgcttggcacagagtccacgtatacgtgtccccctag

SEQ ID NO: 207331 - DNA, 1638 bp, synthetic construct
  misc_feature 1..1638: note = Description of Artificial Sequence: Synthetic coding sequence
  source 1..1638: mol_type = other DNA
atgctgctgctgcaccgggccgtggtgctgcggctgcagcaggcctgtcgactgaaaagcattcctagtagaatctgtattcaggcatgttcaaccaacgacagttttcagccacagagaccatcactgacgttctcgggcgataactcctctacccagggttggcgggttatgggcacactactggggctcggtgcagtcctcgcctaccaggatcacaggtgcagagccgcccaagagagtacccacatatacacgaaggaagaggtctcttctcataccagtcctgaaactggtatctgggtgaccctcgggtccgaggtgtttgatgtcacagagttcgtagaccttcaccctggtggcccatctaagctaatgttagccgcaggggggcccctggaaccgttttgggccctgtacgcagtccacaaccagtcacatgtgcgtgagttgctcgcccagtataaaattggggaactcaatccagaggacaaagtggcaccaacggttgaaaccagcgacccatatgctgatgacccagtgcgtcatccagcccttaaagtgaattcccagcgcccgttcaatgccgagcctccgccggagctgctgaccgaaaactatattactcctaaccccatcttttttacgcgaaatcatctccccgtccctaatctggatccagatacttatagattgcacgtggtcggagcgcccggtggccaatctctgtctctctcattagacgatctgcacaattttcccagatacgagattaccgttacgcttcaatgcgcaggaaatcgccgcagcgaaatgactcaggtcaaggaggtgaagggactagagtggaggacaggagctattagtacagccagatgggcgggggcccggctgtgtgacgtgttggctcaggctggccatcagctttgtgaaaccgaggctcatgtgtgttttgagggtctggattccgatccaacaggcacggcctatggcgcatccatccctctggccagagccatggatcctgaagctgaggtgctgctggcctacgagatgaatggtcagccactgccccgggatcatggatttccagtgcgagtcgtcgtgcccggcgtggtcggcgcacggcacgtaaagtggcttggcagagttagcgtccagccagaagaaagctactcccactggcagcggcgcgactacaaagggttttcccctagcgtggattgggaaactgttgacttcgactcggcaccttccatccaggagctccctgttcaatcagccatcaccgagccccgcgacggcgaaactgtagagagcggcgaggtgaccatcaaggggtatgcctggagcggtggcgggcgagctgttattcgagtcgacgtctctctggacggggggctgacttggcaggtagcaaaacttgatggggaggaacaaaggccccgtaaagcttgggcatggcggctgtggcagctgaaggccccagtgcccgcgggtcagaaagagctgaatatcgtatgcaaggccgtcgatgacggatataatgtgcaaccagacaccgtggctccgatctggaacctgcgcggggtcttgtcgaatgcctggcacagagtgcatgtttatgtgtcaccctag

SEQ ID NO: 207332 - DNA, 1638 bp, synthetic construct
  misc_feature 1..1638: note = Description of Artificial Sequence: Synthetic coding sequence
  source 1..1638: mol_type = other DNA
atgctgctgctgcaccgggccgtggtgctgcggctgcagcaggcctgcaggctgaaatcaatccctagccgcatctgcatccaggcttgctcaacaaacgatagcttccaacctcagcgacctagcctaacattctcaggcgataacagcagcacacaaggctggagggtgatgggtacccttctcgggctgggagccgtcctcgcctatcaagaccacaggtgcagagctgcccaggagagtacgcatatctatacaaaagaggaggtatcctcacacacgtcaccggaaaccggcatctgggttactctgggtagcgaagtgttcgatgtgaccgagtttgttgacctccacccgggtggaccatccaaattgatgctcgctgccggaggccccctggagcccttctgggcgctatacgctgtgcacaatcagtcacatgttcgagaattgctcgcacagtataagatcggcgagctgaaccctgaggacaaagtggcccctacagtggaaacctcagatccttatgctgacgaccctgtgagacacccagccttaaaagtcaattcccaaagacctttcaacgccgaacctccgccggaactactgaccgaaaactatattaccccaaatcctatcttctttacccgcaatcatctcccagtcccgaatctcgatccggacacctatcggcttcacgtcgtgggcgctccaggggggcagtccctgtctctgagcctggacgaccttcacaactttcctaggtacgagataactgtgacgttgcagtgcgccgggaatcgcagatccgagatgacgcaggtgaaggaggtcaagggacttgagtggaggacaggtgcaatctccaccgcgcggtgggctggcgcaaggctgtgtgacgtgttagcccaggcaggccatcaactatgcgaaacggaggcacacgtttgctttgaagggcttgactccgatcctaccggaactgcgtacggggcttccattcctctggcacgcgccatggatccagaagcggaggtactgctggcctatgaaatgaacgggcagcctttgccgcgggaccatggttttcccgtcagggtggtggtcccaggcgtagtcggagccaggcatgtgaagtggcttggacgcgtgagtgttcagccagaagaatcatacagccattggcaacgcagggactacaagggatttagcccaagtgtggactgggaaaccgttgattttgattcagcacctagtattcaagaactccctgtgcagtcagctattacagagcctagggatggagagaccgtggagagcggggaggttacaataaaagggtacgcctggtctggcgggggtcgggctgtcatccgggtcgacgtgagtctggatggtggattaacgtggcaggtggccaaactggacggggaggaacagaggccaaggaaagcatgggcctggagactctggcaacttaaggctcccgtgcctgctgggcaaaaggagcttaatatagtatgcaaggccgtcgatgatgggtataatgtgcagcccgacacagtggcccctatctggaacctgagaggggtgttgagcaatgcatggcatagggtccacgtctacgtgagtccctag

SEQ ID NO: 207333 - DNA, 1638 bp, synthetic construct
  misc_feature 1..1638: note = Description of Artificial Sequence: Synthetic coding sequence
  source 1..1638: mol_type = other DNA
atgctgctgctgcaccgggccgtggtgctgcggctgcagcaggcctgccgactgaaatccatcccatctcgcatctgcattcaagcctgctctacgaatgattcctttcagccccagagacctagcctgaccttctccggggacaattcctcaactcaaggatggagggtaatggggaccctcttgggtttaggcgctgtcttggcctaccaggaccacaggtgtcgcgccgcccaggagagcacgcacatctatacaaaggaagaggtgagtagccatacaagtccagagaccggcatttgggtgacactaggtagtgaagtctttgacgtcacagagtttgtggacttacaccccggcgggccatctaaactgatgttggccgccggcgggcccttggaacctttctgggctctgtatgctgtacacaaccagtctcacgttcgagagctactggcacagtataagataggagagctcaatcccgaagataaggtggcaccaacagttgagaccagcgatccttacgcggatgaccctgtccgccatcctgctcttaaagtgaacagccaaaggccatttaacgccgagcctccccctgaacttctgaccgagaactacattaccccaaacccaatcttctttacgcgcaaccatttgcctgtgcctaatctcgacccagacacttatcggctgcacgttgtgggggcgccaggaggacaaagcttgtcactctcacttgacgatcttcacaatttcccgaggtacgagataacggtgacattgcaatgcgcagggaatcggaggtctgaaatgactcaggtcaaggaggtcaagggtctggagtggcgcacaggggctatcagtacagcccgatgggcaggagccaggctgtgcgacgttttagcccaggcaggccaccagctttgcgaaacagaggcccatgtctgcttcgaagggctggatagcgatcccacggggacagcctatggggcaagtatccccctagctcgcgcgatggaccctgaggctgaagtcttgctggcttatgagatgaacggccagcctctgcctcgtgaccatggcttcccagttcgagtggtggtgcctggagtcgttggtgctaggcacgtcaagtggcttggacgggtcagtgtgcagcctgaggagagctactcccactggcagcgtagggactacaagggtttcagtccgtcagtcgactgggaaacagttgattttgattccgctccatccattcaggaactgccagtgcagtccgctataacagagccgagagatggcgaaacagtggagagcggcgaggtcacaatcaaaggctacgcctggagtggtgggggtagggccgtaattagggtcgacgtctctcttgatgggggtctgacttggcaagtggccaagctggatggtgaggagcagaggcccagaaaagcctgggcatggagactttggcagttaaaggcccctgtgcctgccggccagaaggaacttaacattgtgtgcaaggccgttgacgatggctacaacgtacaacccgacactgtggcccctatatggaatctgaggggggtcttgagtaacgcatggcatcgtgtgcatgtctacgtcagcccctag

SEQ ID NO: 207334 - DNA, 489 bp, synthetic construct
  misc_feature 1..489: note = Description of Artificial Sequence: Synthetic coding sequence
  source 1..489: mol_type = other DNA
atgctgctgctgcaccgggccgtggtgctgcggctgcagcaggcctgcagacttaagtccattccctcccggatttgtatccaagcatgctctactaacgattcatttcagccacagagaccgagcctgactttctctggtgacaatagtagcacccaaggctggcgtgtgatggggaccttactgggcttaggagccgtcttagcctaccaagatcaccggtgtcgtgctgcacaagagtctacacacatttacaccaaggaggaggtgagctctcacacttcccccgagaccggcatatgggttaccctcggcagtgaagtctttgatgtaactgagtttgtcgatctgcacccaggaggcccctctaaacttatgctggctgcaggtggaccattagagccattctgggcactctacgcggttcataaccagagccacgtgagagagctgctggcccagtacaagattggagaactgaatccgtag

SEQ ID NO: 207335 - DNA, 132 bp, synthetic construct
  misc_feature 1..132: note = Description of Artificial Sequence: Synthetic coding sequence
  source 1..132: mol_type = other DNA
atgctgctgctgcaccgggccgtggtgctgcggctgcagcaggcctgtcgactgaagtcaatcccctcccgaatttgtatccaggcttgcagcactaacgatagtttccagccgcaaagacctagtctttag

SEQ ID NO: 207336 - DNA, 1638 bp, synthetic construct
  misc_feature 1..1638: note = Description of Artificial Sequence: Synthetic coding sequence
  source 1..1638: mol_type = other DNA
atgctgctgctgcaccgggccgtggtgctgcggctgcagcaggcctgtcgtctgaagagcatcccttctagaatttgcatacaggcttgtagcacaaacgacagtttccagccccaacggcctagtctgaccttttccggggacaacagttctacccaagggtggcgggttatgggtaccctgcttggcctcggcgctgtactggcttaccaggaccacaggtgccgtgcggcccaagaaagcacacatatctacaccaaggaagaagtttcgtcccatactagtcctgagactggcatatgggttaccctgggctccgaggttttcgatgttactgaattcgtggacctgcatcctggcggtccctccaagctgatgctggccgctgggggtccactggagcctttctgggcactctatgccgttcacaatcagtctcacgtgagggagttactggctcagtacaaaattggggaactgaaccccgaagataaggtagcccccaccgtggaaacatcagacccatatgccgatgatcctgtgcgccaccctgctctgaaggtgaacagtcagaggcctttcaatgccgaaccgccacccgagctgctcacggagaattatataacaccaaatccgatcttctttactaggaaccatttgcccgttcctaatctggaccctgatacctatcgcctgcatgtagtgggcgcacccggaggccagtccctgagtctatctcttgatgacctccacaacttcccaaggtatgaaattaccgtaaccttacagtgcgccggcaatcgaaggtccgaaatgacccaggttaaagaggtgaaggggctcgaatggcggaccggagctatttccactgccaggtgggcaggcgcaagactctgcgacgtcctggctcaagccggacaccagctctgcgagaccgaagcccacgtctgctttgagggcctggactccgatcctaccggaaccgcctacggcgctagcatccccctggctagagcaatggatcccgaggcagaggttttactggcctatgaaatgaacgggcagcccctgcctagggaccatggatttccggtaagggttgtggtccctggcgttgtgggggctaggcacgtgaaatggctcggcagagtatccgtgcaaccggaggagagctatagccattggcagaggagggactacaaaggcttctccccctcagtggattgggagactgttgacttcgatagtgcccctagtatacaggaactgcctgttcagtctgcgatcaccgaaccgcgcgacggtgagaccgtggagagtggagaggtgacaatcaaaggctacgcatggtccggcgggggtcgggccgtgattcgggtagacgtctctctcgatggcggcttgacgtggcaggttgcaaagcttgacggagaggagcagagacctagaaaagcatgggcttggcgcctatggcagttgaaagcccctgttccggcgggccaaaaagagctgaatatcgtctgcaaagctgtggatgatggctacaacgtgcaacccgatactgtggcaccaatctggaatctgagaggcgttctttctaacgcctggcaccgcgtacatgtctatgtctccccctag

SEQ ID NO: 207337 - DNA, 1638 bp, synthetic construct
  misc_feature 1..1638: note = Description of Artificial Sequence: Synthetic coding sequence
  source 1..1638: mol_type = other DNA
atgctgctgctgcaccgggccgtggtgctgcggctgcagcaggcctgccggctgaaaagcattccctcccggatctgtatacaggcttgttccaccaacgactctttccaaccccaacgaccctcactgactttctccggcgacaattcgtcaacacagggctggagagtgatgggtactcttctcggacttggtgccgtgctggcttatcaagaccaccgttgtagggctgcacaagagagcacccatatttacacgaaggaggaggttagtagccacacatcacccgagaccggaatatgggtcaccctgggatctgaagtgtttgacgtcaccgagttcgtagatctgcaccctggtggcccatctaagctcatgctggcagcaggggggccactggaacctttctgggcactgtatgccgtccataatcagtctcacgtgcgagagttgctggcccaatataaaataggagagctcaatccagaggacaaggttgctccaacagtggagacaagcgatccatacgcagatgacccagtgaggcatcccgccctgaaggtcaactcgcagcgtccattcaacgcagaaccacctcctgaattactaaccgaaaattatatcactcccaatcctatcttctttactcgcaaccacctgccggtacctaacctcgatcctgacacctataggctccacgtggtgggcgcccctggcggccagtctctcagcttatcactcgatgatctccataactttcctcgctatgaaattaccgttacgctgcagtgtgccggcaatcgcaggagcgaaatgactcaggtgaaggaagtaaagggtctcgaatggcggactggggcaatttcaacagcccgttgggccggggctcggctgtgtgacgtcctagcacaagcaggccaccaattgtgcgagactgaagcacacgtctgttttgaggggctcgatagcgatccaactggcactgcatatggcgcatctatccccctggcacgggccatggatccggaagccgaggtgctcctagcatacgagatgaacggacagcccctcccccgggaccacgggttccccgtcagagtggtggtccccggagtggtgggcgcgcggcacgtgaagtggttaggaagggtgagcgtccagccagaggaaagttacagtcactggcagagaagggactataagggatttagcccctctgttgactgggagaccgttgacttcgattctgcccctagcatccaggagctccctgtgcagagcgccataaccgagcctagagatggggaaacagtcgagagcggtgaggttaccattaaagggtatgcttggagtggggggggcagagctgtcattagggttgatgtgtcactcgacggcggtcttacttggcaagtcgcgaaactcgacggagaggagcagcggccccggaaggcttgggcatggcgactctggcaactcaaagcccctgtgccagctggacagaaggagctgaatattgtgtgtaaggccgtagatgatgggtacaacgtacagccagacacggtcgcgcccatttggaacctgcggggcgtgctctccaatgcatggcatcgagttcacgtgtatgtctcaccatag

SEQ ID NO: 207338 - DNA, 366 bp, synthetic construct
  misc_feature 1..366: note = Description of Artificial Sequence: Synthetic coding sequence
  source 1..366: mol_type = other DNA
atgctgctgctgcaccgggccgtggtgctgcggctgcagcaggcctgccggctgaaatctatcccctccagaatatgtattcaggcctgcagcaccaacgactcctttcagccacagagaccgtctctgactttttctggtgacaactcatcaacacaaggctggcgtgtcatgggcacgctgctggggctgggagcagtgcttgcctatcaagatcaccgatgtagagctgcacaggaaagtacgcatatctataccaaggaggaagttagttctcatacatcaccagagactggaatctgggtgactctgggctctgaggtgttcgacgtgactgaattcgtggacctacacccaggaggatag

SEQ ID NO: 207339 - DNA, 783 bp, synthetic construct
  misc_feature 1..783: note = Description of Artificial Sequence: Synthetic coding sequence
  source 1..783: mol_type = other DNA
atggccgagagcgaggccgagacccccagcacccccggcgagttcgaatctaagtatttcgagttccatggggtccggctcccgccattttgtcggggaaagatggaggagattgcgaactttcctgtgcggccgtccgacgtgtggatcgtgacttacccgaaatccggcaccagtctgctgcaggaagttgtgtacctggtctctcagggagccgaccccgatgagatagggttgatgaacattgatgagcaactgccggtgctggaatacccccagcccggccttgatattataaaggagctaacaagcccacgccttattaagagtcatctcccctatcgcttccttccttccgacctacataacggcgactcaaaagtcatttacatggctcggaatccaaaggatctagttgtcagttactaccagttccatcggtcactgcggactatgagctaccgggggacatttcaggaattttgtaggcgattcatgaacgacaaactggggtatggctcgtggttcgagcacgtccaggaattctgggagcacaggatggattctaatgtcctgttcttaaagtatgaggacatgcacagggatctggttactatggtggagcagctcgcaaggtttctgggtgtttcttgtgataaggcccagcttgaagcgctcacagagcattgtcatcaattggtagatcaatgctgcaacgccgaggcactgcccgttggacgtgcccattgtgtctttgctcgcaaaatctttctctcttggtag

SEQ ID NO: 207340 - DNA, 855 bp, synthetic construct
  misc_feature 1..855: note = Description of Artificial Sequence: Synthetic coding sequence
  source 1..855: mol_type = other DNA
atggccgagagcgaggccgagacccccagcacccccggcgagttcgaatccaagtatttcgaattccacggcgtacggttgccccctttttgcaggggcaaaatggaggaaatagcaaatttccccgtccggccctcggatgtctggatagtcacctatcctaaatccggcacttctctactacaggaagtagtgtacttggtgtcacagggcgcagatccggacgaaattggcttaatgaatatcgatgaacagttaccagtcctcgagtacccgcagccaggattagatattattaaggaattaacctcccctcgtctcatcaaatctcacctgccatatcggttcctcccctccgacttgcataacggggactctaaggtgatatatatggctcgcaaccctaaagatttggtcgtgagttattatcagttccaccgctccttacgtaccatgtcgtatcgcgggacattccaggagttctgcagacgattcatgaacgataaactcgggtacggctcatggtttgagcatgtgcaagagttctgggagcatcgtatggatagcaacgtcctcttcctgaaatatgaggatatgcaccgagacttagtcacgatggttgagcaactagcacgttttcttggcgtgagctgcgacaaagctcagctagaggccctgaccgagcattgtcaccagttggtggaccaatgctgcaatgccgaggcgttgcccgtaggaagggggagagtagggctgtggaaggatatttttacagtctctatgaatgagaaatttgacttggtgtataagcagaaaatgggaaagtgcgatctgacctttgacttctacttgtag

SEQ ID NO: 207341 - DNA, 516 bp, synthetic construct
  misc_feature 1..516: note = Description of Artificial Sequence: Synthetic coding sequence
  source 1..516: mol_type = other DNA
atggccgagagcgaggccgagacccccagcacccccggcgagttcgaatccaaatactttgagtttcatggagtgaggctgcctccattctgtcgggggaagatggaagagattgctaatttcccagtgagacctagtgatgtgtggattgtgacgtatcccaaatctgtcgggtacgggtcttggttcgagcatgtccaggaattttgggagcaccggatggacagcaacgtgttgttcttgaagtacgaggatatgcatagggacctggtcacaatggtcgaacagttggcccgcttcctgggtgtctcctgtgacaaagcccagttggaagcccttaccgagcactgtcaccaactggtggatcagtgttgcaatgctgaggctttgcccgtgggccggggccgagtgggactgtggaaggacatatttaccgtttccatgaatgaaaaattcgacctggtatataaacaaaagatgggaaaatgcgatctaacattcgacttctacttgtag

SEQ ID NO: 207342 - DNA, 171 bp, synthetic construct
  misc_feature 1..171: note = Description of Artificial Sequence: Synthetic coding sequence
  source 1..171: mol_type = other DNA
atgctggccaagctgctgtgcgaccaggtggtgggcgcccccatcgctgtgtctgcattctacgctgggatgtctattctgcagggaaaggatgatatcttcctggacctgaaacagaaattctggaatacttatatgcaaacccagtcctggctctggcggagcctatag

SEQ ID NO: 207343 - DNA, 888 bp, synthetic construct
  misc_feature 1..888: note = Description of Artificial Sequence: Synthetic coding sequence
  source 1..888: mol_type = other DNA
atggagctgatccaggacaccagccggccccccctggagtacgtgaagggagtcccactgataaaatacttcgctgaggccctgggtccactccagtctttccaggctcggcctgatgatctcttgattagcacatatccaaagtcaggaaccacttgggtatcacaaatcctcgatatgatttaccaggggggggatctcgagaagtgccatagagctccaatctttatgagagtgccattccttgagtttaaggctcccggtatccccagtggaatggaaacactgaaagacactcccgcaccaagattgctcaagacccacctacccctcgctttgttaccgcagactctgcttgaccagaaagtgaaagtggtgtacgtggccagaaacgctaaggatgttgccgtgtcttattatcacttctatcacatggcaaaagtccatcctgagcctggcacttgggacagttttctggaaaagttcatggtgggagaggtgtcctatggtagttggtatcaacacgtgcaagagtggtgggagttgtcacgtactcacccagtgttgtacctgttctacgaagacatgaaagaaaatccaaagcgagagatccagaagatcctcgaatttgtgggaaggtcactgcccgaggagactgtggatttcgtggtccagcacacatctttcaaggagatgaaaaaaaatcccatgaccaactacaccaccgtgccacaagaattcatggaccatagtatcagcccatttatgagaaaaggcatggccggagactggaaaacaaccttcacagtcgctcaaaacgaaaggttcgacgcagattacgctgagaagatggccggctgcagcctgagcttccggtccgagctgtag

SEQ ID NO: 207344 - DNA, 888 bp, synthetic construct
  misc_feature 1..888: note = Description of Artificial Sequence: Synthetic coding sequence
  source 1..888: mol_type = other DNA
atggagctgatccaggacaccagccggccccccctggagtacgtgaaaggggtgcccttaatcaaatatttcgcggaagccctaggccccctacagagctttcaggcgagacctgatgacctgctcattagtacatacccaaagtcaggaaccacttgggtctcccagatcctggatatgatctaccagggtggggatctcgagaaatgtcatcgggcccctatcttcatgagggtgccttttctcgaattcaaagccccagggattccatccggaatggagaccctgaaggataccccagcacctcgcttattgaagacccatttacctttggcccttttgcctcagaccctgcttgatcaaaaggttaaagtagtgtatgtggcccggaatgcaaaggatgtggctgttagttattatcacttctaccacatggctaaggtgcacccggaacctggcacgtgggactctttcctcgaaaaattcatggtgggtgaagttagctatggatcttggtatcagcatgtgcaagaatggtgggagctgtctaggactcatccagtgttatacctgttctatgaggacatgaaagagaaccctaaaagagagatccagaagatcttggagttcgtaggacgtagtctacctgaggaaaccgtggatttcgtcgtgcaacatacttccttcaaagaaatgaaaaaaaaccctatgactaattatacgacagtgccccaggagtttatggatcactctattagtccgtttatgaggaaggggatggctggcgactggaaaactactttcacagtcgcccagaatgaaagattcgacgccgactatgcggagaagatggcaggctgcagcttgtccttcagatctgagctctag

SEQ ID NO: 207345 - DNA, 654 bp, synthetic construct
  misc_feature 1..654: note = Description of Artificial Sequence: Synthetic coding sequence
  source 1..654: mol_type = other DNA
atgctggccaagctgctgtgcgaccaggtggtgggcgcccccatcgccgtctccgcattttacgccggcatgtcaatcttacaagggaaagacgacatcttcttagacctcaaacagaaattctggaacacctatatggtagtctacgtagcccggaatgccaaggatgtcgctgtgagctattaccatttctatcatatggcgaaggtgcatcccgaaccgggcacttgggatagtttccttgagaaattcatggtgggcgaggtatcatatggtagctggtaccagcacgtccaggaatggtgggagctctctagaacgcacccagtgctgtatttgttctatgaggacatgaaggagaacccaaaacgcgaaatacagaaaatcttagagttcgtgggccgctccctcccagaggagacagtggacttcgtcgtgcagcacacctcatttaaggaaatgaagaagaatcccatgactaattacaccacagtaccacaggagttcatggaccattctatcagcccattcatgcggaagggcatggctggcgactggaagacaaccttcacagtggctcagaatgaacggttcgatgctgactatgctgaaaagatggccgggtgctcactttcgttccggtcggagttgtag

SEQ ID NO: 207346 - DNA, 888 bp, synthetic construct
  misc_feature 1..888: note = Description of Artificial Sequence: Synthetic coding sequence
  source 1..888: mol_type = other DNA
atggagctgatccaggacaccagccggccccccctggagtacgtgaagggcgttccactaatcaagtatttcgccgaggctctgggcccccttcagtcttttcaggcacgccctgacgatctgctaatctctacctacccgaagtcaggcacgacatgggtgtctcagatcctggacatgatctaccagggaggagatctggagaaatgccatcgtgctccaattttcatgagagtaccctttctggagttcaaagctcccggcattccctctgggatggagaccctgaaggatacccctgcccctcggctgctaaagacacaccttcccctcgccctcttgccccagactctgctcgaccagaaagtaaaggtggtttacgttgctagaaacgcgaaggacgtcgcggtgtcttactaccacttctaccacatggccaaagtgcacccggagccgggcacttgggacagtttcctggagaagtttatggtcggtgaagtatcatacgggagttggtatcagcatgtgcaagaatggtgggaattgagccgcacccacccagtgctctatttattttatgaggacatgaaggaaaatccaaaacgtgaaatccagaagatacttgagtttgtgggtagatccctccccgaggaaactgtagattttgttgtccagcatacctccttcaaggagatgaagaaaaacccaatgacaaattatacgacagtcccacaagagttcatggaccacagcatttctccttttatgagaaagggcatggcaggcgattggaagacgaccttcacggtcgcgcagaatgaacggtttgatgccgattatgcggagaagatggcagggtgttcactgagctttagatctgagctgtag

SEQ ID NO: 207347 - DNA, 888 bp, synthetic construct
  misc_feature 1..888: note = Description of Artificial Sequence: Synthetic coding sequence
  source 1..888: mol_type = other DNA
atggagctgatccaggacaccagccggccccccctggagtacgtgaagggagttcccctgatcaagtacttcgcagaagctctgggccctctccagtcatttcaggcccgccccgatgacttgctaatttctacttaccctaagtctggcactacatgggtttcccaaatccttgatatgatctaccaagggggcgatctcgagaaatgccaccgggcccctatatttatgagagttcctttcttggagttcaaagcaccagggatcccctctgggatggaaacacttaaggatacccccgctccccgtctacttaaaacccaccttccgttggcccttctccctcaaaccctgcttgaccaaaaggtcaaagtggtttacgtggctcgcaatgccaaggatgtggcagtgtcttactatcatttttatcatatggccaaagtgcaccctgaacccggcacctgggatagctttctggagaagtttatggtaggcgaagtgagctacggaagttggtatcagcatgttcaggagtggtgggagctgtcaaggacccacccggtattatacttattctatgaagatatgaaagagaacccgaagcgagagatacaaaagatccttgaattcgtgggcagatccctgcctgaggagaccgttgactttgtcgtacagcacacttcctttaaagagatgaagaagaacccgatgaccaactacaccactgttccgcaggaattcatggaccattccatcagtcccttcatgaggaagggtatggctggcgattggaagacgacgttcacagtggcccagaatgaacgattcgacgctgattatgcagagaaaatggccggttgctcattaagtttcaggtctgaactatag

SEQ ID NO: 207348 - DNA, 888 bp, synthetic construct
  misc_feature 1..888: note = Description of Artificial Sequence: Synthetic coding sequence
  source 1..888: mol_type = other DNA
atggagctgatccaggacatcagccggccccccctggagtacgtgaaaggcgtgccgttgattaagtacttcgcagaggctcttgggcctctgcaaagcttccaggccaggcctgacgatttgttgatctctacatacccaaaatcgggcacgacctgggtgtctcagatcctggacatgatttaccaaggcggtgacctggagaagtgtcatcgggcgccaatttttatgcgggtgccttttctggagttcaaggtgcccggcatcccctcaggtatggagaccctcaaaaacacgcctgcccctaggctgctgaaaacacacctccctctggcccttctcccccagacactgcttgatcagaaagtaaaagtggtgtatgtggctagaaacgcgaaagacgtcgcggtgtcttactaccatttctaccacatggccaaggtctaccctcatccggggacctgggagtctttcctggagaagttcatggctggtgaggtgtcttatggtagttggtatcagcacgtccaggaatggtgggaacttagtagaacacatcccgtgttgtacctattttacgaggatatgaaggagaatccaaaaagggaaattcaaaagatcctcgaattcgtcggaaggagcctgcctgaggagactgtcgacttaatggtcgaacacacgtcatttaaagaaatgaagaagaatcctatgaccaattataccacggtgcggcgggagttcatggatcactccatttccccatttatgcgcaaaggtatggctggcgactggaagacgacctttacagtcgcccagaacgagaggtttgatgctgactacgctaagaagatggccggatgctcattaagttttagatcagagttatag

SEQ ID NO: 207349 - DNA, 888 bp, synthetic construct
  misc_feature 1..888: note = Description of Artificial Sequence: Synthetic coding sequence
  source 1..888: mol_type = other DNA
atggagctgatccaggacatcagccggccccccctggagtacgtgaagggcgtgccactgatcaagtacttcgcagaagccctagggcctttacagagtttccaggcccgccctgacgaccttctgatctcgacttaccctaagagcggcacaacttgggtctcccagatactcgatatgatatatcagggaggagacctggagaaatgtcaccgcgcccccatctttatgcgggtgcccttcttggaatttaaagttcctggcattcctagcggcatggaaactctgaagaatacgccagcccccagactcctaaagacccaccttccccttgccctacttccacagaccctcttggatcagaaggtgaaggtcgtgtatgtggccaggaacgccaaggacgttgcagttagctactaccatttttaccatatggcaaaggtgtacccccaccccggcacctgggaatctttccttgaaaagtttatggcgggcgaggtgagttacggcagttggtatcaacacgttcaggagtggtgggagctatccagaactcatcctgttttatacttattttatgaagacatgaaggaaaaccccaagcgagagatacagaagatcctagagttcgttgggagatccttgcccgaggaaactgtggacttgatggtggaacatactagcttcaaagaaatgaagaaaaacccaatgaccaactacacaacagtgcgacgcgagtttatggaccattccatctccccttttatgcgcaaaggaatggctggcgactggaagactacctttaccgtcgcccagaatgagaggttcgacgcagactacgctaaaaagatggctggctgctctctgtccttcaggagcgagctgtag

SEQ ID NO: 207350 - DNA, 579 bp, synthetic construct
  misc_feature 1..579: note = Description of Artificial Sequence: Synthetic coding sequence
  source 1..579: mol_type = other DNA
atggagctgatccaggacatcagccggccccccctggagtacgtgaaaggagtaccactcatcaagtattttgcagaggcgctcgggccgctgcagagctttcaggctcgacccgacgatcttctgatctccacatatccaaagagtggaaccacctgggtgtctcagatcctggatatgatttatcagggcggggacctagagaaatgtcaccgcgcccccatttttatgagagtacccttcctcgagtttaaagtgccaggcattccaagtggcatggagaccttgaaaaatactccagctccacggcttctaaagacgcatcttcccttagccctgctcccacaaacgctcttggaccagaaggtgaaggtcgtttatgtggcacgcaacgcgaaagatgtcgccgtatcatactaccacttttaccacatggctaaagtctatccacatcccgggacatgggaatcctttctggagaaatttatggcaggcgaagtgtcgtacggatcctggtatcagcacgtgcaggagtggtgggaattgagtagaactcatccagtcttgtatctgttctag

SEQ ID NO: 207351 - DNA, 891 bp, synthetic construct
  misc_feature 1..891: note = Description of Artificial Sequence: Synthetic coding sequence
  source 1..891: mol_type = other DNA
atggccctgaccagcgacctgggcaagcagatcaagctgaaggaggttgaggggacactgctgcagccagccacagtagacaattggagtcagattcagagtttcgaggctaaaccagacgacttactcatatgcacctatccgaaggcaggcaccacctggatccaggaaattgttgacatgatcgagcaaaacggggacgtcgagaagtgccagcgcgccattatacagcatcgccatccattcatcgagtgggccaggcccccacagccctcgggtgtggaaaaggcaaaggctatgccctccccacgcatcctgaaaacacatctgagtacgcaactgttaccccccagtttctgggagaacaattgcaaattcctctacgtggctcgcaacgccaaagactgcatggtaagttattaccatttccaaagaatgaaccacatgctgcccgatccgggtacctgggaagagtacttcgagaccttcatcaacggaaaggtagtctggggtagctggtttgaccatgtaaaggggtggtgggagatgaaagaccgacaccagatactgtttctgttctacgaagacattaaacgagacccaaaacatgaaatccgtaaggtgatgcagttcatgggaaagaaggtcgacgagaccgtgttggataagattgtgcaggaaacttcctttgaaaagatgaaggagaatcctatgacgaatcgctccaccgtttctaaatccatactagatcagagcattagttctttcatgcggaagggcacagtgggggattggaagaaccacttcaccgtggcccagaatgagcgattcgatgaaatataccggcgcaagatggaaggcacatcgattaatttctgcatggaactgtag

SEQ ID NO: 207352 - DNA, 924 bp, synthetic construct
  misc_feature 1..924: note = Description of Artificial Sequence: Synthetic coding sequence
  source 1..924: mol_type = other DNA
atggccctgaccagcgacctgggcaagcagatcaagctgaaggaggttgaaggcacgctgctgcagcccgcaaccgttgacaattggtcccaaatccagagttttgaagccaagccagacgatcttctaatctgcacttaccccaaggcaggtaccacctggattcaggagattgttgatatgatagaacagaatggcgatgtggagaagtgccagcgcgccatcatacagcatcgccaccccttcatcgagtgggcgaggccaccacagcctagcgaaacaggctttcaccatgtggctcaagccgggctcaagttgctgtcatccagtaacccccctgcttctacctcccaatccgccaaaattacagacttgctgcccccttctttctgggaaaacaactgtaaatttttgtacgtcgctcgaaacgcgaaagattgcatggtctcttactaccacttccaacggatgaatcatatgctgcctgatccaggtacctgggaagagtatttcgagacgttcatcaacggcaaagtcgtgtggggatcttggttcgatcatgtaaagggctggtgggaaatgaaggatcgccatcagatactattcctattctacgaggatataaaacgggatccaaagcacgagatcaggaaggttatgcagttcatgggcaagaaagtcgacgagaccgtactggacaagatcgtgcaggaaacaagtttcgagaaaatgaaagaaaatcctatgaccaaccgaagcactgtcagcaagtctatcttggatcaatcgataagtagtttcatgagaaaggggacagttggggactggaagaatcattttacagtggcacagaatgagcggtttgatgaaatctacaggcgaaagatggaaggcactagcatcaatttctgtatggaactgtag

SEQ ID NO: 207353 - DNA, 933 bp, synthetic construct
  misc_feature 1..933: note = Description of Artificial Sequence: Synthetic coding sequence
  source 1..933: mol_type = other DNA
atggccctgaccagcgacctgggcaagcagatcaagctgaaggaggtggagggtacactactgcaacctgcaactgtggataactggtctcagatccagagtttcgaggctaaaccggatgatctgctgatatgtacatatcccaaggctggcaccacatggatacaggagatagtcgacatgattgagcagaacggcgatgtggagaaatgtcaacgtgccattatccaacaccgacatccattcattgagtgggccagaccgccacaaccctccgtgttagttctgagaaggtgtttcctcctgagctatttcaagggggtggaaaaagctaaggcaatgccttcgcctagaatcctcaagacccacctgtctacccagttgctcccgccgagcttctgggaaaacaactgtaagttcctgtacgtcgcaagaaacgctaaggattgcatggtgtcatattatcacttccaacgtatgaatcacatgctgcctgaccctggcacttgggaggagtatttcgagacatttatcaacggaaaggttgtctggggaagttggtttgatcatgtgaaaggctggtgggagatgaaggaccgccatcaaattttgttcctgttctacgaggatatcaaacgcgacccaaagcatgaaatccgcaaggtgatgcagtttatggggaagaaggttgacgaaactgtgctcgacaaaatcgtgcaggaaaccagtttcgaaaagatgaaggagaacccgatgacaaataggtcaaccgtgtctaagtctatcctggatcagtccatcagttccttcatgcgaaagggaaccgtgggagactggaagaaccacttcacagtagcccagaacgagagatttgacgaaatttacagaaggaagatggagggaacaagtattaatttctgtatggaactgtag

SEQ ID NO: 207354 - DNA, 639 bp, synthetic construct
  misc_feature 1..639: note = Description of Artificial Sequence: Synthetic coding sequence
  source 1..639: mol_type = other DNA
atgggcccccccagcgccagcccccaccgggagtgcatcccctggcaggggttgttgttgacagctagtttacttaatttctggaacccaccgactaccgccaagttaacaatcgaatcgatgcctctatcagttgctgaaggtaaggaagtgctgttgctggtacacaatcttccacaacatctgtttggatactcatggtacaaaggcgaacgcgtagatggcaacagtttaattgtgggatacgtgattggaacccaacaagcaacccccggtgccgcatacagcggccgcgagaccatctacacgaacgccagcctcttgatacagaacgtgacgcagaacgatattggattttacaccttgcaagtgataaaatcagacctggttaatgaggaggcaacgggtcagttccacgtgtaccaagaaaatgcccctggcctgcctgtgggagcggtggccggaattgtgactggtgtgcttgtgggagtggccctggttgctgctctggtgtgctttctgttactcgctaaaacagggcggccctggtctctgccacagctttgtctcctcgacgtccccagcctccactgccccggtccgcccacccagccacaggactcatctttccacctgtag

SEQ ID NO: 207355 - DNA, 1098 bp, synthetic construct
  misc_feature 1..1098: note = Description of Artificial Sequence: Synthetic coding sequence
  source 1..1098: mol_type = other DNA
atggacggccccgccgagccccagatccccggcctgtgggacacctacgaggatgatattagtgaaatctctcagaaattgcccggggagtacttccggtataagggcgtgccatttcctgtggggctttattcgctcgagagtatctccttggccgagaacacccaggacgtgcgagacgatgatatttttattatcacatatccgaaatccgggactacatggatgattgaaataatctgtctgattttgaaagaaggagacccctcttggatcagatcggttcctatatgggagcgtgcgccgtggtgtgagacaatcgttggtgcattcagccttcctgatcagtacagtcccaggctgatgtcatctcatctgcctatccagatttttaccaaggcatttttttcttctaaggccaaggtgatatacatggggagaaatccacgcgacgttgtcgtgagtctatatcattacagcaaaattgcaggccagctgaaggatcctggcacccctgaccagtttctgcgcgactttcttaaaggcgaggtccagttcggatcctggttcgaccacataaagggatggttgcgaatgaagggcaaagataatttcctcttcataacatacgaggagctacaacaggatctgcagggcagtgttgagcgcatatgtggctttctgggccggcccttaggcaaggaggctctcggatccgtggtggcacattctactttcagcgccatgaaagctaataccatgagcaattatactttgctacctccgtcattgctggatcatagacgtggtgcattcctgcgcaaaggagtctgtggggactggaagaaccattttactgtggcgcagagcgaggcttttgaccgggcatacagaaaacagatgaggggcatgcctacctttccctgggacgaagatcccgaggaagacggtagccccgatcccgaacctagccccgaacccgagcccaaacccagcttagagcctaatacctcattggaaagggaaccccgcccaaactcctctccgagtccatccccaggtcaggcttcagaaacccctcatcccagaccctcatag

SEQ ID NO: 207356 - DNA, 1053 bp, synthetic construct
  misc_feature 1..1053: note = Description of Artificial Sequence: Synthetic coding sequence
  source 1..1053: mol_type = other DNA
atggccagccccccccccttccacagccagaagctgcccggcgagtacttcagatataaaggagtcccattccctgtcgggctgtatagcctggagtccatatctcttgcagaaaatacacaagatgtacgggatgacgatatcttcatcattacatatccaaagtcaggcaccacctggatgatcgaaatcatttgcctgattcttaaggagggcgatcctagctggattaggagcgtgccaatttgggaacgagctccctggtgcgagaccatagtaggggccttttcactgccagatcaatatagtccccggctcatgagctcccacttgccaattcagatctttacaaaggccttcttctcttccaaggcgaaggtaatctacatgggacgcaatccgcgagacgtcgtggtcagcctctaccactactcgaaaatcgccgggcaactcaaggatcccggaacccctgaccagtttcttcgggattttctgaagggagaggtgcagttcggctcttggtttgaccacataaaaggttggctgcgcatgaaggggaaggacaactttctgttcatcacttatgaagaattgcaacaagatctgcagggctctgtggaacggatctgcggttttttgggacggcccttaggcaaggaggccttgggatccgtcgtggcacactccaccttttccgccatgaaggccaatacaatgtccaactatacactgttgcccccttcactgttagatcatcggcgcggagcattcctgagaaaaggtgtttgcggggactggaagaaccatttcactgtggcccaaagcgaggcctttgatagggcttacagaaaacagatgcgtggcatgcccactttcccctgggacgaggatccggaggaagacggctctcccgaccctgaacctagcccggaaccagaacccaaacccagtctggaaccaaatacatcactagagcgagaacctcgcccaaactcaagcccctcgccatctcctggccaggcgtctgagactccccatccaagaccatcctag

SEQ ID NO: 207357 - DNA, 1041 bp, synthetic construct
  misc_feature 1..1041: note = Description of Artificial Sequence: Synthetic coding sequence
  source 1..1041: mol_type = other DNA
atggtggagaaggaggaggccggcggcggcatcagcgaggaggaggccgctcagtatgaccgacagatccgcttgtggggactggaagctcagaaacgactgcgagcctcaagagtgctgctcgtgggcctcaaaggcctgggagcggaaattgctaagaacctgatcctggctggcgttaagggccttaccatgctggaccacgaacaagtcaccccggaagacccaggcgcccagtttttgatccggactggcagcgtgggtcggaatcgggctgaagcctctcttgagcgggcacagaacctcaaccccatggttgacgtcaaggtggatactgaggatatcgaaaagaaacccgagtccttcttcacccagttcgacgccgtgtgcctgacctgttgcagtagggatgtgatagttaaggtcgaccagatttgccacaagaatagtatcaaattcttcacaggtgatgtgttcggataccacggctacacttttgccaacttgggcgaacacgagtttgtggaggaaaagacaaaggtggcaaaagtctcccagggcgtggaagacgggcctgacactaagcgcgccaaactcgattcctccgagaccacaatggtgaagaagaaggtcgtcttctgccccgttaaggaagcccttgaggtggactggtcttcagagaaggccaaggcagctctaaagcgaaccactagcgattatttcctcctacaggtgctgctcaaattcagaactgacaagggcagagatccaagctcggatacttatgaggaggatagcgagttgctcttacagatccgcaatgatgtactggattcgttaggaattagcccagacctcttaccagaggattttgtacgctattgttttagcgagatggcccctgtgtgcgctgttgtgggcggaatccttgcccaggagatagtaaaagcattgtctcagcgcgacccaccgcataataatttcttttttttcgatgggatgaagggcaatggtatcgtcgagtgtcttgggccaaagtag

SEQ ID NO: 207358 - DNA, 801 bp, synthetic construct
  misc_feature 1..801: note = Description of Artificial Sequence: Synthetic coding sequence
  source 1..801: mol_type = other DNA
atggtggagaaggaggaggccggcggcggcatcagcgaggaggaggctgcccagtatgacaggcagattcgcctttgggggctggaggcacagaaacggctgcgcgcttcccgagtcctgctcgtgggactcaagggtctgggagcggagatagctaagaatttgatcctcgctggcgtgaaagggctgactatgctggatcacgaacaagtaacacctgaggaccctggagctcagttcctgatacgaacaggctcagttgggcgcaatcgtgcggaggctagtctagaaagagctcagaatctgaaccccatggtcgacgtgaaggtggatacggaggacatcgaaaagaagccagagagcttttttacgcaattcgatgccgtctgtctgacatgttgctccagagacgtgatcgtgaaggtggatcaaatctgccacaagaacagtatcaagtttttcacaggcgatgtgtttggctaccacgggtacacatttgccaacctcggcgaacatgagtttgtcgaagagaagacgaaggttgccaaagtgtcccagggtgttgaagacggtccggacacaaagagagctaagctggactcatccgaaacgacgatggtcaaaaagaaggtggtcttctgtcccgtgaaggaggcactggaagtcgattggtcaagcgagaaggccaaggctgccctgaagcgcacaaccagcgactactttctgttgcaaggcactgcatcccctaggtggccccagtgtgtgcgatggctggaaggcttttggcatcggaaactttag

SEQ ID NO: 207359 - DNA, 900 bp, synthetic construct
  misc_feature 1..900: note = Description of Artificial Sequence: Synthetic coding sequence
  source 1..900: mol_type = other DNA
atggtggagaaggaggaggccggcggcggcatcagcgaggaggaggcagcccagtacgacagacagatccggctgtggggcctggaagcccagaagaggcttagagcctcgcgtgtcttgctggtcgggctcaaaggactcggagccgagatagcgaagaacttgattctggctggtgtcaagggattaaccatgttggatcatgagcaggtgactccagaggacccaggggcccaattccttatcaggacaggctccgttggcagaaacagagcagaggcctctcttgagagagcacagaatctgaacccaatggtcgatgtgaaggtggatactgaagatatcgagaagaagccagaaagcttcttcactcagtttgacgccgtgtgcctgacctgctgcagtcgggatgtgatagttaaagttgaccagatatgtcataaaaactcaatcaaattttttaccggagatgtcttcggctaccatggatatacgttcgctaacctgggggaacatgaattcgtggaggagaagactaaagtcgcaaaagtgtcccagggcgtagaagatgggccagacaccaaaagggccaaactggacagcagcgagactaccatggtgaagaagaaggtcgtcttttgccccgtaaaggaggctctggaggtcgactggtcctcagaaaaagcgaaagccgctctcaagagaacaaccagcgattacttcctgcttcagggtccggttagtgctggcccgtcttcccaacaactcttgctgctccgttggcacgagggtgagtgggactgtggtgtgccgtggccccaggttaactctagattcggatccccaagggacgcaaactgctcaatgcccacctgtattccttgccccttacccagctag

SEQ ID NO: 207360 - DNA, 900 bp, synthetic construct
  misc_feature 1..900: note = Description of Artificial Sequence: Synthetic coding sequence
  source 1..900: mol_type = other DNA
atggtggagaaggaggaggccggcggcggcatcagcgaggaggaggcagcccagtacgataggcaaattaggctctggggcttggaggcccaaaaacggcttcgcgccagtagggtactgctcgttggtttgaaggggctaggggccgaaattgcaaagaacctgatactcgcgggagtaaaaggattgactatgttggaccatgaacaggtgacaccagaagaccccggggcccagtttctgatacggaccggttctgtcgggcgcaaccgggcagaggcttcactagagcgagctcagaatcttaaccccatggtggatgtgaaggtggacaccgaggacatagagaagaagccagaatccttctttactcagttcgacgccgtatgcttaacttgttgctccagggacgtgattgtaaaagtggaccagatatgtcataagaactcaataaaattcttcaccggggacgtgttcggataccacgggtacacattcgctaacttaggcgagcacgagttcgtggaagaaaagaccaaagttgccaaggtcagccagggggtggaggatggcccggacaccaagcgggctaagctagactcctctgaaaccactatggtgaaaaagaaggtagtcttctgcccggtcaaggaagccttggaggtcgactggtcctccgagaaggccaaggccgccctcaaaaggaccacgagtgactattttctcctgcaggagctctttccccggattgtcgagagagtgtacgcccagcggcatcctcggagcacagaacgtacacacgcgaaaatgctaatcccattcctaactaaggaaaagcctgggttcctgggcgaaatggccgtgtcacggagcggcgtcggcaaactgcagtgctcatag

SEQ ID NO: 207361 - DNA, 519 bp, synthetic construct
  misc_feature 1..519: note = Description of Artificial Sequence: Synthetic coding sequence
  source 1..519: mol_type = other DNA
atgctggagaagaccaaggtggccaaggtgagccagggcgtggaggatggtccggatacaaagcgcgctaaactggacagcagcgagacaactatggtgaaaaagaaagtggtcttctgtccagttaaggaagcattggaagttgactggtcgtctgagaaggccaaagccgcactaaaacgcactaccagtgattatttcctactccaggtgctcctgaagttcaggaccgacaagggaagagacccttcctccgacacttatgaggaggattccgagctcctcttgcagatccgtaatgacgtgctcgattcactaggcatttcacctgacctgctgcccgaggatttcgtgaggtactgcttctctgagatggctccagtctgcgcggttgtgggaggcatccttgcccaggagatagttaaggcactcagccagagggatccaccccacaataatttctttttcttcgatggaatgaagggcaatggtatcgtggaatgcctgggacctaaatag

SEQ ID NO: 207362 - DNA, 1935 bp, synthetic construct
  misc_feature 1..1935: note = Description of Artificial Sequence: Synthetic coding sequence
  source 1..1935: mol_type = other DNA
atggacgacatcgccgaccggatgcggatggacgccggcgaggtgacactggtgaatcacaacagtgtgtttaagacccacttactgcctcagacagggttcccggaggaccagctatccctcagcgaccagcagatcctgtcctccagacaagggcatttggatcgttccttcacatgttccacccgatccgccgcctacaaccccagttactactctgacaacccatcttctgatagctttctgggttcaggcgatctgaggacttttgggcagtctgctaatgggcagtggcgcaacagcacaccttctagttcatcatctctgcagaaatctcgtaacagtcgaagcctttacctagaaacaagaaagacgtctagtggcctgtcaaattccttcgccggaaaatccaaccaccattgccacgtgtctgcctacgagaagtctttcccgattaagcccgtgccttctccttcttggtcaggctcatgccgacggagcctgctcagtcccaagaaaactcagcgccggcacgtatccactgccgaagagaccgtacaggaggaagaaagagagatatatcggcagctcctgcaaatggttaccggcaagcagttcacgattgccaagcctaccacccattttcccttgcacctgtcacgttgtctgagctctagcaaaaacacactgaaggactctctgttcaagaatgggaattcgtgcgcaagccagattattgggtctgacacgtcaagtagcggctctgcctccattctgactaaccaagagcagctgagccactccgtctacagcctcagctcttacacacctgatgtcgcatttggaagtaaggactctgggacactgcatcacccccaccaccaccattcagttccccatcagccagacaacttagctgcaagcaatactcaatccgagggttctgatagcgtcatcctcctgaaggtgaaggattctcagaccccaacgcccagctctaccttttttcaagccgaactctggatcaaggaactcacatctgtctacgatagtcgcgcaagggaacgcctcaggcagatcgaagagcaaaaggccctggccctccagctacaaaatcagagactacaggaaagagaacactccgtccacgatagcgtggaactgcatttacgggttccattggagaaggaaattcctgtgacagtggtgcaggaaacgcagaaaaagggacacaaactcaccgactccgaggatgaattcccagaaatcacggaggaaatggagaaagaaatcaaaaacgtgtttcggaatggcaatcaagatgaggtgctctcggaggcctttaggcttaccattactcgaaaagacatccagacactgaatcatctgaattggctgaacgacgaaattatcaacttttacatgaacatgctcatggagcggagtaaggaaaaggggctccccagcgttcacgctttcaatacttttttctttaccaagctcaaaacggcgggttatcaggccgttaagcgctggacaaagaaagttgatgtgttttcagtggatattctcctggtacctatccatctcggcgtgcattggtgccttgctgttgtggatttccgcaaaaaaaacatcacatattatgattcaatgggcggcatcaataatgaggcatgtcgaatcctcctgcagtacctgaaacaggaaagtattgataagaagagaaaggaattcgacaccaatgggtggcagctctttagtaagaagtctcaggagatcccccaacagatgaatggctccgattgcgggatgttcgcctgtaagtatgctgactgtattactaaggacaggcccatcaatttcacacaacaacatatgccatacttcagaaagaggatggtgtgggaaatcttacatcgtaagctcctctag

SEQ ID NO: 207363 - DNA, 489 bp, synthetic construct
  misc_feature 1..489: note = Description of Artificial Sequence: Synthetic coding sequence
  source 1..489: mol_type = other DNA
atgaagatccccctgaccgccaccatctgcctgcccggcagcagccctcctggcctctgtatttttgccaaagtctccgatgttaaacgtctggagatggacgatatagccgatcggatgagaatggacgcaggggaggttacactggtgaaccataatagtgtgtttaagacgcacctgctgccgcagaccggatttcctgaggaccagctttctctttcagatcagcagattttgagcagccgccaagggcacctggacaggagctttacgtgttcaacaaggtctgccgcgtataacccatcctattactcgggtcctgggctgggcgtgctggctcgatatagctgggggaaaatgttgacctttggaggccatcacggcgtgaccctcatgcagatccgacatatggcagtagcaggcttctcgtcgtttatcaacttccaaataatactgccccagacagtcttcttggcccaggccatctag

SEQ ID NO: 207364 - DNA, 1932 bp, synthetic construct
  misc_feature 1..1932: note = Description of Artificial Sequence: Synthetic coding sequence
  source 1..1932: mol_type = other DNA
atggacgacatcgccgaccggatgcggatggacgccggcgaggtgacactcgtgaaccacaattcagtgtttaagacacatctgttaccccaaacaggctttcctgaagaccagttgtccctgtccgatcagcagattctgtcctcgagacaaggacatcttgaccgatccttcacttgtagcacccggagtgcggcatacaaccctagttactacagtgataacccctcttcagatagcttcctaggcagtggtgaccttagaaccttcgggcagagcgctaacggccagtggcgaaattccacaccctccagctcttcttcactgcagaagtctcgtaactccagaagtctctacctagaaacccggaagacttcctctggcctctccaacagtttcgcaggtaaatcaaaccaccattgccacgtgtcagcctatgagaaatctttcccgattaagccggtaccctcgccgtcttggtcgggttcatgcagaaggtcccttctgtctcctaagaaaacacagcgccggcatgtctccaccgccgaggaaacagtgcaggaggaggagcgcgagatctaccgccaactgctgcagatggtgacaggcaagcaatttaccattgccaaacccaccactcacttccctctgcacctgtcccgctgcctatccagtagtaaaaacaccttaaaagattccctattcaagaacggaaactcttgtgcctcccagatcattgggagtgacacctccagcagcggcagcgcttctatcctgacaaatcaggaacaactcagtcattctgtctatagcttatcctcttacacgccagacgtagccttcgggtccaaggactcaggtacattacaccatccacatcatcatcacagcgttccgcaccagcctgataacttagcagcatccaatacacagagcgagggatctgacagcgtgatcctcttgaaggtgaaggacagtcagacccccaccccaagtagcacattctttcaggctgaactgtggatcaaggagttaacaagtgtgtacgactctagagcccgtgaacggctacggcagatagaggaacagaaagcgctggccttgcaactccagaaccagagactccaggaacgggagcatagtgtgcacgactcagtcgagctgcatctgcgagtgcccctggagaaggagattccagtgacagtggtgcaggaaactcaaaaaaaaggccataagctgacggatagcgaggacgagttccccgaaataacagaggagatggaaaaggagattaagaatgtgtttagaaacggcaaccaggacgaagtgctcagcgaagcattcaggctgaccattacccgaaaggacattcagacactgaaccatttgaactggctgaacgacgagattataaatttttacatgaacatgctcatggagcgctctaaagagaagggcctgccctccgtccatgcttttaatacttttttctttaccaagctgaaaacagccggttatcaggcagtcaaaaggtggacaaagaaagtagacgttttttctgttgacattctcctcgtacctatccacctcggtgtccactggtgcttagccgtcgtggattttcggaagaagaatataacctattacgacagtatggggggaattaacaatgaggcgtgtcgtatactgctccagtacctgaaacaggagtcaatcgataaaaagagaaaggagtttgatacgaacggctggcagcttttttcaaaaaagtcacagattccacaacagatgaatggctccgattgcgggatgtttgcctgtaaatacgctgactgtattacgaaggaccggccaattaactttactcaacagcatatgccttatttccgcaaacgaatggtgtgggagattctgcatagaaaattactttag

SEQ ID NO: 207365 - DNA, 1935 bp, synthetic construct
  misc_feature 1..1935: note = Description of Artificial Sequence: Synthetic coding sequence
  source 1..1935: mol_type = other DNA
atggacgacatcgccgaccggatgcggatggacgccggcgaggtgacactggtgaaccataatagcgtattcaagactcatttattgcctcagacaggctttcctgaagatcagctgtccttatccgaccagcagatcctctcaagccgccaggggcatctggaccgatccttcacatgtagtacgaggagcgcggcctacaatccatcctattacagcgacaacccctcctcagatagtttcttagggagcggcgatctacgaacattcgggcaaagcgctaatggccagtggcggaacagcactcccagctcatcaagctcactgcagaaatcccgtaattcccgttccctgtatctggagacacgcaaaacctccagtggcctgtctaactcgttcgccgggaagtccaaccatcactgtcatgtgtcagcttacgagaagagcttcccgatcaaaccagtaccttcacccagttggtccgggtcatgcagacgctcacttctttcccctaagaagacacaacgtcggcatgtcagcacagccgaggagactgtgcaggaagaggagagagaaatttaccggcagctgctgcagatggtgacaggtaagcagttcaccatagctaagccaaccactcactttccactgcatctctcacggtgtctctcctcctccaagaacactctgaaggactccttattcaagaatggaaactcctgtgcttcacagattatcggcagcgacacaagcagtagcgggtcagcctccattctaaccaatcaggaacaactgtcccattctgtgtattctctgtcaagctacacgccagatgtcgcctttgggagtaaggatagcggaaccttacaccacccgcaccaccatcactcggttccccaccagccagacaatctggccgcttcaaatacacagtctgagggtagtgactctgtgatcctgctaaaagttaaggacagccagacaccaaccccgtccagtactttctttcaagccgagctttggatcaaagaactgacttccgtgtacgactccagagcccgggagcggttgagacaaatcgaggaacagaaagccctggcgttgcaactgcagaaccagcggttgcaggaacgcgagcattcagtgcatgactccgttgaactccacctgagggtccccctggagaaggaaatccccgtcacagtggtgcaggaaacgcaaaaaaagggccacaagcttactgattctgaggacgagttccctgagatcactgaggagatggagaaagagattaagaacgtgttccggaatggaaatcaggacgaggtgttaagtgaagccttcagactcacaatcacacgcaaggacattcagacgttgaaccaccttaattggttaaacgacgagatcatcaatttttatatgaatatgctcatggaacggtcgaaagagaaaggactgccctcagtccacgcatttaatacctttttcttcacaaaacttaaaaccgctgggtatcaggccgttaagagatggaccaaaaaagtcgacgtcttcagcgtggacatactcttggttcccatacatttaggtgtgcactggtgtctggcggtagtggacttccgcaagaagaatatcacatactacgactctatgggcggaatcaacaacgaggcttgtcggatcctactccaatatctcaaacaggaatccatcgataagaaacggaaggagttcgataccaacggctggcaactgttcagcaagaagagccaagaaattccgcaacagatgaacggaagtgactgcggcatgttcgcgtgtaagtacgcagactgtatcaccaaagacagacctatcaatttcactcagcagcacatgccatactttcgaaagcggatggtgtgggagatactccatcgaaagttattgtag

SEQ ID NO: 207366 - DNA, 1932 bp, synthetic construct
  misc_feature 1..1932: note = Description of Artificial Sequence: Synthetic coding sequence
  source 1..1932: mol_type = other DNA
atggacgacatcgccgaccggatgcggatggacgccggcgaggtgaccttggtgaaccataacagcgttttcaaaacacatttgctcccacagaccggttttcctgaggaccagctgtcactgtccgaccagcagattcttagctcccggcagggtcacctcgaccggagttttacttgttccactaggagcgccgcctacaatcctagttactatagtgacaaccctagctctgactctttcttggggagtggagatctgagaacatttggacaaagtgcaaatggtcagtggcgcaatagtactccatcatcttcttcctccctccagaagagcaggaactcccggtcgttatacctggaaacgcgcaaaacaagctctggacttagtaactcttttgccggtaagagcaatcatcactgtcacgtaagcgcttacgaaaagtcttttcccatcaagcccgttccctctccctcctggtcgggcagttgtaggcgttcacttctctctcctaaaaaaacgcagcgccgacacgtctcaaccgcggaagaaacagttcaggaagaggaacgggagatctatagacaattacttcagatggtcaccgggaagcagtttactattgccaaaccaactactcacttcccactccacctgagccgctgcctatccagttctaagaataccctgaaagattcactgtttaagaacggtaattcatgtgctagccagattatcggctctgacaccagctcctctgggtcagcttctatcctgacaaatcaggaacagctctcccactctgtgtattcccttagtagttatactcccgacgtcgcttttggatccaaagactcaggaactctgcaccacccacaccaccatcacagcgtgccccaccagccagacaacctggccgcctctaacacccagtctgagggcagcgattccgtaattctccttaaggtaaaggatagtcaaacacctacaccctcctcgacatttttccaggccgaactgtggattaaggagctgacttctgtgtatgatagtcgcgcgagggagcggctcagacaaatcgaagaacaaaaggccctggctctgcagctgcagaatcagcggttgcaggaacgagagcattctgtgcatgacagcgtcgagttacacctgcgcgtcccattggaaaaagaaattccagtgactgtggttcaagagacacaaaagaagggccacaagctgacagactccgaggacgagtttcctgaaatcaccgaggagatggagaaagaaattaagaacgtgtttcgcaatggaaatcaagatgaggttctctcggaagccttccggctgacaatcacccgaaaggacatccagacactgaatcatctgaattggctgaatgatgagatcatcaacttttacatgaacatgctaatggagagatccaaggagaaggggcttccgtctgtccatgcattcaatacctttttcttcactaagctaaagacagcagggtaccaggcagttaagagatggactaagaaagtggacgtgttcagcgtcgatattctgctggttcccatccacctcggagtccactggtgcctcgcagtggtggacttccgaaaaaagaatattacttattatgattcgatgggcggcattaataacgaggcatgcaggatcctcctccagtacctgaagcaggaatccatagataagaagcgaaaggaatttgatactaatgggtggcagcttttctccaagaagagccaaattccgcagcagatgaatgggagcgattgtggaatgtttgcctgtaagtatgcagattgtattacgaaggatagacccataaactttacacaacagcacatgccatactttcgaaaacgaatggtttgggaaatactccatcggaaattattgtag

SEQ ID NO: 207367 - DNA, 1935 bp, synthetic construct
  misc_feature 1..1935: note = Description of Artificial Sequence: Synthetic coding sequence
  source 1..1935: mol_type = other DNA
atggacgacatcgccgaccggatgcggatggacgccggcgaggtgaccctggtgaatcacaatagtgtctttaagacccacttgctcccacagaccggatttccagaggaccagctctcattatcagaccaacagatactgagtagtcgccagggacacttggacaggagttttacttgctcgacaaggagcgccgcctacaacccatcctattattcagacaatccctcaagtgactcgttcctagggtccggggatttacgaaccttcggacagtctgccaatggacaatggcgcaattctaccccatccagctccagttctctgcagaaaagccggaactcccgaagcctgtatcttgaaacccgcaaaacttcttctggtctgtccaactctttcgcaggtaagagcaaccatcattgccatgtctcggcctacgaaaaaagctttccaatcaagcctgtcccatctccatcctggtccggctcctgtaggaggagtctcctgtcccccaagaaaacccagcgcagacacgtctccaccgctgaagaaactgtccaggaagaagaacgtgagatctacaggcagcttctgcaaatggtaactggaaagcagttcacaattgcaaagccaaccactcacttcccgctgcacttatcaaggtgtctgagctcttccaaaaacactctgaaagattcccttttcaaaaacggaaactcttgcgcctcccagattataggtagcgataccagctcctctggaagcgcctcgatccttacaaatcaggagcagttatcccacagcgtgtatagcctttcaagttatacaccagatgtggctttcggatccaaggatagtggaacactgcatcatccacatcaccatcatagtgtcccacatcaacccgataacttggccgctagcaatacccagtcggagggcagcgactccgtcatcctactgaaagtgaaggactcccagacaccgacaccaagctccacatttttccaagccgagttatggatcaaagagctgacctctgtatacgacagccgcgctcgagaacgcctgcggcagattgaggagcaaaaagctctcgcgctccaactgcaaaaccagcgcctgcaggagcgggaacactccgtgcatgacagcgtcgagctgcatctccgtgtgccactcgagaaggagatcccagtaacggttgtccaagaaacccaaaaaaaaggacacaagctgactgatagcgaagatgaatttcctgagattacagaggagatggaaaaagaaatcaaaaacgtgttccgaaatggaaaccaggatgaagttctctccgaggcgttccggttaaccatcacacggaaggatattcagacgctgaaccatttaaattggcttaatgatgaaataattaacttttacatgaacatgctcatggagagatctaaggaaaaaggcctcccttctgtgcacgctttcaatacatttttttttacaaagctgaaaaccgcaggctatcaggcggtcaagcgctggacgaagaaggtggacgtgttttctgtggatattctgctagtgccgatacacctcggagttcactggtgtcttgctgtggtggattttcgtaagaaaaacatcacctactacgacagcatgggggggataaacaacgaggcctgcagaattctactccagtatttgaagcaagaaagcatcgataagaaacggaaagagtttgacaccaatggatggcagttgttcagcaaaaagtctcaggagattccacaacagatgaacgggtcagactgcggaatgtttgcctgcaagtatgcggactgtattacaaaggatcggccaatcaacttcactcaacagcacatgccctatttcagaaaacgcatggtgtgggagattctacacagaaagttgctatag

SEQ ID NO: 207368 - DNA, 2268 bp, synthetic construct
  misc_feature 1..2268: note = Description of Artificial Sequence: Synthetic coding sequence
  source 1..2268: mol_type = other DNA
atgaagaagcagcggaagatcctgtggcggaagggcatccacctggcattctctgaaaagtggaacacaggcttcgggggatttaaaaaattttactttcaccagcacctttgtatcttgaaggcaaaattaggccgaccagtcacctggaacaggcagttgaggcacttccagggcagaaagaaagcattgcaaattcaaaaaacatggatcaaggatgagcctttgtgtgctaagaccaaattcaatgtggcgacacaaaatgtcagcactctatctagcaaggtgaagaggaaggatgcaaagcatttcataagttcatcaaaaacattactgaggttgcaggccgaaaagctcctgagcagcgcgaaaaattccgatcatgagtactgtcgagagaagaacctcttaaaggcagtaactgactttccctcaaattctgccttggggcaggctaatggccaccgacctcgcactgaccctcagccctctgatttccccatgaagtttaacggggaatcccaaagtcccggagagagtggcaccatcgtggtgactcttaataaccacaaacgcaaggggttttgttatggctgttgccaggggcctgagcaccacagaaatggtgggcccttgattcccaagaagttccagctgaatcagcaccgccgaataaaactctccccacttatgatgtatgagaaattgtccatgatccggttccgttataggatcctgcggtcacaacactttcggacgaagagcaaagtttgtaagttgagaaaggcacaacggtcttgggtccagaaggtcactggggaccaccaagaaacccggcgcgaaaacggcgagggggggtcttgtagtccattcccctcccccgaaccaaaagatccatcctgtcgtcaccagccatacttcccggatatggactctagcgccgtggtgaagggcacgaatagtcacgtgcctgattgccacacaaaaggctctagttttcttggcaaggaactcagcctcgatgaggcgtttcctgatcagcaaaacggcagtgccactaatgcttgggaccagagtagctgcagctcacccaaatgggagtgcaccgagctcattcacgatatccctttaccggaacacagatctaataccatgttcataagtgagacagaaagggagattatgacacttggccaggagaatcaaacctcctctgtctcagatgatcgagtgaagctgtccgtgagtggcgcagacacctccgtatcctctgttgacggccctgtaagtcagaaagccgtccaaaatgagaattcttatcagatggaagaagatggtagccttaaacagtcaattctgagctccgaactgctggatcacccttactgcaaatcaccactggaggctccccttgtctgctccggactaaaattggagaaccaagtgggtggtgggaaaaacagccagaaagcttcacccgtggatgatgagcagttatctgtgtgtttaagcggctttctggacgaggtgatgaagaagtatggatccctggtgcccctctccgagaaagaggtgctggggcgcctgaaggacgttttcaatgaggatttttcaaacaggaaaccattcattaacagagaaatcaccaactacagggccaggcaccagaagtgtaattttcggatcttctacaacaagcacatgctggacatggacgatctggcgactctggacggacaaaattggctgaatgaccaggtgatcaatatgtacggcgaactgataatggacgctgtgccagacaaagtccacttttttaatagctttttccataggcagcttgtgactaaaggctataatggtgtcaagcgctggacaaaaaaagttgacttatttaagaagtccttgttgctcataccaatccaccttgaagtgcactggagcctcataactgtgaccctgagcaatagaatcatttccttttacgattcacagggcatacacttcaaattctgcgtggagaatattcgcaaatatcttctgacagaggcccgggagaaaaatcgccccgagtttcttcaaggatggcagacagctgtgacaaagtgtattccacaacagaagaacgattccgattgcggtgtgtttgttctacagtactgtaagtgtctcgccctggaacaaccctttcagttctcccaggaagacatgccaagagtccgtaaaagaatctataaggaactttgcgaatgccgcttgatggactag

SEQ ID NO: 207369 - DNA, 3318 bp, synthetic construct
  misc_feature 1..3318: note = Description of Artificial Sequence: Synthetic coding sequence
  source 1..3318: mol_type = other DNA
atggccgccggcaagagcggcggcagcgccggcgagatcaccttcctggaggccctggctcggtccgagagcaagcgagacggcggcttcaagaataattggagttttgatcatgaggaagaatcagagggcgacactgacaaggacgggactaacctgttgagcgtggatgaagacgaagattctgaaacctccaaaggtaagaagttgaacaggcgttccgaaatagttgcgaatagcagtggtgagttcatccttaagacctacgtgaggagaaataagtccgaatctttcaagacgttaaagggaaaccctataggccttaatatgctttctaacaataagaaattgagcgagaatacacagaatacatctctgtgctcagggaccgtagtgcatggcaggagatttcaccacgcccatgcccagatcccggtggtgaagacggccgcacaacgcaaggagtatccgccacatgtccagaaggtcgagattaacccagtgcggctgtcacgtctacagggggtggaacgcattatgaagaaaacggaggaatcagagagtcaggtggagccggagatcaaaagaaaagttcagcagaaaagacactgcagcacataccagcccacacctcccctcagcccagcgagtaagaagtgccttacacatctggaggacttgcagagaaactgcaggcaggctattacattgaatgagagtacaggtccgctgctgcgaacaagtattcatcagaactctggagggcagaagtcccaaaacactggactgacgacgaagaaattctatgggaataacgtggaaaaggtccccatcgacattatagtcaactgcgacgatagcaagcatacatacctacagactaacgggaaagtgatcttaccgggagccaagatccccaaaattaccaatttaaaagaacgaaaaaccagcctctccgacctaaacgatccaattatcctttcctccgacgacgatgatgacaacgacaggactaatagacgggaatccataagccctcaacctgccgattctgcgtgcagctcccctgcaccaagcacaggcaaagttgaggctgccctgaacgaaaacacctgcagggccgagcgagaactccgcagcatccccgaagatagtgaacttaacaccgtcaccctccctaggaaggcccgcatgaaagaccagtttggaaattcaatcatcaacacccctttgaagcgcaggaaggtcttctcccaggagccacccgacgccttggctttgtcctgccagagctcttttgattctgttattctcaattgcaggtctattagagttggcaccctctttcggcttttgatcgaacccgtgatcttctgtctcgactttatcaaaattcagctggacgaacccgaccacgatccggtcgaaattatcctcaacacatctgacttgacaaaatgcgagtggtgcaacgtccggaagctgcctgtagttttcctgcaggcaatccccgccgtttaccaaaagctgtccatccaattacagatgaataaagaggataaggtgtggaatgactgcaaaggggtgaataaattaacgaaccttgaagaacaatacataattctgattttccagaacgggcttgatccaccagccaacatggtgttcgagtccatcatcaatgagattgggataaagaacaatataagcaatttctttgccaaaataccatttgaagaggccaatggtcgcttggttgcatgtacccgtacatacgaagaatcaataaaaggctcttgtggccagaaggagaacaaaatcaagaccgtgtcgtttgagagtaagattcagctcaggagcaagcaggagttccagttcttcgacgaagaagaggagactggcgaaaaccatacaatctttattggtccagttgaaaagctgatcgtctacccgccgccacccgcgaagggcggaatctcagtaactaacgaggacctccactgtctgaatgagggtgaatttctgaatgatgtgattatcgacttctacttgaaatacttagtcctcgaaaaactcaagaaggaagatgcggaccgcatccatatcttttcaagcttcttctacaaacggctgaaccaacgggaacgtcggaatcacgaaaccaccaatctttctatccagcagaaaagacatggccgggtgaaaacgtggaccaggcatgttgacatctttgagaaggacttcatattcgtgcccctgaatgaggctgcacactggttcctggccgttgtatgctttccgggtttggaaaaaccgaaatatgagcctaatccacactaccacgagaacgctgtgatacagaagtgcagcactgtcgaagactcctgtattagcagtagcgcaagtgagatggaaagttgtagccagaacagctccgcaaaaccagtgatcaaaaagatgttgaataagaaacactgcattgcggtgattgattctaatccaggacaggaggagtccgatccccggtacaagaggaacatatgctcagtgaagtatagtgtgaagaagattaaccacaccgcaagcgagaacgaggaattcaacaaaggggagagtacctcgcagaaggtcgccgatcgtactaagagtgaaaacgggctgcagaacgaatctctgtcttccacgcaccataccgacgggctgtccaagattcgcctcaactacagcgacgagtcccctgaagcagggaagatgttggaggatgaattggtagactttagcgaagaccaggacaatcaggacgacagtagtgatgacggattcctggcagacgacaactgcagtagcgagattggacagtggcaccttaagccgaccatctgtaagcagccatgtattcttcttatggactcacttcggggacccagtaggtctaatgtggtgaagatcctcagagagtatttggaggtcgagtgggaagtcaagaagggttctaagcgctccttttcaaaggacgtgatgaagggaagcaaccctaaagtacctcagcagaataacttctctgattgcggcgtttacgtgcttcagtatgtcgagagcttttttgagaaccctatcctgtcttttgaactcccaatgaacctggcaaactggttcccccccccgcgcatgagaaccaagcgggaggaaattcggaatatcatccttaagctacaggaggatcagagtaaagaaaagcgcaagcacaaggatacatacagtacagaagcccctctgggcgaggggaccgagcagtatgttaactccatctccgactag

SEQ ID NO: 207370 - DNA, 3339 bp, synthetic construct
  misc_feature 1..3339: note = Description of Artificial Sequence: Synthetic coding sequence
  source 1..3339: mol_type = other DNA
atggccgccggcaagagcggcggcagcgccggcgagatcaccttcttagaggctctggcaaggagcgagagcaaaagagatggcggtttcaagaacaattggtcttttgatcacgaagaagaatcagaaggagacacagacaaggacggcacgaatctcctgtcagtcgacgaggacgaagactccgaaacatctaaagggaaaaaactcaaccgcaggagcgagatcgttgcgaatagtagtggcgagtttatattgaaaacatatgtgagacggaacaagagcgagtcttttaaaaccctaaagggcaatcctatcgggcttaatatgctttcaaacaacaaaaaactgtctgaaaacacccagaatactagcctgtgctcaggaacggtggtgcacggcaggcggttccatcacgcacatgcacagatacccgtcgtcaaaacggcggcccaacgccttctgagcaatcagatccttaaagaatacccaccacatgtgcagaaagtcgaaatcaatcctgtgaggctctcacgactccagggggttgagcgaattatgaagaaaactgaggaaagtgagagtcaggtggagcctgaaatcaaacgcaaggtgcaacagaagaggcattgttccacataccagcccactcccccactgtcacctgctagtaagaagtgtctaacccatctagaggacttgcagcgcaattgccggcaagccattactctgaacgaatctaccggcccactccttagaacttccatccaccagaattccggtggacagaaatcccaaaacacagggctgactaccaaaaaattctacggaaataacgtcgaaaaggtccctatcgacataatagtgaactgtgacgacagcaaacacacgtatttgcaaactaatggaaaggtgatactgcccggtgcaaaaatccctaagattacgaatctcaaggaacgcaagacctccctatcagatctgaatgacccaattatccttagttctgacgatgatgacgacaatgatagaaccaataggagggagtcaatctctccacagcccgccgattcagcctgttccagtccggctcccagtaccggtaaagtcgaagctgcactgaacgagaatacttgtagggcagagagagagcttcgatccataccggaagatagcgagctgaacacagtcaccctgccacgcaaggcccgtatgaaggaccagtttggtaacagtatcattaacacccccttgaaacgcaggaaggtgttctcacaagaaccgccagacgctcttgctctgtcctgccaatcctcattcgactctgtgatccttaactgtaggagtattcgagtcggtacactctttaggctgcttattgagcctgtcattttctgtttagactttattaaaattcaactcgacgagccagatcatgaccccgtggaaataatccttaacacttcagatcttaccaaatgtgaatggtgcaacgtgcgaaagctaccagttgtatttttgcaggctattccggcggtctatcagaagctctctattcagctgcaaatgaataaggaggacaaagtgtggaatgactgcaaaggagtgaacaaactcactaacctggaagagcagtacatcatcctgatttttcaaaatggcctggatcccccagctaatatggtgttcgagagtataattaacgagattggaattaagaataacatctccaacttctttgcaaagatccctttcgaggaagcaaacggaaggctggttgcctgtaccagaacttacgaggagtctatcaaggggtcatgcggacagaaggagaacaagattaaaacagttagtttcgagtcaaaaatacagctgaggtctaaacaggagttccaattctttgacgaagaggaagagactggggaaaatcacactatcttcatcggccccgtagaaaaactcatcgtgtatcctccccccccggctaaagggggaatttctgtgacgaatgaagatttgcattgtctgaacgaaggcgagttcctcaacgatgtaataattgacttctacctgaagtatctggttttggaaaaactgaagaaggaagatgcagaccggatccacatttttagctcttttttttacaagagactgaaccaaagggaaagacgcaatcacgaaacaactaatttaagtatccaacagaagcgccacgggcgtgtcaaaacctggactcgtcatgtagatattttcgagaaagacttcatctttgtgccgctgaatgaggccgcccactggtttctagcagtggtatgtttccccggcctcgagaagcccaagtatgagcctaaccctcattatcatgagaatgccgtcattcaaaagtgtagcaccgtggaggacagctgtatatcaagctctgccagtgaaatggaatcatgttcgcagaactcaagcgccaagcccgtcatcaaaaaaatgttaaacaaaaagcattgtattgccgtaatcgattctaacccgggccaggaggagtctgacccaaggtataaaagaaatatctgctccgtgaagtacagcgtgaagaaaattaatcatacagcctccgaaaacgaggagttcaacaagggtgaatctacttctcagaaggtagcggacagaacaaagtcggaaaacggcttgcaaaacgagtcactctcttcaacccatcacactgatggcctgagcaaaattaggctcaactactctgatgaaagcccagaggcggggaagatgcttgaggacgaacttgtcgatttctcagaggaccaggacaatcaggacgattcttccgatgatggttttctggccgatgacaactgcagctctgagatcggccagtggcacctaaagccaactatatgtaagcagccttgtatactgttaatggattccctgaggggtccatcacggtctaatgttgtgaagatcctgcgggagtatctggaggtggaatgggaggtgaaaaaggggtcaaaacggtcattttcgaaggacgtgatgaagggctccaaccccaaggtgccacagcaaaacaatttttctgattgcggagtgtacgtgctgcaatatgtggagtcgtttttcgaaaatcctatactgtcttttgaactgcctatgaatctggccaattggttccccccacccaggatgcggaccaaacgtgaagaaatacgaaatattattcttaaactgcaggaggatcagtccaaagagaagcgaaagcataaggacacttactccaccgaagccccattgggtgagggcaccgaacaatacgttaattcaattagtgattag

SEQ ID NO: 207371 - DNA, 3339 bp, synthetic construct
  misc_feature 1..3339: note = Description of Artificial Sequence: Synthetic coding sequence
  source 1..3339: mol_type = other DNA
atggccgccggcaagagcggcggcagcgccggcgagatcaccttcctagaggcacttgcacgctccgagagtaagagagacggtggctttaagaataattggtcctttgatcacgaagaggaatccgaaggagataccgataaggacgggacgaacctgttatccgtggatgaggacgaagactctgagacctccaagggtaaaaagctgaaccgccgttccgaaattgtcgccaacagcagtggagaatttattctcaagacatacgtgcggcgcaataagagtgagtccttcaagacccttaaaggcaaccctatcggcctgaacatgctgagtaacaacaaaaaattgagcgagaacacgcagaacacttccctctgtagcgggaccgtggtccatggcagacggttccatcacgcgcacgcccagatacctgtggttaagaccgccgcccagtccagcttggatagaaaggaaaggaaagagtatccaccccacgtgcagaaagtggagatcaaccccgtgagattatctagactgcagggagtcgagcgtatcatgaaaaagaccgaggaatcagagtctcaagtagaacctgagataaaacggaaggtccaacaaaaacggcactgtagcacctaccaacccactccccccctgagtcctgcaagtaaaaagtgcctgacccatctggaggacctgcagcgcaactgccgacaggccattaccttaaacgagtccaccggccccctattgcgaacaagcatccatcagaattccggcggccaaaaatctcagaatacaggcctgaccacaaaaaagttctatggcaacaatgtggaaaaagtgcctatcgatataattgttaactgcgacgactctaagcacacatatctgcaaacaaatggcaaggtgattctgcccggtgcaaaaattccgaaaatcaccaacctgaaggaaaggaaaactagtctgtctgacttgaacgaccctataatcctctcatcagatgacgacgacgacaatgatcgaaccaaccgccgtgaatcaatctcccctcaacctgccgacagcgcgtgtagcagcccggcgccgtcaaccggaaaggtggaggccgcactcaacgagaatacgtgccgggccgagcgcgagctgagatcaatcccggaggactccgaacttaatactgtcacgctgcctcggaaagcccggatgaaggaccagtttggcaactcgatcatcaataccccactgaagcgccggaaagtgttctctcaggagccacccgatgcacttgcgctcagttgccagagctcctttgattccgtgatcctgaattgcagatcaatccgcgtggggacattgttccggctgcttattgaacctgttattttttgcctcgacttcattaagatccaattggacgagcctgatcatgacccagtggagatcatcctgaacacatcagatctcaccaagtgtgaatggtgtaatgttaggaagctcccggttgtcttcctgcaggccattcctgctgtgtatcagaaactcagcatccagctgcagatgaacaaggaagataaagtctggaatgactgtaagggtgtcaacaagctcacaaacctggaagagcagtacataatcttgatcttccagaacggcttggaccctcctgccaacatggttttcgaatccatcattaacgaaattgggattaaaaataatattagcaacttctttgctaaaatccccttcgaggaggctaacggccgcctcgtggcatgtactcgcacatacgaggaaagcataaaagggtcatgtgggcaaaaagagaataagatcaaaaccgtctccttcgagtctaaaatacagcttagaagcaaacaggaattccagttcttcgacgaggaggaagagacaggcgaaaatcataccatattcattggtcccgtagaaaagctgatcgtttatcctccacccccggcaaaagggggtatcagtgtaacaaacgaggacctacactgcctgaacgagggcgagtttctgaatgacgtgattattgatttctacctaaagtatctggtcctcgagaagctaaaaaaagaagacgccgaccggattcacatctttagctcctttttctacaagagactgaatcagagggagcggcgaaatcacgaaactacgaacctaagtattcagcagaaacgacatgggagagttaaaacctggacccggcacgtggacatcttcgagaaagacttcatctttgtgcccctgaacgaggcagcacactggttcttggccgtggtgtgtttcccaggcctagagaaaccaaagtacgaacccaaccctcactatcatgagaacgcagtaattcagaagtgcagcacagtggaggacagctgtataagcagtagcgcatctgaaatggagtcatgttcccaaaacagctccgctaagcctgtgatcaagaagatgttaaacaaaaagcattgcatcgcggtgattgactcgaacccaggccaggaggagtctgaccctaggtataagagaaacatctgttccgtcaaatattcagtgaagaagatcaaccataccgcgtccgaaaatgaagagttcaacaagggagaaagcacctcccagaaggtggctgatagaaccaaatctgaaaacggactccagaacgagtccctctcctctacacatcacacagacgggttgagcaaaattcggctgaattacagtgacgagtctcctgaagccggtaagatgctggaagatgagctggtcgatttctccgaagaccaagataatcaagatgactcgagtgatgacggttttctagcagatgacaattgctctagtgaaattggacaatggcacctcaagcccactatctgtaaacagccatgcattctcctgatggacagcctgcgaggcccatctcgatccaatgtggttaagattcttagagagtatctcgaagtggaatgggaagtgaaaaagggcagcaagcgatccttcagcaaagatgtgatgaaaggttcaaatccaaaagtgcctcagcaaaataacttttccgattgcggggtgtatgtgctgcaatatgttgaaagcttcttcgagaaccccatcctgtccttcgagctgcccatgaacctggccaattggtttccacctccaaggatgcgcaccaaacgcgaggagatccgtaatattattttaaagctccaggaagatcagtctaaagagaagcgtaagcataaagatacttactccacagaagcccccctgggggaggggacagaacagtacgtaaacagtatctctgattag

SEQ ID NO: 207372 - DNA, 1074 bp, synthetic construct
  misc_feature 1..1074: note = Description of Artificial Sequence: Synthetic coding sequence
  source 1..1074: mol_type = other DNA
atggccgccggcaagagcggcggcagcgccggcgagatcaccttcctggaggccctcgcaagatcagaatctaagcgagacgggggctttaagaataactggtcgttcgaccatgaggaggaaagtgaaggagacacagacaaggatggaacaaatctcttgtcggtggacgaggacgaagattctgaaacatccaaaggcaaaaagctcaaccgcagatctgagatcgttgctaattcctctggggaattcatcttgaagacttacgtgagacggaacaaatccgaatctttcaaaactctgaagggcaacccaatcggcctgaatatgctaagtaacaataaaaaactgtctgagaacactcagaacacctccctgtgtagtggcaccgtcgtccatgggcgacgcttccaccacgcacacgcccaaatccctgtcgtgaagactgctgcccaatctaatcagattttaaaggagtaccctcctcacgttcaaaaggttgaaataaatccagttcgcttgtctcgactgcagggagtggttatactgtcttctgacgacgacgacgacaacgaccgcaccaaccgccgcgagtcaatttcaccacagccagctgatagcgcttgctcttctccagccccgagcacgggcaaagtggaggccgccctgaatgaaaacacatgccgcgccgaacgagagctgcgaagtatccccgaagattctgagctaaacactgtgaccttgcctaggaaggccagaatgaaagaccagttcggtaatagcataatcaacacaccactaaagaggcgcaaggttttttcccaggagccccccgacgccctggcgctctcctgccagagcagttttgatagcgtgattttaaactgtagaagtatccgagttggcaccctttttaggctgttgatcgaaccggtgatcgtgattattaagattttctttattacccacaaaaagccagaccacgaccccgtcgaaattattctgaatactagcgaccttactaaatgcgagtggtgcaacgtaaggaaactaccagtcgtgttcctgcagtag

SEQ ID NO: 207373 - DNA, 1107 bp, synthetic construct
  misc_feature 1..1107: note = Description of Artificial Sequence: Synthetic coding sequence
  source 1..1107: mol_type = other DNA
atgaaggaccagttcggcaacagcatcatcaacacccccctgaagcggcgcaaggtctttagccaagagccaccagacgctctggcactgtcctgtcagagttcatttgactcggtgatactgaattgtcgtagtatacgcgtgggcacgctattccggctcttgatcgaaccagttatcttctgcctggactttatcaaaatccagctggacgaaccagatcatgatcccgtcgaaataattcttaacaccagcgatctgaccaagtgcgagtggtgcaatgttcggaagctgccagtggtttttcttcaggccatccctgcagtgtatcaaaagctttcgattcaactgcagatgaataaagaagacaaagtgtggaatgactgcaagggcgtaaacaaacttaccaatctggaagagcagtacattatattaatattccaaaatgggcttgatcctcctgcaaacatggtgtttgagtccatcattaacgagatcgggattaagaacaacatttccaacttctttgctaagattccattcgaggaagccaatggcagactcgttgcttgtacacggacctacgaagagtctatcaaaggctcatgtggccaaaaagagaataaaatcaagaccgtgtctttcgagtctaagattcagctgcggagcaagcaggagttccagttcttcgatgaagaggaagagaccggagagaatcacacaatcttcattgggcccgtggagaaactgatcgtttaccccccaccccccgccaagggcgggatcagtgtgacaaatgaggatctgcactgcctcaacgagggagagttccttaacgacgtcatcattgacttctacctgaaatatctggtgctcgagaagctgaagaaagaagatgcagaccgtattcacatattctcatcgttcttttacaaacggcttaaccagagagagcgcagaaaccacgagactacaaacctttccattcagcagaaaagacacggacgggtgaaaacatggacacgacacgtcgacatttttgagaaggattttatcttcgtgcccctgaacgaagcatggctcaaacagaatcagaccaagctttag

SEQ ID NO: 207374 - DNA, 2955 bp, synthetic construct
  misc_feature 1..2955: note = Description of Artificial Sequence: Synthetic coding sequence
  source 1..2955: mol_type = other DNA
atggacaagcggaagctgggccggcggcccagcagcagcgagatcattacagaaggtaaacggaagaaatcatctagtgaccttagcgagatccggaagatgctgaacgccaaacccgaggatgtgcatgttcaatcccctctgtccaaattccgcagttctgagaggtggacgctgccacttcagtgggagaggagtctcaggaataaagtcatctccctagaccataaaaacaaaaagcacataagaggatgcccggtcacttcaaaatcaagccctgagcgaattccaagggttatcctcacaaatgtgctgggaacagaactgggccggaaatatatccgaacaccgccagtgaccgagggaagcctgtctgacactgacaacttacaaagcgagcagctctcttcttcttcagatggatcccttgaatcctatcaaaatctgaatcctcacaagtcctgttatctgtccgaacgcggaagtcagaggagcaagaccgtggatgataacagtgcaaagcaaaccgcacacaataaggagaagaggcgtaaagacgacgggattagcctgctcatatcggatactcaacccgaggatctgaactccggcagtaggggctgcgaccacttagagcaggaatcaaggaataaagatgtaaaatactccgatagcaaagttgagctgaccttgatttcccggaagacaaagcgccgactcagaaataatctgcccgatagccagtattgcacttcacttgataagagcaccgaacaaactaagaagcaagaggatgatagcacaatttccaccgagttcgaaaaaccatcagaaaactatcatcaggatcctaaactccctgaggaaattacgacgaaaccaactaaatccgacttcactaaactcagttcactgaactcacaagaattaactttgtcaaatgctacaaagagtgcatcagcagggtctacaacggagaccgtagaaaactctaattctatcgatatagtgggcatcagctctctagtggagaaggacgaaaatgagctgaacaccatagaaaaaccaatcctaaggggacataacgagggtaaccagtccctgattagcgctgaaccaatcgtggtcagctccgatgaggaaggaccggtggagcataagtccagtgagattctaaaactccagagtaagcaagaccgcgaaaccactaatgagaacgaaagtactagcgaaagcgctctactggagcttccgcttattacatgtgagtccgtgcaaatgagctccgagctctgcccctacaacccagtgatggagaacatctcctctattatgccctctaatgagatggatttacaacttgatttcatttttacttctgtgtacatagggaaaataaaaggggctagcaagggctgcgttacaatcacgaaaaagtacataaagattcctttccaggttagcttaaatgagatcagtttactggtagacacaacacatcttaaaagattcggcttgtggaagtccaaagacgacaatcacagtaagcggagtcatgcaattctgtttttttgggtctcctccgattacctgcaggagatccagacgcagctagagcactcggtgctgtcccagcagagcaagagtagtgagtttattttccttgagctccacaaccccgtgtcacagagggaggagctcaaactgaaagacataatgacagagatctccatcatctccggtgagctggaattatcatacccactgagttgggtgcaggcattcccgctgttccagaatctttccagtaaggaatcttcttttattcactactattgtgtctctacctgtagtttccctgccggagttgccgtcgccgaggagatgaagctgaagtccgtgagtcagccctctaatacagacgccgccaaaccgacttacacattcctgcaaaagcagagctcaggttgttacagtcttagcattactagtaacccagatgaggaatggagagaagtaaggcacaccggcctggttcaaaagttgatcgtttacccacctccccctaccaagggaggtctgggcgtgacaaacgaagaccttgagtgcctagaggagggcgaatttcttaatgatgtgatcatagatttttacctcaagtaccttatcctggagaaagcctccgacgagctggtggaacgaagtcatatcttttcaagctttttctataaatgtctcacacgcaaagaaaataacctgaccgaggataaccctaatctctctatggcccagcggagacacaaacgcgtgcgcacctggactcgacatataaatatattcaacaaagactatattttcgtgccagttaatgagtctagtcactggtacttggctgtaatatgttttccgtggttagaagaagcggtatacgaggactttcctcagaccgtgagccagcagagccaggcccagcagtctcagaatgacaacaagaccattgacaatgacctgaggaccacatccactttgtccttatctgcggaggatagccagtccacagagtctaacatgtctgtccccaagaaaatgtgtaaacgcccctgtatcctgatcctggactcactcaaagctgcatctgttcagaatacggtgcagaatctgcgagagtatttggaagttgagtgggaggtgaaactgaaaacacacagacagttcagtaagacaaacatggtggatttgtgcccaaaggtgccaaaacaggataacagtagcgactgtggcgtttacctgctccagtacgtggagtcatttttcaaagaccctatcgtgaattttgagcttccaatccacctggaaaagtggtttccccggcacgtcataaaaaccaaacgggaggacataagggaactgatccttaagcttcaccttcaacagcaaaaaggttccagcagctag

SEQ ID NO: 207375 - DNA, 3054 bp, synthetic construct
  misc_feature 1..3054: note = Description of Artificial Sequence: Synthetic coding sequence
  source 1..3054: mol_type = other DNA
atgctgaacgccaagcccgaggacgtgcacgtgcagagccccctgtctaaattccgatcatctgaaagatggactctcccgctgcaatgggagaggtctctgagaaacaaagtgatatctttggatcataaaaacaagaaacatattaggggctgccccgttacaagtaaatcctcaccggagcgccaactgaaggtgatgctgactaatgtgctctggacagatctgggccgcaagttcagaaagaccctccctagaaatgacgctaacctctgcgacgccaataaggtgcagtcagattctctgccaagtacaagcgtggattccctcgaaacgtgtcaaaaattggagcccctgaggcagtcgctcaacctcagcgagcggatccctagggtgatccttactaacgtgctgggcaccgagctggggaggaaatacattcggaccccacctgtcacagagggcagcctcagcgacaccgataacttacaaagcgagcagctcagtagttcgtcagatggtagcctggaaagttatcagaacctgaaccctcacaagtcctgttatcttagcgagcggggctcacagagatccaagactgtggatgacaactccgccaaacagaccgctcataacaaagagaagcggcgcaaggacgacgggatctccctgctcatcagtgacactcagccagaagacctgaactccgggtcccgaggctgcgatcacctggagcaagaatctcgcaacaaggacgtcaagtattccgactccaaggtcgaattgaccctgattagcaggaaaaccaagcgacgactgaggaacaacctcccggactctcaatattgcacatcattggataagtctaccgaacagactaaaaagcaggaagatgatagcacaataagcaccgagtttgagaaaccatctgagaactaccatcaggacccgaagctgccagaggagattacgacaaagccaacaaaaagcgattttaccaagttgtcctctcttaacagccaggaactcaccttgtccaacgcaactaagtcagcctctgccgggtctacgaccgagaccgtcgagaactcgaacagcatcgacattgttggaatcagctcactggtcgagaaagacgaaaacgaactgaataccattgagaaacccattctgcgaggccacaacgaagggaatcagtctcttatcagtgccgagcctattgtagtatcttcagacgaagaaggaccagtggaacacaagtcatccgaaatcttgaaactgcagtccaagcaagatagggagacaaccaatgaaaacgaaagcacgtctgagtctgcactgctcgagttacctctcataacttgtgaaagcgtgcagatgtcaagcgaactttgtccatataaccctgttatggagaacatcagctccatcatgccctcaaatgaaatggatctgcagcttgatttcatctttactagcgtttacatcggcaaaatcaagggggcgtctaaaggctgtgtgacaattaccaagaagtacattaaaattcccttccaggtgtcactgaacgaaatttccctgctcgtcgatacaacacatctgaagcgtttcggtctctggaagtctaaagatgataatcattctaaaagatcccacgcaattctattcttttgggtgtctagcgattacctgcaggagattcagacacagcttgaacacagtgtgctgtctcaacagtctaagagtagcgagtttatcttcctggaactgcataaccctgtgtctcaacgcgaggagctgaagctgaaggatattatgacagagattagcattatatccggggagctggagctttcctatccactgtcttgggtgcaggcattcccactgttccagaatctctccagtaaggaatcttcattcatccactactattgcgtgtcaacctgttccttccccgcaggagtggcagtagccgaggagatgaaattgaagtccgtgagccaacctagcaatactgacgccgccaaaccaacatataccttcctgcaaaagcaatcttctggatgctacagcctttctatcaccagcaatcccgatgaggagtggcgcgaggtgcgacacacgggcttggtgcaaaaactgatcgtatacccgccaccgcctacaaagggtgggttgggcgtgaccaatgaggatttggaatgcctcgaagaaggagagttccttaatgatgtgataattgatttttacctaaagtacctgatactcgagaaagcctccgatgagcttgtggagagatctcacattttcagcagcttcttctacaagtgcctgacccgcaaagagaacaatctgaccgaagataacccaaatctctccatggcccagcgtaggcacaaaagagttcgtacatggacccggcatatcaacatattcaataaggactatatctttgtaccggtcaatgaaagctcgcattggtacctcgctgtgatttgcttcccatggctcgaggaggccgtgtacgaagactttccccagaccgtaagccagcagtcccaagcccaacagagtcagaatgataataaaaccatcgacaatgacttgaggaccactagtaccctgagcttgtctgccgaagatagccagagtaccgaatcaaacatgtctgtgcctaaaaagatgtgtaagaggccatgcatccttattcttgactccctaaaggctgcgagcgttcaaaatacagttcaaaacttgcgggaatacctggaggtggaatgggaagtaaagctgaagacccaccggcagttttcaaaaacaaacatggtggatctgtgcccgaaggtcccgaaacaggacaactcgtctgactgcggagtttatctccttcagtacgtggaatcattcttcaaagatccaatcgttaatttcgagttgccaattcatttggagaagtggtttcccagacatgttatcaaaacaaaacgggaggatattcgagaactgatcctgaaacttcaccttcagcaacagaaggggtcatccagttag

SEQ ID NO: 207376 - DNA, 2661 bp, synthetic construct
  misc_feature 1..2661: note = Description of Artificial Sequence: Synthetic coding sequence
  source 1..2661: mol_type = other DNA
atgctgaacgccaagcccgaggacgtgcacgtgcagagccccctgtctaagtttagaagcagcgaaagatggaccctccccctgcagtgggaaagaagcctgagaaataaggtcatctctctggatcacaaaaacaaaaaacatatacgagggtgccccgtgactagcaagagctcccctgagagggggtcacagagatcaaagaccgtagacgacaattcggcaaaacagaccgcccataataaggagaagcggcggaaggatgatggcatctctctactgatcagcgatactcaaccggaggaccttaactcgggcagcagaggttgtgaccatcttgagcaggaatcccggaacaaagacgtgaagtacagcgattctaaggtcgaacttacacttatcagtcgaaagactaaacgacgccttagaaataacttgcctgactctcagtactgtacttctctggacaaatctactgaacagaccaagaagcaagaggacgactctactatcagcaccgagttcgagaagccctccgagaattaccaccaggaccccaaactccctgaggagattacaacaaagccaacgaaaagtgatttcactaagcttagtagcctgaactcacaggagctgacactctctaacgcaacaaagagtgctagcgccgggtcaaccaccgaaacggtcgaaaattccaactctattgatatcgtcggcatcagctcactcgtcgaaaaggatgagaatgaattaaacacaatcgagaagcccatcctgaggggccacaatgaaggaaaccagagtctgatcagcgcagaaccaattgtggtatcatccgatgaggagggtccagtggaacacaagagtagtgagattctgaaactccagtcaaagcaggacagagagacgactaatgaaaacgagtccacttctgagtcggccttgttagaacttcccctgattacctgtgagtcagttcaaatgagctccgagctgtgtccttacaacccagttatggagaacatatcgagtataatgcctagcaacgaaatggatctgcagctggatttcatctttacctcagtttacattggcaaaattaagggagctagtaaggggtgcgttaccatcaccaaaaaatacattaagataccctttcaagtgtctctaaatgagatatctctgcttgtggataccactcacttgaaacggtttgggttatggaagtctaaagacgacaaccacagcaaacgcagccatgccattctgtttttttgggtgagcagcgactatcttcaggagattcaaacacagctggaacactctgtgctgtctcaacagagtaagagcagcgagttcatcttcctggagcttcataaccccgtttctcagcgtgaggagctcaagctgaaggatataatgacggagattagtatcatctctggtgaactggagctctcctacccactttcatgggttcaggcatttccactgtttcagaacctcagttcaaaagagtcttccttcatccactactattgtgtgtccacttgcagtttccccgcaggcgtcgccgtcgccgaggagatgaagctgaaatctgtaagtcagccaagcaacacagatgccgccaaaccgacttacactttcttgcagaaacaatccagtggctgttatagcctgagtatcacatcaaaccccgatgaagaatggcgcgaagtgcggcacacaggactagtgcagaagctcatagtttaccccccgccaccaactaagggcgggctgggagtgactaacgaggatctcgagtgtctggaggagggcgagttcctgaacgacgtcattatcgacttttaccttaagtatcttattcttgaaaaagcctccgatgaacttgttgagcggagccatatcttttcctcattcttttacaagtgtctgactcgaaaggagaataatttgaccgaagataaccctaacctgtctatggcacaacgacgacataagagagtgagaacctggactagacatattaatatcttcaataaggactacatctttgtgcctgtgaatgaatcttcccattggtacttagccgtgatttgtttcccatggttggaagaggccgtgtatgaggattttccccagaccgtaagtcagcagtcacaagctcagcaatctcagaacgataacaaaacaatcgacaacgatctgcgcaccacgtccactctctctctatcggcagaagatagtcaatccactgagagcaacatgtctgtacctaagaagatgtgtaagagaccctgtatcctaattctggacagtctgaaagcagcttcggtgcagaatacagtgcagaatctaagggagtacctcgaggtggagtgggaagtcaagctcaagacccataggcagttcagtaagactaatatggtggacctgtgtccaaaggtgcctaagcaggataatagctcggattgcggggtctacctcttacagtatgtggaatccttctttaaagatcctatcgtaaatttcgaactgcccattcatctggagaagtggttcccccgacatgtgattaagaccaaaagagaggacatcagagaattaatcctcaaactccatctccagcagcagaagggctctagcagctag

SEQ ID NO: 207377 - DNA, 717 bp, synthetic construct
  misc_feature 1..717: note = Description of Artificial Sequence: Synthetic coding sequence
  source 1..717: mol_type = other DNA
atgaagaagttcctgtacatcaagagcgtgttccacaccctgcggatggcccaacgaagacataaaagagtcagaacctggacgcgccacataaacatcttcaacaaagactacatctttgtgcccgtcaacgagtcctcacactggtacctggcggttatctgttttccctggctcgaagaagccgtctacgaagactttccgcaaactgtcagccaacagagccaggcccagcagtctcagaacgacaacaaaaccatagataatgatctgagaacaaccagtaccctgtctctgagcgcagaggattctcagagtacagaaagtaacatgagtgtccccaagaagatgtgtaaacgcccgtgcatactcatactggactccttgaaggccgcatctgtgcagaatacagtgcaaaatttgcgtgagtacttggaagtcgagtgggaggtcaaactgaagacgcacaggcagtttagtaagactaatatggtggacctttgtcctaaggttcctaagcaggataatagttccgattgtggcgtgtacttactgcagtacgttgagagcttcttcaaagacccaatcgtgaactttgaactaccgatccatctagaaaagtggtttccccgccatgtaataaagacaaagcgcgaagacatacgcgagctgatcctgaaattgcacctgcagcaacagaaaggctcttcctcttag

SEQ ID NO: 207378 - DNA, 2958 bp, synthetic construct
  misc_feature 1..2958: note = Description of Artificial Sequence: Synthetic coding sequence
  source 1..2958: mol_type = other DNA
atggacaagcggaagctgggccggcggcccagcagcagcgagatcatcaccgaaggaaagaggaaaaaatcttcgtcagatctgtccgaaatccgaaaaatgctgaacgcaaaacccgaggacgtacatgtgcagagccccctgtccaaattcagatcttcagagcgctggacgttgcctctgcagtgggaacggtcattgaggaataaagttatctctctggaccacaagaacaaaaaacatatcaggggatgtcctgtgacaagcaagtctagccctgagaggcaactgaaggtgatgctgacgaacgttctgtggacagaccttggccgcaagtttcggaagaccttacctcgcaacgacgccaacctgtgtgacgcaaacaaagtccagagtgactcactccctagcacatccgtggacagcctggagacctgccagaagctagagcctctgagacagagcttgaacctgtccgagcggggctcacagagatccaagactgtcgacgataactcggctaagcagactgctcataacaaggagaagcgcaggaaggacgacggcatctccctcctgatttctgacacgcagccggaggatctgaatagtggaagtagaggttgtgatcatctggaacaggagtcacggaacaaggacgtgaagtatagcgattccaaagttgagctaaccctgataagtcgtaaaactaagcgacgcctccgtaacaacctgcctgatagtcagtattgcaccagtctcgataagtccaccgaacaaaccaagaaacaggaagacgactccacaatatccactgaattcgaaaagccgtcagagaactaccatcaggacccaaaactgccagaagaaatcactacaaaaccaaccaagtccgacttcacaaagctgagctccttaaactcccaggaactgactctcagcaatgcaactaagtctgccagcgcaggatctacaacggagacggtggaaaactctaatagcattgacatcgttggaatcagttcgttagtcgaaaaggacgaaaacgagctgaacaccatcgaaaagccaatcctgagaggccacaatgaagggaaccagagccttatttccgctgagcctatagtcgttagttctgatgaggaaggcccagtggagcacaagtcttctgagattctgaaactgcagtctaagcaagatcgggagactactaacgagaacgagagtacgtccgaatccgctttgcttgaactccccctcattacttgcgagagcgtgcaaatgtcatcggagctgtgtccttacaaccccgttatggagaacatctcaagcataatgccgagtaatgagatggacctacaactcgactttattttcacttcagtttatataggaaaaatcaagggtgcctcaaaaggctgtgtgactatcactaaaaaatacattaagattccgttccaagtgtcgctgaacgaaatttcgctattggtagataccacacacctgaagagatttgggctctggaaaagtaaggatgacaatcactcaaaaaggtcacacgcgattcttttcttctgggtctcaagtgattacctgcaggagatccagacacagttggaacacagcgtgctgtcccaacagtccaaaagctccgaattcattttcctagaactccacaaccctgtgtctcagcgggaggaactcaaacttaaggacatcatgactgaaattagtatcattagcggcgagttggagctatcttacccactctcctgggtccaggcttttcctttattccagaatcttagctcgaaggaatcttccttcatccactattattgtgtgtcaacttgttcatttcctgccggcgtcgcggtggccgaggagatgaagctaaaatcagtttcccagccttctaataccgacgctgctaaaccaacgtataccttcctccaaaagcagtcatccggctgctattctctaagtattacctctaaccctgatgaagaatggcgggaagtgagacacacaggcctagtccaaaagttaattgtgtaccctccaccaccgaccaaggggggattgggcgtgactaacgaagacctggagtgccttgaggaaggcgagtttcttaatgacgtgatcattgatttttatctgaagtacctcattttggagaaggcatccgatgagctcgtcgaaaggtcacatatattttcctccttcttctacaagtgtctgactagaaaggaaaataatctgaccgaggataacccaaacctttcaatggctcagcggcggcataaaagagtgcgaacctggaccaggcacattaacatttttaataaggattatattttcgtcccagtgaacgagtcctctcattggtatctggcagttatatgttttccctggctcgaggaagccgtgtacgaggatttccctcagacagtctcgcagcagagtcaagcccaacagagtcagaatgataacaaaaccattgataatgatcttaggactactagcacacttagcctgagtgccgaggactcacagagcactgaatctaacatgtccgttcccaaaaagatgtgcaagagaccatgcattcttatactagactctctaaaggctgcatcggtacagaatactgtgcagaacctgcgcgagtacctggaagtcgagtgggaggtcaaactgaaaacccaccggcagttctctaagactaatatggtggatctgtgtcccaaggtgccaaaacaggacaacagctctgactgcggggtgtacctgctccagtacgttgaatcatttttcaaggatcctatcgttaactttgagcttccaatccacttagagaaatggttccctagacatgtcatcaagactaagcgggaggatatacgcgagctgattctcaagctgcacctgcagcaacaaaagggcagttcctcttag

SEQ ID NO: 207379 - DNA, 3153 bp, synthetic construct
  misc_feature 1..3153: note = Description of Artificial Sequence: Synthetic coding sequence
  source 1..3153: mol_type = other DNA
atggacaagcggaagctgggccggcggcccagcagcagcgagatcataacagagggcaagcgcaaaaagtcatccagtgatctctccgaaatccgcaaaatgctgaacgcaaagcctgaggacgttcatgtccagtctccactgagcaagttccgatcctctgaacgatggaccctaccactgcagtgggagaggagtttgaggaacaaagtgatctccctggaccataagaataaaaaacatatcagaggctgtccagttacttcaaagtcctcaccagagaggcagctgaaagttatgctgactaacgttctatggacagatttgggacggaagttccgtaaaacgctccctcgtaatgacgctaacttgtgcgacgcaaataaggtccagtctgattccttgccaagcactagtgtagatagtctcgagacttgtcagaaacttgagcctctgagacagtcattaaatctcagcgaacgaattccccgggtaattctcactaatgtgctcggaaccgagttgggccgaaaatacattcgaactccaccggttacagaaggcagcctgtcagacaccgacaatctccagagcgagcagctcagctcatcctccgatgggagcctcgagagctaccagaacttgaacccacacaaaagctgttatttatccgagcgcggatcacagaggtccaaaaccgttgatgataatagcgccaagcagacggcccataacaaagagaagagaagaaaggacgacggcatatctctgctgataagcgatacccagcctgaggatctgaatagtggctcacgtggatgcgaccacttggaacaggaatctaggaacaaggatgttaagtatagcgactccaaagttgagcttaccctcatcagtcgcaagaccaagagacggctccgcaataacctgccggatagtcagtactgtacatccctggacaagagcactgagcagaccaaaaagcaggaagacgatagcacaatctccacggagtttgagaagccctccgagaattatcatcaggacccaaagctgcctgaagagatcaccaccaagcccacaaagagcgacttcactaagctctcgtctctcaacagtcaggaactcacactgtccaacgcgaccaaatccgcgtcagccggctccacgaccgagaccgtggagaattcgaacagcatagacattgtaggaatctcctcattagtggagaaggatgagaacgagctcaatacgatcgagaagcccatcctgcgggggcacaatgaaggaaaccagtcgctcatcagcgcggaacctattgtggtgtcatcagacgaggagggtcctgtcgagcacaaatctagcgagatcctcaaacttcaaagtaagcaggacagagagaccacgaatgagaacgaatcaacatccgaatccgccctgctggaactgccactcataacatgcgaatctgtgcagatgtcatctgagctctgtccatacaacccagtgatggagaatatttcgagcattatgccatctaatgagatggacctgcagttggacttcatctttacctccgtctacataggaaaaataaagggtgcaagtaaaggatgtgttaccattaccaagaagtatattaagattcctttccaagtttccctcaatgaaatctcactactggtcgatactacgcatctgaagaggttcggcctctggaaatccaaggacgacaaccacagtaagaggtcccacgctatactgttcttctgggtgtccagtgactatcttcaggaaatccagactcagctggagcacagtgtgctaagccagcaatccaagtcctcggagtttatatttttggaattacataaccctgtatcccagagagaggaattaaagctgaaggacatcatgacagaaatcagcattataagcggcgaacttgaactgtcctaccccctcagctgggtgcaagccttccccttattccagaacttgagctcaaaagaatcttcttttatacactactactgtgtgtctacctgtagcttccccgccggcgtggctgttgctgaggagatgaagctgaagtccgtttcgcagccaagtaacactgacgctgctaaacccacgtatacctttctgcagaaacagtctagtggctgttactcactttctatcacttctaatcccgatgaggagtggcgggaggttcgtcacactggtttggtgcaaaagctgattgtgtacccacctccgcctacaaaagggggcctcggagtgacaaatgaagatctggagtgcctcgaagaaggcgagttcctgaacgacgttataatcgatttctacctgaagtatttgatcctggaaaaagcttcggacgaactcgtggagcgctcccacatcttttcctcattcttctacaagtgtctcactagaaaggagaacaacctgacagaagacaatcccaatctgtctatggctcaacggagacacaagagagtccggacatggacccgacacataaatatatttaacaaggactatattttcgtaccggtcaatgagtcatcacactggtatttagctgtcatctgcttcccttggctggaagaagcagtatatgaggacttcccccagacggtatcccagcaatcccaggctcagcaaagtcagaacgataataagactatcgataatgatctccgcacaacaagcacgctttccttaagtgcagaagactcccagtccactgagtccaacatgagcgtgccaaagaaaatgtgcaagagaccctgcatactgatcctggacagtctaaaagccgcaagcgtgcagaataccgtccagaacctgcgtgagtacctggaagtggagtgggaggttaagctgaaaacccacagacagttcagcaagacaaacatggtcgatttgtgccccaaggtgcctaagcaagacaattcctccgactgtggggtctacttgctgcaatatgttgaatccttcttcaaggatcccatagtcaattttgagctgcctatccacctcgagaaatggttccctcgacacgtcattaaaactaaacgtgaggacatccgagagttgatcctgaaactccacctgcagcaacagaaggggtcaagctcctag

SEQ ID NO: 207380 - DNA, 1770 bp, synthetic construct
  misc_feature 1..1770: note = Description of Artificial Sequence: Synthetic coding sequence
  source 1..1770: mol_type = other DNA
atgtaccggtggctggtgcggatcctgggcaccatcttccggttctgtgaccgttctgtgccaccggcacgtgcattgctgaagcgccgaaggagcgatagcaccctcttctccaccgtggacactgacgagatccctgcaaaaaggcctaggttggattgtttcatacaccaggtaaagaactctctgtataacgctgccagtctgtttggttttccatttcaattgaccaccaagcccatggttacgagcgcctgcaatggcacccgaaatgttgccccaagcggagaggtattttccaactcaagctcttgtgagctgactggctcaggctcctggaataacatgctgaagctgggtaataaatctcctaatggcatctccgactaccccaaaataagagtgaccgttacccgggatcaacctcggagggtgctgcctagcttcggcttcactcttaactccgagggttgcaacagaaggccaggtggccgtcgccactccaaaggcaaccctgagagctcattgatgtggaagccacaagagcaggcggtgactgagatgatatctgaggaaagcggaaaagggctgaggcgaccccactgtaccgtcgaggagggtgtccaaaaggaagagcgcgaaaagtaccgcaaactcctcgaacgactgaaggagtctggacacggtaatagtgtttgcccagtgacctcgaactaccattccagccaaagaagccagatggacacactcaagacgaagggctggggtgaggaacaaaaccacggcgtgaaaaccacacagttcgtgcccaaacagtacagacttgtcgaaacaagaggtcccttgtgctccttgagatcagaaaagcgctgctcaaaaggaaagatcaccgacaccgagacaatggtagggatccgattcgagaatgagtctagacgaggttatcagctagaaccagacttatcagaggaagtctccgcccgccttcggctgggaagtgggtctaatggactgctgcggcgcaaagtttcaatcatagagactaaagaaaagaactgttcaggaaaggaacgggatcgtcggacagacgacctgcttgaattaactgaagatatggaaaaggaaatcagtaatgccttaggccacggaccacaagacgagattctctcgagtgcattcaagctgagaattactaggggagacattcaaacactgaagaactaccactggctcaatgacgaggtgatcaacttctacatgaacttgttagtcgagcggaataaaaagcagggctaccccgccctgcacgtgtttagtacttttttttacccaaagctcaagagtggaggctaccaggctgtgaagagatggaccaagggcgtaaacctcttcgagcaggagattattctggtacccattcaccgtaaggttcactggagtcttgttgttatcgatctccgaaagaaatgccttaagtacctggatagtatggggcagaaaggacacaggatttgcgaaatcctactacaatacctgcaggacgagagcaaaaccaagcggaactccgacctgaaccttctggagtggactcatcattcgatgaaaccccacgaaatcccacaacagctgaacggtagtgattgtggaatgttcacttgcaagtacgctgactatatctctcgtgacaagccaattactttcactcaacatcaaatgccacttttccgcaagaaaatggtatgggaaattctccaccagcagcttctttag

SEQ ID NO: 207381 - DNA, 1242 bp, synthetic construct
  misc_feature 1..1242: note = Description of Artificial Sequence: Synthetic coding sequence
  source 1..1242: mol_type = other DNA
atgtggaagccccaggagcaggccgtgaccgagatgatcagcgaggagagcggcaaggggcttcgacggccccactgcacagtcgaggaaggagtccagaaagaagagagggaaaagtaccgtaagttgcttgagaggcttaaagaatcaggacatgggaattcagtgtgcccagttactagcaactatcactcatcacagagaagccagatggatactctcaagacgaagggctggggcgaggagcaaaaccatggcgtcaaaaccacacagtttgtgccgaagcagtataggctagttgagacccgtggacccctgtgttctttgaggtccgaaaagaggtgctcaaaaggcaaaattactgacacagagactatggtgggtattcgattcgaaaacgagtctaggagaggctatcagctcgagcccgatctctccgaggaagtatccgcccgtctccgcctgggctcagggagtaatggactgcttcgacgaaaagtcagcattattgagactaaagaaaagaattgcagcggcaaagagagggaccgacgaactgatgacctgctggaactcaccgaagacatggagaaggaaattagtaatgccctgggccacggcccacaggatgagatactgagctccgcattcaaattgcgaattacaaggggcgacatacagactctgaaaaactatcattggctcaacgacgaggtaattaacttctatatgaatctgctcgtggagcgtaacaaaaaacagggctacccagctctgcacgtcttcagcacatttttctaccctaagcttaagtccgggggctatcaagccgtgaagcggtggacaaaaggagttaacctgtttgaacaagagattattctcgttcccattcacagaaaggtacattggagcctggtggtcattgatctgcgtaaaaagtgcttgaagtacctggacagcatggggcaaaaggggcataggatttgtgaaattttactccagtatctgcaggatgaaagcaagactaagaggaacagtgaccttaacctgttggagtggacacaccactccatgaagccccacgagataccccagcagttgaatggcagcgactgcgggatgtttacctgtaagtacgctgactacatttcccgcgacaagcctataacattcacccaacaccagatgcccctattccgaaagaagatggtttgggaaatccttcaccaacaattactgtag

SEQ ID NO: 207382 - DNA, 1383 bp, synthetic construct
  misc_feature 1..1383: note = Description of Artificial Sequence: Synthetic coding sequence
  source 1..1383: mol_type = other DNA
atgtaccggtggctggtgcggatcctgggcaccatcttccggttctgtgaccgaagtgtccccccagcgcgcgcgctgctgaaaagaagacgtagcgactccactctcttcagtacagtggacactgatgagattcccgccaagcggccacggctcgattgcttcatccatcaggtgaaaaactcactctacaacgcagccagcctattcggctttccgttccagctaacaactaagcccatggtgacgtcagcatgcaatggcacgaggaatgtggctccatcaggagaggtcaacggaaactccgtctgccctgtaacatctaactatcactccagtcagagaagccagatggacacattgaagaccaagggttggggtgaagaacagaatcatggggttaagacgactcaatttgtgcccaagcaatacaggctcgtggagacgcggggcccactctgcagtctgcgatcggaaaaaagatgctctaagggtaaaatcactgacaccgagactatggttgggatacgttttgaaaacgaatctcggcggggatatcagctggaacccgatttgtccgaggaggtaagcgctcgcctgcggctgggatccggatctaatggactcctgagacggaaagtatcaattatcgaaacaaaagagaagaattgttccggaaaggagcgggacaggcgcaccgatgaccttttggagctcacagaggatatggagaaggaaattagcaacgctctggggcacgggccccaggacgagatcctgtcctccgcattcaaactgaggatcacacgaggggacatccagaccctgaagaactaccactggctgaatgatgaggtgatcaatttctatatgaatctgcttgttgagagaaacaagaagcaagggtatcccgccttgcacgtcttttcaacgttcttttatcctaagctcaagtcagggggttatcaggcagtgaagcgctggacaaagggggtgaacctgtttgagcaggaaatcattctggtccctatccatagaaaggtgcattggagcctggtggtcatagacctgagaaaaaaatgtttaaagtaccttgattccatgggccaaaaagggcatcgcatttgcgagatcctgttacagtacctccaggatgaatctaagacgaaacgtaacagtgacctgaacctgcttgaatggactcaccatagcatgaaaccacatgagatcccgcaacagctcaacggtagcgattgtggcatgttcacttgcaagtacgcggactatatctcccgtgacaagcctatcacctttactcaacaccagatgcctctcttccgaaagaagatggtgtgggaaatcctgcaccaacagctgttgtag

SEQ ID NO: 207383 - DNA, 1740 bp, synthetic construct
  misc_feature 1..1740: note = Description of Artificial Sequence: Synthetic coding sequence
  source 1..1740: mol_type = other DNA
atggacagccacccctgcctgtactgcggcccccaggacagcgagggaacaaattggcaaacttccccttctaccttgttttctactgtggatacagatgagattcccgcgaagcggccccggctggactgctttatccaccaggtgaaaaactcactgtacaacgccgcaagcctttttggcttcccctttcaactgaccactaagccaatggtgacttccgcttgtaacggcacccgcaacgtggccccatcaggagaagtcttcagcaattcaagttcatgtgagctcaccggctcagggtcttggaataatatgttgaaattgggcaacaagtctcccaatggcatttctgactaccctaaaattcgggtgaccgtgacacgggatcagccacgacgcgtcctccctagtttcgggttcaccctgaatagtgaaggctgtaacaggcgccccgggggaagacgccactcaaagggaaatcctgagtcttctctcatgtggaaacctcaagaacaggcagtgactgagatgatatccgaagaaagtgggaagggcctccgtaggccacactgtaccgtcgaggagggcgtgcaaaaggaagaaagggaaaaatacaggaagcttctcgagcgcctcaaggagtcaggccatgggaattctgtctgcccagttacaagtaactaccactcctcccagcgatcacagatggatacgctgaaaacaaaaggctggggggaagaacagaaccacggcgttaagactacgcagttcgtacccaagcagtacaggctggtggagactcgcgggcccctgtgctcattaaggtccgagaaaagatgcagcaaagggaaaattactgatacagagaccatggtggggataaggtttgagaacgagtcaagacggggatatcagctggaaccggatctgtcagaggaggtatccgcaaggctgagactggggtctgggtctaacggcttgctgcgaagaaaggtttccattatcgaaacaaaagaaaagaattgttctggcaaggaacgcgacagacggacggatgacctgctcgagctgaccgaggatatggaaaaggaaatctccaatgctctcgggcacggaccgcaagacgagatactgtctagcgcttttaaacttaggataacgcggggagacatccagaccctcaaaaattaccactggctgaacgacgaagtgatcaatttctatatgaacctattggtagaacggaacaagaagcagggatatcccgcactgcacgtgttttcaaccttcttttaccctaaactaaaaagcggagggtaccaggcagttaaacgatggaccaagggagtcaacttgttcgaacaggagattattctggtgcctattcaccggaaagtacattggtcgctggtggtcatcgatctgcggaagaaatgtctgaagtacctagattcaatgggccagaaaggacatcgtatatgtgagatcctcttgcaatacctacaagatgagagcaaaacaaagcgtaattctgacctgaatctgttagagtggacgcatcactccatgaagcctcacgagataccacagcagctcaacgggagtgactgcgggatgtttacatgcaagtatgccgactacatttcccgcgataagcctataacctttacacaacaccaaatgccgctgttccgcaagaaaatggtctgggagatcctccaccaacaactgctgtag

SEQ ID NO: 207384 - DNA, 1722 bp, synthetic construct
  misc_feature 1..1722: note = Description of Artificial Sequence: Synthetic coding sequence
  source 1..1722: mol_type = other DNA
atgaaggagaccatccagggcaccggcagctggggccccgagccccccggaccagggatccccccggcctattcctcaccccgtcgagaacgccttcggtggcctcctcccccaaagccaagactgaaaagcggtggcgggttcggaccggatcctggatccggcaccactgtgccagcccggaggttgcccgttcccagaccgtcgttcgatgccagtgcttctgaagaggaagaggaagaagaagaagaagaggacgaagacgaagaagaggaggtggccgcttggaggttaccacctaggtggtcccagcttgggacgtcacagagaccaaggccctcgagaccaacacaccggaaaacatgtagccagaggaggcgaagagctatgcgggcattccgtatgctgctgtattccaaaagtaccagtttgacattccactggaaactgtgggggagacaccgcggtcggaggagggggctagcccaccctaagaaccacctgagcccccagcagggcggtgcaacgcctcaggtgccgtccccatgctgccggtttgatagtccacggggtcctccccccccgcgcctgggcttgctgggcgcacttatggcagaggacggtgtgcgcggaagccccccagtgccgagcggaccaccaatggaagaagatggcttaaggtggacccctaaatcacctctggatcctgattccggtttactctcgtgcaccttgccaaatggatttggcgggcagtctggtcccgagggggagagaagcctagctcctccagacgccagtattctaatttccaacgtctgctctattggagaccacgttgcacaagagttgtttcagggatctgatctcgggatggcggaagaagccgagcgacccggggagaaggccggccagcacagccccctccgcgaagagcacgtcacctgcgttcagagcattcttgatgaattcctgcaaacctacgggagtctgatccccctttccacagatgaggtagtggagaagctcgaagatatctttcagcaggaattctcaacacctagtaggaaggggctggtactgcagctgattcagtcctatcaaagaatgcccgggaatgccatggtgaggggatttagggtggcttataagaggcacgttctgaccatggacgatctggggacattgtatgggcagaactggctcaatgatcaggtgatgaatatgtatggagacctggttatggataccgttcctgagaaagtgcacttcttcaatagtttcttttatgacaaattacggaccggctacgatggcgtgaaaagatggactaaaaatgtggatatatttaataaggaactgctgctaattcccattcacttggaggtccactggtccctgatcagtgtagatgttaggcgcagaactatcacgtactttgacagccaacggaccctgaaccggaggtgcccaaagcatatcgccaagtacctccaagctgaggccgtgaaaaaggatcgcttggactttcaccagggatggaagggatactttaaaatgaatgtggccaggcaaaacaacgactcagattgcggcgccttcgtgcttcaatactgcaaacacctagcactgagtcagccatttagtttcacacagcaggacatgccaaagctgcgccgacagatatacaaagagttgtgtcactgcaaattgacagtttag

SEQ ID NO: 207385 - DNA, 1725 bp, synthetic construct
  misc_feature 1..1725: note = Description of Artificial Sequence: Synthetic coding sequence
  source 1..1725: mol_type = other DNA
atgaaggagaccatccagggcaccggcagctggggccccgagccccctggcccaggtattccgcccgcttattcaagccccaggcgcgaacgactgaggtggccaccacccccaaagcccaggttaaagtccgggggtgggttcggcccagatccaggctccggaaccaccgtgccagctaggcgcttgcccgtaccaaggccttccttcgatgcatccgcatctgaagaggaggaggaagaagaagaggaagaagatgaagatgaggaggaagaagtggcagcttggaggttaccaccacggtggagccagttgggcactagccaaaggcccagacccagtcgccctacacatcgcaaaacgtgcagccagaggcgccggagggcaatgagggcattcagaatgctcctgtattccaagtctactagcttaacattccattggaagctatggggcaggcaccgagggagacgaagagggctcgcccaccccaaaaaccatctgagtcctcagcaggggggagctacgccacaggtaccaagcccttgctgcagatttgactccccacggggcccaccacctccgcgactagggctgctcggtgctcttatggccgaagatggcgttcgcgggtctccccccgtcccgagcggtcctcctatggaggaggacggactgcggtggacccctaagagcccactcgacccggacagtggccttttatcttgtacccttcctaacggcttcggtggccagtccggccccgagggagaaagatcgctagcacccccagatgcgtctattcttattagcaacgtgtgctccatcggggatcatgtcgcccaggaattattccaggggtcagacctggggatggcagaagaggccgaacggcctggcgaaaaggccgggcagcattctcccctgcgcgaagagcatgtcacctgtgtgcagtcaatcttggacgagtttttacagacatatggctccctcatccccctatccacagacgaggtggtcgagaaactcgaggatattttccagcaggagttcagcaccccaagcagaaaaggtttggtcttacagctgattcagagctatcagcgcatgccgggtaatgccatggtacggggattccgggtcgcttataagcgccatgtgctcacaatggatgatctggggacgctgtatggccagaactggttgaacgaccaggtaatgaatatgtatggcgacctggtcatggacacagtccctgagaaggtacacttcttcaactctttcttttatgataaattacgtactaagggatatgacggtgtaaagaggtggacgaaaaatgtcgatatcttcaacaaagaactgctgctgatacctattcacctggaggtgcattggagcctgatatccgtcgacgtgcgccgcaggactatcacctacttcgattcccagaggactctaaatagaaggtgccctaagcacatagccaagtacctgcaagccgaggccgttaagaaagataggctggattttcaccagggttggaagggatatttcaagatgaatgtggccaggcagaataacgattccgattgtggagcctttgtcctgcaatattgtaaacacctggcactttcgcagcctttttcgtttacacagcaggacatgcccaagcttcgtaggcagatttataaggagttatgtcactgcaagcttaccgtatag

SEQ ID NO: 207386 - DNA, 3741 bp, synthetic construct
  misc_feature 1..3741: note = Description of Artificial Sequence: Synthetic coding sequence
  source 1..3741: mol_type = other DNA
atgatggagaccgagcggctggtgctgcccccccccgaccccctggatctgccattgcgggccgtggagttaggttgcactggacactgggaactactgaatctaccaggtgctccagaatctagccttcctcatggcctgcctccttgcgctcccgatctgcagcaggaggctgaacagctctttctgtcaagcccggcttggctgccactgcatggtgtggagcactcagccaggaaatggcagaggaagaccgatccgtggtctctgttggcggtgctgggcgccccggtgcctagtgatttgcaggcccagcggcacccaactacagggcagatcctcggctacaaggaggtgcttctcgagaacactaacctttccgctactacaagtctttcactgcggcggcctcctggtcccgccagccagagtttgtgggggaatcctacgcagtaccctttttggcccggcggcatggacgaaccaaccattaccgatctcaatactagagaagaggctgaggaggaaatcgatttcgaaaaagacctcctgaccattccaccaggctttaagaaaggcatggacttcgcgccaaaagactgcccgaccccggcccctggtctgcttagcctgagttgtatgctcgaacctctggatctggggggcggagacgaagatgagaacgaggctgtagggcagccaggcggaccgcgcggtgacactgtgtccgcatccccttgtagtgctccacttgcccgcgcctcttctctggaagatctggtgctgaaagaggcatcaactgctgtgtccacccccgaggcacctgaaccacccagccaggaacagtgggctatccctgtcgatgccacatccccggtgggtgatttctaccggctgatcccgcagcccgccttccaatgggcatttgagcccgacgtcttccagaaacaggccatactccacttagagaggcatgatagtgtctttgtggccgcccacaccagcgccggaaaaaccgtcgtggcagagtacgcaatcgctctggcacaaaaacacatgactcggacaatctacaccagccccatcaaggctttgagcaatcagaaattccgcgacttcaggaacaccttcggggatgtgggactgcttacaggggacgtccagttacaccctgaagcctcttgtttgataatgaccactgagatcctgagatcaatgctgtattccgggtccgatgtgatacgtgatctagaatgggtcatattcgacgaggtgcattacatcaacgacgtcgaacgcggcgtggtgtgggaagaagtactgatcatgctgccggaccacgtgtcaatcatccttctttccgcaaccgtgcctaacgccctggaattcgcagattggatcggccgcttgaaaagacggcagatttacgtgataagtacagtcacacggcccgtccccctagagcattatctgtttaccgggaattcctctaagacccagggagagctgttcctgttgctggactcacgaggagcttttcacaccaagggctattacgctgccgtagaagctaagaaggagcgtatgtctaaacatgcacagactttcggagcgaaacagcccacccatcagggaggaccagctcaggacaggggagtctacctgtcgctcctggcctcactccgcaccagagcacaattacctgtggtcgtcttcacattttctcgcggcagatgcgacgaacaggcctcagggctaaccagtcttgatttgaccaccagttctgaaaagtccgaaatccacctctttttgcaacgttgccttgctaggctccgagggagcgatcgacaactgccccaagtgctccacatgtccgagttgctcaatcggggcctgggcgtgcaccacagtggtatcttgcctatcttaaaagaaattgtggagatgctcttctcaagaggtcttgtgaaagtcctgtttgcaaccgagactttcgccatgggagtgaacatgcccgcaagaactgtggtgtttgacagcatgcgcaagcacgatggttcaaccttccgcgatctgcttcccggcgagtacgttcagatggcgggccgtgcgggacggcgcggattggaccctacaggtactgtgatcctgctctgtaaagggcgggttcccgagatggccgatctgcataggatgatgatgggaaagccaagtcagctccagtctcagtttagactcacttatacaatgatcctgaatctgttgagggtggatgcactgagggtggaggacatgatgaaacggagcttctcagagttcccaagtaggaaggatagcaaggcccacgaacaggctctcgcagaactcaccaaacggctgggtgcattggaggagcctgacatgactggtcagctggtggatctccctgagtactattcatggggagaagaactcaccgaaacacagcacatgatacagagaaggatcatggaatcagtgaatggcttaaaatccctgagtgccggcagagtggtggtagtaaaaaatcaggaacatcacaacgccctgggcgtcatccttcaggtgagcagcaattccacaagccgtgtgtttacaaccctggtgctgtgcgataagcccctgagtcaggacccacaggaccggggacccgccacagccgaggtgccatatccggacgatctagtgggcttcaagctctttttgccggaaggaccttgcgaccacactgtcgtgaaactgcagcctggcgacatggcagctatcaccactaaggtcctgcgggtgaatggcgagaaaattcttgaggacttttccaaacgtcagcagccgaagtttaaaaaggatcctcccctggcagctgtcacgacagctgttcaagagctactccgattagcacaggctcatccggcaggaccccccaccctggatcccgtcaacgacctgcagctgaaggatatgagcgttgtggagggcggcttgcgagcacgaaaacttgaggaactgatccaaggcgcgcagtgcgtgcactccccccgcttccccgctcagtacttaaaactgagagaacgcatgcaaatccagaaggaaatggagaggctaagatttctgctctccgaccagagtctattgttgctgcccgagtatcatcaacgcgtagaggtactgaggacgctgggctacgttgacgaagccggtaccgtaaaactggctgggcgcgtggcctgtgccatgtcatcccacgaactgctgctgacggaactcatgttcgacaacgcactgtcaacactccgtcccgaggagatcgccgctctgctgagcggtttagtgtgccagtcacccggagacgcgggtgatcagcttccaaataccttgaagcaggggatagaacgcgtccgtgctgtggctaagaggattggtgaagtgcaagtggcctgcgggctgaaccagaccgtcgaggaattcgtgggagagcttaacttcggcctagtggaagtagtgtacgagtgggcaagagggatgcccttcagcgagctggctggcttgagcggaacacctgaaggcttggtcgtgaggtgtattcaaaggctggctgagatgtgtaggagccttagaggcgctgcccgactggtcggtgagcctgtgctgggagctaagatggagacagctgcgaccctgctgcgaagagatatagtgttcgcggcatccctgtatacacagtag

SEQ ID NO: 207387 - DNA, 3741 bp, synthetic construct
  misc_feature 1..3741: note = Description of Artificial Sequence: Synthetic coding sequence
  source 1..3741: mol_type = other DNA
atgatggagaccgagcggctggtgctgcccccccccgaccccctggacctccctctgcgagctgtagagctgggctgcaccggccactgggagctactgaacctgcctggcgcccccgagagtagcttgccccacggcttgccaccatgtgcccccgatcttcagcaggaagcagagcagttgttcctctcatcgcccgcatggcttcccctccatggagttgagcacagcgctcggaagtggcagcgaaagaccgatccctggtctttgctggccgtgttgggggcacctgtgcctagcgatctccaggcacagaggcacccgacaaccgggcagatcctcgggtataaagaggtgctcttagaaaatacaaacttgtcagcaactaccagcctgagcttacgccggcctcccggcccagccagccagtccctatggggtaatcctacacaatatccattctggccgggcgggatggatgaaccaacaatcacggatctgaacacaagggaggaggcagaggaggagatcgactttgagaaggatttgctaaccattcctccagggtttaagaaaggtatggacttcgctcctaaggactgccccacccctgccccaggattgctgagcctttcttgtctactggaaccactcgacctaggtggtggcgacgaagacgagaacgaagccgtcggacagccggggggcccacgcggagacaccgtgtccgcctcgccttgcagcgccccactggccagggcatccagccttgaagatctggtgctcaaagaagcctcaactgcggtatctactcccgaggcccccgaacctccctcccaggagcaatgggctattccagtcgatgccacgagtccagtaggtgacttttacaggctgattccgcaacctgcctttcagtgggccttcgaacctgacgtttttcagaagcaggctatactgcacctggagcgacacgattcggtgtttgtggcagcccacacttccgccggaaaaacagtcgtcgccgagtatgcaatcgcgcttgcacagaaacacatgacccgaactatatatacaagtccaattaaagcactctctaatcagaagtttagagattttaggaatactttcggggatgtgggacttcttactggcgacgttcaactgcaccccgaagcgagttgcctcattatgaccaccgagatcctcaggtccatgttgtacagcgggtccgacgtgattagagacttagagtgggttattttcgacgaggtacattatattaatgatgtggagcgaggcgttgtgtgggaagaggtgcttataatgctgcccgaccacgtcagtattatcttgttaagtgctactgtcccaaatgcactggagttcgctgattggatcggcagactcaaaaggagacagatatacgtaatttccactgtgactcggcctgtccccttggaacactacttatttaccggtaacagctctaaaactcaaggagaactgttcctactcttagactcgagaggggcttttcatactaagggctactatgccgctgttgaagccaagaaggaacgtatgagcaagcacgcccagacttttggcgccaagcagccgacccaccaaggcggacccgcccaagatcgcggggtgtatctctcgcttctcgccagtcttagaacaagagcgcaactgccagttgtcgtttttactttctcacggggtcgctgcgacgaacaagcatcaggcctgacatcgcttgacctcactacttcctccgagaagtctgagattcacctgtttttacagcggtgcctggctcgcttgcggggctcagacagacaattgccccaggtccttcacatgtccgagctcctcaaccgcggtctgggagtgcaccactcaggaatcctacccatcttgaaagagatcgtcgaaatgttgtttagccgcggtctggtgaaagtcctattcgcaaccgagacctttgctatgggtgtgaatatgccagctcgaacagttgtgtttgatagtatgaggaagcatgacgggtccacttttcgcgatctgctccctggcgagtacgtgcagatggccgggagagcgggccgcaggggccttgatccaacaggcacagtgattctgctgtgtaaaggtcgtgtgcccgaaatggccgacctgcacaggatgatgatgggaaaaccaagccaactgcagtcgcaatttcggttgacatacactatgatccttaatttgctgcgagttgatgcattacgtgttgaggatatgatgaaaagatcattttctgagttccctagccgtaaagactctaaggcacacgagcaggcactggccgagctaacgaagcgcctcggggccttagaagagccggatatgaccggacagctggtcgacctgcccgagtattatagttggggagaagaactgacagaaacccaacatatgatccaaaggagaatcatggagagcgtcaatggtttaaagtctctgagtgctggaagggtggtcgtggtaaagaatcaagaacaccacaatgccctgggcgtcatactgcaggtgagttcgaacagcacctcacgggtttttaccactcttgtgctctgtgataagccactgtcacaggatccccaggatagggggcctgccacggccgaggtcccatacccagatgacctggttgggttcaaattgtttctgcctgagggcccttgtgaccacacagtggtgaagcttcagccgggcgatatggccgctatcactaccaaggtgctgagagttaacggagagaaaattcttgaggacttcagcaaaagacagcagccaaaatttaagaaggacccgcccctcgcggctgtcacaacagccgtccaagaactcctccgccttgcccaggcccacccagctggaccaccaactctggacccagtaaatgacctgcagctgaaagatatgtccgtggtggagggcggccttcgagcgaggaaactggaagagctaatccagggagctcaatgcgttcacagccctcggtttcctgcgcaatatttgaagttgagggaaaggatgcagatccagaaagaaatggaacgtttgcgattcctgctgtcagaccagtcgctactactccttccagaatatcatcagcgagtcgaggttcttcgaactcttggctatgtggacgaagcaggcactgtaaagctagctggccgggtggcctgcgccatgtctagccatgagttgttgctcaccgagctgatgttcgataatgcactaagtacattacgaccggaagaaatcgctgcgttgctgagtgggcttgtctgccagagccccggagatgccggagaccagctgcctaataccctgaagcagggaattgagcgcgttcgtgctgtagcaaagaggatcggcgaggtacaggtggcatgtgggctcaaccagaccgtagaagagttcgtcggcgagctcaattttggcttggtggaagtcgtgtacgagtgggctcggggtatgccattcagcgagctagccggcctaagcggtacacctgaaggtctggtggtgcgctgcatacagcgtttggcagagatgtgcagaagcctccgcggcgccgctcgtctcgtcggggagccagtcctgggagccaagatggagaccgccgctacactgttgcggagagatattgtctttgctgcgtcactgtacacccagtag

SEQ ID NO: 207388 - DNA, 3741 bp, synthetic construct
  misc_feature 1..3741: note = Description of Artificial Sequence: Synthetic coding sequence
  source 1..3741: mol_type = other DNA
atgatggagaccgagcggctggtgctgcccccccccgaccccctggacttgcctctgcgtgcggtggagttgggctgtaccggccactgggagctgctgaacttacctggagcacccgaatcatccttaccgcatgggctccctccctgcgccccagacctccagcaggaagctgaacagttgtttctgtccagccctgcctggctgccactgcacggggttgagcacagtgctcgtaagtggcagagaaagaccgacccctggtctctgctagcggtgctgggggcacccgtcccttccgacctgcaggctcaaagacacccgaccacaggacaaattctcggctacaaagaggtactgctggaaaataccaacctctctgccacaacatctctctctctccgcaggccccccggacctgcctcccagagtctgtggggaaatccaactcagtaccccttttggcctggcggaatggacgagcctactataactgatttaaacaccagggaagaagctgaagaggagatcgactttgagaaggacctgctcacaattcccccaggctttaagaagggaatggattttgccccaaaagactgtcccacaccggcccccggtttgttgagcctctcgtgtctgttggagccattggacctagggggcggcgacgaagacgaaaacgaggctgtgggacagcctggggggccccggggcgatactgtgtcagcctccccgtgttcagccccccttgccagggccagctctttggaggatctggtgcttaaggaagcttctactgccgtctccacacccgaagcccctgagccaccttcacaggaacaatgggcaatccccgtcgatgcaacctccccagtgggggacttctatagattgatcccccagccagctttccagtgggcattcgagccagatgtctttcagaaacaggccattctccacctggaacgtcatgacagcgtgtttgtcgccgcccacactagcgcgggaaaaaccgttgttgcagagtacgccatcgctctggctcagaagcacatgacaagaacaatctacacctctccaatcaaagcactgtctaatcagaagtttagggacttcaggaacaccttcggcgatgtgggactgctgacaggggacgtccagttgcacccggaggcttcatgcttgatcatgaccactgagattctgcgctccatgttgtatagcggcagcgacgtcatccgagacttggagtgggttatctttgacgaagtgcactacatcaatgatgttgagcggggtgtggtctgggaggaagtattaattatgttgccagaccacgtgtccatcatccttctaagtgctactgtacccaatgccctagagttcgctgactggatcggaagactgaagagacggcaaatatacgtcatatccactgttacaaggcccgtcccactggagcactatctgtttaccggaaacagctcgaaaacacagggtgagctgttcttgcttctcgatagcagaggcgcctttcacaccaagggctattacgccgccgtagaagctaagaaagaacggatgagtaagcacgctcagacatttggcgccaagcagcctacccatcagggtggtcccgcacaggacaggggcgtgtacctgagcctcctggcatcgttgagaacccgcgctcaacttcccgtcgtggttttcacctttagtagagggagatgcgacgaacaagccagcggcctgacttccctagatttaactacgtcctctgagaagagcgaaatccatttatttctacaacgctgtctggcccgccttagagggtctgaccgccagctacctcaggtcctccatatgtcggagctgctgaaccgaggtctaggcgtgcaccattctggcatacttcccatcctaaaagagatcgtggagatgctgtttagccgcggtttagtaaaagtcctattcgcaacagagaccttcgccatgggagtgaacatgccagcccgcacagtggtctttgactccatgagaaagcacgatggctctacctttcgcgatctactacccggcgaatacgtccaaatggctggcagggcaggacgcaggggcctggatccaaccggtaccgtgatcctgttatgtaagggaagggttcccgagatggcggacttacaccgaatgatgatgggaaaaccaagccaattgcaaagccagtttagactcacttatactatgattcttaacctgctgagagtggacgcgctgagggtggaagacatgatgaaacgatccttctccgaattccccagtcgtaaggattccaaagcacatgagcaggccttagccgagcttacaaaacggctgggggccctcgaggaacctgatatgaccggccaactcgtagatctgccagaatattattcctggggagaagagcttaccgaaactcagcacatgatccagaggcgcatcatggagtccgttaacggactgaaaagcctatccgccgggagagtagtagtagtaaagaaccaggagcaccacaacgccttgggcgtgatccttcaggtttcgtctaactcaactagccgagtgttcacaacccttgtcctatgtgacaaacctttgagccaggatccacaagataggggacctgccacagctgaggtcccttatccagacgacctcgtgggctttaagctatttctacctgagggaccctgcgaccatacagtggtcaagctgcagcctggggacatggcagccataactacaaaagtgctgagggtgaacggggaaaagattctggaggacttctccaaacggcagcagcctaagtttaaaaaagacccccccctggctgccgttactactgctgtccaagaattattacgactggcccaggcacacccggccggccccccaaccctcgatccggtgaacgacctccagcttaaggacatgtctgttgtggagggaggactgagagcgaggaaacttgaagaactgatccaaggggcccagtgtgtgcattcacctcgatttcctgcccaatatttgaagttgagggagagaatgcaaattcagaaggaaatggagcggttgagatttttgctgtcggatcagagcctcctcctcctgcccgagtaccaccaaagagtggaagtgctgcgaaccctggggtatgttgacgaggcaggaaccgtgaaactggctggcagggtggcttgtgccatgagctctcacgagctgcttcttaccgagctgatgttcgataacgcactgtcaacactacgccccgaggagattgccgcactgctgtcagggttggtctgtcaaagcccaggggacgcaggagaccagctgccaaacacactgaagcagggcattgagagagtaagagcagtcgcaaagaggattggggaagtccaggtcgcctgtggcctgaaccagactgtcgaggaatttgttggcgaacttaatttcgggttggtggaggttgtctacgagtgggcccggggcatgccctttagtgagcttgctggtctctccggcacacccgagggactcgtcgtgcggtgcatccagagactagctgagatgtgccgaagcttgcggggtgccgcccgcctcgtcggcgagcctgtcctcggggcgaagatggaaacggcagccactctgctccggcgggatatcgtgtttgcagcctctctttacactcagtag

SEQ ID NO: 207389 - DNA, 3741 bp, synthetic construct
  misc_feature 1..3741: note = Description of Artificial Sequence: Synthetic coding sequence
  source 1..3741: mol_type = other DNA
atgatggagaccgagcggctggtgctgcccccccccgaccccctggatctgcctctacgtgcagtcgaattggggtgcaccggacattgggagctgttgaacctgccgggcgcccctgagagcagtctgccacacggtttaccgccatgtgcacccgaccttcagcaggaggcagaacaattgttcctctcctcgcctgcgtggctgcctctgcatggggtggaacatagcgctcggaagtggcagcggaagaccgatccatggtctctcctcgcggtccttggggcccccgtcccatctgacttgcaggcccagcgccaccccaccacaggccagatcctcggctataaggaggtgctgctggaaaacacgaatctctccgcgacgacttcactgtcccttaggaggcccccaggcccggcatcccagtcactgtggggaaatcccacacagtatcctttttggcccgggggaatggatgagcctaccattacggatcttaacacacgggaggaggctgaagaggaaatagacttcgaaaaggacctgctgacaatcccccccggctttaaaaagggtatggatttcgctcccaaagattgcccgacgcctgcacccggcctgctgagtctcagctgtctgttagagcccttggacctgggcggcggcgacgaggacgaaaatgaagctgtcggccagcccggaggacccaggggcgacaccgtgtccgcttcaccctgtagtgctcctttggcaagagcgagcagcctggaggaccttgtattaaaagaggcaagtaccgccgttagcacacccgaggctccagagcctccatcccaagagcagtgggcaattcccgtcgatgcaacgtcacctgttggagacttttatcggctcattccccagcccgcattccagtgggccttcgaaccagacgtcttccaaaagcaggccattcttcaccttgaacggcacgactctgtatttgtggcagctcacacatccgccggcaaaactgtggtggctgaatacgcgattgcactggcccagaagcacatgactcggaccatttacaccagtcctatcaaagccttgtccaatcagaaattcagagatttccgcaatacttttggggatgtgggcctgctgactggggacgtgcagctgcaccccgaggcatcctgcctgattatgaccacagagatcctacgaagcatgctgtattcagggagtgacgttatccgagacttggagtgggtgattttcgatgaagtgcactatatcaacgacgtggaaagaggggtggtctgggaagaggttctcattatgctgccggatcatgtgagtattattctgctctcagcaaccgtgcccaacgcattggaatttgcggactggatcggcagactgaaacggcgacagatttacgtgatatctacagtgaccagaccggtacccctggagcattacctgttcactggtaattccagcaagacacaaggagagctgttcttgctgctcgactctaggggagctttccacactaagggctactatgcagccgtggaagcgaaaaaggagcggatgtccaagcacgcccagacctttggagctaagcaaccaacacaccaaggaggacctgcccaggatcggggagtgtacctttcccttctagccagccttcgcacaagggcccagttgcctgttgtggtgttcacctttagccgaggacgctgtgatgagcaggcctccgggctgacgtccttggacctcaccacaagctcagagaagtcagaaattcatctgttccttcagaggtgcttagcccggctccgcggaagtgacagacagctgcctcaggtgcttcacatgagcgaattacttaacaggggacttggcgttcatcatagtggaattcttcccatcctgaaagagattgtagaaatgctcttcagccgcgggctcgtgaaggtcttgttcgctactgaaacctttgccatgggtgtaaacatgcccgctagaaccgttgtttttgacagcatgcgcaagcacgatggctcaactttccgcgatctcctgcctggggaatatgtgcagatggccggtagggccggccggaggggcctggaccctacgggcactgttatcttgctgtgcaagggaagagtgcccgaaatggcggatctacaccgtatgatgatggggaagcccagtcagttgcaatcccaatttcggcttacctataccatgattctgaatctcctccgtgttgacgcactccgtgttgaggacatgatgaagcgctcattttccgagttccccagcaggaaggactcaaaagctcacgaacaggccctcgcggagctcaccaaaagactgggtgcgctggaggaacccgacatgaccggccagctggtggacctcccggagtattactcctggggagaagagctgacggaaacccagcatatgatccaacgcagaatcatggagagcgtcaacggcctgaagtctctcagcgctggccgagtggtcgtggtcaaaaaccaggaacaccacaatgccttgggggtgatactgcaggtgagcagcaattccacaagtagggtgtttactaccctagtgttgtgcgacaagccactgagccaggatccacaggacaggggccccgccacagccgaggtgccttacccagatgatctcgtgggctttaaattgttcctgcccgaggggccttgtgatcatactgtcgtgaagttacagcccggcgatatggctgctatcactacaaaagtgctgagggttaatggggaaaagatcctggaggattttagtaagcggcaacagcccaagtttaagaaagaccctccgctggccgcagtaaccacagccgtgcaagaactactgaggctcgcacaggcccaccccgctggaccacccacgttagatccagtgaacgatttgcaactcaaagacatgagtgtggtcgaggggggattgagggctcgtaagctggaggagttgatccagggtgcccagtgcgtgcattcgccaaggtttcccgcacaataccttaagctgcgggagcggatgcagattcagaaggagatggaaagactccggttcctgttatccgaccagagcctcctgctgctgccggagtaccaccaacgcgtggaagtcctccggaccctgggttacgtggacgaggcggggaccgtcaagctagcagggcgagtcgcgtgcgctatgtcctctcacgagctgctcctaaccgagctcatgtttgacaacgccctgtcgacgctgaggccagaagagatcgccgcccttctgtccggattggtgtgccaatctcctggcgacgccggcgaccagctccccaacaccttaaagcaaggtattgaaagagtccgggctgtcgccaagcggattggcgaggtccaggttgcttgtggcctgaatcagaccgtggaagagttcgtcggagaactcaattttggactggtggaggtggtctatgaatgggctaggggaatgcccttttcagagcttgctggattatctgggacgccagaaggtctggtagtgcgatgcatacaacgcctagctgaaatgtgtcgctccctgcgaggcgcggcccggctcgtcggggaaccggtcctgggggcaaagatggagactgcggctaccttactcagaagggatatagtgttcgctgcctcgctttatacccagtag

SEQ ID NO: 207390 - DNA, 3741 bp, synthetic construct
  misc_feature 1..3741: note = Description of Artificial Sequence: Synthetic coding sequence
  source 1..3741: mol_type = other DNA
atgatggagaccgagcggctggtgctgcccccccccgaccccctggatctccccctgagggcagtggagctcggttgtacgggtcattgggagctactcaacctcccaggggccccggaaagcagcctgccccatgggcttccaccttgcgctccagacctgcaacaggaggccgagcaattattccttagttcccctgcttggctgccccttcacggagtggagcatagcgcccgcaagtggcagcggaagaccgatccatggtccctcctagcagttttgggagctccggtaccctctgatctgcaggcccagcgccatcccacgacaggacagatcctgggatataaggaggtattgctggaaaatactaacttgtccgctaccacgtctctgagcctgcgaaggccacccgggcctgccagccagtctttgtggggtaatcccacccagtatcccttttggcccggcggaatggacgagcctaccatcacagacctcaacacgcgggaagaagctgaggaggaaatcgactttgagaaagacttgctgacaattcctccaggctttaagaagggtatggatttcgctccaaaagattgcccgacaccagcccctggcctattgagcttgtcttgcctcctggagcccctggacctgggggggggggacgaagacgagaatgaagcagtcgggcagccgggaggccctcgcggtgatacagtcagcgcctcaccctgcagcgccccactcgcccgtgcatcctctctggaggatctggtcttgaaagaggcaagtactgccgtgtctacacccgaggccccagagcctcccagccaggagcaatgggcaatacctgtagacgccacaagccccgtgggtgatttctataggctgattccacaacctgctttccaatgggcatttgagcctgacgtgtttcaaaagcaggccatcctacacctcgaacgtcatgactccgtcttcgtggcggcccacaccagcgctgggaaaacagtggtcgctgagtacgcaatcgcgctggctcagaagcacatgacgcgcacgatctacactagcccgatcaaggccctatccaaccagaaattcagagactttcgtaacactttcggcgacgtgggactgcttactggtgatgtacaattacacccagaggcctcctgcctcattatgacaacggaaatactcagatccatgctatatagcggatctgatgtgatccgggacttggagtgggtgattttcgacgaggtacattacataaatgacgtggagagaggcgtcgtctgggaggaagtcctcattatgctccccgatcatgtatctattatacttctgtccgccactgttcctaacgcactagagtttgcagattggattgggcggctaaagagaaggcaaatatacgtcatcagtaccgtcactcggcccgtgcctctggagcattacttgtttactggaaattcatccaaaactcagggtgagctgttccttctgctagattcccggggcgccttccacacaaagggctattacgccgctgtggaagccaagaaagaacgaatgtccaagcatgctcaaacctttggcgccaaacagcccacacatcagggaggcccagctcaggaccgcggggtatacctttcattgctggcttcactgagaacgagggctcagctgccagtcgtggtgtttacttttagcagaggcagatgtgatgaacaagcgagcggactgacatccctcgaccttactacgtcttctgaaaaatccgaaatccatcttttcctgcagagatgtctagccaggttgaggggctcagacaggcaactgcctcaggtgctgcatatgagcgagttacttaaccgaggtctgggtgtgcatcattccggaatcctccctatcctgaaggagatcgtcgaaatgctcttttctaggggtctggtaaaggtgcttttcgccacggagaccttcgccatgggcgttaacatgcccgctaggacagttgtcttcgactccatgaggaaacacgatggctcaacattccgcgacctgctgccgggtgaatatgtgcagatggccggccgcgctggtaggcgaggcttagaccccactgggacagttatcttactttgtaagggaagggtgccggagatggcagatctccatcgcatgatgatgggcaaaccgagccagcttcagagccagtttagactgacatatacaatgattcttaatttgctgcgggtggatgcgctgagggtggaggatatgatgaagagatcattcagcgagtttccttccaggaaggattctaaggcccacgaacaggccctggctgagctgacgaagcggctgggggcactggaggagccagacatgacaggacagttagtcgatctacccgaatattattcttggggcgaggaactgactgaaactcaacacatgatccagcgaaggatcatggagagtgttaatggcttgaagagcctgtcggccggacgtgtggtggtggtgaagaaccaggaacaccacaatgccctgggtgtgatcctccaagtctcaagtaattccacttctcgagtgtttactacacttgtgctgtgcgataagcccctgagtcaggatccacaggaccgtggacctgcaacagccgaggtcccatatcccgatgatctggtggggttcaagttgttcctgcccgagggcccgtgcgaccacacagtggtgaaactgcagccgggtgacatggctgcaatcaccaccaaagtgctgagggtgaacggcgagaaaatccttgaggatttttcaaagcgtcagcagcctaagtttaagaaagaccccccactcgccgccgtcacgaccgcagtgcaggagctactacggttggctcaggcacaccctgcgggcccgccaaccttggatcctgtgaacgatctgcagttgaaggatatgtccgtggttgagggcggtcttagagcacgtaagctggaggaactcatccaaggcgcccagtgcgtgcacagcccgagatttccggctcaatatttgaaactccgagagcgcatgcagattcagaaggaaatggaacggctgcgatttttgttgtcagaccagtccctgctcctgcttcccgaatatcaccaaagagtggaggtgcttagaaccctcgggtacgtggacgaggcaggcactgtaaagctcgctggcagagtggcatgcgccatgagcagccacgaacttctcctgactgaactcatgtttgataacgctttgtctaccctgcgaccagaggagattgccgctctgttgagcgggctcgtgtgtcaatcccctggtgacgccggagatcagctgccaaatactttaaaacaggggattgagcgtgtgcgcgccgtcgccaaaaggattggcgaggtgcaggtagcgtgcgggctgaaccagaccgttgaagaattcgttggcgagctgaactttggcttggttgaagtggtatacgagtgggcgcgcggcatgccattctcagagctggctggcctgagtggcacacctgaaggattagtggtgagatgcatacaaagactggctgagatgtgcaggtccctacgaggagctgccagactcgtgggtgagcctgtgctcggcgctaagatggaaactgccgcaaccctcttgcggcgagacatagtgttcgctgcatcactttatactcagtag

SEQ ID NO: 207391 - DNA, 3267 bp, synthetic construct
  misc_feature 1..3267: note = Description of Artificial Sequence: Synthetic coding sequence
  source 1..3267: mol_type = other DNA
atggacgagcccaccatcaccgacctgaacacccgggaggaggccgaggaagagatagactttgagaaggacctccttaccataccccctgggtttaagaaggggatggactttgcgcccaaggactgccctacccccgcaccaggacttctatccctctcctgcatgctggagccgctagacctgggaggaggcgatgaggacgagaacgaggctgtgggtcagccaggcgggcctagaggagatacggtatccgcttccccctgctccgcccccctggcaagagcttcttccctcgaggatctggtcctgaaagaagcctctaccgcagtgtccaccccggaggcccctgaaccccctagccaggagcagtgggcgatccctgttgacgccaccagccctgtgggcgatttttacagactcattccccaaccagcctttcagtgggcattcgagcccgatgtctttcagaagcaagcaatcctgcacctggaacgccacgattcagtgttcgtggccgcccatactagtgctggcaaaaccgttgtcgctgaatacgcaattgccctggctcagaaacacatgactcggacaatttacacctctcctattaaggctctgagcaaccaaaagttcagagactttcggaatacttttggggatgtggggctgttgaccggcgacgtccagttacaccctgaagcgagctgcctcataatgaccacagagatcttaagatccatgctgtactctggatccgatgtgatcagggacctggaatgggtcatcttcgatgaagtccactacatcaacgatgtggagagaggcgtcgtctgggaggaagtcttgatcatgctccccgatcatgttagtataatcttgctaagcgccaccgtccccaacgctctggaattcgcagactggatcggtcgactcaagcggcgccagatttacgtgattagcacagtcacaagacccgtaccattggagcactatctgtttacaggcaactcttctaaaacacagggcgaactctttttactgctggacagtaggggggcctttcatactaaggggtactatgctgcggtggaagctaagaaggaacgcatgtctaagcacgctcagacctttggcgcgaaacagccaacccatcagggtggccctgctcaggatcggggagtatatctcagtctgttggcaagtctgcgtacaagagcccagctgccagtggtggttttcaccttctcgaggggccggtgcgacgagcaggccagtggcctgacttccctggaccttacaaccagtagtgagaagagcgagatccacctttttctgcagagatgcctcgcgcggctgcgagggagtgaccggcaattgccccaggtattgcatatgagtgagttgctgaataggggactgggagtccaccactccggtattctgcctattctgaaagaaatcgtagaaatgttgttctctagaggactagtgaaggtgcttttcgccaccgaaaccttcgcaatgggagtgaatatgcctgcacggacagtcgtgtttgattctatgaggaagcatgatgggtcaaccttccgggacctactgcccggcgaatacgtgcagatggctggaagagctggccggagagggctggacccaaccgggacagtgatcctgctgtgcaaaggacgagtgccagaaatggccgatctgcaccgcatgatgatgggaaagcctagccagctgcaaagccaattccgcctgacatacacaatgattctgaatttgctgagagtggatgccttaagggttgaagatatgatgaaaaggtctttctccgaatttccaagtcgaaaagattcaaaggcccatgaacaggcactagctgagctgaccaagcgcctgggagccctcgaagagcctgatatgaccggacagctagtggaccttcctgagtactacagctggggcgaggagttgaccgagacccaacacatgatccagcgccgtatcatggagtccgtcaatgggctaaaaagcctgtccgctggtcgagttgtggtggttaaaaaccaagaacaccacaatgccctcggtgtgattttgcaggtaagttctaactccactagtcgggtctttacaacattggtcctctgtgacaagcccctaagccaggatccccaggatcgtggcccggccactgccgaagttccatatccggacgatctagtgggctttaagctattcctaccagagggaccatgtgaccacaccgtggtgaagctacagcctggagatatggcagctattaccacgaaggtcctgcgagtcaacggcgaaaaaatccttgaggacttcagcaaaaggcagcagcccaaattcaaaaaagaccctccactggccgctgtgaccacagccgtacaggagttactgagactggcacaggcgcatcccgccggaccacctaccctggaccctgtcaatgacctgcagctcaaggatatgtcagtggtggaaggggggctgagggctaggaaactggaggaacttatccagggcgcccagtgcgttcacagtccacgtttcccggcccagtacctcaagcttcgagagcggatgcagatccagaaagagatggagaggcttcggtttttactcagtgaccaatcactcctgctgctccctgaatatcatcagcgcgttgaggttctgcggacgctgggttatgtggacgaggcggggacagtgaaactggccggacgcgtggcgtgcgcaatgtcttcccacgaacttctcctgacggagctgatgttcgacaacgccttgagcacactgagacctgaggaaatcgcagcactgctgtctggcctcgtgtgccaatcacctggcgacgctggtgatcagctgcccaacaccctgaagcaggggatcgagcgcgttcgcgcagtagctaaacgaatcggcgaagtacaggtggcatgtgggctgaaccagacagtagaggaatttgtcggagagctgaacttcggtctcgtggaagttgtctatgagtgggctaggggcatgccttttagtgagctggccgggctgtccggcactcctgaaggcctggtggttagatgtattcagcgcttggccgagatgtgccgctcactgcgaggagcagctaggctcgttggagagcccgtgctcggggccaagatggagactgctgctactcttctgcgcagagacatcgtgtttgctgctagtctgtacacacaatag

SEQ ID NO: 207392 - DNA, 3741 bp, synthetic construct
  misc_feature 1..3741: note = Description of Artificial Sequence: Synthetic coding sequence
  source 1..3741: mol_type = other DNA
atgatggagaccgagcggctggtgctgcccccccccgaccccctggacttaccattacgtgcagtagaactgggctgtaccggacattgggaacttcttaacctgccgggagcccccgaatccagtctaccccatggcctgcccccatgcgccccagatctccagcaggaggccgagcagctgttcctcagttctcccgcctggctgccactacatggcgtagagcatagtgccaggaagtggcagcgcaagaccgacccttggtctctgctggccgttttgggtgcccctgtgcctagcgatctccaggcgcagaggcaccctactactgggcagattctggggtataaagaagtgttgctggaaaataccaatctgagcgcaaccacctccctgagcctgcgacgccctccggggcctgcctcacaaagtttgtggggcaatccgacacagtatcccttctggcctggagggatggatgagcctacaatcacagatctgaacacgagggaggaagctgaggaagagatcgacttcgagaaagacttgctcactatccccccaggcttcaaaaaaggcatggattttgcaccaaaagactgccccaccccagcgcccggtctattatcattaagttgtatgttggaacctctagatttgggtggaggggacgaggatgaaaacgaagccgtcggtcagcccggtgggcccagaggagataccgtgagcgcttctccctgttccgcacctttagcacgggccagctcactagaagacctggtgctgaaagaagccagcacggccgtgagcacccccgaggcccctgagccacccagtcaggagcaatgggccatccccgtggatgctacatctccagtcggcgacttctataggttgattccgcaacccgcttttcagtgggccttcgaacccgacgtgtttcaaaaacaggcgattttgcacctggagcgccacgactcagtgtttgtggcggcccatacgtcagcaggcaagactgtcgtggctgagtacgctattgcgctggctcagaaacatatgacacgaactatctatacctcaccgatcaaggccctcagtaaccagaagtttcgcgatttccggaataccttcggcgatgtgggcctcttgaccggagacgtgcaattgcaccccgaggctagctgcctcatcatgacaacagagatcctgaggagcatgctctattctggctcagacgtgatccgtgatctcgaatgggtgatcttcgatgaggtgcactatatcaatgacgtggagagaggcgttgtctgggaagaagttctcatcatgttacccgatcacgtgtctatcatcctccttagtgctacagtcccaaatgcactggaatttgcggactggatcggtagattgaaaaggcgccaaatatacgtgattagtacagttacaaggcccgttcccctcgagcactaccttttcacgggtaactcaagtaagacacagggcgagttgttcctgcttctcgatagcagaggggcgttccatacaaaaggctactacgcggccgtggaagcaaagaaagagagaatgtccaagcacgcacagaccttcggcgctaaacagccgacacatcagggtggccctgctcaggatcgaggggtgtacttgagtctccttgcctctttgcgcacaagggcacaattacccgtggtcgtgttcaccttttccagaggacggtgtgatgagcaggcttctggactcacgtctcttgacctgaccaccagcagtgagaagagcgagatccatctctttctccagcgttgcctggctcgcctccggggctccgaccggcagctgccccaagtgttgcatatgagtgagctactgaacagagggctgggggttcaccattcagggattctgccaattctgaaagagatagtcgaaatgttattctcccgaggactcgtgaaagtccttttcgccaccgagacctttgcaatgggcgtcaacatgccagccagaacagtggtcttcgactccatgaggaagcatgatggctcaacgtttagagacctcctgcctggggagtacgtgcagatggcagggagagcgggccgaaggggcttagatcccactgggacggtcatattgctctgtaagggccgggttcccgagatggcagacctacataggatgatgatgggcaagccttcccaacttcagagtcagtttcgtcttacatacacgatgatccttaaccttctccgtgtcgacgccttaagagtcgaggatatgatgaagaggtctttctcagaattcccctcgcgtaaagattcgaaggcccatgagcaggcactggccgaactcacaaaacgcctgggagccctggaagagccggacatgactggacagctggttgacttacctgaatactattcatggggcgaagagttgactgagactcagcacatgatccaacgcagaatcatggaaagtgtgaacggcttaaagtcactgtctgccggcagggtggtagttgtaaagaatcaggaacaccataatgctcttggagtgatcttgcaagtgtcctcaaattcgaccagcagagtatttaccaccttagtgctgtgtgataagcctctgagccaggatccccaagatcggggaccagctacagccgaagtcccataccccgacgatcttgttggcttcaaactattcctcccagaagggccatgtgatcataccgtggtcaaactgcagccaggtgacatggctgctatcaccactaaggtcctgagagttaatggggagaaaattctggaggacttttccaaacggcaacagcctaaattcaaaaaggatcctcccctggcagcggtaacaactgctgtacaagagctgctacgcctggcccaggcccacccagcaggccccccaacactggatcctgtcaatgatttacagcttaaggacatgtcggtggtggagggggggctgagagcacgtaagctggaggagttgattcagggggcccagtgtgtgcattctcctaggttcccggctcagtaccttaaactccgggaacgtatgcagattcaaaaagagatggagaggctgcgcttcctcctctcggatcagagtttgctgttgttacccgagtatcaccagcgcgtagaggtgctccgaacgttggggtacgtggatgaagccgggactgtcaaattagccggacgcgtggcatgtgcgatgtcatcgcacgagctgcttctgacagagctcatgtttgataatgccctgtccaccctgaggcctgaagagattgctgccctcctaagcgggctggtgtgccagtctccaggtgatgccggggatcagctgccgaatactctgaaacagggaattgaaagggtgcgggctgttgcaaagcgaatcggtgaggttcaggttgcctgtgggttgaaccaaacagtggaagagtttgtcggcgagcttaactttggcctagttgaagtcgtatatgagtgggcacgggggatgccattttccgagctggccggcttgagcggtacacctgagggccttgtcgtaagatgcatccagagactggcggaaatgtgccggagtctcaggggcgctgccaggcttgtcggtgagcccgtacttggcgcaaagatggagacggcagcaacgttgctgcgcagggacatcgtcttcgcggcgtccctgtacacccaatag

SEQ ID NO: 207393 - DNA, 3162 bp, synthetic construct
  misc_feature 1..3162: note = Description of Artificial Sequence: Synthetic coding sequence
  source 1..3162: mol_type = other DNA
atggacttcgcccccaaggactgccccacccccgcccccggcctgttgagcctcagttgtatgctcgagccattggacttgggcgggggggatgaggacgagaatgaggcggtagggcagcccggaggaccccgtggcgatacagtgtccgcatctccatgcagcgcacccctagcccgtgccagctctctcgaagacctggtcttaaaagaagcttcaaccgcagtcagtacacctgaggccccagagccacctagtcaggagcagtgggctattcccgtagacgcaacaagtcccgttggcgacttctatcgtcttattccccaaccagcatttcaatgggccttcgaaccagatgtgtttcaaaaacaagcaattctccatttggaaaggcacgatagcgtttttgtggccgcgcatacttcagccggaaagaccgttgtcgccgagtatgcgatcgccctggctcaaaagcatatgacgaggaccatatatacaagtcccataaaggcactctctaatcagaaattcagggacttccgtaacacgtttggcgacgtgggactcttaacgggtgatgtgcaattgcatcctgaggcttcctgcttaatcatgacaactgagatcctgcggagcatgttgtattctggatccgatgtgataagagatctggaatgggtgatctttgacgaagtccactatatcaacgatgtcgaaagaggagtggtgtgggaagaagtccttatcatgctcccagaccacgtgtctatcatcttactgtctgctaccgtgcctaatgcacttgagtttgctgattggatcgggcggctgaaacgacgccagatttatgttatctcaaccgtaacacggcctgttccattggagcattacctcttcacagggaattcaagtaaaacacagggcgagctgtttctgctgctggacagccggggcgcgttccatactaagggatactacgccgctgtcgaggctaagaaggagagaatgtcaaagcacgctcagaccttcggcgcaaagcaacccacacaccagggcggaccggctcaggatcggggcgtttatttaagcctcttggcttcccttagaacgcgagcccagctccccgtcgtggtgttcactttctccaggggcagatgtgacgaacaagcatccggactcacaagtctcgatttgacaacctcgtccgagaaaagcgagattcacctattccttcagaggtgtctggcgagactgcgcggaagcgatagacagcttccccaggtgctccatatgagcgagcttttgaataggggattgggcgtgcaccattctgggatcctccccattctgaaagaaatcgttgagatgcttttttcacgcggtctcgtgaaggttttgttcgctaccgaaacctttgccatgggagtcaacatgccagccaggacagttgttttcgactcgatgcgcaagcatgacggcagtacctttcgtgatctgcttccgggcgaatacgtacagatggccggcagagcaggccgcagagggctggatccgaccggcaccgtgatcttactgtgtaagggaagagttcctgagatggccgatctgcatagaatgatgatgggtaaacccagccagctccaaagccaatttcgcttgacttacaccatgattctcaatctgctccgagtcgatgctttacgggttgaggatatgatgaaaagatccttttccgagttcccgtctcgtaaggatagcaaagcgcatgagcaggctctcgccgaacttactaaacgtttaggagccctcgaggaaccagatatgactggacagcttgtggacctgcccgaatactatagctggggtgaagagttaaccgaaacccagcacatgattcagcgacgcatcatggagtcggtgaatggcctaaaaagcctctccgcggggagggttgtggtagttaagaaccaggagcaccataatgccctgggggtaatccttcaggtctccagtaactctacaagccgagtcttcactaccctggttctatgcgacaaacccctgtcgcaggatccccaagacagagggcctgctaccgcagaggtgccataccctgatgatctggtgggctttaaattatttttaccagagggcccttgcgaccatacagttgtgaagttacaacccggggacatggcggccattaccacgaaggtacttcgagttaacggggagaaaattttggaggattttagtaaacgccagcaaccaaagttcaaaaaggatcccccgctagctgccgtgaccactgcagttcaggaactccttaggctggcccaggcacatcccgccgggccaccaactctggacccagtcaatgatctgcagcttaaggatatgagcgtcgtcgaaggtggactgagagctagaaagctggaggagctaatccaaggagcccaatgtgtccattctccacggtttccagctcagtacctcaagctccgggaacggatgcagatccagaaggagatggagcgcctgcgcttcctgctgtctgatcaaagccttctcttgttgccggaataccatcagcgggttgaagtcctacggacactggggtacgtggacgaggccggcaccgtcaagttggcaggccgggtcgcctgcgccatgagttcacacgaactgctcctgaccgaactgatgttcgacaacgccctttcaactcttcggccagaagagattgccgccctgctttcaggtctggtgtgtcagtcccccggcgacgctggcgatcagttgcccaacactctcaagcagggaatagagcgcgttagagcagttgccaagcgcatcggcgaggtgcaggtagcgtgtgggctgaaccagactgtcgaagaattcgtgggcgagttgaacttcggcctcgttgaggttgtttacgagtgggcccgcgggatgccattttccgaactggctgggctgagcggcacacccgagggattagttgtgaggtgtattcagcggctggctgaaatgtgtagaagcctccgtggggcagcacgcctggtaggtgaacctgttcttggtgcaaagatggaaaccgcagccacccttctgcgccgggatattgtgttcgcggccagcctctacacccagtag

SEQ ID NO: 207394 - DNA, 3162 bp, synthetic construct
  misc_feature 1..3162: note = Description of Artificial Sequence: Synthetic coding sequence
  source 1..3162: mol_type = other DNA
atggacttcgcccccaaggactgccccacccccgcccccggcctgttatctctttcctgtatgctcgagcccctcgacctgggtggaggggacgaggacgagaacgaagccgtgggtcagcccggtgggccacggggagacacggtgtcagcttcaccctgttcagccccattggcaagggcatccagcttagaggatctagtgctgaaggaagccagtactgcagtatcaactcctgaagctcccgaacctcctagtcaagaacagtgggctatacctgtggatgcaacgagtcctgttggagacttctatcggctcatcccacagcctgccttccagtgggcatttgagcctgacgtgtttcagaaacaagcaatacttcacctggagaggcacgactcagtattcgtggctgcccatacatccgccgggaaaaccgtggtagccgaatatgcgattgcgttggcccagaagcatatgacccgcacaatctacacatctccaataaaggccctgtccaatcagaaattccgagactttcggaacacatttggggatgtaggtctgctaactggggacgtacagctgcatcctgaagcatcgtgcctgattatgactaccgagattctccgcagtatgctatattctggcagcgacgtgatccgcgacctggagtgggtgattttcgacgaagtgcactatatcaatgacgttgagaggggcgtcgtttgggaggaagtcttgatcatgttgccggatcatgtctctatcatcctgcttagtgcaaccgtgcctaacgctcttgaattcgccgactggatcggacggttgaaaaggaggcagatttatgtcatctcaactgtcaccaggcctgtcccactagagcactacctgtttactgggaacagtagtaaaacgcaaggcgaactgttcctcctattggacagtcgtggggcatttcacactaaggggtattatgcagcagtggaagctaaaaaggagcgtatgtctaagcatgcgcagacttttggcgccaaacagcccacccatcaaggcggtccagctcaggataggggtgtgtatttaagccttctggcatctcttcgtacaagggcgcaactccccgtggtggtctttacattctctcggggaagatgtgatgaacaggccagtggcctgaccagcctcgaccttactacttcatctgaaaaatcagaaattcacctgttcctacaacgctgccttgcccggttgagagggtccgatcgccagcttccccaggtgcttcatatgtcggaactgctgaatagaggcctcggggtgcaccattctgggattcttcctattctgaaggagattgtggaaatgctcttttctcgcggactcgtgaaggttctatttgcaactgagacctttgcaatgggggtcaacatgcccgcgcggacagtggtcttcgattccatgaggaaacacgatggttctacattccgcgaccttctccccggagagtatgttcaaatggcaggccgggccggccggcgcggactggatccgaccggtaccgtcatcctactgtgtaaaggaagggtccccgagatggccgacctgcacagaatgatgatgggtaaaccatcccagttgcaatcccaatttagactcacatacacgatgatcctgaacctgctcagggtcgatgcactccgggtcgaggatatgatgaagcgctcgtttagcgagtttccttcccggaaggacagcaaagcacacgagcaggctctggctgaattgaccaagcgcctcggtgccttagaagagccagacatgaccgggcaactagtggacctgccagagtattactcttggggcgaggaactcacagaaacccagcatatgatccaaagacggattatggagtctgtgaatgggcttaagtctctctctgctgggcgggtggtagttgtcaaaaatcaggagcatcataatgctttgggcgtgatcctacaggtgtcttccaactcaacgtcgcgtgtctttaccactctggtgctgtgtgacaagcccctgtctcaggatccccaggatcggggcccagccacggctgaggtcccttaccccgacgacctggtgggcttcaagttgttcttgccagaaggaccctgcgaccatacagttgtcaaacttcagccgggggatatggcagccattaccactaaggtgctcagagtgaacggagagaaaatcttggaagacttttccaaacgccagcaaccaaagtttaagaaagacccacccctggcagcagtgactacagccgttcaggaacttctgagactggctcaggcccacccggcaggcccccccactctcgacccagtgaacgacctccagctgaaggacatgtcagtagtcgagggcggtctcagagccaggaagttggaggagctgatccagggcgcacagtgcgtacacagccctcgctttcccgcacagtatctcaagctgagagagcgaatgcaaatccagaaagagatggagcgtctgagattcctactcagcgaccaaagcttgctcctgctgcctgaatatcatcagagggtcgaggtgcttcggacccttggctacgtggatgaggcaggaaccgtgaagctggccgggagggtggcctgcgcgatgagttcccacgaactcctcctcaccgagctgatgtttgataacgcattgtctacgttgcggccagaagagatcgcagccctcctaagtggactggtttgccagtccccaggagacgcaggggatcagctgccaaacaccctgaaacagggtattgagcgagttcgggcggtcgctaaaagaattggggaggtgcaggttgcgtgtggtctgaatcagactgtggaggaatttgtcggcgaattgaatttcggacttgtggaagtcgtttacgaatgggcacgggggatgccgttttctgagctggccggattatcagggacccccgagggcctcgtggtgcggtgcattcagcggttggcagaaatgtgtcgcagccttagaggggccgccaggcttgtaggcgaacctgtactgggcgctaaaatggaaaccgctgccactttgctaagaagggacatcgtctttgccgcttctctgtacactcagtag

SEQ ID NO: 207395 - DNA, 693 bp, synthetic construct
  misc_feature 1..693: note = Description of Artificial Sequence: Synthetic coding sequence
  source 1..693: mol_type = other DNA
atgatggagaccgagcggctggtgctgcccccccccgaccccctggatttaccactacgggccgtggagctggggtgtaccgggcactgggagctgctgaacctacccggagcccccgaatcatcattgcctcacggtctgcccccatgcgcaccagacctccagcaggaagctgaacaactgtttctcagctcacctgcttggctacctctccacggtgtcgaacactcagcccgtaaatggcagcgaaagaccgatccctggtctctgctcgccgttttgggagcgccagtgcccagcgacctacaggcccagaggcatccgacaactggccaaattctaggatacaaagaggtcctgctcgaaaataccaacctaagtgcaactaccagtctgtccctccgaagacctccaggtcctgcatcccaatctttgtgggggaacccaactcaataccctttctggccagggggcatggacgagcccactattacagatcttaacactagggaagaggcggaggaggagattgatttcgaaaaagacttacttaccatacctcctggattcaagaaaggcatggacttcgcacctaaaggcagcgtgcactcctgcatacaccccagaggcccaagggcatccatctccggggcagtgggacacccctgtggccggcacctgccgtgctggtag

SEQ ID NO: 207396 - DNA, 3267 bp, synthetic construct
  misc_feature 1..3267: note = Description of Artificial Sequence: Synthetic coding sequence
  source 1..3267: mol_type = other DNA
atggacgagcccaccatcaccgacctgaacacccgggaggaggccgaagaggaaatcgactttgaaaaggacttgctgactattccccccggcttcaagaaggggatggatttcgctccaaaagactgtccgacacccgccccaggattgctgagcttgagctgtctgctcgagccccttgatttgggcggaggggatgaagacgaaaacgaggcagtcggacagcctgggggcccaagaggcgacactgtatcagccagtccctgcagtgcaccgctggcacgcgcatcctctctcgaggaccttgttctcaaagaggctagcactgccgtcagcactcccgaggcccccgagcccccttcgcaagagcagtgggcaataccagtggacgccacttctccagttggtgatttctatcggttgatcccccaaccagcctttcagtgggcgttcgagcccgacgtttttcagaaacaggctatcctgcatctggagcgccacgacagtgtgttcgttgccgcacacactagtgctgggaagactgtggttgcagagtacgcaatcgcactggcccagaagcatatgacaagaacaatctacacatcgcctatcaaagctttgagtaatcaaaaatttcgggactttaggaacactttcggagatgtgggactactaaccggcgacgtacagctgcatcccgaagctagttgtctcatcatgacgacagaaatcctgagaagcatgctgtacagtggctctgacgtaattagagatttggagtgggtcatatttgatgaggtacattatattaatgacgttgagcggggtgtggtttgggaggaagtgctcattatgctgcctgatcatgtgagcatcatattgttaagcgccacagtgccgaatgccctcgagttcgccgactggatcggacgactgaaacgccgccagatttacgtcatctcaaccgttacgagacctgtgcctctcgagcactacttgtttactggaaattctagtaagacccaaggtgaacttttcctgctcctcgatagccgaggagcttttcacactaaagggtattacgctgccgtcgaggcaaagaaagagagaatgtcaaaacacgcgcagacattcggcgcaaagcaacccacacaccagggtggtcccgcccaggacaggggcgtgtatctgagcctgctggcttccctgaggacacgcgctcagctcccagttgtagtgtttacgttttctagaggaaggtgtgatgagcaagcgtccggacttacgtcactggatctaacaaccagcagcgagaagagtgaaatccacctgtttctccaaagatgcctagctagactgagggggtcagatcggcagctgccacaggtgctacacatgtctgaactgctgaacaggggacttggggtccaccatagcggtattctgcctattctgaaagagatcgtggagatgttattctcacggggactggtgaaggtcctgtttgccactgagacctttgccatgggtgttaacatgcccgctcgcactgtcgtgtttgacagtatgagaaaacacgacggttccacttttagggatctgctccctggggagtatgtacagatggccggtcgcgctggtcgaaggggactggatccaactggaacagtgatcctgctttgtaaggggagagttccagaaatggctgatttgcacagaatgatgatgggtaagccaagtcaactccagagccagttcagacttacatacaccatgatcttaaatttgctgcgcgtggacgcactgcgggttgaagatatgatgaagcgatccttcagtgaatttccctccagaaaggacagtaaggctcatgaacaggctcttgctgagttaactaaacgcctcggcgctttggaggaaccagacatgaccggtcagctggtggatcttcctgagtattatagttggggagaggagctcactgagacccaacatatgatccagcgacggataatggagtctgtcaacgggctgaagtctttgagtgccggtcgcgttgttgtggttaaaaaccaggaacatcacaatgcccttggggttattctgcaggtgagctcgaactcaaccagtagagtttttaccaccctggtgctatgcgataaaccactaagccaagaccctcaggatcgggggcccgccacagcagaagtcccttaccccgacgacctcgtggggttcaaattgtttttaccagagggaccctgcgaccacactgtggtgaaactgcagcctggagatatggccgccatcaccaccaaggttcttagagtcaacggagagaaaatcctcgaagacttctcaaagcgccagcagccaaaatttaagaaagaccctcctctcgccgctgtgactactgccgtccaggagttgctgcgtctcgcgcaggctcacccggccggtccaccaactctggaccccgttaacgatctgcagctgaaggacatgagtgttgttgaaggcgggctgcgggcccggaaacttgaagagcttatccagggagctcaatgtgtccactcgcctcgatttcctgcacagtacctaaaactgcgcgaaagaatgcagattcagaaggagatggagagactccgttttctactttctgaccagtctctgttgctgctgcccgaatatcaccaaagagtcgaagttctccgtacactcgggtatgtcgacgaggctgggaccgtgaagttggctgggcgcgtggcatgtgccatgtcttcccacgaacttctactcacagaacttatgtttgacaatgctttaagcactcttcgcccggaggaaatagctgcactattaagcggtctggtgtgtcagtccccaggcgatgcaggagaccaacttccaaataccctgaagcaagggatcgagagggtgcgagctgtggccaaacggatcggcgaggtgcaggtggcctgcggattgaaccagacagttgaagaattcgtcggcgagctgaactttgggctagtggaggtggtgtacgagtgggccaggggaatgccgttttctgaactcgccgggttgtccgggacccccgaagggctggtagtgcggtgtattcaacggttggcagaaatgtgcagaagccttagaggcgccgcaagactcgtcggcgagccggttctgggagctaaaatggaaacggccgctaccctgcttaggagagacatcgtgtttgccgcttctctctacacgcaatag

SEQ ID NO: 207397 - DNA, 3162 bp, synthetic construct
  misc_feature 1..3162: note = Description of Artificial Sequence: Synthetic coding sequence
  source 1..3162: mol_type = other DNA
atggacttcgcccccaaggactgccccacccccgcccccggcctgctctccctcagttgtctactagagccactcgacttaggaggaggagatgaggatgaaaatgaagctgttggccagccaggcggccccaggggggacacagtgtctgctagcccttgctccgctcctcttgctcgggcttcttcccttgaggatctcgtgctgaaagaggcaagtacagccgtgtctacacccgaagccccagaacccccaagtcaggagcaatgggccattccagtggacgcaacatctccggtcggggatttttaccggctgattccccaaccagctttccagtgggcattcgaacctgatgtattccagaaacaggccatattgcacctagagagacatgattccgtgttcgtcgccgcgcatacaagcgcaggaaagactgtggtagcagagtacgcaatcgccctggcacagaagcacatgactcggacaatatatacctcccctattaaggccctgtccaatcagaaattccgggactttcgaaacacctttggagatgtgggacttctgacaggtgatgtgcagcttcatcctgaggcgtcctgtctgattatgaccaccgagatcctaaggagtatgctgtactctgggtctgatgtgattcgggatcttgagtgggtaatttttgacgaggtacactatataaatgacgtagagagaggcgtcgtgtgggaagaagttttgattatgctgccggatcacgtgtcgatcatccttctctctgccaccgtgcccaacgctctggaattcgctgattggatcgggcgccttaagcggagacaaatctatgtaatcagcaccgtgacaaggcccgtgcccctggagcattacctctttaccgggaactcgtctaagacacagggtgaactgtttttgctactcgacagtaggggggccttccataccaagggatattatgcagctgtcgaggcaaaaaaggaacggatgtcaaaacatgcccaaacatttggcgccaagcagccgactcaccaaggtgggccagcacaggatcgcggcgtttacttgtccctgctggcaagcctgaggacaagggcgcaactgcccgtggtggtattcacattttctcggggaagatgcgacgaacaggctagcggcttgacctccctcgatttgactactagctcagagaaatctgaaatccacctgtttctgcagcgttgtctggccagactgaggggcagcgacaggcagctgccacaggtgttacatatgtccgagttacttaatcgcgggctcggagttcaccattccggcattctacctatcttgaaagagatcgtggaaatgctattttcccgtgggctcgtgaaggtcttgttcgccactgagacctttgctatgggcgtaaatatgcccgcccggactgttgtgtttgactcgatgcggaagcatgacggatcaacttttagggacctactcccaggcgagtatgtgcagatggctggcagggccggtcgcagggggctggatccaactggaaccgtgattctcctatgtaagggtagggtgcctgagatggcagatttacacagaatgatgatgggcaagcccagccagctccaaagccagttcagactcacctataccatgattctcaatctgttgagagtagacgccttgcgcgtcgaagatatgatgaagaggagcttctctgagttccccagcagaaaggatagtaaggcacacgaacaggctctggctgagctcacaaagcgacttggagccctggaggaacccgatatgactggacagctggtcgatttaccagagtactactcttggggtgaggagttaaccgagacacagcatatgatacaaagaaggattatggaaagtgtcaatggtctgaaaagcttgtccgcaggtcgagtagtggttgtgaagaatcaagagcaccacaatgcccttggggtgattctgcaggtctcttcaaacagtactagtagggtgtttacaacattggtgctgtgcgataaacctctatcccaggatccacaggaccgaggtcctgccactgcggaagtcccataccctgatgatctggtgggcttcaaattgttcctgcccgagggcccttgcgaccacactgtggtcaagcttcagccaggggatatggccgccatcacaacaaaggtgttgagggtcaacggggaaaagattctcgaggactttagtaaacggcaacaacccaagtttaagaaggatccgcctctggccgcagtaactaccgccgtgcaggagctgttgagattggcgcaggcccacccggcagggccgcccaccctcgaccccgtgaatgatcttcagttaaaggatatgtctgtggtcgaaggcggcctgagagcacgtaaacttgaggagcttattcagggcgcacagtgcgtgcactcccccagatttcctgctcagtacctgaagttaagggagcgcatgcaaatccagaaagaaatggaaagactccgcttcttactgtctgaccagagtctgctgctccttcccgaataccatcagagggtggaggtcctgcggactctaggctacgttgacgaggccgggaccgtgaagctggctggccgagtcgcttgcgccatgagctcccatgagctcttgctcaccgagctgatgtttgacaacgccctttccaccctgaggccagaagagatcgcagccctcctcagcggtttggtctgccaatcacctggtgatgcaggcgatcaactccccaatactcttaagcagggcattgaacgtgtccgagctgtggctaagcgcattggcgaagtccaagttgcatgcggtctgaaccaaacagtggaagagtttgtgggggaactaaacttcgggttagtggaggtagtttatgaatgggcaagaggaatgccattttcagaattggcaggtctctctggaacccctgagggtctcgtcgtgcgctgtatacaaagacttgcggaaatgtgccgcagcctcagaggggcagcgcgcttggtcggggagcccgtcttaggagctaagatggaaaccgccgctactctgttaagacgggatatcgtgttcgctgcgtccctatacacccagtag

SEQ ID NO: 207398 - DNA, 2643 bp, synthetic construct
  misc_feature 1..2643: note = Description of Artificial Sequence: Synthetic coding sequence
  source 1..2643: mol_type = other DNA
atgatggagaccgagcggctggtgctgcccccccccgaccccctggaccttccattgagggccgtcgagctgggttgcactggacattgggagctgcttaatctgcctggtgctccggaatcttcgctaccacatgggcttcccccctgcgcacctgaccttcagcaggaagcagaacagctcttcctttcctccccagcctggcttcctctccacggcgtggagcactctgcacgcaaatggcagaggaaaaccgatccctggtctctactggctgttctgggggcgcccgtaccgtctgaccttcaagctcagaggcacccaacaaccggacagattcttggatacaaagaggtgttattagaacactatcttttcacaggcaatagcagcaagacccagggggagctgtttctcctcctcgactccaggggcgcatttcacactaaaggatactacgccgctgtggaagccaaaaaagaacggatgtcaaagcatgcccagacattcggcgccaagcagccgacacatcaaggcgggcccgcgcaggatagaggcgtgtatctgtcactactcgcctctctgcgcactagagcccagttgcccgtagttgtgttcactttttcgaggggtcggtgcgacgaacaagcctcaggccttacgtcgctagacctcaccacctctagcgagaaatccgagatccatcttttccttcaacggtgtctggcccggttgcgtggatccgatcgccagctgccccaggtgctacacatgtctgaactcttgaatcgcggtctgggcgtacatcattcgggcatcctcccaatcctgaaagaaatagttgagatgttgtttagtagagggttggtgaaggtattgttcgcaactgaaaccttcgccatgggagtgaacatgcccgcccgcactgtggtctttgattcaatgcgaaagcacgatggctctaccttccgtgacctgctcccgggggagtatgtccagatggccgggcgagccggaagaagaggtcttgatcccacgggcactgtcatcctgctgtgcaaaggacgagtgccagaaatggctgacttacacagaatgatgatgggaaagccttctcagctccagtcacagttcagactaacttacacaatgatcctaaatctccttcgggtcgacgccttgcgcgtcgaagatatgatgaaaaggtccttttcagaatttccatcacggaaggatagcaaagcacacgaacaggctcttgccgagctcacgaaacggctgggcgctctggaagaaccggatatgaccggccagctggtagatttgcctgagtactattcatggggcgaagaactgactgagacccagcacatgattcagagaagaatcatggagagtgtgaatggccttaagagcctttctgcaggtcgcgtggttgtagtgaagaatcaggagcaccataatgcactgggagtgattctgcaggtctcttccaattcaacttctagagtcttcacgacactcgtcctatgcgataaaccactgtcacaggatccacaggaccggggaccagctacagcagaggtcccttatcccgacgatctcgtcggcttcaagctgttcttgccagaaggcccttgcgaccataccgtggtgaaattacagcccggggatatggccgccatcaccaccaaagtactaagggttaatggcgagaagatcttggaggactttagcaagcgtcaacagcccaagtttaagaaggaccctccgctggccgccgtgaccaccgccgtgcaggaattgcttcgtttagcgcaggctcaccctgctggccccccaacccttgatccggttaatgaccttcagctgaaagatatgtcagttgtcgaaggggggctgagagctagaaagttggaagaactcatccagggcgcgcagtgtgtgcacagcccccggttcccggctcagtacttgaagctccgcgaaagaatgcagatccagaaggagatggaacggctgcggttcctgctgagtgaccagtctctccttcttttgccagagtatcaccaacgggtagaggtgctgcggactctgggttatgttgacgaagcaggaacagttaaactcgccggtagagtcgcgtgcgcaatgtcctcccacgagctgttgctcacagagctgatgtttgacaatgccctgtctaccctgagacctgaagaaattgccgctctgctgagtgggctggtgtgtcaaagccctggggatgctggagatcagctccccaataccttgaagcagggtatcgaacgagtgagagcagttgccaaacggataggcgaagtgcaggtggcttgtggcctgaaccagacagtcgaagagttcgtaggagagcttaattttggcctggtggaagtagtctacgagtgggctagggggatgcctttctcagaacttgctggtcttagcggcaccccagaggggttggttgtgcgatgtatccagagactggctgagatgtgccggtccctcaggggagccgcccgccttgtgggcgaaccagtcctgggagcaaagatggagaccgctgctacactgttacgacgggatatcgtctttgctgcttccctctatacacagtag

SEQ ID NO: 207399 - DNA, 3267 bp, synthetic construct
  misc_feature 1..3267: note = Description of Artificial Sequence: Synthetic coding sequence
  source 1..3267: mol_type = other DNA
atggacgagcccaccatcaccgacctgaacacccgggaggaggccgaagaggagattgactttgaaaaggatctacttacaatcccaccaggattcaaaaagggcatggactttgcgcccaaggactgtccgacccccgctccgggcctgttatctttatcctgtctgctggaacccttggatctgggcgggggcgacgaggacgaaaacgaggccgttggacagcccgggggccctaggggcgatacggtcagtgcttccccttgttctgccccgctcgcacgagcttctagccttgaggatttagtgctcaaggaagcgtctacggctgtcagtacaccagaggcacctgagcctccgtctcaggaacagtgggcaatcccagtggacgcaaccagccccgtaggcgatttttatcgactgattccccagccagctttccagtgggcctttgaacccgacgtttttcagaagcaggctatattgcacctggagcggcatgactccgtgtttgttgctgctcatacctccgctggtaaaaccgtggtcgccgaatacgccattgctctggcacagaagcacatgactcggaccatttatacaagccccattaaagcactgtctaatcaaaagtttcgcgattttcgtaatacctttggagatgtgggtcttcttaccggcgatgtacagctgcatcctgaagcatcttgcctcatcatgactaccgagatcctgaggtctatgctttactctgggagcgatgttattcgcgacctggaatgggttattttcgacgaagtgcattacattaatgatgtggagaggggggtagtgtgggaggaggtgctcataatgctaccagatcacgtatccataattctgctctctgcaacagtccccaacgccctcgagttcgccgactggattggcaggctcaaaagacgacagatatacgtgatatcaacggtgacacgtcccgtgccactggagcattacttatttaccggcaacagttctaagactcagggtgaattatttttgttacttgattctcgtggggcgtttcacactaagggctactatgcagcagtggaggccaagaaagaacggatgtccaaacacgctcaaacttttggagcaaagcagcctacacaccagggcggcccagctcaggatcgaggagtttacctgagcctattggctagtctaaggacaagggcacaactccctgtggtggtgttcaccttttctcgcgggaggtgcgatgagcaggccagtggtctgactagcctggacttaaccacttcatctgagaaatctgagattcaccttttcctgcagcggtgtctagcgagactccggggatctgaccggcagctaccccaagtgctgcacatgagcgagcttctcaaccgcggtttgggggtgcatcacagcggcatcttgcctattcttaaggagattgtggaaatgctgttctcccgggggctggtgaaagttctgtttgccaccgaaaccttcgcaatgggggtaaatatgcctgcccggaccgtcgtgtttgatagtatgaggaagcacgatgggtccaccttccgcgacctgctccccggggagtacgtccagatggcagggcgcgctggccgccgaggcctcgatcctacaggcactgtgatcctactctgtaaggggcgtgttccggagatggcagatttgcacaggatgatgatgggcaagccatcgcaactgcaatctcaattccgcctcacctacacaatgatcctgaacctcttgagggtcgatgcattgcgtgttgaagatatgatgaagcgcagttttagtgaatttcccagccggaaagactccaaggctcatgaacaggcgttagccgagcttactaaacgcctgggggccctggaagaacccgatatgaccggccagctggtcgacttaccggagtactatagctggggcgaagagctgacagagactcagcatatgatccagcggcgaatcatggagagcgtgaatggactgaaaagcctcagtgccggtcgagtcgttgtagtcaagaatcaagagcaccacaatgctcttggtgtcattttacaggtcagttctaattccacctctcgagtgtttacgaccctggtgctgtgcgacaaaccacttagccaggatcctcaggaccggggccccgctacagcggaagtcccatatccagacgacctggttgggtttaaactgtttctccctgagggtccatgcgaccacacggtcgtgaaattacagccaggcgatatggcagccatcaccacaaaggtgctgagagttaacggcgagaaaatcctggaggacttttctaagcgacagcagccgaagtttaagaaggatcccccgttggcagcagtgaccaccgcagttcaagagctgctccggttggctcaggctcatcccgcaggccctccgaccctggatccagtcaatgacctccagctcaaggatatgtccgttgtggagggtggcctgcgggccagaaagctggaagaactgattcaaggcgcacagtgcgtccattccccccggttcccagcacagtacctgaagcttcgggagcgaatgcagatccagaaggaaatggagcgcctgcgctttttgctttctgaccagtcattgcttctgcttcctgaataccatcaacgcgtcgaagtgttgcgcaccttgggctacgtggatgaagcaggaacagtgaagctcgcagggagggtagcctgtgccatgtctagccacgagcttttgctaactgagctgatgtttgacaatgccctcagcacattgcgtccggaagaaatcgctgccctgctttccgggctcgtttgtcagtcccccggggacgccggtgaccagctcccgaacacactgaagcagggcatcgagagggtcagggccgttgccaaacgcatcggtgaagtccaggtagcatgcggcttgaatcagaccgtagaagagttcgtgggagagctgaactttggcttggtcgaggtggtgtacgagtgggcccgggggatgccatttagtgaactggccggcctgtcaggtacccccgagggacttgtggtgagatgtatccagcgcttggctgagatgtgtaggagcttacggggtgccgctaggctggtaggcgaacctgtgttgggcgcaaagatggagacagctgcgaccctactccgccgcgatatcgtctttgccgccagcctctatactcaatag

SEQ ID NO: 207400 - DNA, 2643 bp, synthetic construct
  misc_feature 1..2643: note = Description of Artificial Sequence: Synthetic coding sequence
  source 1..2643: mol_type = other DNA
atgatggagaccgagcggctggtgctgcccccccccgaccccctggacctgcctttacgggcagtggaactgggttgcacaggccactgggagctcctgaacctccctggggcccctgaatcaagtttgccccatggcctaccaccctgcgctcccgatttacagcaagaagccgagcagctgttcctttcttctcctgcttggctgcctcttcacggagttgagcactccgcacggaaatggcagaggaaaaccgacccctggagtctgctggcagtgctgggcgctcccgtccccagtgacctccaggcgcagaggcatcctacaaccggacagatcctgggctacaaggaagtcctcttagaacactacctttttaccggaaacagttccaaaactcaaggcgagctgttcctgctcttagatagccggggtgcatttcacaccaaagggtactatgctgcggttgaagcaaagaaagaaaggatgtccaaacatgcccagaccttcggggccaagcaacccacacaccagggtggtcccgcacaggacagaggggtgtatctctcacttctggcctctctgcggacccgggcccagttgcccgtggtggtgttcacatttagcagaggtaggtgtgatgaacaagcatcgggcctcacaagccttgacctcactaccagctcagagaagtccgaaatccatcttttcctgcagcggtgtctggcacgtctgagaggtagcgatcggcaacttccgcaggttctgcatatgtctgagctgcttaacagagggctgggagtgcaccatagcggcatcttacccattctgaaggaaatcgttgagatgcttttctcaaggggactcgtgaaggtcttatttgccaccgaaacttttgccatgggcgttaacatgcctgctcgcactgtggttttcgactctatgcgtaagcacgacggatccacattccgcgaccttttacctggggagtacgtacaaatggccggtcgggcaggtaggagggggctcgacccaaccggcaccgttattctcttatgcaagggcagagtgcctgaaatggctgaccttcaccgcatgatgatgggcaagccaagtcagcttcaatcccagttccggctcacctacactatgatcctcaatctattgagagtggatgcactgcgcgtagaagacatgatgaagcgcagtttctcagaatttccttccaggaaagactctaaagcacatgaacaggctctggcagaattaactaaaaggttgggggccctggaagagcctgacatgacgggccaattagtcgacctgccggagtattactcttggggcgaggagctgactgaaacccagcacatgatccagcgtagaattatggagtctgtgaacgggctgaaatcactgagcgccggccgcgttgtcgtagtcaaaaaccaggaacaccataatgcattaggcgttatcctgcaggtctcgtcaaattccacctctcgggtatttacgacactcgttttatgtgacaaaccactctctcaggacccgcaggatcggggtccagccacagccgaagtgccttacccggacgacctcgtaggctttaagctatttctacctgagggaccatgcgatcatacggtggttaaattgcagccaggggacatggccgctatcacaactaaggtcctaagggttaacggggaaaaaatcctggaagactttagcaagcgacagcagcccaagtttaaaaaggatccgcccctggctgctgttacaacagccgtgcaggagttgctgcggctggcacaggcacaccctgcagggcctcctaccttagatcccgtgaatgacttacagcttaaggacatgtctgtggtggagggtggcttaagggcccgcaaactggaggaactcatacagggggcccaatgcgtgcactcccctcggttccctgcccaatacctgaagcttagggagaggatgcagattcagaaggagatggagaggttacgcttcctgttgagcgatcaaagcctgcttctcttaccggaataccaccaacgcgtggaagtgctgcgcactcttgggtatgttgatgaggctggaacagtgaagttagcgggccgagttgcctgtgcgatgagtagccatgagctgttattgactgagctgatgtttgataatgccctgagcaccctgagacctgaggagatcgccgcactcctatccggactcgtttgtcagagccctggggacgcaggcgaccagcttcccaatacattgaaacaggggatcgagcgtgtgcgagctgttgccaaacggattggcgaggtgcaggtggcttgcggactgaaccagacagtggaagaattcgtgggcgaactgaactttggcctcgtagaagtcgtctacgagtgggctaggggcatgccttttagtgagttagcaggtttgtccggaacacccgaaggtctcgtggttcgctgcatccaacgcctggcagagatgtgccgttccctgcggggcgctgcccggcttgtcggagagcctgtgctgggcgccaaaatggagactgcggccacattgctccgccgcgacatcgtgttcgcagccagcttgtatacccagtag

SEQ ID NO: 207401 - DNA, 2643 bp, synthetic construct
  misc_feature 1..2643: note = Description of Artificial Sequence: Synthetic coding sequence
  source 1..2643: mol_type = other DNA
atgatggagaccgagcggctggtgctgcccccccccgaccccctggaccttccactgagggccgtggaactcgggtgtacaggccattgggaacttctgaatctgcccggagcccccgagtcatctcttccccacggcctgcctccctgtgcccctgatctgcaacaggaggccgagcaactgttcctgtcctctcccgcctggctgcctttacatggcgtggaacattccgccaggaaatggcagcgcaaaaccgatccatggagcctgctggccgtgctgggcgctcccgttcccagtgatctgcaggcacagagacatcctactacaggtcagatcctgggctacaaggaggtgctgctggagcactacctcttcaccgggaactcatccaagacccaaggagaattatttcttctgcttgatagccgcggcgcgttccacactaaaggctattacgctgcagtcgaggcaaaaaaagagcgaatgagcaagcacgcacagactttcggagccaagcagcctacccaccagggcggcccggctcaagacagaggggtatacctctcacttttagcatcattgagaacccgcgcccagctgcctgtcgtcgtttttacgttctcccgcggaagatgtgacgagcaggcttctggcctgactagtttagacctgactacaagctcagagaagtctgaaatccacctgttcctccagcgctgtctagcgcggctgcggggaagtgacagacaactaccgcaggtgctccatatgagcgagctgctcaatagaggtttgggcgttcatcacagcggcatcctgcccattctgaaagagattgttgagatgctatttagtcggggactggtcaaggtgctctttgccacagagaccttcgcgatgggggtgaatatgccagcgcgcacagtcgtcttcgactctatgagaaaacacgatggctctacttttcgtgacctgctgcccggcgaatatgtgcaaatggctggtcgagccgggcgtcggggtctcgaccctaccgggacagtgattctcctgtgcaaggggcgcgtgcccgagatggcagacctgcacaggatgatgatgggcaaacccagccagctgcagagccagttccgtctgacttacaccatgatattgaacttactgagagtcgacgccctcagagtggaagacatgatgaagcgttcttttagcgagtttccttcccggaaggactcaaaggctcacgagcaggctctggcggaactgaccaagcggctaggagccctcgaggagccagacatgaccgggcagctggtggacctgccagaatattattcctggggagaggagctgaccgaaacccagcacatgatccagcggcgaatcatggagtccgtgaacgggctgaagagtctctccgccggcagagtggtagtcgtcaaaaaccaagagcatcataatgccttgggtgtcatcctgcaggtctcaagcaatagtacaagccgcgtgttcacgaccctggtcctgtgcgacaagccactgagtcaggacccgcaggaccgtggtcccgctacagctgaggtgccgtaccctgacgacctggtaggctttaagctcttcctccccgaaggaccatgcgatcataccgtcgtcaagctgcagcctggggacatggccgctataactaccaaggtgctgagggtgaatggagaaaaaatcctggaagatttctcaaaacgccagcaacctaaattcaaaaaggatccgcctcttgccgccgtcacaacggccgtgcaggaactgctgagattggcccaggctcaccccgccgggcctccaacactggatccagttaacgatctgcagctcaaggacatgtccgtagtggaaggaggcttgagagcgaggaagttagaggagctgattcagggcgcgcaatgtgtacacagtccaagatttcccgcccagtacctcaaactgagagaaagaatgcagatacagaaagagatggagcggttgcggttcctccttagcgaccagagtctgctgctcctaccagagtaccaccagcgcgtggaggtcttgcgaactctgggttacgtggatgaagccggcactgtgaaattggccgggcgggtggcctgcgctatgtccagccacgaattgctgttgaccgaactgatgttcgacaacgccctgtcaaccctaagacctgaagagatagctgccttattgtcaggactggtctgtcagtctcccggcgacgcaggggatcagctcccaaacacacttaagcagggaatcgagcgcgtccgagcagtagccaagcgcatcggtgaggtccaggtggcttgtggcctcaatcaaacggtcgaagaatttgtaggcgagttaaactttggtttggtcgaggtcgtgtatgagtgggcccgcgggatgccgttctcggagctggcaggactgtcaggcacacctgaaggtctggtggtaaggtgcattcagcgtttggctgagatgtgccgctcattgcgtggggccgcacggctggtgggggagccagtgctaggggccaagatggaaaccgccgcaaccctgctaagacgggacatcgtgttcgcggctagcctctacacccaatag

SEQ ID NO: 207402 - DNA, 693 bp, synthetic construct
  misc_feature 1..693: note = Description of Artificial Sequence: Synthetic coding sequence
  source 1..693: mol_type = other DNA
atgatggagaccgagcggctggtgctgcccccccccgaccccctggacctgcctttacgcgcggtggagctgggctgcacgggtcactgggagctgttgaacctgcctggcgctccagagtcgtcactgcctcacggactgcctccctgcgcccccgatttgcaacaggaagcagagcaactgtttctgagttcacccgcatggctgccattgcatggcgtggagcactctgcgcgaaagtggcagcgaaagacagacccatggagtctgctagctgtgctcggcgcgcccgtaccctccgatcttcaggcacagagacatcctacgacaggccagatcctggggtataaggaggtgctgctggagaacacaaacctaagtgcgacaacctcactttcgctccggcggccaccgggtcccgcatctcagagcttgtggggaaacccaacacagtatcctttctggcccgggggcatggatgagcccactattactgacctgaatacccgggaggaggcagaagaggagatagatttcgaaaaggatttactgacaatccctccgggcttcaagaaaggcatggacttcgcccctaaagggtcagtgcacagttgtattcacccgcggggacccagagcttccatcagcggggccgtgggacatccctgcggccgccacctgccctgttggtag

SEQ ID NO: 207403 - DNA, 2643 bp, synthetic construct
  misc_feature 1..2643: note = Description of Artificial Sequence: Synthetic coding sequence
  source 1..2643: mol_type = other DNA
atgatggagaccgagcggctggtgctgcccccccccgaccccctggaccttccactgcgggccgtcgaacttgggtgtactggtcactgggagttactcaatctgcccggagcaccagagagtagcctgcctcatggattgccaccttgtgctcccgacctgcagcaggaggcagagcaactgtttttaagctccccagcttggctgcctctgcacggcgtggaacactccgccagaaaatggcagcgcaagactgatccctggtcactgctcgctgtcctgggtgcccccgtcccaagtgacttgcaagcgcagcgacaccccactaccggacagattctcggatataaagaggtgctcctagaacattatctatttacaggcaactcctcaaaaacacagggcgaactattcctgctgctagattcccggggggcgtttcacacaaaaggctactacgcagctgtggaagccaaaaaagagcggatgagtaagcatgctcagacattcggagctaagcagcctacacaccagggaggaccagctcaggaccgcggcgtttatttgtctcttttggcttccctgcgaactcgggctcagctcccagttgttgtgtttacttttagccgcggccggtgtgacgaacaagcgtccggactgacctcactcgacttaaccacaagctccgagaagtccgagatccacctgtttctgcagcgatgcctcgcgcggctgagaggctcagatcgccagctgccacaagttctccacatgtcagagctgctaaatcgcgggctcggggtgcatcattctggaatccttccgattctcaaggagattgtggagatgctgtttagtagagggctggtgaaggtcttgtttgcgacggagacgttcgcaatgggcgttaacatgccagcacgcactgttgtgttcgacagtatgcggaagcatgatggatctaccttccgcgatctgttgcctggagagtatgtgcaaatggctggccgagcaggaaggcggggcctcgatccgaccggtacagtaatccttttatgcaaaggtcgagtgcccgagatggctgatctgcatcgtatgatgatggggaagccaagccagctacagagtcagtttaggcttacatacacaatgattctgaacctgctgcgggtcgatgccctacgtgttgaggacatgatgaagcggtcctttagcgagtttccctctaggaaagactctaaggcccatgagcaggcgctggctgagttgaccaaaaggctgggagctttagaggaaccagatatgaccggacagctcgttgatcttcccgagtactatagctggggcgaggaactaactgaaactcagcatatgattcagaggcgaatcatggagagcgtcaacggccttaaaagtctgtcagctggacgggtggtagtcgttaagaaccaggagcaccacaatgctctgggtgtgattctgcaggttagttcaaattctacatcacgggtgttcactactcttgttctatgcgataagccattgtcacaggaccctcaggataggggtcctgctaccgccgaagtaccgtacccagatgaccttgtggggtttaaactcttcctcccggaggggccctgcgaccacacagttgtcaagctgcagccaggcgatatggcagctattaccactaaagttctgcgcgttaatggtgagaagatactagaagatttctctaagcgacaacaacctaaattcaaaaaagacccaccgttagctgctgtgactaccgctgttcaagaactgctccgacttgcccaggcccatcctgccggaccgccaaccctcgaccccgtgaacgacctccaactgaaagatatgagtgtggtggaaggcggcctcagagccagaaagttggaggaacttatccaaggcgcgcaatgcgtacattcaccccgcttccctgctcagtacttgaagcttagagagcgaatgcagatccagaaagagatggagcgactgcgattcctactgtccgaccagagcctgctgcttctccccgagtaccaccagcgggtggaagtgctgaggacacttggatatgtagatgaggcaggaactgtgaagttggccggaagagtggcctgcgcgatgtccagtcatgagcttttactcactgagctgatgtttgacaacgcactcagcaccttgagaccagaggaaatcgctgcccttctgtccgggctggtctgtcaatctccgggcgacgccggggatcagctgcccaacacgctgaagcaggggattgagagagtgcgtgcagttgctaaaaggatcggtgaggtgcaggtagcctgcggcctgaatcagaccgtcgaagagtttgtgggtgagcttaattttggcctggttgaagtggtctacgagtgggcccgaggcatgcccttctccgagctggcagggctcagcgggacccccgaagggctggttgtgcgatgcattcagagactggccgaaatgtgccgctccctcaggggcgccgccaggctggttggggagcctgtcctgggagctaagatggaaacggcggcaaccttgctccggagagacattgtgtttgcggcaagcctttacacccagtag

SEQ ID NO: 207404 - DNA, 3267 bp, synthetic construct
  misc_feature 1..3267: note = Description of Artificial Sequence: Synthetic coding sequence
  source 1..3267: mol_type = other DNA
atggacgagcccaccatcaccgacctgaacacccgggaggaggccgaggaggagattgatttcgagaaggacctcctgactattccccctggctttaaaaaagggatggatttcgccccaaaggactgtccaacacccgcacccggcctgctctctctaagctgtctcctggaacccctggatttgggcgggggcgatgaagatgagaatgaggctgtaggccaaccagggggaccaaggggcgatacagtgtccgcaagtccctgctcagcaccgttggcaagagcctcttcattagaagatctggtcctcaaggaggcatcaaccgcagtaagcacgccagaagctccagagccaccctcccaggagcagtgggccatccctgttgacgctacaagcccggtaggagacttctaccgcctgattccccaacctgcctttcagtgggctttcgagcctgacgttttccagaaacaggccatcctgcatctggaacggcatgatagtgtctttgtggcggcacatacaagcgctgggaagaccgtcgtcgctgagtatgctatcgctctagcccagaaacatatgactaggacaatctacaccagccctattaaagccctgtccaaccagaagtttagagattttcggaatactttcggcgacgttggactcctcactggggacgtccagctccacccagaagcctcatgtctaataatgacaaccgaaattctaagaagcatgctgtactccggcagtgatgttattcgggacctagaatgggtgatatttgatgaggtgcactacatcaatgacgtagagcgcggggtcgtctgggaagaagtgttgatcatgttacctgatcacgtgtccattattctactatccgcaactgtcccaaatgctttggagtttgccgactggattggtcgtctgaaacgaaggcaaatttatgttatcagcacagttactcgcccagtgcctctcgagcactacctgttcacgggtaacagctctaagactcagggagagctgttcttgcttctggacagccgaggggccttccatactaaaggctattatgcggccgtggaagcaaaaaaggaaaggatgagtaagcatgcgcagacctttggagcaaagcagccgacccaccagggaggaccggcacaagatagaggggtgtatctgagccttcttgcctcactccgtacccgcgctcagttgcccgtcgtggtgttcaccttttccaggggcaggtgcgacgaacaagcaagcgggctgacctcactggaccttacaacaagcagcgagaagagtgagatccacctcttcctgcagaggtgtttggcacggttaagaggatcagataggcagctgccgcaggtcctgcatatgagcgaactgcttaacagagggctgggagtccaccatagcgggatcctgccaatcctgaaggagatcgtggaaatgctgttctcccgggggctggttaaagtgctttttgccaccgagaccttcgctatgggcgtgaacatgccggcgcggactgtcgttttcgacagcatgcggaaacacgacgggtctacatttcgggatctgctgcctggtgagtatgtgcagatggcgggccgcgccggccggagggggttggaccctacagggaccgtcatcctcctatgtaagggtcgagttccggaaatggcggatttacaccggatgatgatgggaaaacctagccagttgcagtcccagtttcggctgacttacaccatgattctcaatctgctgagggtggacgccctccgcgtggaagacatgatgaagaggtccttctctgaattcccttcgcgaaaggatagtaaagctcacgaacaggcactggctgaacttacaaaacgtctcggcgctctggaagaacctgatatgaccgggcagttggtcgacttacccgagtattactcttggggggaggagctaaccgaaactcagcacatgatccagcgccgcataatggaaagcgtgaacggattgaagagcttgtcagccggtagggtcgtcgtggttaaaaaccaagaacatcataatgctctaggggtcatccttcaggtgtcctccaacagtacttcgagagtttttaccacacttgtcctgtgtgacaagcccctcagccaggacccccaggacagaggcccagccactgctgaggtgccctatccagatgacctagttgggttcaagctgtttctgcccgaaggcccctgtgatcacactgtggtaaagctgcaaccaggcgacatggccgccatcaccacgaaggtactgcgcgtgaatggcgagaaaatcttggaggatttttctaagcggcaacagccaaagttcaagaaggatcccccactggccgcagttactacagcggtgcaggagctcctacggctggcgcaagcccatccggccgggccgccaaccttggatcccgtgaatgacctccagctgaaggacatgagcgtggtagagggaggcctgcgcgctagaaaactggaagaactgatccagggagcccagtgtgtgcactcaccaagattccctgcgcaatacttaaagttacgggagcgcatgcagatacagaaggagatggagagattacgttttttattgagcgaccagtccctactgctgctgcccgaataccatcagcgagtggaagtgctgcgtaccctgggctacgtggatgaggcaggcactgtgaagcttgctgggcgggtggcatgtgccatgagctctcacgagcttctgttaactgaactgatgtttgataacgccctcagcactcttaggcccgaagagattgcggccttgctgtctggattggtatgccaatcccccggcgacgccggggaccagctccccaatacccttaagcaaggcatcgagcgggtccgtgccgtggctaaaaggatcggcgaggtccaggtagcctgcgggttgaatcaaaccgtggaagagtttgtcggcgaactcaacttcggtctggtcgaggtggtttacgagtgggccagaggaatgcccttctctgaattagcaggattgagcggtaccccagagggactggtggtgaggtgtatacagcggttggctgagatgtgccgctcactgaggggggccgctaggctcgtgggtgaacccgtgctgggagccaaaatggagacggcagctactttattgagacgggacattgtgtttgcagcctctttatatacccaatag

SEQ ID NO: 207405 - DNA, 3267 bp, synthetic construct
  misc_feature 1..3267: note = Description of Artificial Sequence: Synthetic coding sequence
  source 1..3267: mol_type = other DNA
atggacgagcccaccatcaccgacctgaacacccgggaggaggccgaggaggagattgatttcgaaaaagacctgttaacaataccccctggcttcaagaagggcatggactttgcgccgaaagattgccctacaccagctcccggcttgttaagtctgagttgtctgctggagcccctagacctgggtgggggagatgaagacgaaaacgaggcggtaggacaaccaggcggacctcggggtgacacagtgagtgcgagcccttgtagcgcaccgctagcccgggcctcatcactagaagacctggttctgaaggaggcgagcactgccgtgtctacacctgaagcccccgagccgccctcccaggaacagtgggcgatccccgttgatgcgacttcgcccgtgggcgacttctatagactaatacctcagccagcattccagtgggctttcgagcccgacgttttccagaagcaggccatacttcatctggagcgccatgacagcgtgtttgtggcagcccacacgagtgcgggaaagacggtggttgctgaatacgcaatcgcactcgcccagaagcacatgacccgcacaatttataccagcccgatcaaagccttaagcaaccagaaattcagagactttaggaacacgtttggtgatgtggggttactgacaggcgatgtccagctccaccctgaagctagctgcctcattatgacaactgagatcctccggagtatgctctactctggctctgacgtgatccgagaccttgaatgggtcatttttgatgaggtccattatatcaatgatgttgagagaggcgtagtgtgggaagaagtgctgatcatgcttccagaccatgtgagtataatcttactgtccgctacagtacccaacgcgctagagtttgccgactggatcggacggctcaaacggaggcagatttatgtgatcagcacagtcactaggcccgttccactcgagcactatctgtttacgggaaacagctccaaaacccaaggcgaattattcttgttgctcgacagtagaggcgcttttcacacaaagggttactatgcggcggttgaagccaagaaggagaggatgagcaagcacgctcaaacattcggagccaaacagccaacacaccaaggagggccggctcaggaccgcggggtgtacctttccctcctggccagtttgagaacccgggcccagctccccgtcgtggtattcactttttcccggggtaggtgtgacgagcaggcttccggcttaactagtttggatctgaccacaagttcagaaaaatctgaaattcatctgtttctccagagatgcctcgcgcggcttcgaggctccgacaggcagctgccccaggtgctccatatgagcgaactcctcaaccgaggcctcggggtccaccactcaggtattttgcctatattgaaggagatcgtggaaatgctgttcagccgaggcctggtcaaagtcctgtttgcaactgagacctttgcaatgggggtgaacatgcctgctaggacggtcgtgttcgattccatgagaaagcatgacgggtccacatttcgagacctacttcctggagaatacgttcagatggcagggcgcgccgggaggcgggggcttgatcctaccgggactgtaattctactttgtaagggacgtgtccccgagatggctgatctgcaccgtatgatgatgggcaaaccgtctcagctccagtcacaattccggctgacatacacgatgattttgaacctcctgcgagtcgacgcactcagagttgaggacatgatgaagcggagttttagcgagttcccatcacggaaggactctaaagcccacgagcaggctctcgccgagctgacaaaaaggctgggggccctggaggaacccgacatgacgggccaactggtggatctcccagagtattactcatggggtgaagagctgactgaaacccagcatatgattcagcgtcgtattatggagtctgtaaacggactcaagtccctgagtgctgggcgcgttgtagtggtgaagaaccaggagcaccacaacgcgctcggcgtgatcctgcaggtgtcatcaaactccacaagtagggtgtttacgactttggtcttatgcgacaagcccttatcccaggacccccaggacagaggacctgctaccgctgaagtgccctaccctgacgatttagtcggcttcaagctgtttctccctgaagggccctgcgaccatacggtggtcaagcttcaacctggagacatggccgccatcaccaccaaagttctcagagttaacggcgaaaaaattctcgaggacttttcaaagcgccagcaaccaaagttcaagaaagatcctcccctggctgccgtcacaacagcggttcaagagttgttacgcctggcacaggcacatcctgctggaccgcctacactcgaccctgtgaacgatctgcaactgaaagatatgtccgtggttgagggaggtctacgagcccgtaagctggaggaactcattcaaggagctcaatgtgttcattctcccagatttccagcccagtatctgaagttgcgcgaaagaatgcagatccagaaggaaatggaacgcttgcgattcctgctgtccgaccagagccttctgctcctgcctgaatatcatcagagagtggaagtcctaagaaccttgggatacgttgatgaggctggcacggtgaaactcgccggacgggtcgcttgcgcgatgagctcgcatgagctgttgcttaccgagcttatgttcgataacgcactttcaactcttcgaccggaagagatcgcagcgctgctctcagggctggtctgccagagtccaggggatgcaggtgaccaactcccaaacaccctgaaacagggaatcgagcgggtgcgagccgtagctaaacggatcggggaagttcaggtcgcatgtggactcaatcaaaccgttgaggagtttgtgggggaactaaactttgggttagtggaggtggtgtacgaatgggctcgcggaatgcccttttctgaattggctggattaagtgggacaccagaggggctggtggtgaggtgtattcaaaggctggcagaaatgtgccgatctctgcgcggcgccgctcgcttagttggcgaaccggtactgggcgccaaaatggagacagcggcaaccctgctgcggagagatatcgtcttcgccgcatctctttacacacagtag

SEQ ID NO: 207406 - DNA, 693 bp, synthetic construct
  misc_feature 1..693: note = Description of Artificial Sequence: Synthetic coding sequence
  source 1..693: mol_type = other DNA
atgatggagaccgagcggctggtgctgcccccccccgaccccctggacctgccattgcgcgcagtggaacttggctgtacaggacactgggaactacttaacttaccaggcgcacccgagagctccctaccccacgggcttcctccatgtgccccagatctgcagcaggaggccgagcagctgtttctttcaagtcctgcttggctgccactccacggcgttgaacactcagcccgcaagtggcaaaggaagacagacccttggagtttgctcgccgtcctaggtgcccccgtgccatcggatctgcaggcccagcggcacccaacaaccggccagatactcgggtataaagaagttctactggagaacacaaacctttcagccacaacttcactatccctgaggcgcccccccggcccagcaagccagagcttgtgggggaatcctacacagtatcctttttggcccggcgggatggatgagcctactatcacagacctcaacacccgagaggaggctgaggaggagatcgattttgaaaaagatctgctcacgattccaccaggctttaagaaagggatggatttcgcccccaagggttccgttcacagttgtatccaccccaggggaccacgggctagcattagcggggccgttggccacccctgcggacgccacctgccctgctggtag

SEQ ID NO: 207407 - DNA, 3267 bp, synthetic construct
  misc_feature 1..3267: note = Description of Artificial Sequence: Synthetic coding sequence
  source 1..3267: mol_type = other DNA
atggacgagcccaccatcaccgacctgaacacccgggaggaggccgaggaagaaatcgactttgagaaagacttgctgacaattccccctggattcaaaaaagggatggatttcgcccccaaggactgccctacaccggccccaggtctactgagcctttcttgtatgctagagcccctagatctgggcggaggggacgaagacgagaatgaggccgtgggtcagccaggcggccccagaggcgatacagtgtcagcgagcccatgctcggccccattggcccgggcgtcatccctcgaggatctggtgctcaaagaggcatccactgccgtttccacaccggaggctccagagccaccttcccaggagcagtgggccattcctgtggatgcaaccagccctgtaggggacttctacaggctgatcccccaacccgccttccagtgggctttcgaacccgacgtcttccagaaacaggcgatcttacatttggaacgacatgatagcgtgtttgtggccgcccataccagcgcgggtaagacagttgtcgcagagtacgcaatcgctctggctcagaagcatatgacacgcacgatatacacatcgcccattaaagcactgtctaaccagaaattccgagactttcgaaacactttcggtgatgtcggcttgttgacaggagatgtgcagctccatcctgaagcctcttgcctgatcatgacaactgagatcctgcgctctatgttgtatagcgggagcgatgtaattcgagatttggaatgggtaatattcgacgaggtacactacatcaatgacgttgaaagaggtgtcgtgtgggaggaagtgctcataatgctacctgatcacgtcagtattattctgctatccgcgaccgtgcccaacgcgttggagttcgccgactggataggcagactcaagcggagacaaatctatgtaattagtacagtgactagacccgtgccccttgagcattatctgtttacggggaactcatcaaaaactcagggggagctcttcctgttacttgactcccgcggggcatttcatactaagggctattacgctgccgtggaggctaagaaggaacgaatgagtaaacatgcccaaaccttcggcgcaaagcagcccacccaccagggcggccctgcacaggaccggggcgtgtacctatctttactggcctctctaaggacgagagctcaacttccagtggttgtctttacattctcccgcggcaggtgcgatgaacaggcctcaggcttaacatccctcgacctcactacctcctcagagaagagtgaaatccatctcttcctacagagatgtcttgctaggctcagaggaagtgataggcagcttccccaagtccttcacatgtctgaactactcaaccgcggactgggtgttcaccatagcgggattctgccgatcctcaaggaaatagtagagatgttattttctagaggcctggtcaaggttttgttcgctacagagaccttcgccatgggagtgaacatgccagcccgaacagtagttttcgacagcatgcgtaagcatgacggctctaccttccgggatttgctgcccggcgaatacgtacagatggctggaagggccgggagacgaggtctggaccccaccggcaccgtcatcctgctgtgcaaaggaagggtcccagaaatggctgacctgcaccgcatgatgatgggcaagccgtcacagctccagtctcagtttcggctcacatatacaatgatactgaatcttttgagggtcgacgcgctccgagtggaggatatgatgaaaagaagcttcagcgagttcccctctcgaaaagattctaaagcccacgagcaagcgctcgcggagctgacaaagcgcctcggggccctcgaggagcctgacatgactgggcagctggtcgacctgcccgaatattactcttggggggaagagcttaccgagacccaacacatgatccagagacgcattatggaatcagtgaatggcctgaaatcccttagcgcggggagggttgtggtcgtgaagaaccaggagcaccacaacgctctcggggttattctgcaggtgagtagcaattcaacatctcgtgtgttcacaactctggtcttgtgtgataagccgcttagccaggacccacaggataggggtccagccactgcggaagtaccctatccagatgatctagttggattcaaactgttcctgcctgagggcccttgcgatcacacggtggtcaaactgcagccaggggacatggcagctatcaccaccaaagtcttacgggtcaacggggaaaaaatcctagaagatttctctaagaggcagcagcctaaatttaagaaggaccctcccctggccgccgtgaccactgcagttcaagaattgctgaggctcgcacaggcgcacccagccggcccccctactcttgaccccgttaacgacctccagctcaaagacatgtccgtggtagagggcggactgcgtgcaagaaagctggaagagttgatccagggggcccagtgtgtgcatagtcctcgatttccagcacaatatctgaaactgcgagaacggatgcagattcagaaggagatggagaggctgaggtttctattgagtgatcaatctttactcctgcttcccgagtaccaccagcgcgtcgaagttcttcgaactctgggctatgtcgacgaagccggaaccgttaagctggcaggccgcgtagcttgcgcaatgtctagtcacgaattgctactcactgagttaatgtttgacaacgccctgtccacactgcggcctgaagagattgccgcgttgttaagtgggttggtgtgtcagagtccgggggacgctggcgatcagttgcctaataccctcaaacagggcattgagcgggtgagggctgtggcaaagcggattggtgaggtccaggtcgcgtgtggcctgaatcagactgtggaggagttcgtgggggagcttaacttcggccttgtggaggtggtatacgaatgggcacgagggatgccctttagcgagctcgctggattaagtgggacacccgaaggtctcgtggtgcgatgcattcagcgcttagccgaaatgtgccgctctttgaggggggccgccagactggtcggggagccagtcctcggagctaaaatggagactgcagccaccctgctgcgccgtgatatcgtctttgcagcctctttgtatacccaatag

SEQ ID NO: 207408 - DNA, 693 bp, synthetic construct
  misc_feature 1..693: note = Description of Artificial Sequence: Synthetic coding sequence
  source 1..693: mol_type = other DNA
atgatggagaccgagcggctggtgctgcccccccccgaccccctggaccttccactgcgggctgtggagctgggatgcaccggccactgggaactgcttaatctccccggagccccagagtcctctctccctcatggcctacccccatgcgctcctgacctccaacaggaggccgaacagttgttcttgtcttcccccgcatggttgcccttgcatggcgttgaacacagcgcaagaaagtggcaacggaagacggacccatggtccttgctcgcagtgctcggtgcccccgtcccaagcgatctgcaggcccaacggcacccaactacaggccaaattctcggatacaaagaggttcttttagaaaataccaacttgtcagcaacgacaagcttaagcttgagaaggccacccggacccgcgagtcagtctctatggggtaatcctacacagtatccattctggcctggcggaatggacgagcccacaatcactgacctgaatactagagaggaggccgaagaagagatcgacttcgagaaggacctcctgacaattccacctggtttcaagaaagggatggactttgcgccgaaaggatctgtacattcatgcattcacccaaggggacctcgtgcatctattagcggagccgttgggcacccatgcggtcgacacctgccatgttggtag

SEQ ID NO: 207409 - DNA, 2643 bp, synthetic construct
  misc_feature 1..2643: note = Description of Artificial Sequence: Synthetic coding sequence
  source 1..2643: mol_type = other DNA
atgatggagaccgagcggctggtgctgcccccccccgaccccctggatctgcccctcagggcagtcgagctggggtgcactggacattgggagctcctgaacttacctggggcgccagagtcttcactgcctcacggactccccccatgcgccccagaccttcagcaggaagccgagcagctgtttctctcctctcccgcatggctgccacttcatggagtggagcactccgcccggaagtggcaaaggaagacagacccatggagccttctggctgtcttgggcgcccctgttccttcagatctccaggctcagcggcacccaacgacgggccagattttgggctacaaggaggttctgctagaacactatcttttcaccggaaatagtagtaaaacccagggggaactgtttctgctgctggatagtcggggcgcttttcacacaaaaggttactatgctgccgtcgaagcaaaaaaggaacggatgtcaaaacacgctcaaacctttggcgccaaacagccaacccaccagggcgggcccgcccaggatcgcggcgtgtatctttccctactggcctccctccgcaccagagcacaactgcctgtggttgtatttaccttttcacggggtaggtgtgatgagcaggcgtcaggcctaaccagcttggaccttaccaccagctcggagaagtctgagatccatctgtttctgcagcggtgcctcgcaaggctcaggggttctgacaggcagctaccccaggtgctgcacatgtctgaactcctaaaccggggtctgggtgtacaccactccggtatcctgcctatattgaaggagatcgtagaaatgctgttctcacgcggattagtaaaggtgctgtttgcaaccgaaacctttgccatgggcgtcaacatgccagcacggaccgttgtcttcgacagcatgagaaagcacgacggcagcaccttccgggatcttcttcccggggagtatgtgcagatggctggcagggcaggaagacgggggctcgacccgactgggactgtaatcttgctgtgcaagggtagagtgcccgagatggcggacttacaccgcatgatgatgggaaaacccagtcaactacagagtcagtttaggttaacctacaccatgattctcaacctgttgcgggtggacgcactccgggttgaggacatgatgaagcggtctttcagcgagttccctagtcggaaagactcgaaagctcatgaacaggcactggccgaattaacgaaaagactaggcgctttagaggagcctgacatgaccggacagctggttgatctacccgaatactattcttggggcgaagaacttacggaaacccagcatatgatccagagaagaatcatggagtccgttaacggccttaagtccttgtccgctgggcgggttgtggttgtgaagaatcaggaacaccacaacgccctgggcgtgatactacaagttagttctaacagcacttcacgagttttcacaaccctggtcttatgtgacaaacccctgtcacaagatccacaggacagaggacctgctaccgcggaagtaccctacccagatgacttagtcggttttaaactgtttctgccagaaggtccctgtgaccacacagtcgtcaaactacagccaggggatatggctgctattaccacgaaagtactgagagtgaacggcgagaagatcttagaggatttttccaaacgccaacagccaaagtttaaaaaggacccccctctcgccgccgtgaccacggccgtgcaagagctgctgcggctcgctcaagcccatcctgccggaccgcctaccctcgatccagtgaatgacctacagctgaaggatatgagcgtggtggagggaggacttcgcgcccgcaaactcgaggaattgattcaaggcgcgcagtgtgtgcacagcccccgctttcccgcccaatacctgaagttacgtgaaaggatgcagattcagaaggaaatggaacggctgcgttttttgctttccgaccagtccttgctgctgttacccgagtatcaccagcgggtcgaggtcctccgaaccctaggctatgttgatgaggcaggcaccgtcaaactcgcaggcagggtggcctgcgcgatgagttcacacgagctgctgctgacggagcttatgtttgacaatgctctcagcactttgcggccagaggaaattgccgctctgctttccggcttagtgtgtcagtccccaggggatgctggggatcaactgcctaataccctgaagcagggaatcgaacgggtaagagcggttgctaaaaggatcggagaagttcaagtcgcctgtggcctgaaccagaccgttgaagagttcgtcggagagctgaacttcgggctggttgaggtggtctatgagtgggctcgcggaatgccatttagcgaacttgcaggtctgtcagggacgcctgaagggctcgtcgttaggtgtatacaacggttagcagagatgtgcagatcactgcgtggtgcagcacgactcgtgggtgagcctgtgctcggggccaagatggaaaccgccgcgacactcctgcgtagggacatagtttttgccgcatcactgtacacccaatag

SEQ ID NO: 207410 - DNA, 693 bp, synthetic construct
  misc_feature 1..693: note = Description of Artificial Sequence: Synthetic coding sequence
  source 1..693: mol_type = other DNA
atgatggagaccgagcggctggtgctgcccccccccgaccccctggacctccccttgcgggctgtcgaactcggctgcactggccattgggagctccttaatttaccaggcgcccctgaatctagtcttccccacggattgcctccatgcgcccccgatttacaacaagaggccgagcagctgttcctcagttcccccgcttggttgcctttacacggggtagagcactcagcccgtaagtggcagcggaagacagatccctggagcttgctcgctgtgctcggcgccccggtgccctctgatctccaggcccagaggcacccaactacaggacaaattctcggctataaggaagtgttgctggaaaacacgaatctaagtgctaccacttcgctttccttgcgtcgacctcctggaccagcatctcagtccttgtggggtaatcccactcaataccctttttggcctggtggtatggacgagccaacaataacagacctgaatacccgagaggaggccgaggaggaaatcgattttgagaaggacctcctgacaatccctcctgggtttaaaaaaggcatggactttgcgcctaagggcagcgtgcattcctgtatccacccaagaggaccgcgtgctagtataagtggagcagtggggcatccttgcggcaggcatctgccatgctggtag

SEQ ID NO: 207411 - DNA, 3162 bp, synthetic construct
  misc_feature 1..3162: note = Description of Artificial Sequence: Synthetic coding sequence
  source 1..3162: mol_type = other DNA
atggacttcgcccccaaggactgccccacccccgcccccggcctgctgtccctgtcgtgcctgctggagcccctcgatcttggaggtggggatgaagacgagaacgaagctgtggggcagccaggcggaccgcggggagatactgtgtctgcatcgccctgcagcgccccattagcacgggccagttcgctagaagatttggtgctgaaggaagcttctaccgccgtctcaactcctgaggcacccgaaccaccctcccaggagcagtgggccattccagttgatgctacctctcctgtcggcgatttttataggcttatccctcagcccgcatttcaatgggctttcgagcctgatgttttccagaaacaggccattctgcacctggagaggcacgattcagtctttgttgctgcccacacatcagccggcaagaccgtggtcgctgagtacgcaatcgcccttgcgcagaagcacatgacccggacgatctatacatctcccatcaaagcgctgagcaaccagaagtttcgagattttaggaacacctttggtgacgtcgggctgctgacaggagatgtgcagctccatcctgaagccagctgtttgatcatgacaaccgaaattctgcggtccatgctgtactctggctcggatgtgatccgcgacttagaatgggtgattttcgatgaagtgcactatatcaatgatgtggaacgtggggtggtgtgggaggaggtactgattatgctgccagaccatgtatcgatcatcctgttgtctgcaacagtgcctaacgccctggaatttgccgattggattggacgcctgaagcgtagacaaatttacgtgatcagcactgtgactcggccagtcccgctagagcattatttgtttaccggaaattctagcaaaacccaaggagaactcttcctgctgctcgacagccgaggagcattccacaccaagggatactacgccgcagtcgaggccaagaaggagcgaatgagcaaacacgctcagacatttggtgctaagcagcccacgcaccagggtgggccagctcaggacaggggcgtttacctgtctctgttagcctctctgcgcactcgggcccaactgccggtggttgttttcacgtttagccggggtcggtgcgacgagcaggcctccggactgacatctctagatctgactacttccagcgagaagagcgagattcacctgtttctccagagatgcctcgcccgtttgcgggggtcagatcggcagcttccacaggtgctgcacatgagcgagttgttaaatcgcggactcggtgtgcatcactcagggatactgcccatcttgaaagagatcgtcgaaatgctattttctcgggggctagtcaaggtcctcttcgctacagagacattcgcaatgggcgttaatatgcctgcgagaacagtggtgtttgattccatgcggaaacacgacggctcaacgtttagggatctcctaccaggtgagtacgttcagatggccggacgcgcgggaagaaggggattggacccaaccgggactgttatcctgctttgtaaggggcgggtgccagagatggccgatctacaccggatgatgatgggcaagccgtcccagctgcagagccagttccgcttgacatataccatgatcctgaaccttttgagagttgacgctcttagagtggaagatatgatgaaacggagcttcagcgaatttccttcaagaaaggactcaaaggcccatgagcaggccctggctgagctgaccaagcgactgggagctctggaggaacccgatatgacagggcagttagtggacctgcccgaatactactcctggggtgaggaacttacggagactcaacacatgattcaacgacggatcatggagtccgtgaacggcctcaaatctctctccgcaggccgggtggtggttgtcaaaaaccaagaacatcacaacgcccttggggttatacttcaggtcagttctaatagcacgtctcgcgtgtttacgacactcgtcctgtgcgacaaacccctgtcccaggatccacaggacagaggaccggccactgctgaagtgccctacccggatgatttggtcggatttaagctgttcctgcctgagggaccttgtgaccacactgtcgtgaaactgcagccgggagatatggctgccatcaccacaaaggtgctgcgggttaatggcgagaagattctggaagatttctcgaagaggcagcaacctaagtttaagaaggatcctccacttgccgctgtgaccaccgctgtccaagaactgttgagattggcccaagcccacccagcagggcctcctacgttggaccctgtgaacgatctgcaactgaaagatatgtccgtggtggaaggaggccttagggcgcgcaagctcgaggagctgatccaaggggcacagtgtgttcactctccccgatttccagcacagtacctgaaattacgcgaacgaatgcagatacagaaggagatggagagacttcggttccttctgtcagatcagtctctgctgctgctgcccgagtaccatcagcgtgtggaggtgcttcgcacgttagggtatgtggacgaggctggcactgttaagttagcaggccgagtagcctgcgccatgagctcacatgaactgctgttaactgaactcatgttcgacaacgccttgtccactctgaggcccgaagagatagcagccttgttgagcgggctggtctgccagagtccaggggacgccggggaccagctgccaaacaccctcaaacaaggcatcgaaagggtgcgtgcggtcgccaagcggattggtgaagtccaggtggcatgcggactgaatcagaccgtggaggagttcgtgggagaactgaactttggacttgttgaggtcgtgtatgaatgggcccgtggcatgccgttcagtgagctggctgggctgagcggtacccctgagggcctggtcgtccggtgcattcagaggcttgcagaaatgtgcagaagtcttagaggcgccgcgcggttggtgggcgagccagttctgggcgctaaaatggagactgctgcaacattactgaggcgtgacatcgtttttgctgcatctctctatacgcaatag

SEQ ID NO: 207412 - DNA, 3162 bp, synthetic construct
  misc_feature 1..3162: note = Description of Artificial Sequence: Synthetic coding sequence
  source 1..3162: mol_type = other DNA
atggacttcgcccccaaggactgccccacccccgcccccggcctgttgtctctgagttgtcttttagaaccgctggatctcggaggaggcgatgaagatgagaatgaggctgtgggccagcctggaggccctcggggagacacagtgagcgccagcccttgttccgcccccctagcccgagcctcaagtctcgaagacctcgttctcaaagaggcgtctactgccgtatcaacgccagaagcacccgaaccgcccagtcaagagcagtgggccattcctgtggacgcgactagtcccgtgggcgacttttatcggctgattccacagcccgcctttcagtgggccttcgaacccgatgtatttcagaagcaggccatcctccatttggagcgccacgattccgttttcgttgcagcccacactagcgcaggaaaaaccgtcgtggccgagtacgctatcgccttagcccaaaaacacatgacaagaacgatctacacttcaccgattaaggcactcagcaaccaaaagttccgagactttaggaatacctttggggatgtggggctcctcaccggcgatgtgcagctgcacccggaagcctcctgtctcattatgaccactgagatcctccgctccatgctttatagtggctctgatgtcatccgggatctggaatgggttatattcgacgaggttcactatatcaacgacgtcgagaggggcgtcgtctgggaggaggtgctgattatgctccccgaccacgtgtccattatcctgttaagcgcaactgtgcccaatgccttagagtttgccgactggatcggcagattaaaacggcgccagatctatgtaatctccaccgtgacaaggccagttcctttggaacactacttgtttaccgggaatagctcaaaaacccaaggggaactgttcctcctgctcgactcccgaggggcgttccataccaaaggatactatgccgcggtggaggccaagaaagaacggatgagcaagcatgcgcagaccttcggcgccaaacagccaacccaccagggcgggcccgcccaggatagaggggtctacctcagtctcctggctagcttgcgaacccgagcgcagcttcctgtcgtcgttttcaccttctctcggggcaggtgcgacgaacaggccagcggcctgaccagcctcgacctgacgacaagcagcgagaagtccgaaatacacctgttcctgcagcggtgcctcgccaggctgcgaggcagcgatagacagctgccacaggtgttgcacatgagtgagctactcaaccgaggtctgggcgtccaccatagtgggattttaccgatactcaaggagatcgtcgagatgctattctcacgtgggctggtgaaggtcctattcgccacagagaccttcgctatgggcgtaaatatgccggccaggacagtcgtgtttgattctatgagaaagcacgacggttcaacgttccgggacctcctccctggtgaatatgtccagatggcaggcagagccggacgacggggcttggaccccactgggactgtgattcttctctgtaagggacgagtgcccgagatggcggacttgcataggatgatgatgggtaaaccgagtcagctacaatcccagtttcggttgacttacactatgatcctgaatctcctcagagtagacgctctgagggtcgaagatatgatgaaacggtcttttagcgagttcccatccagaaaggattccaaagcacatgagcaggcactggccgaattaactaaaaggcttggcgcactggaagaacctgatatgacgggtcagctggtcgatctaccagagtactatagctggggggaagaactgaccgagactcaacatatgatccagcgtaggataatggaatctgtgaatggcctcaagagtctctcagcaggccgcgtggtggtcgtgaagaatcaagagcatcacaacgcgctgggagtgattctccaggtatcttctaattctacttcacgagtgttcaccacattggttctttgtgataaacctctctcacaggacccacaggatagaggccccgctacggccgaagtcccgtaccctgatgacctggtgggcttcaagttgttcctcccagagggcccttgtgatcacacggtggtgaagttacagccgggggacatggcggccattacgacaaaagttctgcgggtgaacggagagaaaattctcgaggacttctcgaaacgtcagcagccgaagtttaagaaagaccctcccttggcagccgtgacgacggccgtacaagaactgctaagactggcacaggcccatcccgctggaccgcctaccctggaccctgtgaatgatctgcaactgaaggatatgtccgtggtggagggcggcctccgagcaagaaagttagaggagttgattcagggagcccagtgtgtgcacagcccccggttcccagcccagtatctgaaactgagagagcgtatgcaaatacagaaggaaatggagcgtttacgctttctcctgtctgatcagagtcttttgctcctgcccgaataccaccagagagtggaagtgctgcgaacactcggatacgtggacgaggccggcactgtcaagttagccggacgagtggcttgtgccatgagttcccatgagctgctgctgacagagttgatgttcgacaacgccctctccacactcaggcctgaggaaatcgcagctcttttatcaggactggtgtgccaatctcccggagacgccggagatcagctgcctaacacgcttaaacaggggatcgaacgggtgcgggcagtggcgaagcgcataggcgaggtgcaagttgcatgcgggctgaatcaaaccgttgaagaattcgtgggcgaactgaacttcgggctagtggaagttgtctatgaatgggcccgaggaatgcccttttcagagttggctggtctgtcaggaacccctgaaggattggtggtccgatgcatccagaggctggctgagatgtgccggtccctacgaggcgccgcacgattggtgggcgaaccggtgctcggtgcaaaaatggaaactgctgccaccctcctgaggagggacatcgtgttcgctgcctccctatatacacagtag

SEQ ID NO: 207413 - DNA, 3162 bp, synthetic construct
  misc_feature 1..3162: note = Description of Artificial Sequence: Synthetic coding sequence
  source 1..3162: mol_type = other DNA
atggacttcgcccccaaggactgccccacccccgcccccggcctgctgtctctatcttgcctactcgagcctctggatctggggggcggcgacgaggacgagaacgaggcggtgggtcagcctggaggaccacgtggcgatactgtgtccgcatcaccatgctctgctccgctggcgagggccagtagtttggaggaccttgtcttaaaagaagcaagcactgccgtgagtaccccagaggcgcccgaaccaccatcacaggaacagtgggcgatacccgtcgacgctacttcacctgttggcgatttttacagacttatcccccagccagctttccagtgggcttttgaacccgatgtgtttcagaagcaggccattctgcacctagaacgacacgatagcgtgtttgtagctgcccatacgagtgccgggaaaaccgtggtggccgagtacgccatcgccctggctcagaaacatatgacacggactatatacacatcaccaatcaaagcgctgagtaatcagaagttccgggactttaggaataccttcggtgacgttggactgttaactggtgacgtccagctgcaccccgaggccagctgtctgattatgaccactgagatattaagaagcatgctctactctggctccgatgtgatcagggatctcgaatgggtcatattcgatgaagtgcactatatcaatgatgtagaaagaggcgtggtgtgggaagaggtacttattatgctgcccgaccacgtgagcatcatcctactgagtgccaccgtccctaatgccctggagttcgcagattggattggccgtcttaagaggcggcagatttacgttatttccacggttacacgacctgtacccctggaacactatctcttcacaggcaattcatccaaaacacaaggggagctctttctgcttttggactctcgcggtgcttttcatacaaagggatactacgctgccgtcgaagccaagaaagaacgcatgtctaaacacgcacaaacttttggggccaagcagccgacccatcaaggcggaccggcccaggatcgcggggtttacctctccctcctggcatcattacggaccagagcccaacttcccgttgtggtattcacttttagccgggggagatgtgatgagcaggctagcggactaacaagcttagacctgacgacctcaagtgagaagagtgaaattcacctgtttctgcaaaggtgcctggcccgcctgcgaggtagcgaccgacaactgccgcaagtgctgcatatgagtgagctgctcaatcgcggcctaggcgtgcaccactcagggatcctgccgatactgaaagagattgttgagatgctgttttctcgtggactggtgaaagtgctctttgctaccgagacgtttgctatgggagttaacatgcctgcccggactgtcgtgttcgactccatgaggaaacacgacggctctacgtttcgagacctgcttcctggggagtacgtgcaaatggcgggtcgagccgggcggcggggcctcgatcctacgggcacggtgatcctcctctgcaaaggccgcgtgccagagatggctgatctgcacagaatgatgatgggcaagccgtcacagctgcagtcacagtttagattgacatataccatgatcctgaatctgcttagagtagacgcattgcgggtggaggacatgatgaagcgcagtttttccgagttcccgtcacgcaaggatagcaaggcccatgaacaagccctggccgaacttacaaagcgattgggtgcgctagaggagccggacatgactgggcagcttgtggatctgcccgagtattactcatggggggaagaactcaccgaaacgcagcacatgattcagagacgcattatggaatcagtcaacggtctgaaatccttaagcgctggaagggtggtggtggtgaaaaaccaagagcatcacaacgcactgggtgtaatactgcaggtaagcagcaactccacaagccgagtgttcaccactctggttctgtgtgacaagcccctgtcacaagaccctcaagatcgtggccctgctactgcggaagtgccctacccagacgatctggtgggattcaagctatttctgcctgagggcccatgcgaccacacagtagtcaaacttcagcccggtgatatggctgctataacgacaaaggtcttaagagtgaatggggaaaagatcctggaggatttttccaagcggcagcaacctaagtttaagaaagatcctcccctggcggctgtcacaactgccgttcaggaactgctccgactggcccaagctcacccagccgggccgcctacactggacccggtgaacgacctccagctgaaggatatgtccgtggtggagggcgggctacgcgctcgaaaactggaagaacttattcaaggcgcccagtgcgtccactccccgcggtttccagcacaatatctcaagttgcgagagcgaatgcagattcaaaaggagatggagcggctgagattcctgctttctgatcaatcattgctattattaccagagtaccaccagcgcgttgaagtgctgcgcactctcggttatgtggacgaagccggaacagtgaagcttgcaggacgtgtagcatgcgctatgtcaagtcatgagctgcttttaaccgaactaatgttcgacaatgccctatcgactcttaggcctgaggaaatagccgccctgctgagcggattggtctgccagtccccaggtgatgccggcgatcagcttccgaacaccctcaagcaaggaatcgaacgggtgagagcagtggccaagagaatcggtgaagtccaggttgcttgtggactgaatcagacagtcgaggaattcgtgggcgagctgaattttggattggtcgaagttgtgtatgagtgggctagaggtatgcctttttccgaacttgccggactgagtggaacccctgagggattggtcgttcgttgtatacagagactggcagaaatgtgcagaagcctgcggggtgccgcccggctggtcggggagcccgtcctgggagccaagatggagaccgccgctacactccttaggagggacattgttttcgctgcctcgctgtacacacagtag

SEQ ID NO: 207414 - DNA, 465 bp, synthetic construct
  misc_feature 1..465: note = Description of Artificial Sequence: Synthetic coding sequence
  source 1..465: mol_type = other DNA
atggccaccaaggccgtgtgcgtgctgaagggcgacggccccgtgcaaggcatcattaattttgagcagaaggaaagtaatgggcctgtgaaagtctggggatccatcaagggactcactgaggggttgcacggtttccacgtccacgagtttggagacaataccgcaggctgtacctcggctggaccacactttaatcctctcagtcgtaaacacggaggacccaaagatgaagagcggcacgttggcgatctgggcaatgtgacagcagacaaggatggcgtcgctgatgtctcaatcgaggacagtgtgatctctctgtctggggatcactgcatcatcgggagaactctggtcgtgcacgaaaaagcagacgaccttggcaaaggtggcaacgaagagagcaccaaaaccgggaacgccggctcccggcttgcctgtggcgtgattggcatcgcccagtag

SEQ ID NO: 207415 - DNA, 108 bp, synthetic construct
  misc_feature 1..108: note = Description of Artificial Sequence: Synthetic coding sequence
  source 1..108: mol_type = other DNA
atggccaccaaggccgtgtgcgtgctgaagggcgacggccccgtgcaggggattattaatttcgagcagaaagaaagtaacggtccagagggcgtaggtaagcactag

SEQ ID NO: 207416 - DNA, 1074 bp, synthetic construct
  misc_feature 1..1074: note = Description of Artificial Sequence: Synthetic coding sequence
  source 1..1074: mol_type = other DNA
atggacagcgtggagaagaccaccaaccggagcgagcagaagagcaggaaatttctgaagtccctgattcgcaaacaacctcaggaattattgctggtcattggaaccggggtgtccgctgctgtcgcccctggaatccccgccctgtgctcatggcgcagttgtatcgaggctgtgattgaggccgccgagcaattggaggtcctgcatccgggtgacgttgctgaattccgtcgcaaggtaaccaaagacagggatctgcttgtggtggcccacgatctaatccgtaaaatgtcaccgagaaccggcgatgctaagccaagcttcttccaagattgtctcatggaagtgtttgacgatctggaacaacacattcggtcccccgtcgtgctgcagagcatcctgtccctgatggaccgtggagctatggtcttaacaactaattacgacaatctgctggaagccttcggtcgtcggcagaataaaccaatggaatccttggatctcaaagataaaaccaaagttctggagtgggcaagaggccacatgaaatacggcgtcctccatatccacgggctctacacagacccctgcggggttgtattggacccttccggatataaagatgtcacccaggacgcagaggtaatggaggtgcttcagaatttgtaccgaactaaatccttcttgtttgtgggatgtggtgagacactccgggaccagatcttccaggcgctgttcttgtactccgttcccaacaaggtcgatctggagcactacatgcttgtgctgaaagaaaacgaggaccacttcttcaagcatcaagccgacatgctcctgcacggcatcaaggtggtcagttatggcgactgttttgatcacttccctggctacgtgcaggatctggcaacccagatctgcaaacaacaatcccctgatgccgaccgcgtagattccaccacactgctagggaacgcctgtcaggactgcgccaaacgcaagctggaagagaacggaattgaagtatcaaaaaagcgaacccaatccgacaccgacgacgccggggggtcctag

SEQ ID NO: 207417 - DNA, 636 bp, synthetic construct
  misc_feature 1..636: note = Description of Artificial Sequence: Synthetic coding sequence
  source 1..636: mol_type = other DNA
atggacccccggaaggtgaacgagctgcgggccttcgtgaagatgtgcaaacaggacccctccgtcctccacaccgaggaaatgagatttctgagggaatgggtagagtctatggggggaaaagtcccccccgcgacccagaaggccaagagcgaggagaacacaaaggaagaaaaaccagactcaaagaaggtggaggaggatctcaaggccgacgagccttcctcagaagagtccgatcttgagatcgacaaagagggtgtaatcgaaccggacacagacgcccctcaggaaatgggggacgaaaacgctgaaataaccgaggagatgatggaccaggcgaatgataagaaggtggccgccattgaggctctgaatgacggggagctccagaaggccattgacttatttacagacgcaattaagctcaacccccgcctggccatcctttatgcaaagagagcatcagtatttgtgaagttacaaaagccaaacgcagcaatcagggactgcgaccgtgccatcgagattaacccggactccgcacagccctacaagtggaggggtaaagcccatagacttctggggcactgggaggaagccgcccatgaccttgccttggcttggacccagtag

SEQ ID NO: 207418 - DNA, 489 bp, synthetic construct
  misc_feature 1..489: note = Description of Artificial Sequence: Synthetic coding sequence
  source 1..489: mol_type = other DNA
atgggcggcaaggtgccccccgccacccagaaggccaagagcgaggagaatacgaaagaagagaaacctgacagcaagaaagttgaggaggacttgaaggcagatgagccctcgtcggaggagtctgatctggagatagataaagagggtgtaatcgaacccgacaccgacgccccgcaagaaatgggcgacgaaaatgccgagataactgaggagatgatggaccaggctaacgacaagaaggtcgcggccatcgaagctctaaatgacggggaactgcagaaagccattgacctgttcacggatgccattaaactcaacccgcggctcgccattttgtatgctaagcgagcttctgtttttgtaaaactgcagaagcccaacgccgctattcgggactgcgatcgggctatcgaaataaatcctgatagcgcccagccatataaatggcgcggcaaagcgcaccggctgcttggccattgggagtag

SEQ ID NO: 207419 - DNA, 366 bp, synthetic construct
  misc_feature 1..366: note = Description of Artificial Sequence: Synthetic coding sequence
  source 1..366: mol_type = other DNA
atggacccccggaaggtgaacgagctgcgggccttcgtgaagatgtgcaagcaggaccctagcgttctccatacagaggaaatgaggtttctgcgtgaatgggtagagagcatgggcggaaaagtcccccctgccacccaaaaagctaagtccgaagagaacacgaaggaggagaaacctgactccaaaaaagtggaggaagatctgaaggcggatgagccctcatctgaagagtctgacctggagatcgacaaagaaggagtgatcgagccggacacagacgccccccaggagatgggcgatgagaatgcagaaattacagaagaaatgatggaccaggccaacgataaaagcggttgttactag

SEQ ID NO: 207420 - DNA, 2568 bp, synthetic construct
  misc_feature 1..2568: note = Description of Artificial Sequence: Synthetic coding sequence
  source 1..2568: mol_type = other DNA
atgggcagcgaccgggcccggaagggcggcggcggccccaaggacttcggcgcagggctgaagtacaattcccgccatgagaaagtcaatggactggaggaaggagtcgagtttttgcccgtgaacaacgtgaaaaaagttgagaagcacgggccgggacgctgggttgtattggcagccgtgctgataggcctattattggtgttattgggaatagggttcctcgtatggcacctgcaatatcgggacgtccgcgtgcagaaggtgtttaatggatacatgagaatcaccaatgagaactttgtggatgcctatgaaaattctaatagtactgagttcgtcagccttgccagcaaggtgaaggacgcccttaaactgctgtattccggcgtgcccttcctgggcccttaccacaaagagtctgccgtaaccgccttctctgaaggcagtgttattgcatattattggagcgagttcagcattcctcagcacctggtcgaggaagctgagcgagtgatggccgaagaaagggtggtcatgctgcccccacgtgcccggtctctgaaatcctttgttgtgacctctgttgtcgccttccctacagattccaaaaccgttcagagaacgcaagataactcatgttcatttggcctgcatgccaggggcgtggagctgatgcgttttactacccctggctttcctgacagcccttatcccgcccatgccaggtgtcaatgggcacttcggggtgatgccgatagtgtgctcagcctgacattcaggtcgttcgatctggcatcttgtgatgaaagaggctctgatcttgtgacagtatacaatacgctgtcaccgatggaaccccacgcactggttcagctctgcgggacttaccctccgagctacaacctcacctttcatagttctcagaatgtgctcctgattaccttgatcactaatacagaacgccgacacccaggatttgaagctacatttttccaactgcctcggatgtccagctgcggaggccgtctgcggaaggcccagggaacctttaactcgccttactatccaggacattatcctccaaatatagattgtacttggaacatcgaagtccccaacaaccagcacgtaaaggtgaggttcaaatttttctatctgttggagcctggagtgccagccggtacctgtccgaaagattacgttgaaataaacggcgaaaaatactgtggggagaggtctcagttcgtcgtcacatctaactctaacaaaatcacagtcaggttccattcagaccagtcttacaccgacactgggttcttggctgagtatctgtcctacgattccagcgacccctgccccggtcagttcacatgtcggacaggaagatgtattcggaaagagctgcggtgcgatgggtgggccgactgtacagaccatagtgatgagctgaactgctcttgcgatgccggtcatcaatttacatgtaagaacaaattctgtaaacctctgttttgggtatgcgactctgtgaacgactgcggagacaacagtgacgagcagggctgtagttgtcctgcgcagacattccgctgcagcaacggaaagtgcctgtctaagagtcagcagtgcaacgggaaggacgactgcggagatggttccgatgaagcctcctgcccaaaggtgaatgtggtcacctgcacgaagcacacctacagatgcctgaacggcctgtgtctgagcaaaggaaacccggagtgtgatggaaaagaagactgctccgatgggtctgacgaaaaagattgcgactgtggcctcaggtcattcaccagacaggccagggtggttggaggcacggatgctgatgaaggcgagtggccgtggcaggttagtctgcatgcgctggggcagggacacatctgtggggcaagcctcatatcccctaattggctggtcagcgcagcgcattgttacattgatgatcggggattcagatactctgatcccacccagtggacagcttttttgggccttcatgatcagagtcagagatcagccccaggggtacaggagaggaggcttaagcggatcattagccacccatttttcaacgattttaccttcgactatgacattgcactacttgagctggagaagcctgcagaatactcctctatggtccgccccatatgcctgcccgatgcctcccatgtgtttccagcaggcaaggcaatctgggtcaccggctggggccatactcagtacggagggaccggagcactcatcctgcagaagggagagataagagtgattaaccagacaacttgcgagaacctgttacctcagcagatcactccacgcatgatgtgcgtcgggttcctatcaggtggggttgatagctgtcagggagattccggcgggcccctttcaagcgtagaggcagacggcaggatcttccaggccggtgtagtctcctggggagacggatgtgctcagaggaataaacctggtgtctacacaaggcttcctctgttcagggattggataaaggaaaacacaggcgtgtag

SEQ ID NO: 207421 - DNA, 3414 bp, synthetic construct
  misc_feature 1..3414: note = Description of Artificial Sequence: Synthetic coding sequence
  source 1..3414: mol_type = other DNA
atgaccatgaccgccaacaagaacagcagcatcacccacggcgccgggggcacaaaagcccctagagggacattgagtagatctcagagcgtgtctccgccccccgtactatctccaccccgctcccctatataccctctcagcgatagcgagacttccgcctgcaggtatcctagccattccagtagtcgagtcctcttgaaggatcgtcacccaccagcaccttcccctcagaaccctcaggatccatcccccgacacatccccccctacttgcccatttaagactgccagctttggttacttagacagatcgccgtcagcctgcaagcgtgacgctcaaaaggagtccgtgcagggtgctgcccaggatgtggctggtgtggctgcctgtttgccactggctcagtcaaccccgtttcccggcccagcagcagggccacggggcgtcctgctgactaggacagggacacgtgcacactcactggggatacgcgaaaaaatctccgcttgggaaggaagacgggaggcttccccacggatgtctatgtgtggcgagaagcgggaagggtcaggctcggagtgggccgcatctgagggatgtccttctttggggtgtcccagcgtggtcccgagcccctgtagtagtgagaaaacctttgacttcaagggtctgcgcagaatgtcaagaaccttctccgagtgtagctaccctgagaccgaagaagaaggcgaggcgcttcccgtaagagattcattttaccgccttgaaaagagattgggaagaagtgaaccgtcagctttcctgcgtggacatggttccagaaaagaatcttctgctgtgcttagccggatccagaagatcgagcaggtgctgaaagaacagccaggccgtggcctccctcagttgccctcaagctgttattcagtcgaccgaggcaaacgaaaaacaggtacacttggatcattggaggagcccgcgggtggagctagcgtgtccgcggggtcccgagctgtaggcgtcgccggagtggcgggtgaagccgggccacctccagagagagaaggcagtggctccaccaagccaggcacgccaggaaactcacctagcagtcagaggctgccctctaagtcttctctggatccggctgtcaaccctgtgcccaaacctaaaaggacatttgagtatgaggcggacaaaaatcccaagtccaagccctccaatggcttaccgccatcaccgacaccagcagcccctccaccactgccatcaacacccgctccacctgtaaccaggagaccgaagaaagatatgcgcggccatcggaaatctcagtccaggaaaagtttcgaatttgaggacgcctcctctctgcaaagcctgtacccttccagccctactgaaaatgggaccgagaaccaaccaaagttcggatccaaatcaaccctggaagagaacgcttacgaagatatagtaggcgacttaccaaaggagaacccgtacgaggatgtggaccttaaaagccgtagagcaggccggaagagtcagcagctcagcgaaaactccctcgatagtttacatcgcatgtggtcaccccaggaccgcaagtacaacagccctcctactcagctgagcctgaagccaaatagccaaagcctcagatccggcaactggtcggagcgaaaatctcatcgcttaccccgtctgccgaagaggcactcacacgacgatatgttgttgcttgcacaactatcgcttccaagtagcccctcatccctgaatgaagacagcctttcaacaacatccgaacttctttcatccagacgagcccggcgcatccccaagctggttcagcgaatcaactcgatttacaatgccaaaaggggtaagaaacgcttgaaaaaactgtccatgagctcaattgaaactgcctcccttcgcgatgagaacagtgagtccgaatctgatagcgacgatcgctttaaagcccatacccaaaggctggtgcacattcagagcatgctgaaaagggccccctcatataggactctggagctggagctgctcgagtggcaggagcgcgagctgttcgagtacttcgttgtggtgagccttaagaagaagccctcccggaacacctacctgccagaagtgagttatcaattcccaaaacttgaccgacccaccaaacagatgagggaagctgaggagagactgaaggcaattcctcagttctgtttccccgatgccaaggactggcttcctgtgagcgagtactccagtgagaccttttctttcatgttaaccggggaagacggatcacgccggttcggctactgtcgccgtctgctcccatctggcaaaggccctcggttacccgaagtgtactgcgtgatttcgagactgggttgcttcggcctgttcagtaaggtgctcgatgaagtggagaggcggagaggtataagcgccgcccttgtgtaccccttcatgaggtccttgatggaaagccctttcccagcccccggcaaaaccattaaggtgaaaaccttcctaccaggggcaggaaatgaggttctcgagctgcgccggccgatggactccaggctcgagcacgtcgattttgaatgtctgttcacttgcctgtccgtgcggcaactgatcaggatcttcgccagcctgctacttgagcgaagagtgatattcgtcgccgacaagctgtccactctgagcagctgctctcatgcagtcgtggctctcttatatcctttcagttggcagcacacttttatacccgttctgccagcaagtatgatcgacatcgtgtgttgtcccaccccatttttggtcggcctattgagcagctccctccctaaacttaaagagctgccagtggaggaagcactgatggtaaacctcgggtctgataggtttatccgccaaatggacgacgaggatacccttctgccacggaagctccaggccgccctggaacaggccctagagcgcaaaaacgagctcatctctcaagactcagacagcgattcggatgacgaatgcaacaccttgaacggactagtgtcagaggtcttcatcagattcttcgtggagacggtcgggcattatagtttatttttgacacagtccgagaaaggtgagcgtgccttccagcgggaagcctttagaaaaagcgtggcgtccaaatctattcgaaggttcctggaggtgtttatggaatcccagatgttcgccggattcatccaggatagggagctgcgcaagtgcagagccaaggggctgtttgaacaaagggttgagcagtatctagaagaactgccggataccgagcagagcggcatgaacaagttcttgcgggggttgggcaacaaaatgaagtttcttcacaagaaaaactag

SEQ ID NO: 207422 - DNA, 3414 bp, synthetic construct
  misc_feature 1..3414: note = Description of Artificial Sequence: Synthetic coding sequence
  source 1..3414: mol_type = other DNA
atgaccatgaccgccaacaagaacagcagcatcacccacggcgccggtggaactaaagctccccgcgggacgctgtcgcggagtcagtctgtatccccaccccctgtgcttagtccgccgaggtcccccatttatcccctgtccgattcagagacttctgcttgcagatacccctcacacagtagttcccgtgtcctcctgaaggatcggcacccccctgcgcccagcccccagaaccctcaggacccttcccctgacaccagcccaccaacgtgtccttttaagaccgcatcattcggctacttagacagatccccatctgcatgtaaacgagatgcgcaaaaagagtccgtacagggcgctgcccaggacgtggctggggtggctgcctgcctccctctggctcagagtacaccattcccaggccccgccgccggccctagaggggttttgctgacccggacgggcacccgagcacatagtctgggcattcgcgaaaagataagcgcatgggaggggcgaagggaagcgtctcccaggatgagcatgtgtggggagaaacgggagggctcgggatcagaatgggcagccagtgaggggtgtccatccctcggttgcccttccgttgtacccagcccgtgtagtagtgagaagactttcgattttaaggggctgaggcgtatgtctcgcacattcagcgaatgctcttaccccgagaccgaggaagagggcgaagctctgcctgtccgagatagcttctaccgattggaaaaaaggctcggaaggtccgagccatccgcctttcttaggggccacggatctcgtaaggagagttccgctgtgctgtctagaattcagaaaattgaacaggtgctgaaagagcagcctgggcgcggcctgccgcaactgccttcctcttgctactccgtggatagaggaaagagaaagacaggcacactgggatcactcgaagagcctgctgggggtgcttccgtgagtgctggaagtagagctgtcggggtggctggagtcgcgggcgaggccggcccacctcccgaaagggaaggcagcggcagcactaagcccggtactcctgggaattctccgtccagtcaaaggctaccatctaaaagctcgctggatccggccgtgaaccctgtgcctaaacccaagcgtacattcgagtacgaagcagataaaaaccccaagtccaagcccagtaacggactacctccgtcacctacaccggctgctccaccgccactcccttcaacacccgccccgcccgtgacgcgccgacctaagaaagatatgaggggccacagaaagtcccagtcaagaaaatcttttgaattcgaggacgcatccagtctgcagagcctgtatcctagctcccccacagaaaacggtaccgaaaaccagccaaagttcggaagcaaaagtacattggaggagaatgcttacgaagatatagtgggcgatctgccaaaggagaatccttatgaggatgtcgacttgaagagccgccgggcaggtagaaaaagtcaacagctctccgagaactctttagactctcttcataggatgtggtcccctcaagaccgaaaatacaacagccccccaacacagttgtcattgaaaccaaacagtcagtcccttcggtctggaaactggtcggaaagaaagtcccaccgactgccccgtctgccgaagagacactcacacgacgacatgctgctcttggcacaactgtccctgccttcaagccccagttcactgaacgaagacagtctttcaactactagtgaactactgtcgtcacggagggccaggcgtatccctaaacttgtacagcggattaatagcatctataacgcgaagcggggaaagaaaaggttgaaaaagctatctatgagttccatcgagaccgccagcctgcgagatgagaatagtgagagcgaaagtgactctgatgatcgctttaaggcccacacacagaggttggtgcacatccaaagcatgcttaagagagctcccagctaccgcacgctggaactggaattactggagtggcaagagcgggagctgttcgaatactttgtcgtggtgtccttaaagaaaaaaccatctcgcaacacctacctcccagaggtatcttatcagtttccgaaactagataggccaaccaagcaaatgagggaagctgaagaaagactaaaggccatcccccagttttgcttccctgatgcaaaggactggctgcctgtgtcagaatattcgtctgagacattttcattcatgctgaccggtgaggacggctcccgccgattcggctattgccgtcgacttttgcctagtggcaagggaccaagactgcccgaagtgtactgcgtaatatccagacttggatgtttcggcctcttctccaaggtcctcgatgaggttgaacggagaagggggatttcagctgcccttgtgtatccgtttatgcgttccttaatggagtctccctttcccgccccaggtaaaaccataaaggtcaagacctttctaccaggcgcaggcaatgaggtgctggagctacgcaggcctatggattctagattggagcacgtggacttcgaatgtctgttcacatgcctgagcgttagacagctgatccgtatttttgccagcctgctgttagagcgaagagttatattcgtggccgacaagctgagcaccctctcttcttgcagccacgcggtcgtggccttattgtatcccttctcatggcagcacaccttcatccctgttttacctgctagtatgatagacattgtgtgttgcccgaccccctttctggtcggattgctctccagttcccttcctaagctgaaagagttacccgtcgaagaagcattgatggtcaatctgggaagtgacagatttatcagacagatggatgatgaggatacccttctgccgcgaaaattgcaggcggctttggaacaggccctggaaaggaagaatgagctgatctcccaggactctgactccgactccgacgatgagtgcaacacgctcaatggactggtctcagaggtttttatacgattttttgtggaaaccgtcggccactactcgctgttcttgacccagagtgaaaagggtgaacgcgccttccagcgtgaagcctttcgaaagtctgtcgcttccaagtcaatcaggcgattccttgaggtcttcatggagtcccagatgttcgccgggttcattcaagacagggagctcaggaagtgccgggccaaaggtctgtttgagcaaagagtggaacagtatctggaggagctcccagatacggagcagtcaggaatgaacaaatttttgaggggactggggaataaaatgaagtttctgcacaagaaaaattag

SEQ ID NO: 207423 - DNA, 1263 bp, synthetic construct
  misc_feature 1..1263: note = Description of Artificial Sequence: Synthetic coding sequence
  source 1..1263: mol_type = other DNA
atgaccagccggaagaacggcggcggcgcccacagctggcaggagacaccctgggagcaaagacgcgctctcggtttgcaacgggctgagatgactatgacagcgaacaagaattcaagcatcacccatggcgctggtggaaccaaagcacccagagggactctgtcaagaaaaagcttcgagttcgaggacgcctcctccctgcagtctctgtacccgtcctcccccaccgaaaatggtaccgaaaatcagcctaaattcggctcgaaatcaaccctggaagaaaatgcctacgaggatattgtgggcgacctccccaaggagaatccctacgaggacgtggatctgaagtctcgtcgggctggccgaaagtctcaacagctcagtgagaactcactggactcactgcaccggatgtggtctccccaagacaggaaatacaactcccctcccacccagttatcgctcaaaccaaacagccagagcctccgatcagggaactggtctgagagaaagagccacaggcttcccagactgcctaaacgccactctcacgacgatatgctgttgctcgcccaactcagtctgcccagtagcccaagctcactgaatgaggattcgctgagcacaacctccgaactgttaagttcacggcgagcccgtagaataccaaaactggttcaacggattaactccatctataatgcaaaacgcggtaagaaacgactgaaaaaactgtccatgtctagcatcgagaccgcatccctccgggatgagaacagcgaaagcgaaagcgacagcgacgatagattcaaagcccacacacagaggcttgtccacatccagtcaatgctgaaaagggcgcctagctataggaccctggaactcgaactgttggaatggcaagaacgcgaattgttgagcaccctttggtggtgtccctctagacgcagccaccgggagacccccacttcgcccaagtctccaacctcctttccaaggaacgttctgtcccccgccctacacgtcgcagccggctcgttttcgttcctgcgactgtgctcttcaaggacctcttttcgccgcagtgttcagacgcctgcctggtcaccgtctcccgcccagttggcacttctggacaggcccacaaagcaaatgcgagaggccgaggaacgactgaaggctatccctcaattttgtttcccagatgctaaggattggctacccgtgtctgaatacatgcgcccgtttctgagttgttag

SEQ ID NO: 207424 - DNA, 174 bp, synthetic construct
  misc_feature 1..174: note = Description of Artificial Sequence: Synthetic coding sequence
  source 1..174: mol_type = other DNA
atgaccatgaccgccaacaagaacagcagcatcacccacggcgccggtggcaccaaagcacctaggggcactctgtcgaggagccagagcgtgtccccacccccagtgcttagcccccctagatcgccgatttatccgcttagtgatagcgagaccagtgcctgtcgttactag

SEQ ID NO: 207425 - DNA, 123 bp, synthetic construct
  misc_feature 1..123: note = Description of Artificial Sequence: Synthetic coding sequence
  source 1..123: mol_type = other DNA
atgaccatgaccgccaacaagaacagcagcatcacccacggcgccggaggcacgaaagcgccaaggggaacactcagccggtcccagtccgtgtctcctccacccgttttgtcaccaccttag

SEQ ID NO: 207426 - DNA, 144 bp, synthetic construct
  misc_feature 1..144: note = Description of Artificial Sequence: Synthetic coding sequence
  source 1..144: mol_type = other DNA
atgtggagcccccaggaccggaagtacaacagcccccccacccagttgtcactgaagccaaactcacaatcactcaggagtggcaactggagcgagagaaaatcacaccgactgccacgcctgcccaagagacattcccattag

SEQ ID NO: 207427 - DNA, 219 bp, synthetic construct
  misc_feature 1..219: note = Description of Artificial Sequence: Synthetic coding sequence
  source 1..219: mol_type = other DNA
atgaccatgaccgccaacaagaacagcagcatcacccacggcgccggcggaaccaaggctccgagaggcacattaagcaggaagtctttcgagtttgaggacgccagcagtttgcagtcactctatccttcatctcccacagaaaatgggactgagaatcagccgaaattcggcagcaagtctactttggaggaaaacgcatatgaggatatagtgtag

SEQ ID NO: 207428 - DNA, 375 bp, synthetic construct
  misc_feature 1..375: note = Description of Artificial Sequence: Synthetic coding sequence
  source 1..375: mol_type = other DNA
atgaccatgaccgccaacaagaacagcagcatcacccacggcgccgggggcaccaaggccccgaggggtacccttagcaggtcccagtctgtcagccctccacccgtgcttagccctcctcgctcaccaatttacccgttgtctgatagcgagacatccgcttgccggtatccttctcacagttcctctagggtgcttctcaaggacaggcatccacctgctccaagtccacaaaatccacaagacccttctccagataccagtccccccacatgcccgtttaaaacagcctcattcggctatcttgatagaagtccctctgcctgcaaacgggacgcccagaaagaatctgtgcagggagccgcccaagattag

SEQ ID NO: 207429 - DNA, 429 bp, synthetic construct
  misc_feature 1..429: note = Description of Artificial Sequence: Synthetic coding sequence
  source 1..429: mol_type = other DNA
atgaccatgaccgccaacaagaacagcagcatcacccacggcgccggcgggacaaaggccccccgggggaccctctcaagatcacagtcagtgtccccgccacctgtattgtcacctccccgttccccaatctaccctctgtctgactccgagactagtgcgtgtagatacccttcacactccagcagccgtgtgctgttgaaggatcggcacccgcctgcaccctcgccccagaatccacaggatccttcgccggacactagccctccaacatgtccatttaagaccgcctcattcggttacctcgataggtctccctcagcgtgcaaacgcgatgctcagaaagagagtgtgcagggggctgcacaggacgttgccggagttgccgcctgtctgccactggctcagtcaaccccattcccaggctag

SEQ ID NO: 207430 - DNA, 2154 bp, synthetic construct
  misc_feature 1..2154: note = Description of Artificial Sequence: Synthetic coding sequence
  source 1..2154: mol_type = other DNA
atgaccatgaccgccaacaagaacagcagcatcacccacggcgccgggggcaccaaggccccacgcggtacattaagtcgaaaatccttcgaattcgaggatgcctcctccctgcagtcactgtatccttcaagcccaactgagaatggcacagagaaccagccaaaatttggaagtaagagtactcttgaagagaatgcctacgaagatatcgtgggtgaccttcctaaagaaaatccctacgaagacgttgacctgaagtccaggcgcgcaggtagaaaatctcaacaactctccgaaaacagcttagatagcttacaccgtatgtggagccctcaagaccgaaaatataacagtccacccacacagctgagccttaagccaaattcccagtcccttagatccggaaactggtccgagagaaagtcacacagattgccgagactgcctaaacgccattcacacgatgacatgcttctgctagcacaactgtccctgccctcaagcccatcctccttaaatgaggactcactctccaccacctccgagctgctctcctctagacgggccaggcgtatcccaaaacttgtccagagaatcaatagcatttataacgccaagagggggaaaaagcggctgaaaaagttgagtatgtctagtattgaaacggctagtctgagagacgagaattcagagtccgaaagtgactcagacgaccggtttaaggctcatactcagcgcctggtacacatacagtcaatgcttaagagggctccctcctatcggaccctggaactcgagctgttggagtggcaggaacgggaactgtttgaatattttgtggttgtttctctgaaaaaaaagcccagtcgcaacacctacctccccgaagtgagctatcagttccccaagctggacaggcccacaaagcagatgagggaggctgaggagagactaaaagccataccgcagttctgttttcctgacgccaaggactggctgccagtgtcagagtacagtagcgagacattctccttcatgctaactggcgaggatggctctcggcgatttggctactgtaggcgactcctgccgtcaggcaaggggcccaggctgccagaagtctactgcgtaatcagtcggctgggctgtttcgggctgttctctaaagtcctcgatgaagtcgagcggcgcagaggcatttctgcagccctggtttatccattcatgcggagcttgatggagagcccttttccggcacccgggaaaacaataaaggtcaaaacattcctacccggcgctggcaacgaagtcctggagttgaggcggcccatggactctcggctcgagcatgtagatttcgagtgtttgtttacctgcctgagtgtaaggcagttgattcgcatcttcgccagcctactcctggaaagaagagtcatttttgttgcagataagctgtcgacgttaagttcatgctcccatgcggtagtggccctcctgtaccctttttcttggcaacacacattcattccggttctaccggccagtatgatcgacattgtctgctgcccaaccccattcctggtagggctgctttccagcagccttccgaaactgaaggagttaccagtggaggaggccctgatggtgaacctgggatccgacagattcatcaggcaaatggatgatgaggatacgctcctgcctcgcaaactccaggccgctctggaacaggctctggagaggaagaatgaactcatatcccaagactccgactctgacagcgatgatgaatgtaacaccctgaacggacttgttagcgaagtgtttatcaggttcttcgtggaaaccgtaggccactattccttgtttcttacccaatccgaaaagggtgagagagccttccagagggaggcatttcgcaagtcagtggcttccaaatccatccggagatttctcgaagtatttatggagtcgcaaatgttcgccggcttcattcaagatcgggaactgaggaagtgtagagctaagggattatttgagcagcgggtcgaacaatatttggaggagctgcccgacactgaacagagtgggatgaacaaattcttgcgaggacttgggaacaagatgaaattcttacacaagaaaaattag

SEQ ID NO: 207431 - DNA, 159 bp, synthetic construct
  misc_feature 1..159: note = Description of Artificial Sequence: Synthetic coding sequence
  source 1..159: mol_type = other DNA
atgaccatgaccgccaacaagaacagcagcatcacccacggcgccggcgggaccaaggcaccacgagggacacttagccggagccagagtgtatctccaccccctgtgctttcgccaccacgctctcctatataccccctgagtgacagcgagacttag

SEQ ID NO: 207432 - DNA, 336 bp, synthetic construct
  misc_feature 1..336: note = Description of Artificial Sequence: Synthetic coding sequence
  source 1..336: mol_type = other DNA
atgaccatgaccgccaacaagaacagcagcatcacccacggcgccggtgggacaaaagcaccacgggggacattgtcccgaagccagtctgtgagtcctccaccagtcctgtcccctccgcgaagccctatctatcctctgagtgactcagagacctcagcttgccgatacccctcgcactcctcttcgagagtactcctgaaggatagacatcccccagctccatcacctcagaacccacaggacccttctcctgacacatccccaccgacttgcccctttaagaccgctagtttcggatacttggacagatccccatccgcctgtaaacgctag

SEQ ID NO: 207433 - DNA, 162 bp, synthetic construct
  misc_feature 1..162: note = Description of Artificial Sequence: Synthetic coding sequence
  source 1..162: mol_type = other DNA
atgaccatgaccgccaacaagaacagcagcatcacccacggcgccggcggaactaaggcccccagaggcacactgtcgcgttcacaaagtgtttcacccccaccagtgctttcccccccaagatccccaatctaccctctgagcgactccgagacttcctag

SEQ ID NO: 207434 - DNA, 252 bp, synthetic construct
  misc_feature 1..252: note = Description of Artificial Sequence: Synthetic coding sequence
  source 1..252: mol_type = other DNA
atgaccatgaccgccaacaagaacagcagcatcacccacggcgccgggggcactaaggccccccgaggcacactcagtaggagtcagagcgtctctccacccccggttttatctccgcctagaagtcctatctacccgctatccgacagcgagacttcagcgtgcagatatccatcacattcatccagtagggtcctcctgaaggacaggcacccccctgcccctagcccccagaatccacaggatccatag

SEQ ID NO: 207435 - DNA, 288 bp, synthetic construct
  misc_feature 1..288: note = Description of Artificial Sequence: Synthetic coding sequence
  source 1..288: mol_type = other DNA
atgaccatgaccgccaacaagaacagcagcatcacccacggcgccgggggcacaaaagcccccaggggtacactctcccggagtcagagcgtttcgccgccccccgttctaagtccccctagaagccccatatatcccctgtcagatagtgagacttccgcgtgccggtacccatcccattcctccagtcgcgtgctgcttaaggaccgacatccgcctgcaccctccccccaaaaccctcaggatccttccccagacacttctcccccaacgtgtccttttaaatag

SEQ ID NO: 207436 - DNA, 465 bp, synthetic construct
  misc_feature 1..465: note = Description of Artificial Sequence: Synthetic coding sequence
  source 1..465: mol_type = other DNA
atgaccatgaccgccaacaagaacagcagcatcacccacggcgccggaggtaccaaagccccacgaggcactctgtcccgatcacagagcgtgtcgccccctccagttctgagtccaccaagatcccccatctatcccctctctgactcggaaactagcgcttgcaggtatcctagccatagcagtagccgcgtgctgctgaaagacaggcatccacctgcccccagcccccaaaatccacaggatccttctccagacacatcaccacccacttgcccctttaaaactgcatccttcggatatctggaccggagtccatcagcatgtaaacgtgatgcacagaaggagagtgtacagggtgccgcccaggatgtggccggagtggctgcctgcttgcctctagcacaatccacaccatttcccggtccagcagcaggacctcgtggtgtcctgctcacaaggtag

SEQ ID NO: 207437 - DNA, 540 bp, synthetic construct
  misc_feature 1..540: note = Description of Artificial Sequence: Synthetic coding sequence
  source 1..540: mol_type = other DNA
atgtggagcccccaggaccggaagtacaacagcccccccacccagctgtctctaaaaccaaatagccagtccctacgctctgggaactggagtgagagaaaatctcacagactgcccaggctccccaagagacacagtcacgatgacatgttgcttcttgcccagttgtccctaccctctagcccttcctccctgaacgaggattcgttgagtacaacctctgagcttctgagttcaaggagagcccgaagaattcccaagcttgtgcaacgcatcaactccatctataatgcaaaacgcggtaagaagcgactgaaaaaactctccatgtcttccatcgagactgcaagtctgcgagacgagaatagcgagtctgagagcgactctgacgaccgtttcaaggcccacacacaacgtctggtacatatccaatcaatgctcaaacgcgcccccagttatcgcactctggaactcgagctactggaatggcaggagagggagctgtttgagtacttcgttgtggtgagtctgaagaagtag

SEQ ID NO: 207438 - DNA, 2154 bp, synthetic construct
  misc_feature 1..2154: note = Description of Artificial Sequence: Synthetic coding sequence
  source 1..2154: mol_type = other DNA
atgaccatgaccgccaacaagaacagcagcatcacccacggcgccggtggcacaaaagcccccaggggaacactctctcggaagagctttgaatttgaggacgctagctccctgcagtccctgtatccatcttccccaaccgagaatggcacggagaatcagccgaagttcgggtctaagtcgacactggaagagaacgcctatgaggacatcgtcggagacctgcccaaggagaatccttatgaagatgtggatcttaagagccggcgtgccggtcggaaaagccagcaactatccgagaactcactcgacagccttcataggatgtggagcccccaagatagaaaatacaactcaccacctacacagctgagtctgaagccaaactcacaatctttgcgctcaggtaactggtccgagagaaagagtcatagactgccccgcctgcccaaacggcactcccacgacgatatgctgttgctggcccagctttccttacccagtagtccctcctcactgaatgaggatagcttgtccactacatctgaacttctctcaagcaggcgcgctagaaggataccgaagcttgttcagcgtattaatagcatctacaatgcaaagagaggaaagaaacgcctcaaaaaactgtcaatgtcgtccatagaaacagcatcactgcgggacgagaattccgaatccgagagtgattcagatgacaggtttaaggcccacactcagagactggtccacattcagtccatgctcaagcgggcaccctcctacagaacgttagagttagagctgctagagtggcaggaacgggagctctttgagtacttcgtggttgtatctctgaaaaagaagccatcccgtaacacttacctgccggaggtgtcttatcagttccccaagctggacagaccgactaagcaaatgagagaagcagaggagagattaaaggcgataccccagttctgctttccggatgctaaggactggctcccagtgagtgagtattcttcggagacctttagcttcatgctgaccggagaggacgggtctagaaggttcggatactgcagacgcttacttccaagcgggaaagggcctcgtctgcctgaagtatattgcgtaataagtcgactggggtgctttggccttttttccaaggtgctggacgaagtggaaagaaggcgaggtatttctgccgcactggtgtaccccttcatgaggtctctgatggagtcgccattccctgcaccaggaaagacgattaaagtgaaaacatttctgcccggcgccggcaatgaggtactggagctacggcgtcccatggacagccggctggaacacgttgattttgagtgtcttttcacctgtctgagcgtgcgccaattaatccggatttttgcgtctttgcttctcgagaggcgcgtgatcttcgtggccgacaaactcagcactctttcttcttgctctcacgcggtggttgccctcctgtaccctttctcctggcagcacacatttataccggtgctcccggcttcgatgatagatatcgtctgctgtcccacccccttcctagtaggactgctgtcttcatccttgcccaagctgaaagaactccccgtggaggaagctcttatggttaacctgggcagcgatagattcatccgccagatggatgatgaggacacactgctgccgcgaaaacttcaggcagcgttggaacaggccctggagcggaagaatgagctgatcagccaggatagcgattccgatagcgatgatgagtgcaacactctcaacggactcgttagcgaagtattcataaggttctttgtagaaacagtgggtcattattctttgttccttacacagtcggaaaagggggagagagcattccagcgagaagcctttcggaaaagcgttgcctccaaaagtattcggagattcctcgaggtgttcatggaatctcaaatgttcgccggcttcatacaggaccgtgagttgcggaaatgtcgtgccaaaggcctgtttgagcagcgggtggagcaatatctcgaagaactgcctgataccgagcaaagcggaatgaacaagttcctccgggggcttggtaataaaatgaagttcttacacaagaagaactag

SEQ ID NO: 207439 - DNA, 411 bp, synthetic construct
  misc_feature 1..411: note = Description of Artificial Sequence: Synthetic coding sequence
  source 1..411: mol_type = other DNA
atgaccatgaccgccaacaagaacagcagcatcacccacggcgccggcggaaccaaggctcctcgggggaccctgagccgaaaatcctttgaatttgaagatgcctctagccttcagtccctgtatccaagctctccaacggagaatggcaccgaaaaccagccgaaattcggaagtaaaagcacactggaggaaaatgcctatgaggatatcgttggcgacctaccaaaggaaaatccgtatgaggatgtcgacctcaagagccggagagctggaaggaagtctcagcagctgtccgagaatagcttggacagtttgcataggatgtggagcccccaggatagaaagtataatagtccacccacacaactctctctgaaaccaaacagccagagtcttcgatctggttag

SEQ ID NO: 207440 - DNA, 225 bp, synthetic construct
  misc_feature 1..225: note = Description of Artificial Sequence: Synthetic coding sequence
  source 1..225: mol_type = other DNA
atgaccatgaccgccaacaagaacagcagcatcacccacggcgccgggggaacaaaagcccctcggggcacattgtctaggtctcagtcagtctctccgccccccgtactcagtccacccaggtctccaatctatcctctatccgattcggagacttccgcctgtagatatccttctcacagctcttcacgagttctgctgaaagaccgccatccgcccgcctag

SEQ ID NO: 207441 - DNA, 420 bp, synthetic construct
  misc_feature 1..420: note = Description of Artificial Sequence: Synthetic coding sequence
  source 1..420: mol_type = other DNA
atgaccatgaccgccaacaagaacagcagcatcacccacggcgccggtggaacgaaggccccacggggaactctctctcggtcccagtcggtgtccccgcccccagttctaagccctcctagaagcccaatatacccactctccgactctgagacgagcgcttgccggtatccgtctcattcttcctcccgtgttttgctgaaggacaggcaccctcccgctcctagcccacagaatcctcaggatccttcaccagacacctctccacccacatgtccatttaaaaccgcaagctttggttacttagatcggtctccgtcagcatgtaaaagggacgcgcagaaagagtcggtgcagggggccgctcaggacgtcgccggtgttgcagcttgcctgcctttagcccaatccactccatag

SEQ ID NO: 207442 - DNA, 1830 bp, synthetic construct
  misc_feature 1..1830: note = Description of Artificial Sequence: Synthetic coding sequence
  source 1..1830: mol_type = other DNA
atgtggagcccccaggaccggaagtacaacagcccccccacccagttgagcctgaaaccaaattctcagtccctgcgaagcggtaattggtccgagcgcaagtcccacagactgccaagactgcctaaaagacactctcatgatgacatgctgcttctggcacagcttagcctgccctcttcaccttcttccttaaacgaagattctctgtcgacaacatctgagctgttgtctagccgtcgtgccagaagaatcccaaagttggtgcagcggataaacagcatttacaacgccaaacgcggaaagaaaagactcaaaaagctgtcaatgagcagcatcgagacagcttctctccgagatgaaaacagtgaatccgaaagcgattcggatgatcgcttcaaggcccacactcagaggctggtccacatacagtctatgctcaagcgggcaccttcatacaggactctcgagcttgagctgttagaatggcaggaaagggagctgtttgagtatttcgttgttgtgagcctgaaaaagaagccctcccgcaatacctacctgcctgaagtctcttatcagttccctaagttggataggcccaccaaacagatgagagaagccgaggaaagactgaaagctattcctcagttttgtttccccgacgcgaaagattggttgcctgtttctgagtactctagtgaaaccttctcatttatgctgacaggggaggatggaagcagaagattcggttactgcagacgattgcttccctccgggaaaggcccccggctgccagaggtttattgcgtgatctcaagactgggttgcttcggtttgttcagtaaggtcctggacgaggtggagcgtcgtaggggcatttccgcggctcttgtttatcctttcatgcgcagccttatggagtctcccttccctgcgcccggaaagacaatcaaggtgaagaccttcctgccaggagcaggcaacgaagtgctggagctacgtcgtcccatggattcccgccttgaacacgttgactttgaatgtctgttcacctgtctgtcagtccgtcaactgatccgcatttttgcttctctcctcctggagcgcagggttatcttcgtagcagataagctgtcgactctctcctcctgcagtcatgccgtggttgcactgctgtatccattctcttggcagcatactttcatccctgtgctgcccgcttccatgatcgacattgtttgctgccctacaccatttttggtgggtctgctttcgtcctcactgccaaagctgaaggagctgcccgtcgaagaggccttgatggtgaatctcggctctgaccgattcatacgacaaatggatgatgaggacacactcctccccagaaagctacaggccgcactagagcaggctctggagaggaagaatgaattaatctcccaagatagcgattcagactccgacgacgaatgcaacacattaaatggccttgtgtccgaggtttttataagattctttgtcgagacagtaggacattactctctcttcctcacacagagcgaaaagggagagagagccttccagcgagaggcattccgaaagagtgtcgcctctaaaagcatcaggcgcttcttggaagtgtttatggagagtcaaatgtttgccgggtttattcaggacagagaattgcgtaagtgccgcgccaagggactcttcgaacagagggtggaacagtaccttgaagaactcccagacacggagcagtccgggatgaacaaattcctgagagggctgggcaacaaaatgaaattcctccacaaaaagaattag

SEQ ID NO: 207443 - DNA, 234 bp, synthetic construct
  misc_feature 1..234: note = Description of Artificial Sequence: Synthetic coding sequence
  source 1..234: mol_type = other DNA
atgaccatgaccgccaacaagaacagcagcatcacccacggcgccggaggaacaaaggcccccagaggtacactgagccgaaagtccttcgagtttgaggacgcctccagtcttcagtcattgtacccctcttcgcccacagagaacggcacagagaatcagcccaagttcggctccaaaagtacgctggaggaaaatgcctatgaggacatcgtaggagacctgccaaagtag

SEQ ID NO: 207444 - DNA, 81 bp, synthetic construct
  misc_feature 1..81: note = Description of Artificial Sequence: Synthetic coding sequence
  source 1..81: mol_type = other DNA
atgaccatgaccgccaacaagaacagcagcatcacccacggcgccggtggaacaaaggcccctcgcggaactctgtcttag

SEQ ID NO: 207445 - DNA, 1035 bp, synthetic construct
  misc_feature 1..1035: note = Description of Artificial Sequence: Synthetic coding sequence
  source 1..1035: mol_type = other DNA
atgtggagcccccaggaccggaagtacaacagcccccccacccagttatcgcttaagcccaatagccagagcctgcgttcagggaattggtcagagagaaagagccaccggttacctagactgcctaagcgacacagccacgacgatatgctcctcctcgcccagcttagtcttccctcatcaccaagctccctgaatgaagactcccttagcaccacaagcgagctgctcagctcgcggcgagcccggaggatccccaagttagttcagaggattaattcaatttacaacgctaagcgtggcaagaaaagactaaaaaaattatctatgtcttccattgaaacggcgagtttacgggatgaaaattccgaaagcgagagcgactcagatgaccgcttcaaggcccacacacagcgcctcgttcacattcagtcaatgttgaagcgcgctccttcatataggactttagaactcgagctgttagagtggcaggagagagagctgtttgagtacttcgtagtcgtgtcgctaaagaagaagccttctaggaatacatacctgcccgaggtgagctaccagttcccgaagctggatcgtcccactaaacagatgcgcgaggccgaggaacggcttaaagcgatccctcagttctgtttcccagatgcgaaagactggctgccagtgtcagagtacagcagtgagactttttcttttatgctgacgggtgaggatggtagcagaaggtttggatactgtcggcgcttactgccctcgggcaagggcccacggctccccgaagtgtactgtgtcatcagcaggcttgggtgttttggactgttcagcaaagtgctggacgaggtcgagcggaggcgaggcatctcagctgccctggtgtatccattcatgcgtagcctcatggagtcaccattccccgcccccggcaaaactataaaggtgaagacattcctccccggggctggaaacgaggtgctggaattgagacgaccaatggattccaggctggagcacgtgtag

SEQ ID NO: 207446 - DNA, 231 bp, synthetic construct
  misc_feature 1..231: note = Description of Artificial Sequence: Synthetic coding sequence
  source 1..231: mol_type = other DNA
atgaccatgaccgccaacaagaacagcagcatcacccacggcgccgggggcacaaaagcacctcggggcacccttagccggaaatcgttcgagtttgaagacgcttccagccttcaaagcctttatccctcaagtcccacggagaacgggacggaaaaccagccaaagtttggctccaagagcaccctggaggagaacgcctacgaggacattgtcggggatctgccctag

SEQ ID NO: 207447 - DNA, 225 bp, synthetic construct
  misc_feature 1..225: note = Description of Artificial Sequence: Synthetic coding sequence
  source 1..225: mol_type = other DNA
atgaccatgaccgccaacaagaacagcagcatcacccacggcgccggcggcacaaaggctcctagaggaaccctgagtcgttcacaatcagtgtctcccccacccgtgctttcaccccctagatcaccgatttaccctctcagcgactcggagacatcggcctgcaggtaccccagccactcctcaagccgtgtattgcttaaagacagacacccacccgcctag

SEQ ID NO: 207448 - DNA, 435 bp, synthetic construct
  misc_feature 1..435: note = Description of Artificial Sequence: Synthetic coding sequence
  source 1..435: mol_type = other DNA
atgaccatgaccgccaacaagaacagcagcatcacccacggcgccggcggcaccaaggcccccagagggacactttcaaggagtcagagtgtaagtccccctcccgttctgtcacccccacgctcacctatttatcctctgagcgactcagaaacttccgcttgcagatatccttcccactcttcctcacgggtactcctgaaagataggcatcctcctgcaccctcacctcagaacccccaggatccgtccccagacactagtccgccaacatgcccatttaaaacagcgtctttcggctacctagaccggagtccatctgcatgcaagcgagatgctcagaaagaatctgtgcagggagccgcgcaggatgtggccggagtcgccgcctgtctgcccttggcccaatccactccttttccaggacctgcatag

SEQ ID NO: 207449 - DNA, 3414 bp, synthetic construct
  misc_feature 1..3414: note = Description of Artificial Sequence: Synthetic coding sequence
  source 1..3414: mol_type = other DNA
atgaccatgaccgccaacaagaacagcagcatcacccacggcgccggcggaacaaaagctccccggggaactctttcccggagccaatcagtttcccccccacccgtattgtcgccccctcgctcgccaatctaccctctaagtgattctgaaaccagcgcctgcagatatccgagccacagcagctctcgggtgttgctcaaagaccgacacccccccgcgcccagcccccagaaccctcaagatcccagtccggatacctcaccccccacgtgcccatttaagaccgccagctttgggtacctcgatcgcagcccttcagcgtgtaagagggacgcccagaaggagagtgtgcagggggctgcgcaggatgtcgctggtgtggccgcatgtttacccttagcccagtcaactccattccctggaccagcagccggtccccgcggagtcctcttgaccaggacaggaaccagagcccattccctgggcattcgtgaaaaaatctccgcttgggaggggcgacgggaggcttcacccagaatgtcgatgtgcggtgagaaacgggaagggtctggcagcgagtgggccgcctccgaaggctgccctagtttaggctgcccttcggtggtccccagcccttgcagctccgagaaaacctttgactttaagggccttcgcagaatgtctaggacattctccgagtgcagctaccctgagaccgaagaggagggggaggccttacctgtgcgagactctttttacagactggagaaacgcttgggtcgaagtgaacctagcgcgtttctgcgtgggcacggttcccgcaaagagagcagcgcagtgttgagtaggatccaaaaaatcgagcaggtgcttaaagagcagccggggcggggcttgccgcaactgcccagcagttgctatagcgtcgacagaggtaagcgtaagacaggtaccttagggagtcttgaggaacctgccggtggcgcctccgtgtcagccggcagccgggcagtcggcgtggcaggtgtggcaggcgaagcggggccacctcccgaaagggagggttccggcagtaccaagcccgggactcccggaaatagtccaagctctcaaagactgccgtcaaaaagcagtcttgaccccgctgttaatcccgtcccaaagccgaaacgcacctttgaatatgaagctgacaaaaatcctaaaagcaagcctagcaacggtctgccccctagtccaactcctgcagccccacccccactccccagtactcctgccccacctgtgacccgcagacccaagaaagatatgcgcggacaccgtaagtcccaatccagaaaatctttcgagttcgaggacgcctcttccctgcagagcctgtacccatcttcccccactgagaatggaacagagaatcaacccaaatttggatctaagtccactctggaagaaaatgcgtacgaggatattgttggcgacctgcctaaggaaaacccatatgaagacgtcgacctaaagagccgacgtgctgggagaaaaagtcaacagctcagcgaaaattctctagattcgttgcataggatgtggtcacctcaggacaggaagtataattccccacctactcagttgtctttaaagccaaacagccaatctctgcgatccgggaactggagtgagagaaagtcacaccgcttgccgagattaccaaagaggcatagccacgatgacatgctcctgctcgcccagctgtcccttcctagcagcccctcctcactgaacgaagactcattatctaccacctcagagctcctgtcatctcgccgggccagacgtatccccaaactcgtacagcgaattaactccatatataacgcaaagcggggcaagaaacgtctgaagaaactttcaatgtccagtatcgagaccgccagcctccgcgacgaaaattcggagagtgagtctgacagtgatgacaggtttaaggcgcatactcagagactggttcatatacagagcatgctcaaaagagccccaagctatcggacactggaacttgaactacttgaatggcaggaacgagagctgtttgagtattttgtcgtggtgtctctgaaaaaaaaaccttctcgcaatacctacctgcctgaagtgtcataccagtttccgaagctggacaggccgaccaagcaaatgcgcgaagcagaagagcggctgaaagccattccccagttctgtttccccgacgctaaagattggttaccagtttccgaatattcgtctgagacctttagttttatgcttacaggtgaggacggaagccgccggtttggatactgtagaagactgctgccttcgggtaaagggcctaggctgccagaggtttattgtgttatctccagactaggttgtttcggcctgttcagcaaagtgctagatgaggtggaaaggcgacggggaatcagcgcagcactcgtgtatccatttatgagatcgctcatggaaagccccttccctgctcccggaaagacaatcaaagtaaagacgtttctcccaggcgcggggaatgaggtcctagaactccggcggcctatggattccaggcttgaacacgtggatttcgagtgtttatttacttgcctgagcgtccggcagttgatccggatatttgccagcttactgctcgagaggagggtaattttcgtggctgacaaactgagcaccctttcatcttgctcacatgcagtggttgcgctgctgtacccgtttagctggcaacacacgtttattcctgttctgccagcatccatgatcgatatagtgtgctgccccaccccttttctagtaggcctgctgtccagtagcttaccaaaactgaaggagttacctgtcgaggaagcccttatggtaaacttagggagtgatcgatttattcggcagatggacgatgaggacacgctactcccacggaaactgcaggcagccttggagcaggctctggagcgtaagaatgaactgatctctcaggactccgattccgattcagacgacgaatgtaatacccttaacggcctggtgtctgaagtgtttatacgcttctttgtcgaaactgtgggccactattcgctctttctgacccagtctgagaagggtgagcgggcattccagcgggaggcctttaggaagtccgtcgcatcgaagtccattcgacgtttccttgaagtgtttatggaatcccagatgttcgcaggattcattcaagacagagagctgcgtaagtgcagagctaagggactgtttgagcagcgggttgaacagtacttagaggaactcccagacacagagcaaagtggaatgaacaaattcttgagagggctggggaataagatgaaatttctgcataagaagaattag

SEQ ID NO: 207450 - DNA, 369 bp, synthetic construct
  misc_feature 1..369: note = Description of Artificial Sequence: Synthetic coding sequence
  source 1..369: mol_type = other DNA
atgaccatgaccgccaacaagaacagcagcatcacccacggcgccggcggtacaaaggctccacgggggacactgtcccggtcccagagcgtgagcccgcctccagtgctaagccctccccgctcccctatatatcccctgagcgactccgagacctcagcctgtcgttacccctcccactctagttctcgggtactcttaaaggaccggcatccaccagccccctcacctcagaacccacaagatccgtcaccggatacctcaccccccacttgcccttttaagacggcgtcctttgggtaccttgacagaagcccaagcgcatgtaagagagacgcgcagaaggagtcagtacagggggccgcctag

SEQ ID NO: 207451 - DNA, 93 bp, synthetic construct
  misc_feature 1..93: note = Description of Artificial Sequence: Synthetic coding sequence
  source 1..93: mol_type = other DNA
atgaccatgaccgccaacaagaacagcagcatcacccacggcgccggcggtactaaagccccccggggcaccttgtcccggagccaaagctag

SEQ ID NO: 207452 - DNA, 1758 bp, synthetic construct
  misc_feature 1..1758: note = Description of Artificial Sequence: Synthetic coding sequence
  source 1..1758: mol_type = other DNA
atggccgaggccgccaccggcttcctggagcagctgaagagctgcatcgtctggtcttggacatatctgtggaccgtgtggtttttcattgtgctctttctggtatatattcttcgggtccctctgaagataaacgacaatttgagcactgttagcatgttcttgaatacactgactccaaagttctacgttgccttgactggaacctcttcactcattagcggactgatcttaattttcgagtggtggtactttagaaagtacggcacctcctttattgaacaagtatccgtctcccatctgcggcccctgctgggcggcgtcgataacaattctagcaataactcaaattcatcaaacggagactccgacagcaaccgacagtctgtttctgagtgtaaggtgtggcgaaatcctctcaatctgtttcgcggcgctgagtataatagatatacctgggtgacgggaagagagccactcacctactacgacatgaatctcagcgcacaggaccatcaaaccttctttacctgcgattcagaccacctgaggcccgcggatgcaatcatgcaaaaagcttggcgggagcgtaacccacaggctcggatatccgccgctcatgaggctctcgaaatcaatgagatccgtagccgcgtcgaagttcccctgatcgccagcagcacgatttgggagattaagcttttgcccaaatgcgctacagcctatattctgctagccgaagaagaggcaactactatagcagaagctgaaaaactttttaagcaagcactgaaagcaggagacggttgttatagaagaagccaacaactccagcatcatggctcccagtacgaagctcaacatcggcgagatacgaatgtactcgtgtatattaagcggcgcctggctatgtgcgctaggaggctaggaagaacaagagaggctgtgaagatgatgagagacttgatgaaggaatttcctctcctctctatgttcaacatacacgaaaatttacttgaggctcttctcgagttacaggcctatgcggacgttcaagctgttctggccaagtacgatgatatctcactaccgaagtccgcgactatttgttacacagctgccctgctcaaggcacgcgcggtgtccgataaattttcccccgaggctgcaagtcgcagaggtctgtccacagcggaaatgaatgccgtcgaagcaattcatcgcgccgtggaattcaacccccacgtgccaaaatacctgctcgaaatgaaaagtttgatcctgcctccggagcatattctgaaacggggagacagcgaggccatcgcctacgcgtttttccatctggcacactggaagagagtggagggggcgctgaacttgctccattgtacctgggagggcactttcagaatgatcccctaccctctggaaaagggccacctcttttatccctaccctatctgtactgaaacagcagacagagagctgctgccatcctttcatgaggttagtgtataccccaaaaaggaactgcccttcttcattctgttcaccgcaggcctgtgttccttcaccgctatgctagccctccttacccatcagttccctgagctgatgggagtattcgcaaaggcgatgatcgatatcttctgttctgctgaattccgcgactggaattgcaagtcgatttttatgagagttgaggacgagcttgagattccaccagctccgcagtcacagcatttccagaattag

SEQ ID NO: 207453 - DNA, 1500 bp, synthetic construct
  misc_feature 1..1500: note = Description of Artificial Sequence: Synthetic coding sequence
  source 1..1500: mol_type = other DNA
atgagcatgttcctgaacaccctgacccccaagttctacgtggccctcactgggacctcatctctgatctccggcctcatccttatctttgaatggtggtattttcgcaaatacggcactagctttattgagcaggtgtctgtctcacacctaagacctctactgggtggtgttgacaacaactcatccaacaatagcaacagctctaatggtgatagtgattctaacaggcaaagtgtgtctgaatgcaaggtgtggcgaaatcccctgaacttatttcgaggcgccgaatataaccgatacacgtgggttacaggccgggagcctctgacgtactacgacatgaatctcagcgcacaagatcatcaaaccttctttacatgcgactctgatcatctccgccctgcagatgcaattatgcagaaggcttggcgtgaacggaacccccaggctcggatctcagcggcccacgaagccctggagataaatgagtgtgcgactgcttacattcttctggccgaggaggaggcaacaaccatagcagaggcagaaaagctctttaaacaggccctcaaggctggagacgggtgctacaggcgctcccagcagcttcagcaccatggctcccaatacgaggcacagcatcgccgtgacacgaacgtactcgtgtacataaaaagacggctggccatgtgcgccagacgcttgggccgcactagggaggccgtgaagatgatgagagacctcatgaaagaattcccactcttgtccatgtttaacatccacgaaaacctgctagaggcactgctagaactccaggcctatgccgatgttcaagccgtgctggccaagtacgacgatatcagtctccctaagagcgccaccatctgttacacagcagccctgctcaaggcgagggctgtctcagataaatttagtcccgaagccgcctctcgacgcggcctcagcaccgccgaaatgaacgccgttgaggctatccatagagcggtggaattcaatccgcacgtgccaaaatacctgctggaaatgaaaagtctgatcctaccacctgaacatatacttaaacgcggggactctgaagctatcgcgtacgcgttttttcaccttgcccactggaaaagggtggagggcgccctgaacctgctccactctttcaggatgatcccgtacccccttgaaaagggacaccttttctacccctaccccatttgcaccgaaacggctgacagagagctgttaccttctttccacgaagtgagcgtttatcccaaaaaagaactgcctttctttattctgttcaccgcgggactgtgctcctttactgccatgctggctcttctgacacatcagtttccagaactcatgggggtctttgcaaaagcatttctaagtacgctgttcgcccctctgaacttcgtcatggaaaaggttgagtctattctaccgagctctctttggcatcagctgaccaggatctag

SEQ ID NO: 207454 - DNA, 1536 bp, synthetic construct
  misc_feature 1..1536: note = Description of Artificial Sequence: Synthetic coding sequence
  source 1..1536: mol_type = other DNA
atgttcggcaccgagagcagcctgagcatgttcctgaacaccctgacaccaaagttctatgtggctctgaccgggacttcctccctgatcagcgggctcatcctaatctttgagtggtggtatttccgaaagtatggaacgtcgtttattgaacaagtctccgtctcccaccttaggccgctgctaggtggggtggacaataacagcagcaataattcgaatagcagcaacggcgactctgatagcaaccggcaatctgtctcagagtgtaaggtctggcggaatccgttgaatctctttagaggggctgagtataaccgctacacctgggtgaccggtcgcgagccccttacctattatgacatgaaccttagcgctcaggaccaccaaacattcttcacctgcgactcagaccacctccgccccgcggatgcaattatgcaaaaggcttggcgcgagcggaacccacaggcccggatctcagctgcccacgaggccctggagatcaatgaatgtgcaaccgcttatattctcttagcagaggaggaggctaccaccattgccgaggctgagaaactatttaaacaggcactcaaggctggggatggttgctatagacgcagtcagcagctccagcaccatggaagccagtatgaagcccaacacagacgggacacgaatgtactcgtatacatcaaacgccgtctggccatgtgtgctcggcggttgggtagaacacgcgaggcggtcaagatgatgagagacctcatgaaggaatttcctctcctgtcaatgtttaacattcatgagaacctgttggaggccttgctggagttgcaagcttacgccgacgtccaggcggtgctggctaaatatgacgatataagcctaccgaagtccgccacaatttgttacactgctgccctgctcaaggcccgtgccgtgagcgataagtttagtcccgaggctgcgtctaggagagggttgtcaacagcagaaatgaacgccgtagaagcaatccatcgcgctgtggaattcaatccccacgttcctaagtatcttctagaaatgaaatcactgattctccctccagagcacatcctgaagcgcggcgacagtgaggcgatcgcctacgcatttttccaccttgcacactggaagagggtggagggtgctctcaacctactgcattgcacttgggaaggtacctttaggatgattccttatcctctagagaaaggccacctgttctacccatatccaatttgcaccgaaaccgccgaccgggaacttctgccctcgttccacgaagtgagtgtgtatcctaagaaagaactgcctttttttatactgttcactgcagggctgtgcagttttaccgccatgctcgcgttactcactcatcaatttccagaattgatgggagtgtttgccaaggctttcctgtccactctgttcgcccccttaaactttgtgatggagaaggtagagtccatacttcccagcagtctgtggcaccagttgacgagaatttag

SEQ ID NO: 207455 - DNA, 1605 bp, synthetic construct
  misc_feature 1..1605: note = Description of Artificial Sequence: Synthetic coding sequence
  source 1..1605: mol_type = other DNA
atgttcggcaccgagagcagcctgagcatgttcctgaacaccctgactcccaaattctacgttgccttgacaggcacctcttccttaatctccggtcttattcttatcttcgaatggtggtatttccgcaagtacggcacatctttcattgagcaggtgtcagtgtcacatttacgccctttgctggggggagtcgacaataactcctccaacaactcaaacagcagtaatggagattctgatagcaataggcagtctgtttcagagtgcaaggtctggagaaatccacttaacttgtttcggggcgccgaatataacaggtatacctgggtcaccggcagggaaccgttaacctactacgacatgaacctctctgcccaggaccatcagacatttttcacatgcgactcggaccacctgagaccagcagatgcaatcatgcagaaggcgtggagagagcgtaacccgcaggcccgcatatcagcggcccacgaggccttggaaattaacgagatccgcagccgagtggaggtacccctcatcgccagcagcacaatttgggagattaagcttctgcctaagtgcgcaaccgcctacatcttgttagccgaagaggaggcgactaccatagctgaagcagagaagctgtttaagcaagctctcaaagctggtgatggatgctacaggcgctcacagcaactgcaacatcacggctcccagtacgaggctcagcatagaagagacacgaacgtgctggtgtatatcaaacgccgcctagctatgtgtgcccggagactgggccgaactagggaagcagtgaagatgatgcgggatctcatgaaagagtttcctctgctgtctatgttcaacatccacgagaatctacttgaagccctgctagaacttcaggcttacgctgatgtgcaggcggtcctggctaaatacgacgacatatccctgccaaagagcgccacaatctgctacacggccgccctgctgaaagctcgcgcagtttccgacaagttctcacctgaagcggcctctcggagaggcctctctactgccgagatgaatgccgtggaggccattcaccgcgccgttgagtttaacccccacgttccgaaatacttgctggagatgaaatccctgatcctgcctccagagcatattctcaagagaggcgactccgaggcgatcgcatacgcattcttccacttagctcattggaagcgagttgaaggcgcccttaacttgctccactgtacctgggaagggacgtttaggatgatcccctaccccctggagaaagggcatttgttttacccgtatccaatctgcacagaaacagccgatagggaactattaccctcattccatgaagtctcagtatatcccaagaaagaactacctttcttcattttattcaccgccgggctgtgcagtttcacggcaatgctcgccctgttaacacatcagttccctgaactgatgggcgtgttcgctaaggcattcctgtcaaccctgttcgcaccactgaatttcgtgatggagaaagtagagagcatcctgccatccagtctgtggcaccagctgacgcgtatttag

SEQ ID NO: 207456 - DNA, 1665 bp, synthetic construct
  misc_feature 1..1665: note = Description of Artificial Sequence: Synthetic coding sequence
  source 1..1665: mol_type = other DNA
atggccgaggccgccaccggcttcctggagcagctgaagagctgcatcgtctggagctggacttacctctggactgtttggttctttatcgtcttatttctcgtgtatatcctccgcgtgccactcaaaatcaacgacaacctaagcacagtttctatgtttctgaacactctgacacccaagttttacgtggcgctgacaggaaccagctcactcatctctggcctgatacttatctttgaatggtggtacttccggaaatatggcacaagtttcatcgagcaagtctccgtgtcgcatcttcgtcctttgctcggaggggtggacaacaactcttcaaacaactccaattcaagtaacggtgattccgactcaaatagacagtctgtgtcagaatgcaaggtctggcgtaaccccctgaacctttttaggggcgccgaatataatcgctacacatgggtcacaggacgagagccccttacatactacgatatgaacctgtctgcacaagaccaccaaacattctttacgtgtgatagcgatcaccttcggccagccgacgccattatgcaaaaggcctggagagagcggaatccccaggctcgcatctccgctgctcacgaggctctggagattaatgaatgcgctactgcctacatcctacttgccgaggaggaagccactacgatcgccgaggctgagaaactgttcaaacaggcgctgaaagctggcgatgggtgttaccgacgctcgcaacaactacagcatcatggttctcagtacgaggcacagcaccgtcgcgataccaatgtgctcgtttatataaagaggcgcctcgccatgtgtgcaagacgcttaggaagaacacgcgaggccgttaaaatgatgcgtgatctcatgaaagaatttcctcttcttagcatgtttaatatccatgagaatctgctcgaggcattgctagagctacaggcctacgctgatgttcaggcggttctcgccaaatacgacgacattagtttacctaagagcgcaacaatttgctacaccgccgccctgctaaaggcccgtgccgtgtcagataagttctctccagaagccgcatccaggaggggtttaagcaccgccgagatgaatgcagtcgaagcgatccaccgggctgtggagtttaacccacacgtccccaagtaccttctggagatgaagagcctcatcttgccccccgagcacatcttgaagaggggtgactccgaagcaatcgcctacgcttttttccatctagcccactggaagagagtggaaggcgccttgaatcttctgcactgtacctgggagggtactttccggatgatcccctacccgctcgaaaaagggcaccttttctatccctaccccatctgcactgaaacggctgatagagagcttcttccatccttccacgaagtttctgtgtatccaaaaaaggagctgcctttttttatcctttttaccgccggcctgtgttctttcacagccatgctggccttactgacacaccagtttccagagctgatgggggtgttcgctaaggctttcctcagtaccctgttcgcccctctgaattttgtcatggaaaaagttgaatcaatcctaccttctagcctctggcaccagctgacccggatctag

SEQ ID NO: 207457 - DNA, 189 bp, synthetic construct
  misc_feature 1..189: note = Description of Artificial Sequence: Synthetic coding sequence
  source 1..189: mol_type = other DNA
atgagcatgttcctgaacaccctgacccccaagttctacgtggcccttacaggcacttcaagtttaatttccgggcttattcttatctttgagtggtggtactttagaaaatacggtactagttttatcgagcaggtgagcgtatcacacctcaggcccctcctggggggagtggacaataattcttag

SEQ ID NO: 207458 - DNA, 264 bp, synthetic construct
  misc_feature 1..264: note = Description of Artificial Sequence: Synthetic coding sequence
  source 1..264: mol_type = other DNA
atgagcatgttcctgaacaccctgacccccaagttctacgtggccttgacaggtacctcatctctcatcagcggactgattctgatctttgaatggtggtattttcgaaagtatggcacaagttttatcgagcaggtcagtgtgtcccatcttcggcctctactgggaggggtagataataactctagtaataactccaattcatccaatggagattcagattccaaccggcagtccgtgtcggagtgtaaagtgtggcgatag

SEQ ID NO: 207459 - DNA, 1323 bp, synthetic construct
  misc_feature 1..1323: note = Description of Artificial Sequence: Synthetic coding sequence
  source 1..1323: mol_type = other DNA
atggccgagaacaacgagaacatcagcaagaacgtggacgtgcggcccaaaacttcccggtcgaggtccgctgatcgtaaagacggatacgtatggtcaggtaagaaattgagctggagcaaaaagagcgagagttactccgatgctgaaactgtgaacggaattgagaagacggaagtgagcctcagaaaccaggaaaggaagcacagttgctcctctatcgaactggatttagaccactcttgcggacacagattcttgggaaggagtctgaagcaaaagctccaggatgcagtaggacaatgcttcccaattaagaactgctcgagccgccattcatccggactgccatccaaacgtaaaatccacatcagtgagttgatgctcgacaagtgccctttcccccctcggtcagacctggcctttcgctggcacttcatcaaaaggcacactgcacctattaacagcaaaagcgatgagtgggtcagcacagacctatcacaaacggaactgcgggatggccagctgaagcgaaggaatatggaagagaatataaattgcttcagccacacaaacgttcagccctgtgttataaccacggacaatgctctctgtcgcgagggcccaatgaccggatcggttatgaatctcgtaagtaacaattccatcgaagacagcgacatggactccgatgacgagattctgactctttgcacctctagtcggaagcggaacaaacccaaatgggatctggatgacgagatcctccagctcgagacaccaccgaaatatcatactcagattgactatgtgcattgcctagtgcccgacctcctgcagattaataataacccctgctactggggggtgatggataagtacgctgcagaagcccttttggaaggtaagcccgagggtacattcctgttgagggactctgcgcaagaggattaccttttcagcgtgtcctttcgccgatactcacgatcactgcacgcccgcattgaacagtggaaccacaactttagcttcgacgcccacgacccatgcgtgtttcattcccctgacatcaccggtctcctcgagcattataaagatccatccgcctgcatgttcttcgaaccgctcctgagtacaccactgattcggaccttccccttttccctccaacatatctgtagaacagtaatctgcaattgcactacttacgacggcattgacgcccttcccatcccgtccagcatgaagctatatctgaaggagtaccactataagtctaaggtgcgggtcctgagaattgacgcaccagagcagcagtgttag

SEQ ID NO: 207460 - DNA, 1323 bp, synthetic construct
  misc_feature 1..1323: note = Description of Artificial Sequence: Synthetic coding sequence
  source 1..1323: mol_type = other DNA
atggccgagaacaacgagaacatcagcaagaacgtggacgtgcggcccaaaaccagtcgaagcagatctgctgaccgaaaggatggttacgtttggagcggtaaaaagctgtcatggtctaagaaatcagaatcgtattctgatgccgagaccgtcaacggcattgagaaaacagaggtctctctgcggaatcaggagagaaagcacagctgtagtagcatagagctagacttggatcattcctgtggtcaccgattccttggtcgaagcctgaagcagaagctgcaggatgcggtgggacaatgttttcccattaaaaattgtagttccaggcactcctccgggctacctagcaaacggaagattcacatctcagaattaatgctggacaaatgtccttttccaccacggtccgacctggccttcagatggcactttattaagcggcataccgcccctatcaactcaaagagcgatgaatgggtatccaccgacctttctcagaccgagttacgcgatggacagctgaaacgcaggaatatggaagagaatattaactgcttctcacacactaatgtccaaccatgtgtgatcactaccgacaacgccctgtgcagggaggggcctatgacggggtctgtcatgaaccttgtgagtaacaacagcatcgaagactcggatatggatagtgatgacgaaatcctgacattgtgcacaagttcaagaaaaagaaataagcctaaatgggatttggacgatgagattctacaattggaaaccccacctaagtatcatactcaaatcgattacgtgcactgtcttgtgcccgatctgctacagataaataacaatccgtgctattggggagtgatggacaagtatgcggccgaggctctcctggagggaaaacctgagggtacatttctcctgcgggacagcgcgcaggaagattacttgttcagcgtttcattccgtcggtactctcgctctctacatgcacggatcgaacagtggaatcataacttctctttcgatgcgcatgacccatgcgtctttcactctccagatattacagggctactagaacattataaggacccctccgcttgtatgtttttcgagcctctcttaagcacacctctcatcagaacctttcccttcagcctgcagcacatatgcaggacggtgatttgtaattgtaccacatacgacgggattgatgccctgcccatccccagtagtatgaaactgtacttgaaggagtaccattataaatcaaaagttagagtcttgcggatagatgcgccagagcagcagtgttag

SEQ ID NO: 207461 - DNA, 1323 bp, synthetic construct
  misc_feature 1..1323: note = Description of Artificial Sequence: Synthetic coding sequence
  source 1..1323: mol_type = other DNA
atggccgagaacaacgagaacatcagcaagaacgtggacgtgcggcctaagacatccaggagtaggagcgctgacaggaaagatggctacgtatggtcaggcaagaaactgagctggtcgaaaaagtctgaatcctactccgacgccgaaactgtcaacggcattgagaagactgaagtgagtctcaggaatcaagagcgtaaacacagctgctcatccattgagcttgatcttgaccactcttgcggtcatcggtttctaggcagatcactcaaacagaagctgcaagacgccgtgggccaatgcttccccatcaaaaactgctcatctcgacactctagcgggctcccttcaaaaagaaagatacatattagcgagttgatgttggacaaatgcccatttcctccgagaagtgatctcgccttcaggtggcacttcatcaaaaggcacacagccccgattaacagtaaatctgatgagtgggtctctacagacctgtctcagactgagcttagggatggccagctgaaaaggcgcaatatggaagaaaatattaactgctttagccacacaaatgtgcaaccatgcgttatcacaacagacaatgccctgtgtcgcgaggggcctatgactggctctgtcatgaacctcgtctcaaacaacagtattgaagattctgacatggactcagatgatgagattctcaccctgtgcacatcttcacgcaagcggaataagcctaagtgggacttagacgacgaaattttgcaactggaaacccctcccaagtaccacacacagattgattacgtccactgtttagtccctgaccttctgcagattaataacaacccttgctattggggcgtgatggacaagtacgccgccgaagccttgctcgaaggaaagccagagggcacctttctgctgcgcgatagcgcccaggaagactatctctttagcgtttcctttagaaggtacagccgctccctgcatgcaaggatagagcaatggaatcataacttctcatttgatgcccacgatccctgtgtgttccacagcccggatataaccggattgctggaacactacaaagaccccagcgcatgcatgtttttcgaacccctactgagcacacccctgattcgtaccttcccttttagtctgcaacacatctgtcggactgtcatctgcaattgcacgacatatgacggtattgatgcacttcccatcccctcttccatgaagctgtacctgaaggaatatcactataagagtaaagttcgcgtactccgcatcgacgctcccgagcagcagtgttag

SEQ ID NO: 207462 - DNA, 1611 bp, synthetic construct
  misc_feature 1..1611: note = Description of Artificial Sequence: Synthetic coding sequence
  source 1..1611: mol_type = other DNA
atggacaaggtgggcaagatgtggaacaacttcaagtaccggtgccagaacctgtttggacacgaaggcggctcaagaagtgagaacgtcgatatgaacagcaatagatgcctgtctgtgaaggagaagaatatttccattggagacagtactccacaacagcagagcagtcccctccgggagaatatcgctctgcagctcggtttgtcacctagcaaaaacagctcgagacgaaaccagaattgcgcaaccgagatcccacaaatagtcgaaattagtatcgaaaaggacaacgactcatgcgtcactcctggaactcgcctcgcaaggcgggatagttactcacgtcatgcgccgtggggtggcaagaaaaagcactcctgtagcactaagacacagtccagcctcgacgctgataagaagttcggccggacgagatctgggttgcagagaagggagcggaggtacggggtaagttccgtccacgacatggactcagtcagctcccggacagtaggctcaagaagcctgaggcagagactccaggacaccgtgggactctgcttccctatgcgtacctacagtaagcagtctaagcccctattcagcaataaacgtaaaatccacttatctgagctcatgctagagaagtgtccctttcccgctggtagtgatctggctcagaaatggcatcttattaaacagcacaccgcacctgtgtccccccactctactttttttgacacctttgaccctagtcttgtatcaacagaggatgaggaagacaggttacgggaaaggcggcgcctctcgatcgaagagggtgtcgacccaccccccaacgcgcagatccatacgtttgaagcgactgctcaggtgaatccactgtataagctcggacctaagttggccccgggcatgacagagatctctggggattctagtgccataccgcaggcaaactgtgactccgaggaggatacgacaacgctgtgtcttcagtctcggagacagaaacagaggcagatttccggggactcgcacacgcatgtgtccaggcagggagcatggaaggttcacacacagatcgattatatccactgcctcgtacccgatctcctgcaaattacaggaaatccctgttactggggagtgatggatcggtacgaagctgaggccttgttggaaggaaagccagaagggacatttttgttaagagacagtgcccaggaagactacctgttctccgtgtcctttcggcgctacaaccggtctctgcatgccaggatcgagcagtggaaccataatttctctttcgacgcccacgatccctgcgtattccacagctcaaccgtcaccggtctgttagaacattacaaagacccttcatcctgcatgttttttgaacccttgcttacaatcagcttgaaccgtacattcccattctctctgcagtacatctgcagagccgtcatttgtcgttgcacaacttacgatggaatcgatggactaccactaccatctatgctccaggatttcctaaaagagtatcactataagcagaaagtccgcgtcaggtggctagagcgtgagccggttaaggctaagtag

SEQ ID NO: 207463 - DNA, 1611 bp, synthetic construct
  misc_feature 1..1611: note = Description of Artificial Sequence: Synthetic coding sequence
  source 1..1611: mol_type = other DNA
atggacaaggtgggcaagatgtggaacaacttcaagtaccggtgccaaaacctgttcggacacgaaggcggctcccggagtgaaaatgtggatatgaactccaaccgttgtctgtccgtcaaggagaagaatatttctataggagacagcactcctcagcagcagtccagccccttgagagagaatattgcattgcaactggggctgagtccttccaagaatagttccagaaggaaccagaactgtgccaccgaaattccacagatcgttgagatttctatcgagaaagacaatgactcgtgcgtgactccggggacaagattagcccgcagggactcttactcacggcacgctccctggggtggcaaaaaaaagcattcatgctctaccaaaactcagagcagcctggacgctgataagaaatttggacggacacggtccggactccagcgtagagagcgtaggtacggcgtcagcagcgtccacgacatggacagtgtttcatccagaaccgtggggtcacggtcccttcgacaaaggctgcaagatacagtgggtctctgcttcccaatgagaacctattccaagcaatccaaacctctgtttagtaataaacgcaaaatccacctatccgagctgatgctggagaagtgcccattcccagccgggtctgacctagcacagaagtggcacctcatcaagcagcacaccgctccagtttccccacattccacctttttcgacaccttcgaccctagtttagtgtctacggaggatgaggaagacaggctcagggaaaggcgcagattatcaatcgaggagggagtggatccaccgccgaacgcacagattcatacatttgaggcaaccgcccaggtgaacccgctctacaagttaggtcccaaactggctccagggatgaccgaaattagtggggactcaagcgctatccctcaagctaactgcgattccgaggaggacaccactacactctgccttcagagcaggaggcagaagcagcggcagattagcggggactcccatactcatgtttcaaggcagggggcttggaaggttcacactcagattgactatattcattgtctggttccagacctgctgcagataaccgggaacccctgctactggggtgtgatggaccgatacgaagcggaagcgcttctggaaggcaaacctgaaggaacctttttactaagggacagtgcccaagaagactacctgtttagtgtatcattcagaaggtataaccgaagtctgcacgcccgtatcgagcagtggaaccacaatttttctttcgacgcccatgatccttgcgtgtttcactcatctacggtaacgggtctgctggaacattataaggaccccagttcgtgcatgttcttcgaacccctacttacgattagcctcaaccgaacttttccatttagtctgcagtatatctgccgcgctgtgatatgcaggtgtaccacctacgacggaattgatggccttccactcccatcgatgctccaagatttcttgaaggagtaccactacaagcagaaggtaagagtccggtggctcgagcgtgagcccgtcaaggcaaagtag

SEQ ID NO: 207464 - DNA, 3264 bp, synthetic construct
  misc_feature 1..3264: note = Description of Artificial Sequence: Synthetic coding sequence
  source 1..3264: mol_type = other DNA
atgagcgacagcgaggacagcaacttcagcgaggaggaggacagcgaaaggtcctccgatggggaggaggcagaggtggatgaggaaaggaggagcgcagcgggttccgaaaaggaggaagagcctgaagacgaagaagaagaggaggaagaggaagagtacgatgaagaggaggaggaagaagacgatgatcgcccgccaaagaagccccgccatgggggatttattttagacgaggctgacgtcgatgacgagtatgaagacgaggatcagtgggaggacggggccgaagacatcctagagaaggaagagatagaggcctctaacattgataatgtagtgctggacgaggacagaagtggggccaggcgattgcagaacctctggcgggatcaaagagaggaggagctcggcgaatattatatgaagaagtatgccaaaagctctgttggtgagaccgtatacggcggctcagacgaattgtccgatgacataacccagcagcaactactcccgggcgtgaaagatccaaatctgtggactgtcaaatgcaagattggcgaggagcgggccacagccatttccctgatgcgcaaatttatcgcttaccagtttacagatacaccactgcagatcaaatcagtggttgctccagaacacgtgaaggggtacatctatgtcgaagcttacaaacagactcacgtgaaacaggccattgagggcgtgggcaacctccgattaggctactggaaccagcagatggtacccataaaggaaatgacagacgtacttaaagtggtaaaagaagtagccaacctgaaacccaaatcctgggttcggttgaagcgggggatctataaagacgacatcgcccaggtggactacgtcgaaccatcccagaataccatatctctcaaaatgataccaagaatcgactatgaccggatcaaggctaggatgtcactgaaagattggtttgccaaacgaaaaaaattcaagcgaccaccacaacgtctattcgacgcggagaagataagaagcctcggcggcgacgtagcttcggacggggactttctcatcttcgagggaaacagatatagcaggaagggcttcctgtttaagtcattcgcaatgagcgccgtgatcactgaaggggtcaagccaacgctctcagagcttgagaaattcgaagatcagccagaaggaatcgacctcgaagttgtaactgaaagcaccgggaaggagagggagcacaacttccagcccggcgataacgtcgaagtctgcgaaggcgaacttataaaccttcaaggaaagattctgtccgtggatggcaataagattacaataatgccgaagcacgaggacctgaaagatatgctcgaattcccagctcaggaactgcgcaagtactttaagatgggcgaccacgttaaagtaatcgctggaagatttgagggagacaccggcctgattgtccgcgtcgaggaaaacttcgtgatactgttcagcgaccttacaatgcacgagctgaaggtattaccgcgcgaccttcagctgtgttcagagaccgcatcaggcgtcgacgtgggcggtcagcacgagtggggcgagctggtgcagctggatccacagaccgtcggagtcattgtgaggctggagcgcgagacctttcaggtgttaaatatgtatggcaaggtcgtgacagtccgccaccaggccgtgacccgtaaaaaagacaatcggttcgctgtggctctcgattccgaacaaaacaatatacacgtgaaagatatcgttaaggtcatcgatggaccacacagcggacgcgagggggaaatccggcatctttttaggtctttcgctttcctgcactgcaagaagcttgtagaaaatggagggatgttcgtgtgtaagactaggcacttagtcctggcggggggctctaagcctcgggatgtcacaaacttcacagttggtggattcgctcctatgtctccccgcattagcagccctatgcacccatctgcggggggacaaagggggggctttggctcgcccggcggcggctctggcggcatgtcaaggggacgaggtcgccgcgacaacgagttgatcggtcagacagtgcggatctctcagggaccctacaaaggctatatcggggtggtgaaagatgcgacggagagcactgcaagggtcgaattgcactccacgtgtcagacaatctcagtggatcgccagagactgactacggtgggcagccggcgtcctggtgggatgacgtccacatatggccggacccctatgtacggaagccagacaccaatgtacggctccgggtcgagaacaccaatgtacgggagccaaacaccccttcaggacggctcaaggacaccacactacggtagccagaccccactgcacgacggttcgaggacacccgcccagtccggtgcatgggaccccaataatcccaacacaccctctagagcggaggaggagtacgagtacgcgttcgacgatgaacccactccaagccctcaggcttatggcggcacacccaacccccagacacccgggtacccagacccctcctccccacaggtaaatcctcaatataaccctcagactccagggacgccagctatgtacaacacagatcaattcagcccctacgctgctccgtctccacaggggtcgtatcagcccagtcccagcccacaatcatatcaccaagtagccccaagccccgcaggctatcagaacacacattcacccgcctcttatcatccgactccctcccccatggcctatcaggcaagcccatcgccaagccctgtgggctactcccctatgaccccaggggctccttccccaggcggctataaccctcacacaccaggaagcggtatcgagcagaacagttcagattgggttacaactgatattcaggtcaaagtcagagacacctacctggacacccaggtggtcggtcagacaggcgtgattaggtcggtgacaggaggtatgtgcagcgtgtaccttaaagacagtgaaaaggtggttagcattagtagcgaacatctggaacccatcaccccaaccaaaaacaacaaagtgaaggttatccttggagaggatcgggaggctacaggcgtcctcctgagtattgacggtgaggacggcatcgttaggatggacttagacgagcagctgaagatcctgaacctccggtttctaggaaaactgctcgaagcgtag

SEQ ID NO: 207465 - DNA, 3198 bp, synthetic construct
  misc_feature 1..3198: note = Description of Artificial Sequence: Synthetic coding sequence
  source 1..3198: mol_type = other DNA
atgagcgacagcgaggacagcaacttcagcgaggaggaggacagcgaaagaagcagtgacggagaggaggcagaggtagacgaggagcgtcgcagtgctgccgggagtgaaaaggaagacgatgatagaccccctaagaagcccagacatgggggcttcattctggacgaggctgatgtggacgatgaatacgaagacgaagatcagtgggaggacggggctgaggatatcctagaaaaagaagagatcgaagcttcaaatattgataacgtggtgctggatgaggacagatctggggccagaagactccaaaatctatggagggatcagagggaggaggagctgggagaatattatatgaaaaagtatgcgaaatcatctgtaggggaaacggtttacggcggatccgacgagctgtcagacgacattactcaacagcagctgctaccaggggtgaaggaccctaacttatggactgtgaagtgcaaaataggtgaggaacgggccaccgccattagtctgatgcggaaattcattgcctaccaatttacagacactccccttcagattaaaagtgtggtagctccagagcacgtaaagggctacatctacgttgaggcctataagcagacgcacgtgaaacaggcgatcgagggcgttggcaatctgcgcctgggatactggaatcaacagatggtgcccattaaagagatgaccgatgttcttaaagtcgtgaaggaggtggcaaacctgaagcctaaatcatgggttcggctgaaaaggggcatatataaggatgatatcgctcaggttgattatgtggaaccctctcagaataccattagtctgaaaatgattccgaggatcgactacgacaggatcaaggcgcgcatgagcctgaaggactggttcgccaaacgcaagaagttcaaaaggcccccacagagattgtttgatgctgagaaaatacgatcattgggcggagatgttgcctctgatggcgacttcttgatcttcgaaggcaatcgctactcacgcaaagggttcctcttcaaatctttcgcaatgagtgcggtgattactgaaggagtcaaaccgacactcagcgaactcgagaagtttgaggatcagcccgaaggtatcgacctggaagttgtaaccgaaagcacaggtaaagaaagagagcataacttccagcccggagataatgttgaggtgtgcgagggcgaattgattaacctccaagggaaaatcttgtctgttgacggcaataagatcaccatcatgcctaaacatgaggacctgaaggacatgctggagttccccgcccaagaactccgaaaatattttaaaatgggcgatcacgtgaaggtcatcgcagggaggttcgaaggtgatacgggactgatcgttagggtggaagagaacttcgttattctcttcagcgaccttacaatgcatgaactcaaggtgttgcctagggatctgcaactatgctccgaaacagcgagcggagtcgacgtgggaggccaacatgaatggggggaactcgttcaactggatcctcagaccgtaggtgtaatcgtcaggcttgagagagaaaccttccaggtgctgaacatgtatggaaaggtggtgacggttcgacaccaagccgtgacccgaaaaaaggataacaggttcgcggtggcactcgatagtgagcagaacaacatccacgtaaaagatattgtgaaagtaatcgatggccctcactccggaagagagggcgagattagacacctctttcgatcttttgctttcctgcattgcaagaagttagtggaaaatgggggtatgtttgtctgtaaaaccagacatcttgtgctggccggagggtcaaaaccacgagacgttaccaactttacggttggcggcttcgcccccatgtcccccaggatttcttcacccatgcatcccagtgctggcgggcagcgcggcggttttgggtcccccgggggggggtccggcgggatgtcccgaggccggggtcgacgcgacaatgaattaattggccaaactgtaagaatcagccaggggccttataaggggtatatcggcgtggtgaaggatgcgacggaatccaccgctagagtggagcttcacagcacatgtcaaaccattagtgtggacaggcagcgacttaccaccgttggctcccgtagacccggcgggatgacctctacgtacggccgcaccccgatgtacggcagtcagacacctatgtatggctctggatcccggacacccatgtacgggtcacagacacccctgcaggacgggagccgtacccctcattatgggtctcagacaccactccacgatgggagtagaacccccgctcagagtggagcttgggacccaaataaccctaacaccccctctcgagctgaagaggagtatgagtacgcctttgacgacgagccaacccccagcccccaggcctacggcggcactcccaatccacagacgccgggttacccagacccttcgtccccacaagtgaaccctcaatacaatccccagactcccgggacacctgcaatgtataacacagatcagttcagtccctatgctgccccaagtcctcaggggtcctatcagccaagtcctagccctcaatcgtatcaccaagtcgcacccagcccagccggatatcaaaacacccactcgcctgcttcctatcatccaactccgtctccaatggcttaccaggccagcccgtctcccagtcccgttggctactcccctatgactccgggggccccgagcccagggggttataacccccacaccccagggtcaggaatcgagcagaattcatcagactgggtgactactgacatccaagttaaagtgcgtgacacatatcttgacacccaagtggtcgggcagacaggcgttattcggtctgtcaccgggggcatgtgtagcgtgtacctcaaagacagcgagaaggtggtcagtatcagttctgaacatttggaacctattacacccactaaaaacaacaaagtgaaagtcatcctcggcgaagaccgcgaagcaacgggtgtgctgctgtccatcgatggagaagatggcattgtgcgcatggacctggatgagcaactgaagatcctcaatctgcgctttcttggtaagcttctagaagcctag

SEQ ID NO: 207466 - DNA, 3252 bp, synthetic construct
  misc_feature 1..3252: note = Description of Artificial Sequence: Synthetic coding sequence
  source 1..3252: mol_type = other DNA
atgagcgacagcgaggacagcaacttcagcgaggaggaggacagcgagagaagtagcgacggcgaagaagccgaagtggatgaggagcgcagaagtgcagcaggatcagagaaagaggaagagccagaggatgaggaggaggaagaagaagaggaggagtacgatgaagaagaggaggaggaggacgacgataggcctcccaagaagcccagacacgggggcttcatcctggacgaagccgatgtggatgatgagtatgaagatgaagaccagtgggaagacggggcggaggatatcctcgagaaagctagcaacatcgataacgtggtcctcgacgaggacagatcaggagcaaggcggcttcagaacctgtggagggatcagcgcgaagaagagctgggtgaatactatatgaaaaaatatgcaaagtcttcagtgggcgaaactgtgtacggcggatcagatgaactcagtgacgacatcacccaacagcaactcctgcccggtgtcaaggacccaaatctgtggaccgtcaagtgcaagataggggaagagcgtgcaacggctatatcattgatgcgaaaatttattgcctaccagtttacagataccccattacagatcaagtccgtggtcgccccagaacatgtcaagggatatatctatgttgaagcttataagcagactcatgttaagcaggcaattgagggtgtcggaaacctgcgcctgggatattggaaccagcagatggtgcctatcaaggagatgacagatgttctgaaggtggtgaaagaggtggccaacttgaaacccaagagttgggtaaggttgaaacgggggatttataaggacgatatcgctcaagttgactatgtagagccctcccagaacacaatctcccttaagatgattccaaggattgactacgacaggatcaaggctcgcatgtcactcaaagattggtttgcgaagcggaagaaatttaagcgaccaccgcagcgactttttgatgcagaaaaaatccgctcactgggcggtgacgtggcaagcgatggggactttctgatattcgaaggcaatcgatattcgcgtaagggatttctgttcaagtcattcgccatgtccgctgtaataaccgaaggcgtgaaacctaccctgtccgagctggaaaagttcgaggaccaacccgaaggaatagatctagaagtggtcaccgagagcacaggcaaggagcgggaacacaatttccaacccggcgataatgtagaagtgtgcgaaggagagttgataaacctgcagggaaagattctgtcggtggatgggaacaagatcacaataatgcctaaacatgaggatcttaaggacatgcttgagttccccgctcaagagctgagaaagtattttaaaatgggcgatcacgtcaaggtgatcgccggcagattcgaaggggacacgggactcattgtgcgcgttgaagagaatttcgtgattctcttcagcgatctgacaatgcatgagctaaaggtgctgcctagggatcttcagctgtgctccgaaactgcctcaggtgtagacgtgggaggtcagcacgaatggggagaactggtgcaattggacccgcagaccgtcggggtgatcgtgcgcctggagcgcgaaacttttcaggtgcttaacatgtacggtaaggtggttaccgtgaggcatcaggcagttacgcgcaagaaagataaccgcttcgctgtggcactggactctgaacagaataatatccacgtgaaagatatcgtgaaggtcattgacggcccacactccggcagagaaggagaaataagacacctttttcgcagtttcgccttcctgcactgtaagaaattggtggaaaacggcggtatgttcgtttgcaaaacacggcatctggtcttagccggtgggtccaaaccacgtgatgttaccaactttacagtgggcggctttgctcccatgagtccccgcataagtagccctatgcaccccagtgccgggggccaacgcggcggcttcgggagccccgggggcggaagcggcggaatgagtcgggggcgcggtaggcgcgacaatgagctgatagggcagacggtacgaattagtcaggggccatacaaagggtacattggagtcgtgaaagatgcgaccgagagtaccgctagggtcgaactgcacagcacctgccaaacaatttccgttgaccgccagcgattaactacagtgggttcacgccggccaggtggcatgacatccacgtatggacggacgcctatgtacggctcacagacacccatgtacggctccggatccagaacacctatgtacggtagccagacacccctgcaggacggctctcggaccccacactacggatcccagactccactccacgacgggtcacgcacccctgctcagagcggcgcctgggaccctaataacccgaatactcctagcagggcggaagaagaatatgaatatgctttcgacgacgaacctacgcctagtccacaagcctacggcgggacacctaatccacaaaccccaggttatccagacccgtcgagccctcaggtgaatccccaatacaacccccagacacctgggactcccgccatgtataatactgaccaattttcgccctatgcagccccttcaccccaaggaagctatcagccctcaccatctccccaatcctaccaccaggtggccccctctcccgccggctaccagaatactcattcacctgcctcttaccaccctactcccagcccaatggcctaccaggccagcccctcccctagccctgtgggctactcaccaatgacacccggagcgccttctcctggagggtataatcctcacacccccggctcaggaatcgaacagaattcaagcgattgggtgacgaccgatatccaggtcaaagttcgggatacttatctcgatacacaggtcgtcggccaaacaggagtgattcggtctgtcacaggtggcatgtgttctgtgtatctcaaagatagtgaaaaggtggtcagcatctcatccgagcacttagaaccaattacgcctaccaaaaacaacaaagtgaaggttattttgggcgaggatagggaggccacaggagttctcctttcaattgatggagaggacggtattgtgcgcatggatctggacgagcagctcaagatcctcaatcttcggttcctgggcaagctcctggaagcgtag

SEQ ID NO: 207467 - DNA, 3264 bp, synthetic construct
  misc_feature 1..3264: note = Description of Artificial Sequence: Synthetic coding sequence
  source 1..3264: mol_type = other DNA
atgagcgacagcgaggacagcaacttcagcgaggaggaggacagcgagcgatcgtctgatggcgaagaggccgaggtggatgaggagaggaggagcgctgccggatctgaaaaagaagaggagcccgaggatgaagaggaagaagaggaggaggaagaatatgatgaagaagaagaagaggaggacgacgaccggcccccaaagaagccacgacacggggggtttattctggacgaagccgacgtagatgacgagtacgaagatgaggaccagtgggaagatggagctgaagatatcctggagaaggaggaaattgaggcctccaatatcgacaacgtggtgttagatgaagatagaagcggtgcgcgacggctgcagaacctttggcgcgaccagagagaggaggaattaggcgagtactacatgaagaagtatgcaaagagctccgtgggcgagaccgtttatggaggttccgatgagctgagcgatgacatcactcaacagcagctcttaccgggtgtaaaggatccaaacctgtggactgtgaaatgtaagatcggggaggagcgggcgaccgctatcagcctcatgcggaaatttatcgcctatcagttcaccgatactccactccaaattaagtctgtggtcgcccctgagcacgtgaaaggatatatctatgtcgaggcatataaacaaacgcacgtgaagcaggccattgaaggagtgggcaacttgaggttaggttactggaatcaacagatggtgcccattaaagagatgaccgatgtgctgaaagtcgttaaggaggtcgcaaacctgaagcccaagtcatgggtaagactgaagcgcggaatctacaaagacgacattgcacaggtggactacgtcgagcctagccagaacactatcagtctcaagatgatccccagaatcgactacgataggattaaagcccggatgtccttaaaggattggtttgccaagcgaaaaaagtttaaacgacccccccagcggctctttgatgcagagaaaatccgctcgttggggggtgacgtggcttccgacggcgacttccttatatttgagggcaatcgatattcaaggaagggctttttattcaaatcattcgcgatgtccgctgtgattactgagggcgttaaacctacactgagtgaactcgaaaagtttgaggaccagcccgaagggatcgatctggaagtggtgaccgaatccacaggcaaggagagagagcataatttccagcccggcgataacgtagaggtatgcgagggcgagctgattaatctccaagggaagatcctcagtgttgatggcaataaaatcaccattatgcctaagcacgaagacctgaaagatatgctggagttccccgcccaagagctcagaaaatactttaagatgggtgaccacgttaaagtgattgcagggaggttcgagggggacactgggctgatcgtccgtgtggaggagaactttgttattctgttctctgatctgactatgcacgagttaaaggtgttgcctagagaccttcagttgtgcagtgagaccgcatccggcgtcgatgtgggcgggcagcacgagtggggggaactggtccaattagacccccaaacagtgggtgtcattgtgcggctcgaacgagagacgttccaagttctgaacatgtatggcaaagtggtgactgtacggcatcaggccgtgacccgcaagaaagacaatagattcgccgtggctcttgattcagagcagaacaatattcacgtgaaagacatagttaaagtaattgacggaccccatagtggcagagagggagagattaggcacttgttcagatctttcgcgttcttgcattgtaaaaagctggtcgagaacggaggcatgttcgtttgtaagacccgacaccttgtcttagccggaggatccaaaccaagagacgtgacaaactttacagtgggggggttcgctccgatgtctccacgcatcagctctccaatgcatcccagcgccggcggacagcggggaggtttcggatccccaggtggaggcagcggaggaatgtcaaggggaagaggcagacgagataacgagctcattggtcagacagtccggattagccaggggccctacaaaggttacattggggtcgtgaaggacgcgacagaaagtactgcacgagtggagctccattccacgtgtcagacgatcagcgtggatcgacaaaggctgaccacagtgggaagccgcagacctggagggatgactagtacctacggacgaacacctatgtacggttcacagacccctatgtacggcagcggaagtcgaaccccaatgtacggatctcagacacccctccaggacggatcccggaccccccactacggaagccaaactcccctccatgatgggtccagaacacccgcccagtcaggtgcctgggaccccaacaatccaaatactccgtcaagagctgaggaagaatatgagtatgcttttgatgacgagcccactccctcccctcaggcgtacggcggaaccccaaacccacagacccccggttatcccgaccccagttctcctcaggtcaacccgcagtacaatcctcagacaccagggactccggccatgtacaacacagaccagttctcaccctacgccgcaccctcacctcaagggtcatatcagccgagcccaagtccccagagttaccatcaggtggcaccttcccctgctgggtatcagaatacacattcccctgcctcatatcacccaactccttcacctatggcctaccaggcttcaccttccccatctcccgtaggatatagccccatgactcctggcgctccctctcccggggggtataacccccacacccccggatccgggatcgaacaaaactcatcagattgggttactactgatatacaagtgaaagtgagggatacctacctggatacccaggttgtgggtcagacaggtgtcatccggagtgtgaccgggggaatgtgctccgtatacctcaaggacagcgaaaaggtggtaagcatcagcagcgaacacctggagcctattacaccgactaaaaataacaaggtaaaggtcatccttggagaagatcgagaagcgaccggtgtgctgttgtctattgatggtgaagatgggatcgtgcgcatggatctagacgaacagttaaaaattctcaacctgcggttcctggggaagctgctcgaggcgtag

SEQ ID NO: 207468 - DNA, 3264 bp, synthetic construct
  misc_feature 1..3264: note = Description of Artificial Sequence: Synthetic coding sequence
  source 1..3264: mol_type = other DNA
atgagcgacagcgaggacagcaacttcagcgaggaggaggacagcgagagatcatccgatggggaggaggctgaggtggatgaagagcgccgatctgcagccggctccgaaaaggaggaggaaccagaagacgaagaagaagaggaggaagaggaggaatatgatgaagaagaggaggaagaggacgacgatcgccccccgaaaaagccaaggcatggcggcttcatcttggatgaggccgatgttgatgatgaatatgaggacgaggatcagtgggaagatggtgctgaagatattttggagaaggaagagattgaagccagcaacattgataatgttgttctagatgaggatcgttcaggggcgagacgcctacagaatctctggcgggaccagcgggaggaggagctgggcgagtattatatgaagaagtatgcgaaatcttccgtgggggagacggtctacggcgggagtgatgaactctccgatgacatcacacagcagcagctcttacctggagtgaaagacccaaatctctggacagtcaaatgcaaaatcggtgaggaacgcgcaaccgctatcagtctcatgagaaagttcattgcctatcagtttacagatacgccgcttcagattaagagtgttgtggctcctgagcacgtaaagggatatatctacgtggaggcctataagcaaacacatgtcaaacaagccatagagggggtgggaaacctacgccttgggtattggaaccagcagatggttccaatcaaagagatgacagacgtcctgaaagtcgtcaaggaagttgcaaacttaaagccaaaatcctgggtccggctcaagcggggcatttacaaagatgacatcgcccaggtagattatgttgaacctagtcagaacacaataagtctcaaaatgatccccaggattgactacgataggatcaaggccagaatgtctttgaaggattggttcgctaaacgtaagaagttcaaacggccaccacaacggttgtttgacgccgagaaaatacgcagtctggggggggatgtggcaagcgacggagactttttgatcttcgagggcaatcgctactcacgcaagggatttctcttcaaatccttcgcaatgtccgccgtgatcacagaaggtgttaaaccgacactgagcgagttagagaagttcgaagatcagcccgaaggcattgacctggaggtagtgaccgagtctacggggaaggaaagagaacacaattttcagcccggcgacaatgttgaggtgtgtgagggggagctgattaacctccagggtaagattctttccgtggacggcaataagatcaccatcatgccaaaacatgaggatctgaaggacatgctggagttccccgcccaagaactgaggaagtattttaagatgggagaccatgttaaggtgattgccggccgatttgagggtgacactggtctgatcgtccgggtcgaggaaaacttcgtgatattattttccgatctgaccatgcatgagcttaaagtcctcccgagagatctacagctttgctccgagaccgcgagcggggtcgacgtgggcggccagcatgaatggggggaattggtacagctggatccacagacggtaggggtgatagtgcggctggagagagagacatttcaggttttgaacatgtatgggaaggtggtcacagttaggcatcaggccgtgacccgaaaaaaggataatcgcttcgccgtggccctggattcggagcagaataatattcacgtaaaagatatcgtaaaggtgatcgacggaccgcacagcggacgagagggagaaataaggcacctgtttaggtcttttgcatttctacactgcaaaaagctggttgaaaatgggggtatgtttgtgtgcaaaacacgacacctcgtcctggccgggggatctaagcccagagatgtcacaaacttcactgtaggaggattcgctcccatgtcgccccgcatctcttcaccaatgcacccgtccgcggggggccagagaggcgggtttggtagtccgggagggggctccgggggtatgtcacggggccggggcaggcgggacaacgaactgattgggcagacagtaaggatcagtcagggcccatacaaagggtacattggggtggtgaaagacgctaccgagtctactgctcgggtcgaattacactctacatgccagacaatatcagttgaccggcagcgcctgacaaccgtaggatctcgtcggcccgggggcatgactagtacgtatgggcgcacaccaatgtatgggagccagacacctatgtatggatccgggtccagaacacctatgtacggctctcagaccccactccaagatggtagtcggactcctcactatgggtcacagaccccactccacgacggtagcaggaccccagcgcagagcggcgcttgggacccgaataatcccaacacaccaagcagagcggaggaagagtatgagtatgcgtttgacgatgagcccactcccagcccccaagcatacggtggtacacccaatccgcagacccctggttaccctgatccttcttctcctcaggttaatccacaatacaacccacagacaccaggcaccccggccatgtataataccgaccagttttcaccttacgcagcaccttctccacagggtagctaccagccttcaccttcacctcaatcttaccaccaggttgcacccagccccgcagggtatcagaatacccattcccctgcttcttatcacccgacgccctccccaatggcttatcaggcttcaccctctccttccccggtgggatatagccccatgactccaggcgccccaagtccgggtggatataacccacacacacctggatcagggattgagcagaactcctccgattgggtaacaactgacattcaggtgaaggtaagagacacatacctggatacccaggtcgtgggtcagactggtgttattaggagcgtaacagggggaatgtgttctgtgtacctcaaggattccgagaaggtagtcagcatttctagcgaacatcttgagccaataacgccaacaaagaataacaaagtgaaagttatattaggggaggacagagaggctactggagtgctgttgtccattgacggcgaagatggcatcgttcgaatggatttggatgagcagctgaaaatactgaatttacggttccttggtaaactgttagaagcctag

SEQ ID NO: 207469 - DNA, 3264 bp, synthetic construct
  misc_feature 1..3264: note = Description of Artificial Sequence: Synthetic coding sequence
  source 1..3264: mol_type = other DNA
atgagcgacagcgaggacagcaacttcagcgaggaggaggacagcgaacgcagttcagatggggaagaggccgaggtcgatgaggagcggagaagcgctgctgggtccgaaaaggaagaggagccagaagatgaggaggaagaggaggaagaagaagaatatgatgaggaagaagaagaggaggacgacgaccgacctcctaaaaagccacgtcatggagggttcatcctggacgaggccgacgtggatgatgaatatgaggacgaagatcagtgggaagacggggctgaggacatacttgaaaaagaggaaattgaggcctcaaatattgacaatgtggtcctcgatgaggaccggtccggtgcacggcgtctgcagaacctctggcgggaccagcgcgaggaagagctgggggaatactatatgaaaaaatacgccaagagtagcgtgggggagaccgtttatgggggatctgatgagctgagtgatgacattacacagcagcaacttcttcccggggttaaggaccccaacctgtggacagtcaaatgtaaaattggcgaggagcgcgccacagcaattagtctgatgcggaagttcatcgcataccagtttaccgacacccccctgcaaattaaatccgtcgtcgcacccgagcatgtcaaaggctacatctacgtggaggcctataagcagactcacgtcaaacaggctatcgaaggagtgggtaatttaaggctcgggtattggaaccaacagatggtgccaattaaggagatgacagatgtactgaaggtggtgaaggaggttgccaaccttaagcccaaaagctgggtaaggttgaagagaggcatctataaggatgacattgcacaggtagattacgtggagccaagccagaacacaatttccctgaagatgatacctcggatcgactacgaccgaataaaagcaagaatgtccctgaaagactggttcgccaagcgcaagaaatttaagaggcctccccagagactcttcgacgccgagaagattcgcagcctgggaggtgacgtggcctctgacggcgattttctaatcttcgaggggaaccgctattcccgtaaggggttcctctttaaaagctttgcaatgagtgctgtcataacggaaggtgtcaaaccaacactgtccgagctcgagaagtttgaggaccagccggaagggattgacctggaagtggtcaccgagtcaactggcaaggagagagagcacaattttcaacctggagacaacgttgaagtgtgcgagggagagttaattaatctgcagggcaaaatactgagcgtggacggaaacaagataaccatcatgccaaaacatgaagacttgaaggacatgctggagttccctgcacaggaacttcgtaagtactttaaaatgggtgatcatgttaaagtgatcgctggtaggttcgagggagacactggtctgattgttcgagtggaggaaaactttgttattctgttttcagacttgaccatgcacgaactcaaagtgcttccacgagacctgcagctgtgttccgaaactgcatcaggggtggacgtgggcggtcagcacgagtggggagaactggtccaactggatccacagaccgtgggcgtcatcgtccggctggaacgggagaccttccaagtgctcaacatgtatggtaaggtggtgaccgtccgccaccaggctgtgactcgaaagaaggataacaggttcgccgtggcattagacagcgagcagaacaatattcacgttaaagatatcgtcaaggtgatcgacggtccacacagtggccgggagggagagatacgacatctgtttaggtcctttgcctttttgcactgtaaaaagctcgtagagaacggaggtatgttcgtatgcaagactagacaccttgtactcgctggaggttccaaacctagagatgtcaccaatttcactgtgggtggcttcgcccccatgtcccctaggataagttctcccatgcatccttcagccggtggccagcgcggagggttcggtagtccagggggcggtagtgggggcatgtccagaggtcgcggacggcgggataacgaactgatcggccagactgtcaggataagccaagggccttataaaggttatattggtgtggtgaaagatgcaaccgagagtactgctcgggtggaactccatagcacttgccagactatctccgtggacagacagagacttacaaccgtgggatccagacggcccggcgggatgacatcaacctatggccgcacaccaatgtatggcagccagacccctatgtatggctctggatctcgcacacctatgtacgggagccagaccccactacaggacggtagtagaactccacattacggctctcagacccctctccacgacggctcccgtacccctgctcagagtggagcctgggacccaaataacccgaacacccccagtcgggcggaggaggagtacgagtacgcttttgacgacgagcctacaccctccccgcaggcctatggagggactccgaacccacagaccccgggctatcccgatcctagctctccacaggtcaatcctcagtacaacccgcagacgccaggcacaccggccatgtataatactgatcaattttctccttatgcagcgccgtcacctcagggaagttaccagccaagtccgagtccacagtcttaccatcaagtggcgccgagcccggccgggtatcaaaacacccacagcccagcaagctaccatccaaccccttcaccgatggcctaccaagccagtcccagcccatctcctgtgggatactctcccatgaccccaggcgcgcctagtcccggcggctacaatccccatacacccgggtctggtattgagcagaacagcagcgactgggtcactacagacatacaggtgaaagtacgggatacctacttggatacccaggtggtggggcaaacgggagttatccgctccgttactggcgggatgtgcagtgtgtatctgaaggattcggagaaggttgttagtatatccagtgaacatttagagcctatcacccctacgaaaaacaacaaagtgaaagtcatcctcggagaagaccgggaagctacaggcgtgctgctatcaatcgatggcgaggacgggatcgttagaatggacttagatgaacagctgaagattttgaacctgcgcttccttggtaaacttctggaggcatag

SEQ ID NO: 207470 - DNA, 5181 bp, synthetic construct
  misc_feature 1..5181: note = Description of Artificial Sequence: Synthetic coding sequence
  source 1..5181: mol_type = other DNA
atgagcgacttcgtggagagcgaggccgaggagagcgaggaggagtataacgacgagggggaagtcgtgccccgagtcaccaagaagtttgtggaagaggaagacgatgatgaggaggaggaggaggagaatctggacgaccaagatgaacagggtaatttaaaaggattcatcaatgacgacgatgacgaggatgaaggcgaggaagacgaaggctcggactccggtgacagcgaggatgacgttgggcacaaaaagagaaaaagaacttccttcgacgatcgacttgaagacgatgactttgatctgattgaggagaatctgggggtgaaagtaaaaagaggacagaagtatcgcagggtcaaaaaaatgtctgacgacgaggatgacgatgaagaggagtacggtaaggaggagcacgaaaaggaggctattgctgaggaaatcttccaagatggcgaaggagaggagggccaggaggccatggaggcaccaatggcccctccagaggaggaagaggaggacgacgaggagtcagacattgatgactttatcgtcgacgatgacggccaaccgctaaaaaagcccaagtggcgtaagaaactacctggttacacagacgccgctttacaggaagctcaagaaatttttggcgttgatttcgactatgacgagtttgagaaatacaatgaatacgatgaagagctggaagaagagtatgaatacgaagatgatgaagccgaaggagaaatcagggtccgaccaaagaaaactactaagaagcgcgtctcccggcgcagcattttcgagatgtatgaaccctccgagctcgaatctagccacctcaccgatcaagacaacgagatacgcgccactgacctgcccgagagatttcagttacgcagtatccctgttaagggtgccgaagatgacgagctagaggaagaagccgactggatctacaggaatgcctttgctaccccaactatcagcttacaagagtcttgtgattatctcgaccgcggtcaaccagcatcatcctttagcaggaagggcccttctactatccagaagatcaaggaagccctcggcttcatgcggaatcagcacttcgaggttccattcatcgctttctatcggaaggagtacgtagagcccgagttacatataaacgatctgtggagggtctggcagtgggatgaaaaatggacacagctcagaatccgcaaggaaaatttgacgagactgtttgagaagatgcaggcttaccagtacgagcaaatcagcgctgatcctgataaacctctggctgatggtattcgtgcactggatacaacggatatggagcggttgaaggatgtacagagcatggacgagctgaaagacgtctataaccatttcttgctttactacggtagggatatccccaaaatgcagaacgccgccaaggcaagcagaaagaaactgaaacgagtgagggaggaaggggatgaagagggcgaaggcgatgaagcagaggatgaagagcagcgaggtcccgaactgaagcaggcctcccgtcgggatatgtatacaatatgtcaaagcgccggcctcgatggacttgctaagaagttcggcctaacaccggagcagttcggagaaaatctaagagactcttaccagcgtcacgaaaccgaacagttcccagccgagcctctcgagctggcaaaagactacgtctgcagtcagtttccaacacccgaggcagtgctggagggcgcgcggtatatggtcgccctgcagatcgcacgcgagcccctggttcggcaggtcctgagacagacttttcaggagagagccaagctgaatatcaccccaactaaaaaagggagaaaggatgtcgatgaagctcattatgcctattcctttaaatacctgaagaacaaacccgtcaaggaactaagagatgatcagtttcttaagatctgcctcgccgaagatgagggtctgctgactaccgacatcagtatcgacttgaagggagtggaggggtacggcaatgaccagacttatttcgaagagatcaaacagttctactatagggatgagttttcacatcaggtgcaggagtggaatcgccagcgcactatggctattgaaagggcactccaacagttcctctacgtgcagatggctaaggaacttaagaataaactgctggccgaggctaaggagtacgtaatcaaagcctgctcgcgtaaactgtataactggctccgcgtggccccatacagacccgatcagcaggtggaggaagatgacgattttatggatgaaaaccaggggaagggtattcgggtgctgggaatcgctttttcttcagcaagagatcacccggtgttttgcgctctggttaatggagagggtgaggtcacagacttccttcgactgccccactttaccaaaaggcgaaccgcatggcgcgaggaagaaagggagaaaaaggcccaggatatcgaaacactgaagaaatttctcctgaacaagaaaccgcatgtggtgacagttgccggggagaaccgcgacgcccagatgctcatcgaggatgtgaagcgcatcgtgcacgagctggaccaaggacagcagctctcctccattggagttgaactggtcgacaacgaacttgctatcctgtacatgaattccaaaaaatctgaggcagagttccgagattacccaccagttcttagacaagccgtcagcctcgctcgcaggatacaggatcctcttatagagtttgcccaggtctgttcgtccgacgaggatattctatgtctcaagttccatcccttgcaggagcatgtggtgaaagaggaacttctgaacgccttgtattgtgaattcatcaatagagtgaatgaggttggtgtggacgtcaatcgtgcaatcgctcacccatattctcaggctttgattcagtacgtttgtggtctggggccacgtaagggaacccacctgctgaaaatcctaaaacagaataacaccaggctggagagtcggacacagcttgttacaatgtgtcacatgggaccaaaggttttcatgaattgcgccggctttcttaaaatagataccgccagcttaggagacagcacggattcatatattgaggtcctcgacgggagcagagtacaccccgagacctacgagtgggccagaaagatggcggtggatgccctcgagtatgatgaatcagccgaagatgcaaacccggccggggccctcgaagaaatcctcgagaatcccgagagactcaaggatttggatttggacgcatttgccgaggagctagagaggcagggctacggagacaagcacataaccctctacgatattcgggcggagttgtcatgccgctataaggatctgcgcactgcgtatcggagcccgaatactgaggagatttttaatatgttaaccaaggagacccctgaaacgttttacattggcaaacttatcatatgcaacgtcaccgggattgcccacaggaggccgcagggagaatcttatgaccaggctattaggaacgatgaaaccggactctggcagtgtcccttctgtcagcaggacaatttccccgaattgtctgaggtctggaaccatttcgactcagggtcttgcccaggacaggccattggcgtgaaaaccaggctagacaatggggtcaccgggtttatccccactaagtttttgagtgataaggtggtaaaaaggccagaggagcgggtcaaggtggggatgactgtgcactgtagaattatgaaaatcgatattgagaaatttagtgcggatctgacatgccgcacttccgacctgatggaccgcaacaacgagtggaaactccccaaagacacctattatgatttcgacgctgaggcagctgatcacaagcaagaggaggatatgaagcgcaagcaacagcgcaccacctacattaagagagtaattgcccatccgagttttcacaacatcaattttaagcaggccgagaagatgatggaaaccatggatcagggggacgtcattatacgcccttctagtaagggcgaaaaccacctgacagttacatggaaggtgagtgatggaatttaccagcacgttgacgtgcgcgaggaggggaaggaaaacgcattctcactgggcgctacgctctggattaacagcgaggaatttgaagacctggacgaaattgtcgcccggtatgtgcagccaatggcttcctttgcaagagacctgctcaatcacaagtattaccaggattgctctggaggagatcgcaagaaactggaagaactgttaataaagaccaagaaggagaaacctactttcataccgtattttatctgcgcatgcaaagagctgccaggcaagtttcttctaggttaccaaccacggggcaaaccgaggatagagtacgtcacggtgacacctgaaggattccggtaccgtgggcagattttccctactgtgaacggactgttcagatggtttaaagatcattaccaagacccagtgccggggataaccccgagctcttcaagccgtacccggactcccgccagcatcaacgcgacccccgccaatattaacctagctgacctgacaagggctgttaacgctctgccccagaacatgaccagccagatgttttctgccattgctgctgtcacgggccaagggcagaaccctaatgcaaccccagcgcagtgggccagttcccagtacggttatggagggagcggcggcggttctagcgcgtaccacgtctttcctacgccagcgcagcagcctgtggccaccccgctgatgaccccctcctacagttacactacgccttctcagccgattaccacgccacaataccaccagctgcaagcgtccacaacacctcagtccgctcaagcccagccccagccaagttctagttccagacagcgacagcaacagcctaaatccaatagtcatgccgctattgactgggggaaaatggcagagcagtggttgcaggagaaggaggcagagcggcggaagcagaaacagcgcctcacaccacgaccatctccatcaccaatgattgaatctacacccatgagcatagcaggtgacgccactcctctactggatgagatggatcggtag

SEQ ID NO: 207471 - DNA, 2181 bp, synthetic construct
  misc_feature 1..2181: note = Description of Artificial Sequence: Synthetic coding sequence
  source 1..2181: mol_type = other DNA
atgagcgacttcgtggagagcgaggccgaggagagcgaggaggagtataatgatgaaggagaggtggtaccgcgcgtgactaaaaagttcgttgaagaggaggacgacgacgaagaggaagaggaggaaaatttggatgaccaggacgaacaaggtaatctcaaaggcttcattaatgacgacgacgacgaggatgaaggtgaggaagatgagggctctgactctggggacagcgaagacgatgtcgggcacaaaaagagaaaacggacttcttttgatgatcgacttgaggacgatgattttgacctgattgaggaaaatctgggggtgaaggtgaaaagaggacagaagtatcggcgcgtcaagaaaatgagcgatgacgaggacgatgatgaggaggagtacgggaaggaagaacacgaaaaggaggctatagctgaggagatcttccaagacggagaaggagaggaggggcaggaggccatggaggccccgatggccccccctgaagaggaggaagaagacgacgaagaaagcgacattgatgacttcatcgtggacgacgacggacagccactcaaaaaaccaaagtggcgaaagaaattgcccggctacacagatgcagctttacaagaagcccaggagatcttcggggtcgactttgattacgacgaattcgaaaaatataatgaatacgacgaagagctggaggaggaatatgaatatgaggacgatgaagccgaaggggagattcgggtccggccgaaaaaaaccactaaaaaaagggtgtcccggcgaagcatctttgaaatgtacgaaccttcagaacttgagtcctctcacctcactgatcaggataacgaaattcgggcaacagacctgcccgaacggttccagctcagatcaatccccgtgaaaggcgcagaagacgacgagctggaagaggaggccgactggatttatcgaaatgcctttgccacacccaccattagcttacaagagtcttgtgattatctcgacaggggacaaccagccagcagtttctctagaaagggtcccagcacaattcaaaaaatcaaagaagccttagggttcatgcggaaccaacattttgaagtgccatttattgcattctatcggaaggaatacgtggaacctgagctccacatcaacgacctctggcgggtgtggcaatgggatgagaaatggacccaattacgaattcggaaagagaatctcaccagactcttcgaaaaaatgcaggcctatcaatacgagcagataagcgccgaccccgacaagcccctggccgacggcattcgggccttggatacaactgacatggaaagattgaaggacgtgcagtctatggacgaactaaaagatgtctataatcattttctgctgtactacggtcgtgacatccccaagatgcagaacgctgcaaaagcaagcaggaagaagctcaagcgggtgcgtgaggagggcgacgaggagggagagggtgatgaggcagaggacgaggagcagcgaggccctgagttaaaacaagccagcaggcgcgacatgtacactatctgccagtctgcaggactcgatggcctggctaagaagtttggccttacacccgagcagtttggggagaatctgagagacagctaccagaggcacgagactgagcagttccctgccgagccccttgagctggccaaggactacgtatgcagtcagtttccaacgcctgaggccgtgctggagggggcaagatacatggtcgctctgcagattgcgcgggagcccttggtccgacaagtgctcagacagacattccaggaacgggccaagctgatgacgccatcttatagctacacaaccccctctcagccgattaccacgcctcagtaccaccaactacaggcctcaactaccccccaaagcgctcaggcccagcctcaacctagttcctcatcacgccagcgccagcaacaacccaagtcaaacagccacgccgccatcgattggggaaaaatggcggagcagtggttgcaggaaaaggaggctgagagaaggaagcagaagcagaggctcacacctagaccttcaccttctccaatgatcgagagtaccccaatgagcatcgccggggatgccacacctctgctggacgaaatggaccgctag

SEQ ID NO: 207472 - DNA, 2361 bp, synthetic construct
  misc_feature 1..2361: note = Description of Artificial Sequence: Synthetic coding sequence
  source 1..2361: mol_type = other DNA
atgagcttcagccgggccctgctgtgggcccggctgcccgccggccggcaagcggggcatcgggctgctatatgttctgccttgcggcctcacttcggcccatttccgggagtgctcgggcaggtgtccgtcctcgccaccgcatcatccagtgcgagtggggggagcaagattcctaatacctcactcttcgtgcctttgactgtgaagccccagggcccgtccgcggacggggacgtcggcgccgaactgacgaggccgcttgataaaaacgaggtaaagaaagtgctggataagttctataagaggaaagagattcagaaactgggtgccgactatggtcttgatgccaggttatttcaccaagcattcatttcctttcgcaattacatcatgcagagccactcccttgacgtggatatccacatcgttctgaatgatatctgttttggtgctgcacatgctgacgatctcttcccattcttcttgagacacgcaaagcagatcttccctgttctggactgtaaggatgacctgcgcaagattagtgacctgcggataccccctaattggtacccagacgcccgtgccatgcaacggaagatcatcttccactccgggccaacaaatagcggtaaaacttatcacgctattcaaaaatacttctccgcgaagagcggtgtgtactgcggacccctcaaactcctcgcacacgaaatcttcgagaagtctaatgccgccggcgtgccgtgtgatctcgtgacaggggaagaaagagtgacagtgcagccaaacggtaaacaggccagtcacgtctcctgcacggtcgaaatgtgcagcgtgaccacgccatacgaggtggcagtcatcgatgaaatccaaatgattagggacccagcacgcggttgggcttggacgagggcactcctgggcctctgcgctgaggaggtgcacctgtgcggggaacctgccgctatagatctggtaatggagttgatgtataccactggggaggaagtggaagtgcgagattacaagagacttacacctatcagcgtgctggaccatgcgcttgagtcactggacaacctgaggcctggagattgcattgtgtgttttagtaagaatgatatatactccgttagtagacagattgaaatccgcggactggagtccgctgttatctatggcagtctgcctccaggaacaaaactggctcaggccaaaaagttcaacgaccctaatgatccctgcaagatcctggtagcaactgacgcgatcggaatggggttgaacctttctattagacggataattttctactcccttatcaagcccagtatcaacgaaaaaggggagagggagctggagcctattacaacctcacaggctctacagattgccggccgagctgggcgattttcaagtcggtttaaggaaggtgaggtaaccacgatgaatcatgaagatttgtctctcctcaaagaaatacttaaacggcccgtggacccaataagagccgctggcctgcaccctactgcagagcagattgaaatgttcgcttatcacttacctgatgcgacactctccaaccttatcgacatattcgtcgatttttcccaggtcgacgggcagtacttcgtttgtaatatggatgattttaagttcagcgccgaactgattcaacacattccactgagcttaagagtgagatatgtgttctgcacagcccctattaataaaaagcaacccttcgtgtgctcttcactcctgcaatttgcacgtcagtacagtaggaatgagccgctcacatttgcctggctgaggcgttacatcaagtggccattgctaccaccaaagaacataaaggaccttatggatcttgaggccgtacatgacgtgctggacctgtatctgtggttgtcttaccgcttcatggatatgttccctgacgcgtctctgatcagggatctgcagaaggaactcgacggtattattcaggatggggtgcacaacatcacaaagctgataaagatgagcgaaacccacaaactcctcaatctcgaaggctttccaagcgggagtcaaagcaggctgagcggcacgttgaagtcacaagcaaggaggacccgcggcactaaggcgctaggatctaaagccacagagccacctagccccgacgccggcgagctgagcttggcttcccgcttggtgcagcagggcctgcttacacccgatatgctgaagcaattggagaaagaatggatgacccagcagacagagcacaacaaagaaaaaacggagtcgggcactcaccctaagggcactaggcgcaagaagaaagagccagacagtgactag

SEQ ID NO: 207473 - DNA, 792 bp, synthetic construct
  misc_feature 1..792: note = Description of Artificial Sequence: Synthetic coding sequence
  source 1..792: mol_type = other DNA
atgagcttcagccgggccctgctgtgggcccggctgcccgccggccgacaggccggccaccgggctgccatctgcagcgctctgcggccccattttggtcctttccccggggtgctcgggcaggtgagcgtccttgcaactgcttccagctcggcgtctggaggcagtaagatccccaatacatctctctttgtccccctcaccgtaaaaccacagggcccatcagctgacggagacgtgggcgccgagttaaccagacctctggacaaaaatgaagtcgcggttatagacgagatccagatgatccgtgatccggcacgcggctgggcctggaccagagctctgctcggactgtgtgctgaggaggttcatttatgtggagaaccagcagccatcgatctcgtgatggaactgatgtataccacaggtgaggaagtggaggtgcgggattacaagcgcctcaccccaattagtgttctggatcacgccctagaaagcctggacaacctccgccctggagattgtatagtgtgtttctcgaaaaatgatatctatagtgtgagtaggcagatcgagattagaggcttagaatcagccgtgatttatgggtctctgccccccggaaccaaacttgcgcaggctaaaaagttcaacgatccgaacgacccttgtaaaatcctggttgccaccgacgctatcgggatgggcctcaacctgagcattaggaggatcattttctactccttgataaagccttctattaatgaaaaaggggaaagagagctggaatag

SEQ ID NO: 207474 - DNA, 1233 bp, synthetic construct
  misc_feature 1..1233: note = Description of Artificial Sequence: Synthetic coding sequence
  source 1..1233: mol_type = other DNA
atggccgccgtgggcgccgaggcccggggcgcctggtgcgtgccctgtcttgtgtcactggacacgctgcaggaactgtgtcgaaaggaaaagttaacttgcaaatcaattggaatcacaaagaggaatcttaacaattacgaggtggagtacttatgcgactataaggttgtcaaggacatggagtattatctggtgaagtggaaggggtggccggatagtacaaacacttgggaaccactacaaaacctcaagtgcccccttctgctgcagcagttctcgaacgataagcacaattacctgtcacaggtgaagaagggaaaagccatcactcccaaagacaacaataaaaccctcaaaccggctatcgccgagtatatcgttaagaaggcaaagcagcgcattgccttgcagcggtggcaggacgagttgaatcgtcgcaagaaccataaaggtatgatcttcgtcgagaacacggttgatctggagggaccccccagcgacttctactatatcaatgagtataaacctgctcctggtatctccctggtaaatgaggcaaccttcgggtgctcttgcactgactgtttcttccaaaagtgttgtcccgctgaggcaggcgtgttgctcgcatacaataagaatcaacaaattaagatccctcctggaacacccatttacgagtgtaactctaggtgccagtgcggcccggattgccctaatcggatcgtgcaaaagggtacccagtactcattgtgtattttcagaacaagtaacggtaggggctggggcgtgaaaacactcgtgaagattaagagaatgagcttcgtgatggaatacgtgggcgaggtgatcacgagtgaggaggccgaacgtagaggccagttctacgacaataagggaatcacctatctgttcgatctagactacgaaagcgacgaatttactgtcgacgccgcaaggtacggcaacgtatcccatttcgtgaaccactcctgcgaccctaacctgcaggtgttcaacgtttttatagataatctggacacacgactcccaaggatcgcactgtttagcacacggaccatcaatgcaggcgaagagctaactttcgactaccagatgaaaggctccggcgatattagttctgatagcatcgaccatagtcccgcaaaaaaaagagtcaggactgtgtgtaagtgtggggccgttacttgtaggggctatctgaattag

SEQ ID NO: 207475 - DNA, 693 bp, synthetic construct
  misc_feature 1..693: note = Description of Artificial Sequence: Synthetic coding sequence
  source 1..693: mol_type = other DNA
atggccgccgtgggcgccgaggcccggggcgcctggtgcgtgccctgtctggtgagcctggataccctgcaagaactgtgtcgcaaggagaagctgacgtgcaagtctatcggcatcacaaaacgcaacctgaataattacgaggttgaatatttgtgtgactacaaagtcgtgaaagacatggaatattaccttgtcaaatggaaaggatggcccgatagcaccaacacatgggagccacttcagaatttgaaatgcccactgttgctgcaacagttcagtaacgataagcataattatctgagtcaggttatcactagcgaggaggccgagcgcaggggtcagttctacgataacaaggggataacgtatctgttcgacttggactatgagtccgacgaatttacggtagacgccgcccggtatggcaatgtatcccattttgtgaatcatagttgcgaccccaacctgcaggtctttaacgtgtttattgacaatctggacacccgcttgccaagaatcgcactgtttagcacccggaccattaatgccggggaggaactcacttttgactaccagatgaaaggtagcggggatatttcaagtgacagtattgatcactccccggctaaaaaaagagtccgtacggtttgtaaatgtggagcagtcacatgccgggggtatttgaattag

SEQ ID NO: 207476 - DNA, 459 bp, synthetic construct
  misc_feature 1..459: note = Description of Artificial Sequence: Synthetic coding sequence
  source 1..459: mol_type = other DNA
atggagtactacctggtgaagtggaagggctggcccgacagcaccaacacctgggaaccccttcagaacctgaagtgccctctattgctccaacagttttctaatgataagcacaattatctaagccaggttatcacgagcgaggaggccgagcgaaggggtcagttctatgacaacaagggaatcacatacttattcgaccttgactatgaatctgacgaattcacagtggacgcggctcggtatgggaacgtgtcccattttgttaaccacagttgtgatccaaacctgcaggtgttcaacgtgtttatagacaacctggatacccggctcccacgaatcgcgctgttttcaacccggactattaacgccggagaggaactcacgttcgactaccagatgaagggatctggagacatttcatcagactctatcgatcattctcccgcaaagaagtag

SEQ ID NO: 207477 - DNA, 1053 bp, synthetic construct
  misc_feature 1..1053: note = Description of Artificial Sequence: Synthetic coding sequence
  source 1..1053: mol_type = other DNA
atggagtactacctggtgaagtggaagggctggcccgacagcaccaacacctgggaaccattgcagaaccttaaatgcccgctcctactgcagcagttcagcaatgataagcataattacttatcccaagttaaaaagggaaaggctatcacccccaaagataataacaagactctgaagccagcaatagccgagtatatagtcaaaaaagctaaacagaggatcgcactgcagaggtggcaggacgaacttaatcggagaaagaaccataaaggtatgatttttgtagagaacacagtggatttagaggggcccccttcagacttctactacatcaatgagtacaaacccgcccctggtatatcattggtgaatgaagcaacttttgggtgctcctgcacagattgtttcttccaaaaatgctgcccagcggaggctggcgttctgctcgcctataacaaaaaccaacaaatcaagatcccccctgggaccccaatctatgagtgcaactccagatgccaatgtgggccggactgccctaaccggattgtgcagaagggaacacaatactccctatgcatctttaggacttctaacggacgtggttggggagttaaaacactcgtgaagattaaacgtatgtcattcgtcatggagtacgtaggagaggtgataacgtcggaagaagccgagcggaggggacagttctatgacaacaaaggaatcacatacctgtttgatttggattacgagtccgacgagttcactgtcgatgccgccaggtatggcaacgtcagccacttcgtcaatcattcctgtgacccgaacctgcaagtgttcaacgtctttatagacaacctggatacgagacttccaaggatcgcgctgtttagcactcggactatcaacgcgggggaagaattaaccttcgattaccagatgaagggttcaggagatatctctagtgactccattgaccattcgccagctaagaagagggtgcggacagtgtgcaagtgcggcgccgttacctgcaggggatatctcaactag

SEQ ID NO: 207478 - DNA, 2658 bp, synthetic construct
  misc_feature 1..2658: note = Description of Artificial Sequence: Synthetic coding sequence
  source 1..2658: mol_type = other DNA
atgaagtggctgggcgagagcaagatcatggtggtgaacggccggagaaatggggggaaactcagcaacgatcaccagcagaatcagagtaagctccagcatactggcaaggatacgctgaaagctggtaaaaacgccgtggagagaagatctaacagatgtaatggaaattccgggttcgaaggacagagtagatatgttccatcgtcaggcatgagcgcgaaagaactgtgcgaaaacgacgatctggccacaagcctggtgctggatccgtacttgggattccaaacacataagatgaacacgtctgcttttccttcaagaagcagccgccatttcagtaagtccgattctttcagtcacaacaaccctgtccgctttcggcccattaaggggcgacaggaagagctcaaggaggtcattgagcggtttaagaaggatgaacatctcgagaaggcctttaaatgccttacatctggtgaatgggcacggcactacttcttgaacaagaacaagatgcaagagaagctcttcaaagagcacgtattcatttatctccgcatgttcgcaaccgacagcgggttcgagatcctcccctgcaataggtacagctccgaacagaacggggcaaaaatagtagcgacaaaagaatggaagcgaaacgacaaaatagagctgttggtgggctgcatcgctgaattatcggagatcgaggaaaacatgctcctgcgacacggtgaaaacgactttagcgtcatgtactccacccggaagaattgtgctcagctttggctcggaccagctgcattcatcaaccacgactgccgcccgaattgtaagttcgtgtccacgggcagagacaccgcatgcgtaaaggcccttagggacattgagcctggagaagagatctcttgttattacggtgacgggttcttcggtgagaacaatgaattctgcgagtgttacacatgtgaaagacgcggcacaggagcctttaaaagtcgcgtcggactcccagccccagcccccgtgatcaactccaaatacggcctgcgcgagacggataagcggcttaatcgtctgaagaaactgggcgactcaagcaaaaatagcgatagccagtccgtctcaagcaacacagacgcagatactacccaagaaaaaaacaacgctactagtaatcggaagtcaagcgttggcgtgaaaaagaatagcaaaagtcgtaccctgacaaggcaaagtatgagtcgcatccccgccagcagtaatagcacatcatctaagctgacacacattaataacagtagggtacctaagaagctgaagaagcccgccaaacccttgttgtctaagattaaactgaggaatcactgtaaaagactcgaacagaaaaatgcaagtaggaaactggaaatggggaacttagtcttaaaagaacccaaagttgtgctttacaaaaacttaccaataaagaaggacaaggagcctgaaggcccagcgcaagccgccgttgcctccgggtgtctcacacggcatgctgccagagagcacagacagaacccagttagaggggcccattcccagggtgaatcctcgccctgtacatatattactaggcggagtgtgcgcaccagaacaaacctcaaagaggcttcggacattaagctggaaccgaacacccttaacgggtacaagagtagcgtgactgaaccctgtcctgattccggggaacaactacagcctgcccccgtcctgcaggaggaggaactggctcacgagactgctcaaaagggtgaggctaagtgccacaagtcagacaccggtatgagcaagaagaaatcaagacagggcaagcttgtgaagcagtttgctaagatagaggaatctacccccgtgcatgattctcctggaaaggatgatgccgttccagacttgatgggtccacactctgaccagggcgagcatagcggaactgtgggggtgcctgttagctacacagactgtgctccgagcccagtgggctgcagcgtggttacatcggatagctttaagaccaaagactccttcagaaccgcgaagagcaaaaagaaacggaggattactcgatatgatgcccaacttatcctcgagaacaactccggcattcccaaattaaccctgcgtaggcgacacgatagtagtagtaagaccaacgaccaggagaatgatggcatgaactcttcaaagatcagcatcaagctcagcaaagaccatgataacgacaataatctgtatgtggcaaagctaaataacggcttcaatagcggtagcggctcatcctccaccaaactcaagatacaattgaaacgagatgaggaaaacagaggctcatatactgaggggcttcacgagaacggggtgtgctgctctgaccccttgtctctgttagaatccaggatggaggtggatgactattctcagtacgaggaggaatctaccgatgactccagctcctcagaaggggacgaagaagaagacgactacgatgatgattttgaggacgattttattcccctgcccccagccaagcgtctccggctgatcgtgggaaaagactccatcgatatcgacattagctcgcggcggcgcgaagaccagagtctgcgcctgaacgcatag

SEQ ID NO: 207479 - DNA, 1182 bp, synthetic construct
  misc_feature 1..1182: note = Description of Artificial Sequence: Synthetic coding sequence
  source 1..1182: mol_type = other DNA
atgaagtggctgggcgagagcaagatcatggtggtgaacggccggaggaacgggggaaaactgtcaaatgatcatcagcagaaccaatccaaacttcaacacacagggaaagacacattgaaagccggcaagaatgctgtggaaaggaggagtaaccgctgtaacgggaatagcgggtttgaaggccagagtaggtacgttccttcgtctggtatgtcagccaaagaactatgcgagaacgacgacttagcgacctctcttgtgctagacccttatctcggctttcagacacacaaaatgaacacttcagcattcccatctcggagttcacggcacttttctaagtctgactccttttcgcacaataaccctgtccggttccggccaatcaaagggaggcaggaggagctgaaggaagtgatcgaaaggttcaagaaagatgaacacttagaaaaggcctttaaatgcctcacctcaggcgagtgggccaggcactactttctgaataaaaataagatgcaagaaaagctcttcaaggagcatgtgtttatttacctgcggatgtttgctactgactcaggctttgaaattctgccttgtaacaggtacagtagtgagcaaaacggtgcaaagattgtagcgactaaggaatggaagcgcaacgataagattgagctgctcgtggggtgcatcgccgaactgtctgagatcgaagaaaatatgcttctgagacacggggaaaatgacttcagcgtgatgtactctacccgaaaaaattgcgcacaactttggttaggcccggccgcatttataaaccacgattgccggccaaactgtaaattcgtctcaactggcagggacaccgcctgtgtgaaagccctccgcgacatcgagccaggcgaagagattagctgctattacggtgacggcttctttggagaaaacaacgaattttgtgaatgctacacctgtgagagacggggtactggtgccttcaaaagccgggttggattgcccgccccagcccccgtaatcaattcaaagtacggcctccgggaaacagacaaaaggctgaataggctgaagaagcttggcgatagcagcaagaactccgatagtcaatctgtctcatccaacacagacgccgataccacccaggagaagaacaatgcatcaaagtag

SEQ ID NO: 207480 - DNA, 1182 bp, synthetic construct
  misc_feature 1..1182: note = Description of Artificial Sequence: Synthetic coding sequence
  source 1..1182: mol_type = other DNA
atgaagtggctgggcgagagcaagatcatggtggtgaacggccggcgcaacggggggaaactgtcgaatgaccaccagcagaatcagagcaaactgcaacacacaggcaaagacactctcaaggccggtaagaacgcagtggagcggcgcagcaatcggtgtaatggcaacagcgggttcgaaggccagtcacggtacgtaccttcaagtggcatgtccgcaaaagagctgtgcgagaacgatgatttagcgacctcattggttctggatccttatcttggattccagacccataaaatgaacacctccgcctttccttccagaagtagccgccatttttccaagagcgatagtttctctcacaacaacccagtgcggtttcggccgatcaaagggcgtcaggaagaactcaaagaggtcatcgagcgcttcaagaaagacgaacatctggaaaaagcttttaagtgcctcaccagcggtgagtgggcacggcactactttctgaacaaaaacaagatgcaggaaaaactgttcaaagaacatgttttcatctatctacgcatgttcgcaacagacagcggtttcgaaattctcccctgcaatcgttactcctccgaacaaaacggggcgaagatcgttgctactaaggaatggaagaggaatgataagatcgagctcttagtcggatgtatcgccgagctgtcagaaatcgaagaaaacatgctgcttcgacacggagaaaacgatttcagcgtgatgtactcaacacgcaaaaactgcgcacagctttggctggggccggcggcctttattaatcacgactgtagacctaattgtaagtttgtgtcgacaggaagagacaccgcatgtgtgaaggctctgcgggacatcgagccaggagaagagatcagttgttattatggagacgggttcttcggagagaacaacgagttttgcgagtgctacacctgcgagaggagaggaacaggggcatttaaaagtcgggtcgggttgccagcacccgcccctgttattaactcaaaatatgggctgcgggaaacagacaaaagactaaaccgacttaagaaactgggcgactccagtaagaactctgacagtcagagcgtttcatctaataccgatgccgacacaacccaagaaaagaacaatgcaagtaaatag

SEQ ID NO: 207481 - DNA, 357 bp, synthetic construct
  misc_feature 1..357: note = Description of Artificial Sequence: Synthetic coding sequence
  source 1..357: mol_type = other DNA
atgaagtggctgggcgagagcaagatcatggtggtgaacggccggaggaacggtggaaagctctctaacgaccatcaacaaaaccagtctaaactgcaacatacaggcaaggatacccttaaggcaggtaaaaacgcagttgagagacggtctaatagatgtaacggtaattccggctttgagggccagtccaggtatgtgccatcctcaggaatgtccgctaaggaattgtgtgagaatgatgacctggcaacctctctggtgctggatccatacctggggtttcaaacacataagatgaatacttccgcatttccctcacgctctagtcggcatttttctaaatccgattcatag

SEQ ID NO: 207482 - DNA, 1389 bp, synthetic construct
  misc_feature 1..1389: note = Description of Artificial Sequence: Synthetic coding sequence
  source 1..1389: mol_type = other DNA
atgggccccgaccgggtgaccgcccgggagctgtgcgagaacgacgaccttgccacaagcctggttctggatccttatctggggttccgcacacacaaaatgaatgtgagcccagtgcccccccttcgccgtcagcaacatctgaggagcgctctggagactttcctgcggcagagagatttggaagccgcttacagagcactcaccctgggagggtggacggctagatattttcagagtagaggccctcgacaggaagccgcgctgaaaacacatgtctacaggtaccttcgcgcctttctgcctgagtctggctttacgattctgccctgtacaagatactcaatggaaacaaacggtgctaaaatcgtatccacgcgggcctggaagaagaatgaaaaactggagctgcttgtcggctgtatagccgaacttcgagaggctgacgagggtttactgcgggctggggaaaatgactttagtatcatgtatagtactaggaaacggagtgctcagctttggctaggccccgctgcgtttattaatcatgactgtaagccaaactgcaagttcgtgccagcagacggtaacgctgcctgcgtaaaggtcctccgcgacatcgagcccggcgacgaggtgacatgtttctatggagagggcttctttggagagaagaatgagcattgcgagtgtcacacatgcgaaaggaaaggtgagggcgcttttcgcacccggccaagggaaccggcgcttcccccacgacctctcgataaatatcagctgcgtgagactaaacggcgtctgcagcagggcttagatagcggatcaaggcagggactgctcggcccgcgcgcctgcgtccacccaagtccacttcggcgtgacccgttctgtgctgcttgtcagccactcaggctcccagcatgctcagcacgccctgatactagcccgctgtggcttcagtggctcccccagccccaaccacgggtccgacctcgaaagcggagaagacctaggccccgacgcgctccagtgttgtctactcatcatgcagcaagggtgtctctccatcgttggggaggctgcggccctcattgccgcttgcgcggtgaagccctggttgccctgggccagcctcctcacgcccgctgggccccgcagcaggactggcattgggcaaggagatatgggctgccatacgtggtccgggtggatctgagacgactggctccagccccacccgcaacacccgcgcccgccggaaccccaggcccaattctgattccgaaacaggcactcgccttcgcccccttttcaccaccgaagcggcttaggctggtcgtgtctcatggaagcatagacctggacgtcggcggcgaggagttgtag

SEQ ID NO: 207483 - DNA, 390 bp, synthetic construct
  misc_feature 1..390: note = Description of Artificial Sequence: Synthetic coding sequence
  source 1..390: mol_type = other DNA
atgccccggcggggccggtggctgagctgcagccccgaggccgagggtatacgacgtgtgggttctcgcgcagctctccgggttcatcctctggagcacaggccccgttgggggactcccggcgggatgactaaggggagtagattcctggcccctgaatctgaactctcctggggaccaggggacgcaactcctggcttgtggttcttcatttcagatggcgtgggagaggacctctggaattcagcaggttggtcatccgtgccagaagggttcgggcagcgcatgcgcgggcccggattaactcctcacaccgacgccgggggcgatggcaataaaaggcgccactcggaaagattgtgccgggcatctgttctccaaccgccctag

SEQ ID NO: 207484 - DNA, 744 bp, synthetic construct
  misc_feature 1..744: note = Description of Artificial Sequence: Synthetic coding sequence
  source 1..744: mol_type = other DNA
atgcacctggcccggctggtgggcagctgcagcctgctgctgctgcttggcgccctaagcgggtgggctgcctcggatgaccccatagagaaggttatcgagggaattaatcggggtttgtccaatgcagagcgggaagtcggcaaggccctcgacggcatcaattcaggaatcacacatgctggacgcgaggtggagaaagtcttcaatgggttatccaacatggggtctcatactgggaaagagctcgataaaggtgtgcaagggttgaaccacggcatggataaggttgcacacgagataaaccacggaatcggccaggctggaaaggaagcagaaaaactagggcatggcgtgaataacgcagcaggtcaggctgggaaagaggctgacaaggcagttcagggatttcacactggagtgcaccaggcaggcaaagaggcggagaaactggggcagggcgtcaaccatgccgcagatcaagcaggcaaagaggtcgaaaaactaggccagggagcacatcacgccgcaggacaagcaggcaaagaattgcagaacgctcataatggagtgaaccaggcatctaaggaagccaatcaactcctgaatggtaatcaccagagtggctcttcttcacaccaagggggcgctaccaccacccccctggccagtggggcctcggttaataccccgtttataaatttacccgctctgtggaggtccgttgcaaacatcatgccatag

SEQ ID NO: 207485 - DNA, 1773 bp, synthetic construct
  misc_feature 1..1773: note = Description of Artificial Sequence: Synthetic coding sequence
  source 1..1773: mol_type = other DNA
atgcacctggcccggctggtgggcagctgcagcctgctgctgctgctgggtgccctgtccggttgggctgccagtgacgaccccatcgaaaaagtgattgaaggcatcaaccggggcctctccaatgcagaaagggaagtgggcaaagctctggacggcataaacagcggtattacgcacgctgggcgagaggtggaaaaggtctttaacggattgagcaatatgggctctcacaccggaaaggagctcgacaagggcgtccaggggctgaatcatggcatggacaaggtggcacacgaaataaaccatggcataggacaggcagggaaagaagccgagaagctgggacatggtgtgaataacgccgcgggccaggttgggaaggaggcagataagctaattcatcacggggtgcatcacggcgccaaccaggctggatctgaggccggtaagtttggacaaggagtggacaacgctgctggacaggctggaaatgaagctggccgttttggtcagggagtccatcatgccgccgggcaggccggaaacgaggctgggaggttcggacagggagttcatcacgcagctggacaggccgggaacgaagctggacggtttgggcaaggggcacaccatggcctatctgaggggtggaaagagactgaaaagttcggccagggcattcatcacgccgccggtcaggttgggaaggaagccgagaagttcgggcagggcgcccaccacgcggcgggacaggcaggcaacgaagccggtcgttttgggcagggcgtccaccacggcttaagtgaaggctggaaggagactgagaagtttgggcagggtgtccatcacaccgcgggccaggtcggcaaggaagccgaaaaatttgggcagggcgctcatcatgcagctgggcaagctggaaacgaggccggaagattcggacagggggcccatcatgccgctgggcaggcaggaaatgaggccgggcggttcggacagggtgtacaccacggactgagtgaaggatggaaggagaccgaaaaatttgggcagggagtgcatcacgccgcttcacagttcggaaaggaaactgaaaaattgggtcatggggtgcatcatggagtgaacgaagcttggaaggaagctgagaagttcggacagggggtccatcacgccgccagtcaggtgggaaaggaagaggatagagtggtgcaggggctacaccacggagtgagtcaggctgggcgtgaagcaggccagtttgggcacgacattcaccacaccgcaggacaagccggtaaggagggcgatatcgctgttcacggagtccaaccaggtgttcacgaggccggcaaagaggccggccagttcggccagggggtgcaccacacgttagagcaggccggcaaagaggcagataaggccgtccagggcttccacactggcgtccaccaggctggaaaagaggcggaaaaactgggccaaggagtaaatcacgccgctgaccaagcagggaaggaagtcgagaaactgggacagggagctcatcacgccgctgggcaagccggtaaagagcttcaaaacgcccacaacggtgtgaatcaagcgtccaaggaagccaatcaactcctgaatggcaaccatcagtctggctcgagctcccatcagggcggcgccaccaccacccccctggcctccggggcaagcgtgaacactcctttcattaacctcccagctctgtggaggagcgtcgctaacattatgccttag

SEQ ID NO: 207486 - DNA, 288 bp, synthetic construct
  misc_feature 1..288: note = Description of Artificial Sequence: Synthetic coding sequence
  source 1..288: mol_type = other DNA
atgggcagccacaccggcaaggagctggacaagggcgtgcagggccttaatcacggtatggataaggtcgcccatgaaatcaaccacggaatcggccaggccgggaaagaagccgaaaaactgggtcacggcgtaaataatgccgcgggacagggtaaccatcagtcagggtctagtagccaccagggcggagctactacgacaccgttggcttccggagctagcgtgaacacgccttttatcaacttaccagcgttatggaggagcgtcgctaatatcatgccatag

SEQ ID NO: 207487 - DNA, 738 bp, synthetic construct
  misc_feature 1..738: note = Description of Artificial Sequence: Synthetic coding sequence
  source 1..738: mol_type = other DNA
atgtggctgtgccccctggccctgaacctgatcctgatggccgcctccggcgcagtttgcgaggttaaggatgtgtgcgtgggttctccaggaattcctggcacgcccggatcccatggactgccggggcgtgacgggcgtgatggactaaaaggcgatcctggcccacctggtccaatgggacctccgggcgagatgccttgtccccccgggaatgatgggctcccgggggctcccggaattccaggagagtgtggtgagaaaggtgagcccggcgagcgcggccctcccggactgcctgcacaccttgatgaagagctgcaagcgacgctgcacgatttccgtcatcagatcctccagacacggggagcattgtcactacaaggatccatcatgacagtaggcgaaaaggtgttctcttcgaacggacagtccattactttcgacgcaatccaggaagcatgcgccagagcaggcggtcggatagctgtcccaagaaaccctgaggagaacgaggcaatagcttcctttgttaagaaatacaacacctacgcctatgtcgggctgacggaaggcccctcgcctggggattttaggtactccgacggaacgcccgtcaattacaccaactggtaccggggcgagccagccggtagaggcaaagagcaatgcgttgagatgtacacggacggccagtggaacgacaggaactgtctgtatagccgattgaccatctag

SEQ ID NO: 207488 - DNA, 570 bp, synthetic construct
  misc_feature 1..570: note = Description of Artificial Sequence: Synthetic coding sequence
  source 1..570: mol_type = other DNA
atgggcccccccggcgagatgccctgcccccccggcaacgacggcttgcctggcgcacccggaattcccggcgagtgtggggaaaaaggtgagccaggcgagcgtggaccacctggtttaccagcacacctggatgaggagctgcaggccactttgcacgatttccgtcatcagatattgcagacccgcggtgccctttcccttcagggctcaatcatgacggtaggagagaaggtgttcagctccaatggccaatctatcacctttgatgcaattcaggaggcttgcgcccgggcaggaggacgcatagccgtgccacgcaatccggaagagaacgaggcgatcgcaagtttcgtcaagaagtacaatacttacgcctacgtgggtttgactgagggccccagccccggggacttccgatactccgacggcacacctgtgaactatacaaactggtaccggggggaaccggccggcagagggaaagaacaatgcgtggagatgtatacagatgggcagtggaacgacaggaactgcctgtactcaaggctgactatttgtgagttttag

SEQ ID NO: 207489 - DNA, 747 bp, synthetic construct
  misc_feature 1..747: note = Description of Artificial Sequence: Synthetic coding sequence
  source 1..747: mol_type = other DNA
atgtggctgtgccccctggccctgaacctgatcctgatggccgccagcggcgccgtgtgtgaggtgaaagatgtatgtgttggatcacccggtatacccggaacccctgggagccacggtttgcccggaagggacgggcgagacggcctgaaaggagatccaggcccacctggcccgatggggcctcctggcgaaatgccttgtcctcccgggaacgatggactccccggagcccccggaatccctggggagtgcggagagaaaggagagcccggagagcgggggcctccggggctgcctgcgcacctggacgaagaactacaggctacactccacgactttagacaccagatcctgcaaacgcggggggcacttagcctgcagggcagcatcatgactgtaggcgagaaggtgtttagcagtaatgggcagagcataacattcgacgcgattcaagaagcctgtgcacgcgccggtggcagaatcgcagttccacgtaaccccgaggagaacgaggcaatcgcctcttttgtaaaaaaatacaatacctacgcttacgtggggttgacggaggggccttcgccgggggatttccgttacagtgacggaactcctgtcaattatacaaactggtatcgaggcgaacccgctggaagaggaaaagaacagtgtgtagagatgtatactgatggtcaatggaacgatcggaattgtctatattcacgactaaccatctgcgaattctag

SEQ ID NO: 207490 - DNA, 747 bp, synthetic construct
  misc_feature 1..747: note = Description of Artificial Sequence: Synthetic coding sequence
  source 1..747: mol_type = other DNA
atgtggctgtgccccctggccctgaacctgatcctgatggccgccagtggcgccgtgtgtgaggtaaaagatgtgtgtgtaggctcccctggcatccccggcactccggggtcacatggtttaccaggcagagatggccgagacggactcaagggcgatcccgggccgccagggccaatgggccccccaggtgagatgccttgcccaccagggaacgacggcctaccgggcgcaccggggatcccaggagagtgtggggagaagggcgaacccggagagagaggcccacccggtctccctgcccacttggatgaggagctccaagcgacgctgcacgattttcggcaccagatcctccagaccaggggcgccttgtctcttcagggatcgataatgaccgtgggggagaaagttttttccagtaacggacagagtatcactttcgacgccatccaggaggcttgtgcccgcgccggcgggcgcatagcggtgccaagaaacccagaagaaaacgaagctatagccagctttgttaagaagtataatacatatgcttacgtaggcctgaccgaaggaccctcccctggtgatttccggtacagcgacggtacccccgttaattataccaactggtacaggggagaaccagcaggaagaggcaaagaacagtgtgttgagatgtataccgacggacagtggaatgacaggaattgcttatacagcagactgacaatctgcgagttctag

SEQ ID NO: 207491 - DNA, 792 bp, synthetic construct
  misc_feature 1..792: note = Description of Artificial Sequence: Synthetic coding sequence
  source 1..792: mol_type = other DNA
atgcggccctgccaggtgcccggcgccgccaccggcccccgggccatgtggctctgtcccctcgccctgaacttaatcctcatggcggccagcggggctgtatgtgaggtgaaagacgtctgcgtcggatcgccaggaattcctggtacaccaggttctcacggactgccgggcagggacggccgggacgggctcaagggagatccaggccctccaggcccaatggggcccccgggggaaatgccgtgcccgcctggcaacgatggcctgccaggcgccccgggtatccccggtgagtgcggagaaaagggtgagccaggggagcgcggcccccccggccttcccgcacacttggacgaggagctgcaagcaacccttcacgattttagacaccagatcctacaaacacgcggggccctctccttgcaggggagtataatgactgtaggcgaaaaagtgttcagctccaacgggcagagtataaccttcgatgctatccaggaggcctgcgcaagagccgggggtagaatagccgtcccgagaaatccagaagaaaacgaagctatcgccagcttcgttaaaaaatacaatacttacgcttatgtggggctcaccgaaggaccatctcctggggactttcggtactcagatggaactcccgttaattacactaactggtataggggcgaacctgcaggccgtggtaaagaacaatgcgtagagatgtacacagatggacagtggaacgataggaattgcctgtatagcagattaacaatttgcgaattttag

SEQ ID NO: 207492 - DNA, 747 bp, synthetic construct
  misc_feature 1..747: note = Description of Artificial Sequence: Synthetic coding sequence
  source 1..747: mol_type = other DNA
atgtggctgtgccccctggccctgaacctgatcctgatggccgccagcggggcggtgtgcgaggtcaaggacgtttgcgttggatcccccggcattcctggtacgcccggatcccacggactgccaggccgcgatgggagggacggcttgaagggcgacccagggcctccaggaccgatggggccaccgggggagatgccatgcccaccaggcaacgatgggcttcctggcgctcccggcatcccaggcgagtgcggagaaaagggcgagcctggtgaaagaggccccccaggcctccctgctcacctggatgaagaacttcaggcaacgctgcacgacttccgtcatcagattctacagactcgaggcgcactttcactgcaggggagcatcatgacagtgggcgaaaaggtcttctctagtaacgggcagtccatcacttttgacgccatccaggaagcctgcgcacgcgccggaggccgtatcgctgtgccgcgaaatccagaggagaacgaggcgatagcctctttcgtaaagaaatacaacacatacgcctatgtaggcctgactgaagggccttcgccaggcgacttcaggtattccgacggtacgccagtgaactatacaaactggtataggggagagcctgctggcagaggaaaagagcagtgtgtggagatgtacacagacgggcagtggaatgataggaattgcctctatagcagactgaccatctgtgaattttag

SEQ ID NO: 207493 - DNA, 477 bp, synthetic construct
  misc_feature 1..477: note = Description of Artificial Sequence: Synthetic coding sequence
  source 1..477: mol_type = other DNA
atgtggctgtgccccctggccctgaacctgatcctgatggccgcctccggggccgtgtgtgaggtgaaggacgtttgtgtaggaagccccgggatacctggaactccaggctcacacggtctgcccggaagagacggtcgggacggccttaaaggcgatcccggtccgcctggcccgatgggccctcctggggaaatgccttgcccacccggaaatgacggtctccccggtgccccaggcatcccaggggaatgcggggaaaagggcgagcccggcgaacgcggacctccaggcttacctgctcaccttgacgaggagctacaggctacgctgcacgattttaggcaccagatactacagactcgcggcgccctgtcgttgcaggggtctattatgaccgtcggtgaaaaggtgttcagctcaaacggccaaagcataactttcgacgctatccaggaggcatgtgcaagggcctag

SEQ ID NO: 207494 - DNA, 477 bp, synthetic construct
  misc_feature 1..477: note = Description of Artificial Sequence: Synthetic coding sequence
  source 1..477: mol_type = other DNA
atgtggctgtgccccctggccctgaacctgatcctgatggccgcctccggcgccgtgtgtgaggttaaagacgtgtgtgttggctcccccggcataccaggaacccccggttcccacggattgcctgggcgcgacgggcgagatggtctgaaaggcgatccaggaccacctggacctatggggccacccggggaaatgccatgcccaccgggcaacgacgggcttcccggagcccctggtattcctggcgagtgtggagagaaaggagagcccggggagagaggacctccgggactgcccgcccaccttgacgaggagctgcaggctacgcttcacgactttagacaccaaattctccagacaaggggagccctcagcttacagggcagtattatgaccgtgggggaaaaagttttcagttctaatggacaaagcataactttcgacgcgatccaagaggcctgtgctcgagcatag

SEQ ID NO: 207495 - DNA, 747 bp, synthetic construct
  misc_feature 1..747: note = Description of Artificial Sequence: Synthetic coding sequence
  source 1..747: mol_type = other DNA
atgtggctgtgccccctggccctgaccctgatcctgatggccgcctccggggccgcatgtgaggtgaaggatgtgtgcgtgggaagtcccggcataccaggcactcctggatcacatggccttcccgggcgggacgggcgagacggtgtcaagggagaccctggccccccaggtcctatgggcccgcccggagagactccctgcccccctggtaacaacggactaccaggtgctcctggcgtgccgggggagcggggtgaaaagggggaggctggtgagcggggcccccccggcctgccagcccatctcgacgaggagctgcaggctaccttacatgactttcggcaccaaatattgcagacccgtggggccctgtccctgcaaggctctataatgaccgttggcgagaaagtgtttagttctaacggtcagagcatcaccttcgacgctattcaggaggcctgcgcccgcgcaggtggacggatagccgttccaaggaacccagaggaaaatgaagctatcgccagctttgtaaagaagtataacacctatgcctatgtggggttaacagagggcccaagccccggggatttcaggtactcagacggcactcccgtgaattatacaaattggtaccgcggagagccggccggcagaggaaaggagcagtgtgtggaaatgtatacagacggccagtggaatgatagaaactgtctgtacagccggctgaccatctgcgagttttag

SEQ ID NO: 207496 - DNA, 747 bp, synthetic construct
  misc_feature 1..747: note = Description of Artificial Sequence: Synthetic coding sequence
  source 1..747: mol_type = other DNA
atgtggctgtgccccctggccctgaccctgatcctgatggccgcctctggcgctgcttgcgaggttaaggatgtgtgtgtgggcagcccagggatcccaggaacaccaggatctcatggcctgcccggaagagatggacgagatggagtcaaaggggaccctggcccacctggacccatggggcccccaggcgaaactccttgcccacctggcaacaacggcctgccgggggctcccggggtgcccggggaaaggggggagaagggagaggctggcgagcggggtcccccaggactaccagcccatctcgacgaagagctgcaggccactctccacgactttcggcatcagatcctccagacaagaggtgctctgtcactacagggcagcatcatgacagtgggagagaaagtattctcatccaatggccagtccattacattcgacgctattcaagaagcttgtgcgagggccggaggaaggatcgctgtgccccggaaccctgaagagaatgaagcgattgccagttttgtgaagaagtacaacacctatgcttatgttgggctgaccgagggtccctcacccggtgattttcgatatagtgacggcaccccagtcaattacacgaactggtataggggagagccggccgggagaggcaaagaacagtgcgtggagatgtacactgatggccagtggaacgataggaattgtctgtacagccgcctgaccatatgtgagttctag

SEQ ID NO: 207497 - DNA, 477 bp, synthetic construct
  misc_feature 1..477: note = Description of Artificial Sequence: Synthetic coding sequence
  source 1..477: mol_type = other DNA
atgtggctgtgccccctggccctgaccctgatcctgatggccgccagcggcgctgcatgcgaggtgaaggatgtttgtgtgggcagccctgggataccaggcacccctgggtcgcacggactacccggtagagacggtagagatggtgtaaagggcgaccccggaccccctggccccatgggcccaccaggggagaccccttgtccacccggtaataatggactgccaggcgctccaggcgtcccgggagaaagaggcgagaagggagaagccggggaaagggggcccccggggctgccagcccatctggatgaagaactgcaggccacactgcacgactttaggcaccagatccttcagactcgcggcgcactgtctctgcagggaagcatcatgaccgtgggggagaaagtattctccagcaacgggcaatcaattactttcgacgcaattcaagaggcctgcgcccgagcatag

SEQ ID NO: 207498 - DNA, 645 bp, synthetic construct
  misc_feature 1..645: note = Description of Artificial Sequence: Synthetic coding sequence
  source 1..645: mol_type = other DNA
atgcggccctgccaggtgcccggcgccgccaccggcccccgggccatgtggttatgccctctggctctcaccctgatcctcatggccgcttccggcgctgcctgcgaggtgaaagacgtctgcgttggctcacctgggattcccgggaagcggggcgaaaaaggtgaagccggggaacggggccctccgggactccccgcacacctcgacgaggagctccaggcgactctacacgatttccggcaccagatcctgcagacaaggggggcactctcattgcagggatccatcatgaccgtgggcgaaaaggtcttttcctccaatgggcaatccatcaccttcgacgcaatacaggaggcctgtgccagggcaggaggacggattgcggtccccaggaaccctgaggaaaacgaggccatagctagttttgtgaagaaatacaacacctacgcttatgttggtctcacagaggggccaagcccaggagacttcaggtactctgacggaacccctgtgaactatactaactggtaccgtggcgaaccagcaggaaggggaaaggagcagtgcgtggagatgtacacagacgggcaatggaacgaccgaaactgcctgtattctcggctgacaatttgtgaattctag

SEQ ID NO: 207499 - DNA, 1146 bp, synthetic construct
  misc_feature 1..1146: note = Description of Artificial Sequence: Synthetic coding sequence
  source 1..1146: mol_type = other DNA
atggccgagagccacctgctgcagtggctgctgctgctgctgcccacactctgcggcccaggaacggccgcttggactacgtctagtttggcttgtgcccaagggccggagttctggtgccagtccttggaacaggctctccagtgtcgggccctgggccattgcctgcaggaagtctgggggcacgttggcgcagacgacctgtgtcaggagtgtgaggatatcgtccacattcttaataagatggcgaaggaggccatctttcaagacaccatgcgtaagtttcttgagcaggagtgtaatgtgctgccgctgaaactgctgatgcctcagtgcaatcaggttctggacgattattttccactcgtcattgactactttcagaaccagaccgattccaacggcatatgcatgcatcttggcctctgcaaatccagacaacctgaacccgagcaggaaccagggatgagcgaccccttacctaagcctctgagggaccccctgccagaccctctgctggacaaactggttctgccagtattgcctggcgccctgcaggccagaccaggaccacacacccaggatctctccgagcagcagtttcctattccgctcccatattgctggctgtgtagagctctcatcaaaaggatccaggcaatgataccgaagggcgcattagccgtcgccgtagcacaggtctgcagggtcgtccccctggtcgccggagggatatgccagtgcctcgctgaaagatattcagtaatcctgttggacacccttttaggacggatgctcccacagttagtctgtcggctggtcttacgttgctctatggatgactctgccggaccacgttcaccgactggtgaatggttgccgcgcgactccgagtgtcacctgtgcatgtctgtgactactcaagccggaaactctagtgagcaggccattcctcaggccatgctccaggcttgcgtgggttcgtggctcgatagggaaaagtgcaagcagttcgtcgagcagcatactccacagttactgacactggtgcccagagggtgggacgcccacactacctgtcaggcacttggtgtctgtggtacgatgtctagccctctgcagtgcatccattccccggacctttag

SEQ ID NO: 207500 - DNA, 1128 bp, synthetic construct
  misc_feature 1..1128: note = Description of Artificial Sequence: Synthetic coding sequence
  source 1..1128: mol_type = other DNA
atgctgctgttcctgctgagcgccctggtgctgctgacccagcccctaggatatctggaggctgaaatgaagacatattcgcacagaaccatgcctagcgcatgcacactcgtaatgtgttcaagcgtcgaatcaggcctccccggcagggacggccgggatggacgggaaggcccccgcggcgagaaaggagaccccgggctgccaggcgctgccggacaagctggcatgccagggcaggcaggaccggtcggccctaagggagataatggcagcgtgggagaaccaggccccaaaggagatacagggcctagcggcccacctggaccccccggcgtacctggtcccgccggcagggagggaccactgggaaagcaaggaaacatcggaccacagggtaagccaggacccaagggcgaagcaggccctaaaggtgaggtgggagctcccgggatgcagggtagcgcaggcgctaggggcctggctgggcctaagggagagcgaggcgtccccggcgaaagaggtgttccggggaacaccggagctgctggatccgcaggtgctatgggaccccaagggtctcctggcgccagggggccccccggtctgaagggcgacaaagggatcccaggggacaagggcgcaaaaggtgaatctggtctgcctgatgttgcttctcttcggcaacaggttgaagccctgcaaggccaggtgcaacacctgcaggcggccttcagccagtacaaaaaagttgagttgttcccaaatggccagtctgtaggcgagaaaatttttaaaaccgcaggctttgtgaagcccttcacggaggctcaactcctgtgcacccaggcagggggacagcttgcttccccccggtcagcagctgagaacgctgcactccagcaattggtggttgccaaaaacgaagctgcctttctaagtatgaccgatagcaaaaccgagggaaaattcacatatcccactggagagagccttgtgtatagtaattgggctcctggggagcccaatgatgatgggggttctgaggattgcgtcgaaattttcacaaacgggaagtggaacgaccgcgcctgcggtgagaagcggctcgtagtgtgcgagttctag

SEQ ID NO: 207501 - DNA, 657 bp, synthetic construct
  misc_feature 1..657: note = Description of Artificial Sequence: Synthetic coding sequence
  source 1..657: mol_type = other DNA
atgttcctgagcaccagcaagcacggccggcaggaggccatgctgctgttcctcttaagtgccttggttctgctcacacaacctttgggttatctagaagccgagatgaaaacttacagccatcgaacaatgccatccgcttgtacactggtaatgtgtagttccgttgagagcggccttcctggccgggacggtcgagacggccgggagggcccccgcggcgaaaagggcgatcccggcctgcctggcgccgccggacaggccgggatgccggggcaagctggtcctgtggggcctaagggggataacggatccgtcggtgaaccgggccccaaaggggacaccggtcccagcggtccaccaggcccaccgggagttcctggtcccgcggggagggaaggaccactgggcaaacagggaaatatcggcccgcaaggcaagccagggccaaagggcgaggcaggccccaagggtgaggtaggggcacccggaatgcaaggctccgcgggggcccgaggtttggctggccccaagggtgaacggggtgtgccaggggaacgaggtgttcctggtaataccggggccgccggaagcgccggggctatgggaccccaggggagtcccggcgcccgggggcccccaggtctgaagggctag

SEQ ID NO: 207502 - DNA, 903 bp, synthetic construct
  misc_feature 1..903: note = Description of Artificial Sequence: Synthetic coding sequence
  source 1..903: mol_type = other DNA
atggccgccgtggccgccctgcagctgggcctgcgggccgccggccttggacgcgctccagcttctgcagcctggcggtccgtgctgcgtgtctccccgagaccaggggtggcctggcgaccttctcgatgtgggagttctgctgctgaagccagcgctaccaaggccgaggacgacagcttccttcagtgggtgcttctactgattcccgtgaccgcatttggtctgggcacctggcaggtccagcgtcgaaaatggaaattgaatctgattgcagaactggagtcaagggtgcttgccgagcccgtacctctgccagcggaccctatggaactcaaaaacttggagtatcggcccgttaaggtccgcggctgtttcgatcacagtaaagaactctatatgatgcccaggactatggtggaccctgtgcgcgaggctagggagggtgggctcattagctcaagtacccaaagcggggcatacgtcgtcacacctttccactgcaccgacctaggggtaaccattctcgtcaaccgcggcttcgtgcctaggaagaaggtgaatcctgaaacaagacaaaaaggccaaattgaaggggaggtggaccttatcggtatggtaaggttaactgagactagacagcctttcgtgcctgaaaataatccagagcgaaaccactggcattaccgcgacctggaggctatggctcggatcacgggcgccgaacccatcttcatcgacgcaaatttccagagcacagtgcccggcggacccatcggcggccaaactagggtcaccttgcgcaatgaacacctccagtacattgtaacctggtatggcctctccgcagctacatcttatctctggtttaagaaattcctgagagggacccctggcgtttag

SEQ ID NO: 207503 - DNA, 813 bp, synthetic construct
  misc_feature 1..813: note = Description of Artificial Sequence: Synthetic coding sequence
  source 1..813: mol_type = other DNA
gcccccgccagcgccgcctggcggagcgtgctgcgggtgagcccccgtcccggtgttgcttggaggccttctaggtgtggctcgtccgcagctgaagcctccgctactaaagccgaagacgactcgtttctccaatgggttctcctcctaatcccagtgaccgcctttggtctggggacatggcaggtgcaacggagaaagtggaagctcaacctcatcgctgagctggagtcccgcgtgctggccgagcctgttcctcttccagccgaccccatggagttgaagaacctggaatatcgtcctgttaaggtaagaggttgttttgatcattcaaaggaattgtatatgatgccaaggacgatggtggatccggtcagggaggcccgcgaaggcgggctcatctccagcagtacccagtctggcgcgtatgtcgtgactccgtttcactgcactgacctggggaagaaggtgaatcccgaaacgagacaaaaaggacaaattgaaggcgaggtcgatctgattgggatggttaggttgacagaaacgcgccagcctttcgtcccggaaaataatcctgaacgaaatcattggcattatcgagatctggaagctatggccagaataactggagccgagccaatttttatcgatgcgaatttccaatcaaccgtgcccggagggccaattggtggccagacacgagttacactgcggaatgaacatttgcagtatattgtcacatggtacggtctctctgctgctacaagttacctgtggtttaagaaattcctccgaggaacccctggggtatag

SEQ ID NO: 207504 - DNA, 771 bp, synthetic construct
  misc_feature 1..771: note = Description of Artificial Sequence: Synthetic coding sequence
  source 1..771: mol_type = other DNA
atgagcgagctgcccggcgacgtgcgggccttcctgcgggagcaccctagcttgcgactgcagaccgatgctaggaaagtgagatgcatcctcactggtcacgagctgccatgtcgcctgcctgagcttcaagtgtacacccgcgggaagaaatatcagagactcgtaagggcaagtcccgctttcgactacgctgagtttgagcctcacatagtgccttctacaaagaacccccaccagttgttctgtaaactgaccctgagacatatcaataagtgtccagaacatgtccttagacacacccaggggagaagataccagagggccttatgcaagtacgaggaatgtcagaagcagggcgtggagtatgtgcccgcttgcctcgtgcaccgccgtagaaggagggaagaccagatggacggagacggcccaaggcctagagaagcgttctgggagccgaccagttcagatgaggggggggcagcctcagacgattccatgacagatctttaccctccagaactcttcacacgcaaggacttgggaagtacagaggacggcgacggcacagatgactttctgacagacaaagaggatgagaaagcaaagcccccccgcgagaaagctactgacgaaagccgccgggaaactacggtgtaccgcggcctggtgcagaagagagggaagaagcaactgggcagcttgaagaagaagtttaagtctcaccatcgtaagccaaagagtttctcaagctgtaagcagcctgggtag

SEQ ID NO: 207505 - DNA, 810 bp, synthetic construct
  misc_feature 1..810: note = Description of Artificial Sequence: Synthetic coding sequence
  source 1..810: mol_type = other DNA
atgggccagaacgacctgatgggcaccgccgaggacttcgccgaccaatttctccgggttacgaagcaatatttaccacacgtagcacgcctgtgcctcatatcaaccttcctagaagatggcatccgcatgtggtttcagtggtccgagcaacgggattatatcgacacgacctggaattgtggataccttttggccagttcattcgtctttctgaatttgctaggccagcttactggatgcgtcctggtgttgagtaggaatttcgtgcagtacgcatgcttcggtctgtttggaataatcgcactgcaaaccatcgcgtactctatcctgtgggacctgaaatttctgatgcggaatctggctctcggtggtggcttgctgttgctgctggctgaaagtcgctctgagggcaagagtatgttcgccggtgtgcccactatgcgcgagtcctcaccaaaacagtatatgcaactcggggggcgcgtcttgttggtactgatgtttatgaccctcttgcacttcgacgcttcattctttagcatcgtgcaaaacatcgtcggcacagccctgatgatcctggtcgccattggcttcaagactaaattggctgcactcacactcgttgtctggctcttcgctatcaacgtttattttaatgccttttggactatcccagtgtataaaccgatgcatgattttctaaagtatgattttttccagaccatgtcagtgatcggaggcctcttactggtcgtggcacttggtcctggcggagtcagcatggacgagaagaagaaggagtggtag

SEQ ID NO: 207506 - DNA, 561 bp, synthetic construct
  misc_feature 1..561: note = Description of Artificial Sequence: Synthetic coding sequence
  source 1..561: mol_type = other DNA
atgggccagaacgacctgatgggcaccgccgaggacttcgccgaccagttcttgagggtgaccaaacaatatttacctcacgtcgccagactgtgccttatatcgaccttcctcgaagatggtattcgaatgtggttccaatggtcagagcaacgagactacatagataccacctggaactgcggatacctgctggcctcgtctttcgtgtttctcaacctgctgggacagctgaccggatgcgtactggtgctgagcaggaactttgtccaatatgcctgtttcggactgtttggcattatcgcgctgcaaaccatcgcctacagtatcctttgggatttgaaatttctgatgagaaatttagctctgggtggggggctgctgctcctgctggccgagagccgcagtgagggcaaatctatgtttgctggcgtacctacaatgagggagagctcccccaagcagtacatgcagcttggcggaagggtgcttctcgtgctgatgtttatgactctgctgcattttgacgctagctttttttctcagcccagccagcagtag

SEQ ID NO: 207507 - DNA, 567 bp, synthetic construct
  misc_feature 1..567: note = Description of Artificial Sequence: Synthetic coding sequence
  source 1..567: mol_type = other DNA
atgggccagaacgacctgatgggcaccgccgaggacttcgccgaccagtttcttcgagtcactaaacagtatctgccacacgtcgccaggctgtgcctcatctccacctttttagaagacggtatccgaatgtggtttcagtggtctgaacagagggattacatagacaccacctggaactgtgggtatctgctggccagctcatttgtcttcttaaacctgctaggccaattgactgggtgcgtgctcgtcctgtcccggaacttcgttcagtatgcgtgttttgggctgttcggaattatagccttacagacaattgcatatagtattctgtgggatctgaaatttctcatgcggaatttggccctgggggggggtttacttttgctactggccgaaagccgatcagaaggtaagtcaatgtttgccggtgtcccaaccatgcgggaaagttcaccaaaacacacatgcctggcgaagacacggggcaggcagggcctggtgcgaggaggcttcaataaaacagcctccttctacgtctctagctccctacctctgccttggtag

SEQ ID NO: 207508 - DNA, 783 bp, synthetic construct
  misc_feature 1..783: note = Description of Artificial Sequence: Synthetic coding sequence
  source 1..783: mol_type = other DNA
atgcggagcctggccaccgagttcctgcgggtgaccaagcagtaccttccccacgtagcgagactttgtcttattagtacattcttggaggatggtatcaggatgtggttccagtggagtgaacagcgggactatatcgatacgacttggaactgcgggtatctcttggcatccagcttcgtgttcctgaatctccttggccaactgacaggatgcgtgttggtgctttcacggaactttgtgcagtacgcctgctttggactgtttggtattatagccctgcagacaatcgcatattccatactgtgggaccttaagttcctgatgcgaaatctggcgctgggcggggggttactcctccttctggctgagtcccggtcagagggcaagtccatgtttgcaggagtgcccaccatgagggaatccagtcctaagcagtatatgcagcttggcggtcgggtcctcttggtcttaatgttcatgacccttcttcatttcgatgcatcattcttctcaattgttcagaacattgtaggcactgctctcatgattctggtggccataggctttaagactaagcttgctgcccttacgctggtggtatggctcttcgccattaacgtctacttcaatgccttttggactatcccagtctacaagcctatgcacgacttcctgaaatatgatttctttcagacgatgagcgttattggaggcttactcctagtggtggctctgggcccaggtggcgtctctatggatgaaaagaagaaagagtggtag

SEQ ID NO: 207509 - DNA, 387 bp, synthetic construct
  misc_feature 1..387: note = Description of Artificial Sequence: Synthetic coding sequence
  source 1..387: mol_type = other DNA
atgggccagaacgacctgatgggcaccgccgaggacttcgccgaccagttccttcgcgtaactaagcagtatctgccccacgtggcaaggttgtgcttgatctctacttttcttgaggatggtattcggatgtggtttcaatggtccgagcagagagattatattgacacaacctggaactgtggatacctcctggcatcctccttcgtgttcctgaacctcctgggccagctgaccggatgcgtactggtactgtccaggaactttgtgcagtatgcatgttttggcctttttggaatcatagcactgcaaactatcgcctatagtattctgtgggacctgaagttcttgatgcggctctcccgcacttcatgggcacagttatag

SEQ ID NO: 207510 - DNA, 1086 bp, synthetic construct
  misc_feature 1..1086: note = Description of Artificial Sequence: Synthetic coding sequence
  source 1..1086: mol_type = other DNA
atggccagcctgctggccaaggacgcctacctgcagagcctggccaagaaaatctgcagtcactctgccccagaacagcaagctcgtacgagagcaggcaaaactcaagggtcagagacagcaggaccccccaaaaagaagcgaaaaaagacccaaaagaagttccggaagagggaggagaaggcagcagagcataaagcaaaatcactgggcgagaagagtcccgcagcttccggtgcccggcggcctgaggcagctaaagaagaggccgcctgggcgtcatcttccgctggaaaccctgctgatgggctggcaactgagcctgagagcgtgtttgctctggacgtcctccgccaaaggctgcatgagaaaattcaggaggctcgggggcagggtagtgccaaagaactgagtcccgctgctctggaaaagcggcgtaggagaaaacaggaaagagacagaaaaaagagaaagagaaaggagctgagagctaaggagaaagcgcgcaaagcagaagaggccacagaggctcaggaggtagtggaagccacacctgaaggagcttgtaccgagccgcgagagccacccggcctgatcttcaacaaagtggaagtgtcagaggacgagcctgcatccaaggcacagagacggaaagaaaagcgacagcgggtgaagggcaacctgacccccctcactggaaggaactacaggcagctcttggaacggcttcaggctcggcagtcccggctggacgagctgagggggcaagatgaaggcaaagcccaggaactggaggccaagatgaagtggactaatttgctgtataaagccgagggggtgaaaatccgggacgacgaacgcctgctgcaagaggccctcaaaagaaaggaaaaacggcgcgcccagcgtcagcggcgctgggagaaacggactgccggagtagtggaaaagatgcaacagcgtcaggatcggcggagacagaaccttcggagaaagaaagctgcccgggcagagcgccgtctcctccgagctcggaaaaagggccgaatcctcccgcaagatttagagagggcaggactggtctag

SEQ ID NO: 207511 - DNA, 789 bp, synthetic construct
  misc_feature 1..789: note = Description of Artificial Sequence: Synthetic coding sequence
  source 1..789: mol_type = other DNA
atggccatgagcagcggcggcagcggcggcggcgtgcccgagcaggaagatagcgtgctttttcggagaggcacgggccagtccgacgactctgacatttgggacgacaccgccctgatcaaagcatacgataaggccgttgccagtttcaagcatgccctgaaaaatggcgatatctgtgagacctccggcaagccaaagactacccccaagcgtaagccagcgaagaagaacaagtcccagaagaagaacacagccgcatccctgcagcaatggaaagtcggggacaaatgttccgcgatttggagcgaagacgggtgcatatatccagccaccatcgcttcaatcgattttaagagagaaacctgcgtggttgtttataccggttacggtaatcgggaggaacagaatctgtcagacctcctaagtccaatttgcgaggtcgctaataatatcgaacaaaacgcccaggaaaacgagaacgaatcccaagttagcaccgacgaatcagagaactcccgaagccctggcaataagtctgacaatattaagccgaagagtgccccctggaacagcttcctgcctccgcctcctccaatgcctggtccgcgtctgggtcctgggaagatcattccccctcccccacccatttgtcctgattccctggatgacgctgatgcactcggatccatgctcatctcctggtacatgtccggttatcatacggggtattatatgggcttcaggcagaaccagaaggagggcagatgtagtcattccctcaactag

SEQ ID NO: 207512 - DNA, 885 bp, synthetic construct
  misc_feature 1..885: note = Description of Artificial Sequence: Synthetic coding sequence
  source 1..885: mol_type = other DNA
atggccatgagcagcggcggcagcggcggcggcgtgcccgagcaggaagactcggtgctgttccgccgagggacgggccagagcgatgactcagacatatgggatgatacggcactcatcaaagcatacgataaggccgtggcatcctttaaacatgctctgaagaacggcgacatctgtgagacatcaggcaaaccgaagacgaccccaaaacgtaaacctgctaagaaaaataagtcccaaaaaaagaacactgctgcgtccctgcaacagtggaaggttggtgataagtgctctgctatatggtcagaagatggttgtatttaccccgccaccatcgcctccattgacttcaagcgcgagacttgcgtcgtcgtctacaccggatatggaaacagggaggagcagaacttgtccgatctcctgtcaccaatatgtgaggtcgccaacaacatcgagcagaatgctcaagaaaacgaaaatgagtctcaagtctccaccgacgaaagcgaaaactcgaggtcccccggtaataagagcgataacattaaaccgaagagtgcaccctggaattctttcctccccccccctccccctatgcccggtccccgcctggggccgggcaaaccaggattgaaatttaatggtccgccaccccctcctccaccaccacccccccatctgctcagctgttggttacccccattcccaagcggtcctccgataatacctcccccacccccgatctgcccagattctctagacgatgccgatgctctgggcagtatgctgatttcttggtacatgtccggataccacacgggctactatatggggtttaggcagaaccagaaggagggacggtgttctcacagcttgaactag

SEQ ID NO: 207513 - DNA, 789 bp, synthetic construct
  misc_feature 1..789: note = Description of Artificial Sequence: Synthetic coding sequence
  source 1..789: mol_type = other DNA
atggccatgagcagcggcggcagcggcggcggcgtgcccgagcaggaagactccgtgttgtttcggcggggaacgggccaatccgatgattccgatatctgggacgatacagctctgatcaaagcgtatgataaagccgtagcctcctttaaacacgcgctcaagaatggggatatctgcgagaccagcggcaagcccaagaccacgcccaagaggaaacctgccaaaaagaacaagtcacagaagaagaacaccgcggcctcactgcagcagtggaaggtgggcgacaaatgctccgctatttggtctgaggacggatgcatttaccccgctactatagcgagcattgatttcaagcgggaaacctgtgtggtagtgtacacagggtatggaaatagagaagaacagaatctctccgatctcctgtcccctatctgcgaggtcgcaaacaacatcgaacaaaacgctcaggaaaacgaaaacgagagccaggtgtcaaccgacgagtctgaaaattcccgtagtccagggaataagtctgataatataaagccaaaaagcgccccctggaattcatttcttccaccaccgccacccatgccaggaccccggttgggaccgggaaagattattcctccgcctccacccatctgccccgactcactagatgatgccgatgctctggggagcatgctgatttcttggtatatgtccggataccatacgggttactacatgggctttcgccagaaccagaaagagggccgttgtagccacagtctgaactag

SEQ ID NO: 207514 - DNA, 849 bp, synthetic construct
  misc_feature 1..849: note = Description of Artificial Sequence: Synthetic coding sequence
  source 1..849: mol_type = other DNA
atggccatgagcagcggcggcagcggcggcggcgtgcccgagcaggaggactcggttttgttcaggcggggtaccggccaatcagacgactctgacatttgggacgacacagccttaataaaagcgtacgataaagctgtcgcctccttcaaacacgccctgaagaatggggacatatgtgagacaagtgggaagcccaagactacgccaaaaagaaagcctgcaaagaagaacaagtcccagaaaaagaataccgccgcatccctgcagcagtggaaggtgggcgataagtgctctgcaatctggtccgaagatggttgcatttatcctgccactattgcgagcattgactttaagcgcgagacttgcgttgtcgtgtacacggggtatgggaatagagaagagcaaaacctgtcagatctcctcagccccatctgtgaagtcgcgaataatatcgagcagaatgctcaagaaaatgaaaatgagtcacaagtgtccaccgacgagtccgaaaacagtcgctcccccggaaacaagtccgacaacataaaacccaaatccgctccctggaattcatttttgccgccaccaccgccaatgcctgggccccgcctggggcccgggaagcccgggctcaaattcaatgggccacctccgccgccccccccaccgcctccccacttactgtcctgctggcttccacctttcccatccggtccacccatcataccacccccaccacccatttgtccagactctctggacgacgccgacgcgctcggatccatgctgattagctggtatatgtccggctatcatacaggatactatatggagatgttggcctag

SEQ ID NO: 207515 - DNA, 885 bp, synthetic construct
  misc_feature 1..885: note = Description of Artificial Sequence: Synthetic coding sequence
  source 1..885: mol_type = other DNA
atggccatgagcagcggcggcagcggcggcggcgtgcccgagcaggaggactctgtcttgtttagaagaggcacaggccaatccgacgactctgatatctgggatgacactgccctgatcaaggcctacgacaaggccgttgcctcctttaagcatgcacttaaaaacggggatatctgtgaaacatcgggcaagcctaaaacgactcctaaacggaagcctgccaagaaaaacaagtcacaaaagaagaacacggccgcttcactgcagcagtggaaagtcggagacaagtgctccgctatatggtcagaagatgggtgtatttatcctgctacaatcgcatcaatagactttaaaagagagacgtgcgtcgtcgtgtataccgggtacggcaaccgggaagaacaaaacctatccgatctcctctcacccatttgtgaagtagctaataacatcgagcaaaatgctcaggagaatgagaacgaaagccaggttagcacagacgaatctgagaacagccggtcgcccgggaataagtcagataacattaagcccaaatctgccccctggaactcattccttccccccccaccccctatgcccggcccaaggcttggacccggcaagcccgggctgaaattcaacggacctcctccaccgcctccgccaccgcccccacacctcctttcgtgctggctccctccattcccttcagggccacccattataccgcctccgcccccaatctgccctgattcgttagacgatgccgatgcgctgggttctatgctgatctcttggtatatgtcaggctatcataccgggtattacatgacaggtttccactgcgtgagccaagatgggctcaatctgctgaccccttag

SEQ ID NO: 207516 - DNA, 684 bp, synthetic construct
  misc_feature 1..684: note = Description of Artificial Sequence: Synthetic coding sequence
  source 1..684: mol_type = other DNA
atggccatgagcagcggcggcagcggcggcggcgtgcccgagcaggaagactctgtcttatttcgtcgggggactggccagtccgatgattcagacatctgggacgacaccgccctcatcaaggcatacgacaaagcagtcgcctcttttaagcacgctctgaaaaacggagacatatgcgagaccagcggcaaacctaagaccacccccaaacgcaagccagccaaaaagaacaagtcccagaagaaaaataccgccgcatccctgcaacagaatgagaacgagagtcaggtgtcgacagatgaaagcgagaattcccgatcgcccggaaacaagagtgataacataaaacccaagtccgcgccgtggaactcattcctccctccaccacctcccatgccgggtccgcgtttaggcccaggcaaacccggattgaaattcaatgggcctcctcctccccctcctcccccccccccccacctcttgtcctgttggctgccacctttcccctccggccctcctatcatcccccccccccctccaatttgtcccgattctctcgatgacgccgacgctctcgggtcaatgctcatcagttggtacatgtcaggatatcatactggctattacatgggcttccgccagaaccagaaggaaggcagatgcagccacagcctaaactag

SEQ ID NO: 207517 - DNA, 849 bp, synthetic construct
  misc_feature 1..849: note = Description of Artificial Sequence: Synthetic coding sequence
  source 1..849: mol_type = other DNA
atggccatgagcagcggcggcagcggcggcggcgtgcccgagcaggaggatagcgtgctctttaggcgggggactggacagtccgacgactccgatatctgggacgataccgctctgatcaaggcctatgacaaagccgtggcaagttttaagcacgctctgaaaaatggggacatctgcgaaacatcgggaaagccaaagacaactccaaagcgcaaaccagccaaaaagaacaagagccaaaaaaaaaatactgctgccagcttacagcagtggaaagtgggggacaaatgcagtgccatttggtccgaggatggttgtatctatccagcgacgattgcttcaatcgattttaagagggagacttgcgtggtagtgtatacaggttacggtaacagggaagagcagaacctttcggatctgctaagtcctatctgcgaggtcgccaacaacattgagcaaaacgcccaggagaacgaaaatgaaagtcaggtttccaccgatgagtccgagaactccagatcgcccggtaacaaaagcgataatattaagccaaagtcggcgccttggaactcttttctgccgccacctcctcctatgcccggaccaagattgggaccgggcaaacctgggttgaaattcaacgggcccccccctccccctccccctcctccccctcacctgttaagttgttggttgccccctttcccaagtggcccacccatcatccctcctcccccccctatctgtccggattccctcgatgatgccgatgccctaggctccatgctgatctcttggtacatgtcaggctaccacacgggttactacatggaaatgctggcgtag

SEQ ID NO: 207518 - DNA, 789 bp, synthetic construct
  misc_feature 1..789: note = Description of Artificial Sequence: Synthetic coding sequence
  source 1..789: mol_type = other DNA
atggccatgagcagcggcggcagcggcggcggcgtgcccgagcaggaggacagcgtactctttcggaggggtacaggccagtccgatgattccgacatctgggatgacacggcacttattaaagcatacgacaaagctgtagctagcttcaagcatgccctgaagaatggcgacatttgtgaaacatctggtaaacccaagaccacccccaagcgaaagcccgcgaagaaaaacaaatcccaaaagaagaataccgccgcttctttgcaacagtggaaggtcggggacaaatgtagcgccatctggagcgaggatgggtgtatctatcctgctaccattgcaagcatcgattttaagagggaaacttgcgtggtggtgtacactggctatggcaatcgggaggagcaaaatctgtctgacctcctgagccctatctgtgaggtggccaataatatcgaacaaaacgctcaggagaacgaaaatgagtcccaagtctccaccgatgagtcagagaacagccgttctccaggaaacaaatccgacaacatcaagccaaaatcagctccgtggaactcattcctccctcccccacccccaatgccaggccctagactcggccccgggaagatcatcccacctcccccgccaatttgcccggacagcctggacgatgctgacgcactcggaagcatgttaatctcttggtacatgtcaggataccataccggctactatatgggctttagacagaaccaaaaagagggaagatgcagccattcgctgaattag

SEQ ID NO: 207519 - DNA, 885 bp, synthetic construct
  misc_feature 1..885: note = Description of Artificial Sequence: Synthetic coding sequence
  source 1..885: mol_type = other DNA
atggccatgagcagcggcggcagcggcggcggcgtgcccgagcaggaggatagcgtcctgtttcgtcgcggcaccgggcagagcgatgattctgatatctgggacgacactgctctgatcaaagcttacgataaggccgtggcgtcgtttaagcatgctctcaaaaatggggacatttgcgagacatctggaaagcccaaaacaaccccgaagaggaagccagctaagaagaataagagtcaaaagaaaaataccgcagcttcgctgcagcagtggaaagtgggagataagtgttctgccatttggtctgaagatggctgtatctacccagccacaattgctagcatagactttaaaagggagacctgcgtcgtggtttatacaggatatggaaaccgggaggagcagaacctgtcagaccttttatcaccgatctgcgaggttgctaataatatcgagcagaatgcccaggagaacgaaaatgagagccaggtttccaccgatgagtccgaaaattcacgttcaccaggcaacaaatcagacaatataaagcccaaaagcgcaccttggaactctttccttcctcctccgccccctatgccagggccccgcctcggccccggcaagcctggtctgaagttcaatgggccaccccctccccctccacctcctccacctcacctcctcagttgttggctccccccctttccctctggtcctccaattattcctcctcctcctccaatctgtccggatagcctggacgacgctgacgccctgggctccatgctgattagctggtatatgtcgggctatcacacaggctactatatgggattccgccaaaaccagaaagagggcagatgttcgcatagtctgaactag

SEQ ID NO: 207520 - DNA, 885 bp, synthetic construct
  misc_feature 1..885: note = Description of Artificial Sequence: Synthetic coding sequence
  source 1..885: mol_type = other DNA
atggccatgagcagcggcggcagcggcggcggcgtgcccgagcaggaggactctgttctgtttaggcgcggcacaggtcagagcgacgactctgacatctgggacgacacagctctcatcaaggcctacgacaaggctgtggcctccttcaaacatgcactcaaaaatggagacatatgtgaaacgtccggcaagccaaaaacgactcccaaacgtaaacctgccaagaaaaacaagtctcagaaaaagaataccgccgcatcactgcagcaatggaaggtgggcgacaaatgctccgccatatggagtgaagatggttgtatttaccctgctactatcgcatcaatcgactttaagcgcgaaacttgcgttgtagtctacacagggtacgggaatcgcgaggagcagaatctgtccgacctgttatcccctatttgtgaagtcgccaacaatattgaacaaaacgcgcaggagaatgagaacgaaagccaggtaagcacagacgagtcagaaaatagtcggtccccgggcaataagagtgataatataaaacctaagagtgcaccctggaacagttttttaccacccccaccgcccatgcctgggccaagactgggccctggtaaacctggtctgaagttcaacggacccccacccccacccccgccccccccgccccacctgctctcatgctggctgccacccttcccctcggggccacccataatccctcccccaccccctatttgtcccgactccctggatgatgctgacgctctcggatcaatgttaatctcctggtatatgtcgggctatcataccggttattatatgactggatttcattgtgtgtctcaggacggactcaacctcctgaccccttag

SEQ ID NO: 207521 - DNA, 684 bp, synthetic construct
  misc_feature 1..684: note = Description of Artificial Sequence: Synthetic coding sequence
  source 1..684: mol_type = other DNA
atggccatgagcagcggcggcagcggcggcggcgtgcccgagcaggaagacagcgtgttattccggagagggaccgggcagtccgacgatagcgatatttgggatgacactgctctaatcaaagcatacgacaaggcagtggccagcttcaagcatgcgctgaagaatggcgatatctgtgaaacatctggaaagcccaagaccaccccgaagcggaaacctgctaaaaaaaataaatctcaaaaaaagaatacggccgcaagcctccagcagaatgagaacgagagtcaggtgtccacagatgagagtgagaactcccgttctccaggcaacaagagcgacaatataaaaccaaaaagcgcaccttggaactccttccttccaccaccgcctcccatgccgggtccaaggttaggtcccggtaagcccggcctaaagtttaacgggccgcccccacctccgccccctccacccccccacctactgtcctgttggctgccccctttcccctctggtcccccgattatccccccacccccgcccatctgtccggactcactggacgacgcagatgcgctaggttccatgcttatcagttggtacatgtcaggataccatactgggtattacatgggttttcggcagaaccaaaaggaaggtagatgctcccattcccttaattag

SEQ ID NO: 207522 - DNA, 4494 bp, synthetic construct
  misc_feature 1..4494: note = Description of Artificial Sequence: Synthetic coding sequence
  source 1..4494: mol_type = other DNA
atgccccggtgcatcgcccacttctgcgagaagccccccagcgtgtcatacagcatcttggagtctgtgtcaaaggctaagtttgctgcaggatctgtggtgagttttaagtgtatggagggtttcgtcctgaacacttcagctaagatcgaatgcatgcgggggggccaatggaatccgtcacccatgtcaattcagtgtatacccgtgaggtgcggtgagccccctagcattatgaatgggtatgcttctgggagcaattattcctttggtgcaatggtggcctacagctgcaacaaaggcttttacattaagggtgagaaaaaaagcacctgtgaggctacaggtcagtggagctcaccaattcctacatgtcaccctgtgagctgcggcgagccgcccaaggtggaaaatggctttctcgagcacaccaccggcagaatcttcgagagtgaggttcgataccagtgtaatccagggtataagtccgtcggtagccccgtttttgtgtgtcaagccaatagacactggcattcggaaagccctctcatgtgcgttcctctagactgtggaaaaccaccgccaatccagaatggcttcatgaaaggagagaacttcgaagtggggtcaaaagtgcagttcttctgcaacgaaggctatgaactcgttggagactcttcctggacctgtcagaagtccggcaagtggaataagaagtccaatccaaagtgcatgcctgcgaaatgccccgagcctcctctcctcgagaaccagctcgttctgaaagagctcacaacagaggtgggagttgtgacgttctcatgtaaggagggccacgtcctgcagggaccctctgtgttaaagtgcctccctagtcagcagtggaacgattccttccccgtttgtaagattgttctttgtacgcctcctcctctcatcagctttggggtgccaatcccctcttcagccctacatttcggatccaccgtgaaatactcatgtgtaggaggattctttctcagggggaacagcactaccctgtgtcaaccagacggaacctggtcctcacccctgccagaatgtgttcccgtggaatgtccgcagcccgaggaaattcctaacgggatcattgacgtacagggactcgcctatttaagcaccgcgctgtatacctgtaagccagggttcgaattagtcggtaacaccacgaccttgtgtggagagaacggtcactggctgggcggtaaaccaacttgcaaggctatcgaatgcctgaagccaaaagagatcctcaatgggaagttttcctacacagatttgcattacggacaaacggtgacatattcctgtaaccgcggctttcgcctcgagggaccgtcggccttaacctgtttggaaaccggtgactgggatgttgacgccccttcttgtaatgctatccactgtgattcgccccagccgatcgaaaatggtttcgtggaaggtgccgattactcttatggagctatcataatctactcatgttttcccgggttccaagtcgcgggccatgccatgcagacttgcgaggagtctggctggtctagtagcattccgacttgcatgcctatagactgtggcctgcctccccacatcgacttcggggactgtacgaagctgaaagacgaccaggggtacttcgagcaggaagatgacatgatggaggtgccttatgtaacaccccatcccccgtaccacctgggagctgttgcaaagacttgggagaacacgaaggagagccccgccacacactccagcaactttctttatgggaccatggtgtcttatacatgcaatcccggctacgagcttctaggaaaccccgtccttatctgccaggaggacggaacatggaatggttcagcaccatcttgtattagcatagagtgcgatctgccaacagcccctgaaaatggctttctcagattcactgagacatctatgggatctgctgtgcaatattcatgtaaaccaggacatatccttgctgggagcgatttaaggctctgtctggagaatcggaagtggagcggagcttctccccgctgcgaagcaattagttgcaaaaagcccaaccctgtcatgaacggatccattaagggcagcaactacacttacctctcaactctgtattatgagtgtgatcccgggtatgtgctcaatggtacagagcgacgcacctgccaggatgacaaaaactgggacgaggacgagcccatctgcatacctgtggattgcagctcccctcccgtatcagcaaatgggcaggtgcgtggggacgagtataccttccaaaaagagattgaatatacatgcaacgaaggattcctgcttgaaggagcacggtccagagtgtgcctggctaacggcagttggtccggcgcgactcccgactgcgtccccgtgagatgcgccaccccgcctcagctggccaatggagtgaccgagggcctggattacggcttcatgaaagaagtgacctttcattgtcatgaaggttatattcttcacggagcacccaagttaacctgccagtcagacggaaactgggacgcagaaattcccctttgtaagccggtcaattgcggcccgcctgaggaccttgcccatggatttccaaatggttttagcttcatccatggcggacacatccagtatcagtgtttcccagggtacaagttacatgggaactccagtagaaggtgcttaagcaacggaagctggagcggaagctctccaagctgtcttccatgtaggtgttccacgcctgtgatcgaatatggaactgtgaacggcactgatttcgattgcggtaaagcagctcggattcagtgctttaagggcttcaagttgcttggcctgagcgagatcacctgtgaagccgacggccagtggagtagtgggtttcctcattgcgaacacacaagttgcggcagcctacccatgatccccaacgctttcatttccgagacctcaagctggaaggagaacgttatcacatattcttgtcgctctggatatgttatccagggctcttctgatttgatctgcaccgagaaaggcgtttggtctcagccctacccagtgtgcgagccactgagctgcgggagccccccgagcgtcgcaaacgcggtcgctaccggagaggctcacacctacgagagcgaagtaaagctgcgctgcttggagggctacactatggatacagataccgatacatttacctgtcaaaaagatggcagatggtttcccgagagaataagctgtagccctaaaaagtgtcctctgccagagaatattacacatattttagttcatggcgatgatttttccgtgaacaggcaggtgagcgtgtcctgtgcagagggatatacgtttgagggcgtgaacatcagcgtctgccagttggacggaacctgggaaccacctttttccgatgagagttgcagccccgtgtcttgtggcaaaccggagtctcccgaacatggcttcgtggttgggtccaaatatactttcgaatctaccattatataccagtgtgagccaggttacgaactggagggaaaccgagaacgtgtctgccaggagaaccgccaatggtctggtggcgttgccatttgtaaggagacaaggtgcgaaactccactggagtttcttaatggcaaagctgacatcgagaaccgtactacaggtccaaatgtcgtttacagttgcaataggggctatagcttagaaggaccatcagaggctcattgcactgagaacggcacttggagtcaccctgtgcccctgtgcaagccgaacccctgcccagttccatttgtgattcctgaaaatgccttactgagtgaaaaggagttctacgtcgaccaaaatgtctcaattaagtgtagagaaggtttcctgctgcagggccatggcatcatcacctgcaatccagacgagacttggacacagacatcggctaaatgtgagaaaatctcatgcggacctcctgctcacgtagagaatgccatcgcccgaggtgtgcactatcagtacggcgacatgataacatattcttgctattctggttatatgctggagggcttcttgcgatccgtctgcctggagaatggaacatggactagccccccaatctgcagggcagtgtgtcgcttcccatgtcagaatggaggcatttgccagaggccgaatgcctgctcctgtcctgagggctggatgggcagactttgtgaagaaccgatttgcatcctcccgtgcttaaatgggggacgctgcgttgccccataccagtgcgactgtcctccaggctggacaggaagtcgttgccacacagctgtgtgccagagcccctgcctgaatggtggcaagtgtgttagacctaatagatgtcactgtctgtctagctggacagggcataactgcagtcggaagaggcggacaggtttctag

SEQ ID NO: 207523 - DNA, 4650 bp, synthetic construct
  misc_feature 1..4650: note = Description of Artificial Sequence: Synthetic coding sequence
  source 1..4650: mol_type = other DNA
atgtggccccggctggccttctgctgctggggcctggccctggtgagcggctgggcaaccttccagcagatgagcccatcgcggaacttctcctttaggttgttcccggagacagccccaggagccccaggctcaatacctgccccccctgctccgggcgacgaggccgccggtagccgtgtcgaaagactgggccaggccttcagacggagagtcagactgctgagagaactctctgaaagactggaattggtattcttagttgacgatagctcaagtgttggtgaagtgaatttcaggtctgagctcatgtttgttaggaaattgttgagcgacttcccagtagtcccgacagccacccgagtggccattgtgacgttttcatcaaagaactacgtcgtgcctcgagtggattatattagcacccgaagagcccgccagcataagtgtgctctgctgctgcaggagattcccgccatctcctacagaggcggcggcacgtatacgaaaggggcattccagcaagccgctcagattctgctgcatgctcgggagaatagcaccaaagtggttttcctgatcaccgacgggtatagtaacgggggtgacccaaggcccattgcagcctcccttagagattctggggtggagattttcacattcggtatatggcagggcaacattcgcgaactgaatgatatggcctctacccctaaggaggagcactgctatctcctacatagctttgaggagtttgaggcgctcgcccgcagggctctacatgaggacttgcctagtggatcctttatccaggacgacatggtccactgttcatatctgtgcgacgaggggaaagattgttgcgatcgcatgggctcttgcaaatgcgggacacataccgggcacttcgagtgtatctgcgagaagggttattatggtaagggcctccagtatgagtgcactgcctgcccgagcggcacctataaacctgagggcagccccggcggtatcagctcttgtatcccctgccccgacgagaatcatacaagccccccgggctccactagtcctgaagactgtgtttgccgagaggggtaccgcgcctccggccagacatgcgagctggtgcactgccccgctttgaagcccccggagaacggctatttcattcagaacacctgtaataaccatttcaacgccgcctgcggagtgcggtgccatcccggatttgatctggttggctcaagtataatactctgcttgcccaacggactgtggtccggcagcgagagctactgtcgcgtgcgaacatgcccacatttgcgccagcccaagcacggtcacattagctgttcaactagggagatgctctataaaacaacttgtctggtcgcttgcgatgaagggtacaggctggaggggagtgacaagctgacctgccagggtaattcacagtgggacggacctgaaccacgttgtgtggagcgtcattgcagcacatttcaaatgcctaaggacgtcataattagtccccacaactgcgggaaacagccagcaaaatttgggacaatctgctacgttagctgccggcagggttttattcttagtggagtaaaagagatgctgcgctgcacaacgtcgggcaagtggaatgtgggagtccaggctgctgtgtgtaaagatgtcgaggcaccccagatcaattgccccaaagacattgaagccaagaccttggaacagcaggatagcgcaaacgtgacctggcaaatcccaaccgctaaggataattcaggcgaaaaggtgagtgtgcacgtccatcctgcctttacgcctccttatctcttccctatcggggacgtcgcaatcgtttatacagcaaccgacttgtctgggaatcaggcgtcttgtatttttcacatcaaagtcattgacgcggaaccccccgtcatcgactggtgtagaagtcctcccccagtacaggtatccgaaaaagttcacgccgcttcctgggatgagccacagttttccgacaactctggtgcagaattagtgattacccgctcgcatacgcagggcgatttatttccacagggggaaaccattgtgcaatataccgccacagatcctagtggaaataacaggacgtgtgacatacatatcgtcataaagggaagcccctgcgaaataccctttacccctgtgaacggagacttcatttgtactcctgacaataccggagtgaattgcactctcacttgtcttgagggctacgacttcaccgagggctccacagacaagtactactgtgcctatgaagatggcgtgtggaagcccacctacaccacggagtggcctgattgtgccaagaagcgcttcgccaaccacggtttcaagtcttttgagatgttttataaagcggctaggtgcgatgatacagacctgatgaagaagttcagtgaagcttttgaaaccaccttgggcaagatggtgccaagcttctgttccgacgctgaggatatcgactgtaggctggaagagaacctgaccaagaagtattgtctggaatataactatgattatgagaacgggttcgctattggcccaggcgggtggggcgccgctaacagactggactactcttacgacgacttcctcgataccgtacaggagaccgcaacttcaattggaaacgctaagtcttcccgcattaagcggagcgctcctctgagtgactacaagattaagctcattttcaatataacagcctcggtaccactgcctgacgagaggaatgacacgcttgagtgggaaaatcagcaaagacttctgcagaccctggaaaccattactaataaactcaagagaacgctgaacaaagatcctatgtactcctttcagcttgcaagtgagattctcatcgcagacagcaatagcctcgaaacaaagaaagcatcaccattttgtcgccccggaagcgtactgcgcggtcggatgtgtgtgaactgtcccctgggcacatactacaatctcgaacatttcacatgcgagtcgtgccgcatcgggtcatatcaagatgaggagggccagctggagtgcaaactttgcccttccgggatgtatacggaatatatacattctcgaaacatctcagattgcaaagcacaatgcaagcagggaacttatagttactcaggcttggagacctgcgagtcatgcccactcgggacctaccagccaaagtttggaagccggtcgtgtctgagttgccctgagaatacctcaacagtcaaacggggggcggtgaacatcagcgcatgtggcgtgccatgtcctgaaggaaagttcagtaggtctggcctcatgccgtgccacccgtgccctcgggattactatcaacctaacgctggcaaggccttctgcctggcttgcccgttttatggcaccaccccatttgccgggtctcgcagcattacggagtgtagctcattctcctcaaccttctctgccgcagaggagtctgtggtcccccctgccagtcttgggcatattaaaaaacgccacgagattagcagccgggtgtttcatgagtgtttctttaacccctgtcataatagcggaacctgccaacagctgggacgaggatatgtgtgcctgtgccctcttggatataccggcttgaaatgcgagacggatatagacgagtgtagtcctctcccgtgcctgaacaacggcgtgtgcaaagatctcgtgggggaattcatatgtgaatgcccgtcagggtataccggccaaaggtgcgaggagaacatcaacgaatgttcctcgtcaccgtgtctgaacaagggtatatgcgtggacggagtagctggctataggtgcacctgcgtaaaaggatttgtgggcctgcactgcgagacggaggtgaacgaatgccagtccaacccctgtctcaacaacgctgtctgtgaggatcaagtggggggcttcctatgcaagtgccccccaggctttctgggtacacgttgcggcaaaaatgttgacgaatgtttaagccagccatgcaaaaatggggctacatgtaaggacggcgccaacagctttcgttgcctgtgtgccgccgggttcacaggctcacactgcgagctgaatattaacgagtgtcagagtaatccctgccgcaaccaggccacgtgtgttgacgaattaaattcctattcctgcaaatgtcagccgggattcagtggcaagagatgcgaaaccgagcagagtactgggttcaatctggacttcgaagttagcggtatttacggatatgtcatgctggacggtatgctgccttcactccacgctctgacttgtactttctggatgaaatcttccgatgacatgaattacggcacaccaattagttacgccgtggacaacggatctgataatacgctgctgctgacggactataatgggtgggtactgtatgttaacgggagggaaaagataaccaactgcccgtccgtgaatgacgggagatggcaccacatagccattacgtggacaagcgccaatggcatttggaaagtgtacatagatggaaagcttagcgatgggggtgccggcctttctgtgggcctaccaattcccgggatgttttag

SEQ ID NO: 207524 - DNA, 2538 bp, synthetic construct
  misc_feature 1..2538: note = Description of Artificial Sequence: Synthetic coding sequence
  source 1..2538: mol_type = other DNA
atgagccccagccggaacttcagcttccggctgttccccgagaccgccccgggcgctccaggcagcatcccagccccccccgcccctggggacgaggccgcaggctctcgcgtggagcggttgggtcaggccttccgccgtagagttaggctgctccgagagctgagtgagagacttgagctggtgtttttagtagacgactccagctcagtaggggaggtcaactttcggtctgagctgatgtttgtacgcaagctcctctctgattttccggtggtgccgacagcaacccgggtggcaattgtgacgttcagttccaagaattacgttgtgcctagggtggactacatcagtacccgacgagcccgacagcacaagtgcgctctcctgctccaggagatccctgccatcagctatcggggcgggggcacctatacaaagggggcctttcaacaggcggcccagatccttttacatgctagagagaactcaactaaagttgttttcctcatcaccgacggctatagcaatggaggggatcctcgccctattgctgctagcctgcgggactcaggggttgagatctttacgttcggaatctggcagggaaatataagagagcttaacgatatggcctccacacctaaggaagagcactgctatctcctgcactcattcgaggaatttgaagcactcgccaggcgcgctttgcacgaggaccttccctcaggtagctttattcaggacgacatggtccactgcagctatttatgcgacgagggaaaagattgctgtgacagaatggggtcatgcaaatgtggcacccacactggacacttcgagtgcatctgtgagaagggctattatgggaaaggactccagtatgagtgcacagcctgccctagcggaacttacaaacccgaaggctctccgggcggaatctcttcctgcattccgtgtccggacgagaaccacaccagcccacctggctcaacctctcccgaagactgtgtgtgtagggaagggtaccgggcctccggacaaacatgcgaactggtgcattgccctgccctgaaacctccagaaaacggctatttcatccagaatacttgtaataaccacttcaacgctgcatgtggtgtgcggtgtcacccaggattcgatcttgtggggtcgagcatcattctttgtctgccaaatggtctgtggagtggtagtgaatcatattgtagggtgcgcacctgtccccatctgaggcagcccaagcacgggcacatctcctgttccactcgagagatgctgtacaaaactacttgcctggtcgcctgcgacgagggctacaggctggaggggagtgacaaactgacctgccagggcaactctcagtgggatgggcccgagccgagatgtgtggagagacactgctcaacattccagatgcctaaagatgttatcattagtccgcacaattgtgggaaacagccagctaagttcggcacaatttgttatgttagctgccgacagggatttatcctgagcggtgtcaaggagatgttacgatgtactaccagcggcaagtggaatgtgggcgtccaggccgccgtctgtaaagacgtggaggccccacagattaattgcccaaaagatattgaggcaaagaccttggagcagcaggattccgccaatgtgacttggcagatcccgaccgccaaagataactctggagagaaggtgagcgttcacgtgcatccagcctttacgcctccctatctgttccccattggagatgtggcaatcgtatacacggcaacagaccttagcggaaatcaagcttcatgtattttccatataaaggttatcgatgctgagccaccagtcatcgattggtgccggagccctcccccggtccaggtgagcgaaaaagtacatgctgcctcatgggacgagccacagttttcggataactccggagcagaattggtgattacaagaagccacacacaaggagacctctttccccaaggagaaaccatcgtgcagtatactgcaaccgacccaagcggcaataacagaacgtgcgatatccacatagtcatcaagggaagcccatgtgagatacccttcactcccgtaaatggagatttcatatgtacgcctgacaataccggggtgaactgtacattaacttgccttgagggttatgacttcaccgaaggttcaactgataagtattactgtgcctatgaagacggggtctggaaacccacttatacaacggagtggcctgattgcgccaaaaaacgcttcgccaaccacggcttcaagagttttgagatgttttacaaggccgcaaggtgtgatgatacggacctgatgaagaaattctcagaagccttcgagaccaccctgggaaagatggtcccaagcttctgcagtgacgctgaagacatcgactgtcgactggaagaaaatttgaccaaaaaatactgtttggagtataattacgattacgaaaacggctttgctatcgggaactag

SEQ ID NO: 207525 - DNA, 1548 bp, synthetic construct
  misc_feature 1..1548: note = Description of Artificial Sequence: Synthetic coding sequence
  source 1..1548: mol_type = other DNA
ctggagaaccagctggtgctgaaggagctgaccaccgaggtgggcgtcgtgactttcagctgtaaagagggccacgtgctacagggaccgagtgtcctgaagtgccttccgtctcagcagtggaatgattcttttcctgtttgcaagattgtcctttgcacccctccccccctgatcagcttcggagtgcctattccttcttcagctctgcacttcggaagtaccgtcaagtacagttgcgtgggcgggttttttctaagaggcaacagcacgactctctgccagcccgacggcacttggtctagcccactgccagaatgcgttcccgtggagtgtccgcagcctgaggaaatcccaaacggcataatcgatgtgcagggcctcgcgtatctcagtacagcattgtatacatgcaaacccgggtttgaattggttggcaacacaacaaccttatgcggcgagaatggccactggctgggggggaagcctacatgcaaagcgatcgaatgcttgaagcccaaagagatacttaacggcaagttttcctacactgatcttcactacggtcagacagttacgtacagttgtaacaggggcttcagactggagggtccatcagccttaacctgcctcgaaaccggcgactgggacgttgatgctccctcctgcaacgcgattcactgtgactcgccccagccaattgaaaatggattcgtcgaaggcgccgactactcttatggcgcaatcattatttatagctgttttcccggatttcaggtggctggccacgcaatgcagacttgcgaggagtccgggtggtctagcagtattccaacctgtatgcccatagactgtggattgcctccccacatcgactttggggactgtacaaagctgaaagatgatcagggctactttgagcaagaagacgacatgatggaagttccctacgtgacgccgcatcccccatatcacttgggcgctgtagccaaaacatgggagaacacaaaagaatcgcctgcgacccatagttcaaactttctttatggcaccatggtgtcctacacttgcaatcccggttatgaactgcttggaaatccagtcttaatctgccaagaagacggcacttggaacggatctgctcctagctgtatctccattgaatgcgatctgccgaccgctcctgagaacggctttttgcgcttcactgagacaagtatgggaagcgccgtgcagtatagctgtaaaccaggtcacattttggccggctccgatttgcgactatgcttagaaaatcgtaagtggagcggcgcgagccctagatgtgaggctatctcgtgcaagaagccaaatccagtcatgaatggttcaatcaagggctccaattatacatatctgagcacattatattacgaatgtgaccccgggtacgtgctgaatggcaccgagcggcgaacctgtcaggatgacaaaacagggatgcgcatgtcgccctttgctttcctctggactgcagtccatccccagtcccaacctatggccaggtag

SEQ ID NO: 207526 - DNA, 10647 bp, synthetic construct
  misc_feature 1..10647: note = Description of Artificial Sequence: Synthetic coding sequence
  source 1..10647: mol_type = other DNA
atgagccccagccggaacttcagcttccggctgttccccgagaccgcccccggcgccccaggctcgatacctgccccgcctgctcccggtgacgaagctgccgggagtcgtgtggaacggctggggcaggcctttcgccgacgcgtgcgactgctgcgggaattgtctgaacgcctagagctagtgttcctggtggatgacagttctagcgtaggagaagtaaattttcgatccgaacttatgttcgtccgcaaactattatccgactttcctgtggtacccacagcaaccagagttgccattgtgacgttctcaagtaagaactatgtcgtgcctcgtgttgactatattagtacacgacgcgctcgtcagcataaatgtgcactgctactgcaggagattcctgccatctcctacagaggaggcgggacatacacgaaaggggcgttccagcaggcggcacagatcctactgcatgcacgggagaactccaccaaggttgttttcctgataaccgatgggtattctaacggaggagaccctcgacctatagcagcctctctcagagactcaggggtggagattttcacctttggtatctggcagggcaatatcagggagttgaatgatatggcgtcaacgcctaaggaggaacactgttacctgctgcatagttttgaagagtttgaagctctggcaagacgggcattgcatgaggatctgcctagtggaagctttatccaggatgacatggtgcactgtagctacctttgcgacgaaggtaaagattgctgcgaccgtatgggctcatgtaagtgtggtacccacacgggtcacttcgaatgcatttgtgaaaagggctattacggcaagggccttcaatatgaatgcaccgcctgccccagtggcacctataaaccggaagggagccccggcggcatatcaagttgcatcccttgtcccgacgagaaccatacctctcctccaggctccacttcgccagaggattgcgtctgccgtgaaggctatcgagcctcaggccaaacctgtgagctggttcactgtcccgcactgaagccaccagagaacggctacttcattcaaaatacttgcaacaaccattttaacgcagcttgcggagtacggtgtcatcccggtttcgatctggttggaagcagtattatcctgtgtctgcctaacggtctatggtcgggcagcgagtcatattgcagagtgcggacctgtcctcacctgcggcagcctaagcatggccatatctcatgctctacccgggaaatgttgtacaagaccacttgtttagttgcatgcgacgaaggatatcgccttgagggttccgataagctgacatgccagggtaatagccagtgggacggccctgagcctagatgtgtggaaaggcactgcagtacgttccagatgccaaaggacgttatcataagcccccacaattgtgggaagcaaccggccaagttcggaactatctgctacgtcagctgccgtcaggggttcatacttagcggtgttaaggaaatgcttcgatgtacgacctccggcaagtggaacgttggcgtacaggccgccgtgtgcaaagacgtagaggccccccaaattaactgcccaaaggatatcgaagctaagacacttgaacaacaagacagtgctaatgtgacctggcagatacccaccgccaaggataatagcggcgagaaagtaagcgtgcatgtgcatcccgcctttacacctccatatctttttcccatcggtgacgtggcgatagtctacacagccactgacctgtccggtaatcaggcatcctgtattttccacatcaaagtgatcgatgccgagcctcccgtaattgactggtgccgcagccctcctcccgtccaggtaagtgagaaggtacacgccgctagctgggacgagccacaattcagcgataacagcggggccgagctggtgattacccggtcacacacacagggtgatctctttccacagggtgaaactattgttcagtatacagccacagacccttccggcaacaacaggacatgcgatatccatatcgtgattaagggctcaccatgtgaaattccctttacccccgtaaatggggacttcatttgcaccccagataacactggagtgaactgcactctaacctgtctggaagggtatgatttcaccgaggggtccaccgataagtattactgcgcctacgaagacggcgtttggaaacctacatatactacagagtggcctgattgtgccaagaagcggttcgcgaatcacggctttaagtcttttgaaatgttttacaaagcagcccgctgtgatgacaccgacctcatgaagaaattctcggaggcttttgagaccactcttggcaaaatggtcccttcattttgcagcgacgctgaggacatcgattgccgcctggaagaaaaccttactaagaaatactgcctggagtataattacgattatgagaacgggtttgcaataggcccaggggggtggggcgcagcaaatcggctggattacagctatgatgacttcctggatacggtccaagaaactgctacatcaattggtaacgctaagagctcgcgcatcaagaggtccgcccctctgagcgactacaagatcaaattaatatttaatattaccgcctccgttcctctgcccgacgaacggaatgacacccttgagtgggaaaaccagcagcggctgttgcagactctcgagaccatcacaaataaactcaaacgcaccttgaataaggacccgatgtacagcttccaactggcctctgagatcctgattgccgatagcaatagcctggagaccaagaaggctagtccattttgtagaccgggaagtgtcctccgaggaaggatgtgcgtgaattgtccactgggtacatattacaacctggagcactttacttgtgaatcttgcagaattggcagctatcaagacgaggaaggacaactcgagtgcaagctgtgcccctccgggatgtatactgaatacatccattctagaaacattagcgattgtaaggcacagtgtaagcagggcacctactcatatagcgggttagagacctgtgagtcatgccctcttggaacctaccagccgaaattcgggagcaggtcttgtctgtcatgtcccgaaaatacctcaactgtcaagcgcggggccgtcaacataagtgcttgcggtgttccttgcccggaaggaaaatttagtagatcaggactcatgccttgtcacccctgtcctagagactactatcagccgaatgccgggaaggcattttgtctggcctgtccattctatggcaccacaccttttgcagggagccgcagcattacagaatgctcgagcttcagcagtacgttttctgccgccgaagagagtgtcgttcctcccgcttctctggggcacattaaaaaacgccatgagattagctcccaagtattccatgagtgcttctttaacccctgtcataacagtggcacttgtcagcagctcgggaggggttacgtgtgtctctgtccgctcggatatacaggcctgaagtgcgagaccgatattgacgagtgcagtccattgccatgcctgaacaacggggtttgtaaggacctcgtaggcgagtttatttgcgaatgcccgtccggctataccgggcagaggtgtgaggaaaatattaatgaatgctcctctagcccatgtctgaacaaaggcatctgtgtcgatggtgtggctggctaccggtgtacctgtgtgaaaggcttcgtaggattacactgcgagacagaggtcaacgagtgccagagtaatccgtgtctgaataacgctgtttgtgaagatcaggtcggaggcttcctgtgcaaatgcccccctggattcctgggtacacggtgcgggaaaaatgtggacgaatgcttgtcgcagccctgcaagaatggagcgacttgcaaagatggtgctaattccttcagatgcctgtgtgccgccggattcaccggaagccattgtgaactgaatattaacgagtgtcaaagcaacccgtgccgcaaccaggccacttgtgttgacgagctgaatagctactcctgcaagtgccagccgggattcagtggaaagcgatgtgaaaccgagcagtcaaccgggtttaatcttgactttgaggtaagcggcatttatggatacgtgatgcttgatgggatgctgcctagcctccacgccctgacttgcacattctggatgaagtccagtgacgacatgaactacggtacacccatctcttacgccgttgataatggttctgataataccttgctgctcacagattacaatggctgggtgctttatgtcaacggacgcgaaaaaatcactaactgccctagtgttaatgatggacgatggcatcatatcgcaattacctggacatccgctaacggcatatggaaggtttatatagatggaaaacttagcgatggaggcgctggactgtccgtgggcctgccaattccaggcggcggcgctctggtgctcggccaagaacaggacaagaaaggagaaggcttttcacctgctgagtcattcgtgggctcaatatcccagctgaatctttgggactacgtgctcagtccccagcaggtgaagtctctggctacatcctgtcccgaagagctctcgaagggtaacgttttggcctggcctgatttcctgagcggtatagtaggaaaggtgaagatcgattctaaaagtattttttgtagtgactgtccgaggctgggtgggagtgtcccacacctaaggactgctagcgaagacctcaagccaggttctaaggtgaatctcttttgcgaccccggattccagctggttgggaaccccgtgcagtactgcctcaatcaaggacagtggacacagcctctgccacactgcgaaagaatcagttgcggcgtgccacctcctcttgagaatggatttcactctgccgacgacttctatgctggatctaccgttacctatcaatgcaataacggttactatctgctgggtgatagccgcatgttttgcaccgataatggctcatggaatggggtgagtccaagttgcctcgatgtcgacgagtgcgctgtgggatctgattgttcggaacacgcatcgtgtctgaacgtcgacgggagctacatctgttcctgcgttcctccgtacaccggtgacggcaagaactgcgccgaaccaattaaatgtaaggcaccaggtaatcctgagaacggtcactccagtggggaaatctatactgtgggggccgaggtgactttctcgtgtcaagagggatatcagctcatgggtgtcaccaagatcacttgtctcgagtccggggaatggaatcatctgatcccttattgcaaggcggtaagctgcggcaagccagccatcccagagaatggctgcatcgaggagctggcattcacattcggctctaaagtaacgtatcggtgcaacaagggttatacactcgcaggtgataaagagtcttcttgcctggccaattcctcctggagtcactcaccccctgtctgtgaacctgttaagtgcagttccccagagaacatcaacaacgggaagtacatcttgagcggtctcacttatctatctactgccagttactcgtgtgatacgggatactcacttcagggacctagcatcatcgaatgcactgctagcgggatctgggatagggcacctcctgcatgccacttggtgttttgtggtgaacctcccgctatcaaggatgcagttattaccgggaataatttcactttcaggaatactgtgacatatacctgtaaagaagggtacactttggcaggtttagacacaattgagtgtttagccgatgggaaatggagcagaagcgaccagcaatgtctggcagtgtcctgcgacgagccacctattgtcgatcatgcatcacccgaaaccgcccatcggctgttcggcgatatagctttctactactgttccgacgggtactccctggccgataattctcaactcttgtgcaacgcccagggcaagtgggtcccccccgaaggccaggacatgccacgctgcatcgctcacttttgcgagaagcctccatctgtgagctactcaatcctggaatcggtgtctaaagcaaagtttgctgccgggagcgttgtgtcctttaagtgcatggaaggcttcgtgctgaacacatcagctaagattgagtgcatgagaggcggacagtggaaccccagtcccatgagtatccagtgcattccagttcggtgcggtgaacctccaagcatcatgaatggttatgcctctggctctaattattcatttggagccatggtggcctattcttgtaataaggggttctatattaagggagagaagaaatccacatgtgaggccactgggcagtggtcctcgccaattcctacatgccaccccgtatcctgcggggagccccctaaggtcgaaaacggcttcctggagcacactactgggcgaatttttgagagtgaggtccgttatcaatgtaaccccggttataaatccgttgggtcgcccgtgttcgtttgccaggcaaacaggcactggcattctgagtcaccgctgatgtgcgttccactggattgtgggaaacccccacctatccaaaacggttttatgaaaggtgagaattttgaggtgggttccaaggtgcagttcttctgtaacgagggttatgagctggtcggagacagttcgtggacctgtcagaaatccggtaaatggaacaagaaatcgaaccctaagtgtatgccagccaagtgtcctgagccacctctgctggaaaaccaactcgttctgaaggagctgacaacagaggtaggagtggtgaccttttcgtgcaaggaggggcacgtgctgcaggggcccagcgtactcaaatgcctcccttctcagcagtggaatgactcattcccagtgtgcaaaatcgtcctgtgcacacctcccccgttgattagttttggcgttcctatcccgtccagcgcactacattttggttccaccgtaaagtactcctgtgtcgggggcttcttcctgcgtggaaactcaacgaccctctgtcaacctgacggtacctggtcctcacctctccccgaatgcgtgccagttgaatgcccccagcccgaggagattcccaatggaattatcgacgtacaggggttagcctacttatcgaccgcattgtacacctgtaaacctggtttcgaactggtgggaaatactacgaccttgtgtggggagaatgggcactggttgggaggtaagcccacttgtaaggcaattgaatgcctgaaaccaaaagaaatcctgaacgggaagttctcctacacggacttgcattacggccagactgtgacttactcgtgtaatcgcgggtttcgccttgaagggccctctgcactgacttgccttgagactggggactgggatgttgacgccccatcctgtaatgccatccactgtgattccccccagcccatcgagaacgggttcgtcgagggcgcagattactcttacggcgccatcatcatctactcttgttttcctggatttcaggtcgctggccacgccatgcagacttgcgaggaatccgggtggtcaagcagcattcccacgtgtatgccgatcgattgtggattaccgccgcacatcgatttcggggactgcactaagcttaaagatgaccagggctactttgaacaggaggatgatatgatggaagttccttacgtgactcctcatccaccataccacttaggcgccgtggctaagacttgggagaatacaaaggagagccctgctacccattcatccaacttcctttatggtacaatggtgtcttacacgtgtaatcccggatatgaattattgggtaatcctgtgctgatttgtcaagaagacggaacttggaatgggtctgctccaagctgcatcagcatcgagtgtgacttgcccaccgctcctgagaacggtttcttgcgatttactgagacttcaatgggttccgcggtacagtatagctgtaaacctggacacatcctggccggaagcgacctccggctctgtctggaaaatcggaagtggagcggagctagtcccagatgtgaggccatctcctgtaagaagccgaaccctgtgatgaacggctcaattaaagggtccaactacacttatcttagcacgttgtactatgaatgcgatccggggtatgtcctaaatggcactgagcggcggacctgtcaggacgacaagaattgggacgaggacgagcctatctgcatcccagttgattgtagctccccacctgtgagcgccaatgggcaagtcaggggcgacgagtatactttccaaaaggaaatagaatacacatgcaatgaggggttcttgcttgaaggagctagaagcagagtctgcctggccaacggtagttggagcggggctacaccggactgcgtacccgttaggtgcgccacgccaccgcagctcgccaatggcgtgacagaaggactggactacggctttatgaaagaagtgactttccattgtcatgagggatacatactgcacggagcgcctaagctgacatgtcagtccgacggaaattgggacgctgaaatccccctttgtaagccagttaattgtggcccccctgaggatctcgcacatggatttcctaacggcttcagttttatccatggtgggcacatccagtatcaatgtttcccagggtataagctccatggtaattcaagtcggagatgcttaagcaacggcagctggagcggcagtagcccctcgtgtttgccctgtaggtgttcgacccctgtaatcgaatacgggactgttaacggaactgatttcgactgtggcaaggccgcgcgtatacagtgcttcaaagggtttaagttactcggcctgtccgagatcacctgcgaggctgatgggcagtggtcatccggattcccgcactgcgagcacactagctgcggttctctgcctatgatcccgaacgcattcatatccgagacatcatcttggaaagaaaatgtcatcacatatagctgtcgctctgggtacgtgattcaaggaagtagcgacctcatctgtaccgaaaaaggagtgtggagccaaccatatcctgtgtgtgagcctttaagttgtggctcacctccaagcgtggccaatgctgttgcgaccggagaagcccacacatatgagtccgaggtaaagctccgatgtctggagggctacaccatggatactgacacagatacctttacctgccagaaggacggccgttggttccctgagagaatctcgtgcagtccaaaaaaatgcccgctcccagagaatatcacccatattttggtgcacggtgacgatttctctgtaaacaggcaggtgtcagtttcttgtgcggaggggtacacatttgagggcgttaacataagcgtctgccagctagatggaacatgggagccacctttttccgacgagtcatgttcccccgtctcttgtggcaaacctgagagtcctgagcacggcttcgtggtgggcagcaaatacaccttcgagtcaacgattatttatcagtgcgaacccgggtatgagttagagggcaaccgcgagcgtgtgtgccaggagaatagacagtggagcgggggggtcgccatatgtaaagaaactcgatgcgagacccccctggagttcttgaacgggaaagctgatatcgagaaccgcacaacgggccctaatgttgtatattcttgcaatagaggatatagtcttgaggggccctccgaagctcattgtactgagaatggcacttggtcccacccagtaccattgtgcaagcccaatccatgccccgttcccttcgttattcctgagaatgctctgctatcagaaaaagaattctacgtggaccagaatgtgagtattaaatgcagggaggggtttcttctccaaggacacggtattatcacatgtaatcccgatgagacgtggacacagacttcagccaagtgtgagaaaattagctgcggccccccagcccacgtggagaacgccattgcacgtggcgttcattaccagtacggtgacatgattacctacagctgttactcggggtatatgctggagggatttctgaggagcgtctgcctggaaaatgggacctggacttcccctcccatatgcagggccgtgtgcaggttcccatgtcaaaatggcgggatctgtcagcggccgaacgcttgtagttgtcctgaaggatggatgggtcgactctgtgaggagcccatttgtattctgccctgcctcaatggtgggaggtgcgttgcaccttatcagtgcgattgcccccctggctggacaggcagccggtgccacacagctgtttgtcagtccccatgtctgaacggcggcaaatgcgtaaggccaaatagatgtcactgcttatcttcgtggaccggccacaattgttcccgtaagcgcagaacaggcttttag

SEQ ID NO: 207527 - DNA, 10716 bp, synthetic construct
  misc_feature 1..10716: note = Description of Artificial Sequence: Synthetic coding sequence
  source 1..10716: mol_type = other DNA
atgtggccccggctggccttctgctgctggggcctggccctggtgtccggttgggctacttttcagcagatgtctccaagtagaaattttagtttccggcttttccccgaaaccgccccaggggcccccggcagcattcccgcgcccccagctccaggggatgaggccgccggatctagggtagagcggctcggacaggccttcaggcggcgggtgagactcctgcgcgaactcagcgagagactggagcttgtgttcctggttgatgactcttccagcgtgggggaagtgaatttcaggtcagagctcatgtttgtaaggaagctattgagtgattttcctgtggtacctaccgcaaccagggtggccatcgtgacattcagcagcaagaactacgtcgttcccagagtggattacatcagcaccagaagggctcgccaacataaatgtgcgctgctgctgcaggaaatccccgccatttcatacaggggcgggggcacatacaccaagggagcgtttcaacaggccgcccagattctgctccacgctagagaaaatagcaccaaggtagtgttcttaatcacagacggatattcaaacggtggtgacccacgtccaatcgcagcaagcctccgggactcgggagtcgagattttcacttttggcatctggcaaggtaatatcagggagttaaatgacatggcctccacacctaaggaggagcactgttatctcctccactcgttcgaggagttcgaggcattagccaggcgggcactgcatgaggatcttcccagcgggtcattcatacaagatgatatggtgcattgtagctatctgtgcgatgaagggaaggattgctgtgacagaatgggcagctgtaaatgtggcactcacactgggcatttcgagtgtatctgtgaaaaagggtattacggcaagggattgcagtatgaatgcaccgcatgtccgagtgggacatacaagcccgagggatctccagggggtattagcagttgtatcccgtgcccagacgagaaccacactagccctccagggtcaacttccccggaggactgcgtttgcagggagggttatagagcctctgggcagacttgcgagctggtccattgccccgcgctcaaaccccctgaaaacggatactttatccagaatacctgcaataaccacttcaacgccgcctgtggcgtgcgctgccaccctgggtttgatctagtcgggtcatctatcattttatgtctgcccaatggcctatggagtggctctgagagctactgccgagtaagaacatgtcctcacctgcgtcaaccaaagcacggtcacatcagttgctcgacccgcgagatgctgtataaaaccacctgcttagtagcctgtgatgagggctaccgactggagggaagtgataaactaacttgtcagggcaactcacagtgggatggcccagagccccgctgtgtggagcggcactgctccacattccaaatgcctaaagacgtgatcatatcccctcataattgcggaaaacaacccgctaaatttggaacaatctgctacgtttcatgcagacagggatttatcctgagtggtgtcaaagaaatgctgaggtgcaccacttccgggaagtggaatgtgggagtgcaggccgcagtgtgtaaggatgttgaagctcctcagataaactgccccaaagacattgaagccaagacactagagcagcaggatagcgcgaacgtgacctggcagataccaaccgctaaggataactccggagagaaagtatccgtgcacgttcacccagccttcacacctccctatttattccccattggcgatgtggctattgtttacactgccacggacctgagcggaaaccaggcctcatgtatctttcatattaaggtgatcgatgccgagccaccagtaatagattggtgccgttcgccacccccagtgcaggtgagcgaaaaggtacatgccgcctcctgggatgagccgcaattttctgacaatagcggcgccgagctcgtaattacacgttcccacacacagggggatttattcccgcagggcgagaccattgttcagtacactgccactgaccctagcggcaataacagaacatgcgacattcatatcgtgatcaaaggaagcccgtgcgagatccccttcacacccgttaacggcgacttcatctgtacaccagataacaccggagtaaactgtactctgacttgcctggaaggctatgacttcacagaaggctctacggacaagtattattgcgcatacgaggatggcgtgtggaagcccacgtacactacagaatggccagactgtgccaagaaacggttcgccaaccacggctttaaatcttttgagatgttctataaagccgcaaggtgtgacgacactgacctcatgaagaagttctcagaggcgtttgaaacaacactcggcaagatggtgccatcattctgctccgatgccgaagatatcgattgcaggctggaggagaatttgaccaaaaaatactgtttggagtataattatgactatgaaaacgggttcgctattgggccgggtggctggggcgccgccaaccgcctggactatagctatgacgatttcttagacaccgttcaggagactgcaacatcaattggaaatgccaaaagctctcgcattaagaggagtgcaccactttccgactacaagatcaaattgatttttaacatcacggcgtccgtccccctgcctgacgagcggaacgacaccctagagtgggaaaatcagcagagactcctgcagacattggagactatcaccaataagttgaagcgaacactgaataaagacccaatgtactctttccagctggcatcagaaattctcatcgcagatagtaatagtctggaaacgaagaaggcttcaccattttgccggccaggttccgtactgagagggcggatgtgcgtgaattgtccactaggaacttactacaatctcgagcacttcacatgtgaatcctgcaggattgggagctaccaggatgaagagggccagttagagtgtaagctgtgcccttccggcatgtatacagagtacatccactccagaaacatcagtgattgcaaggcgcagtgcaagcagggcacttacagttacagtgggctagaaacttgcgaaagctgtcccctcgggacctatcagcctaagtttggctcgcgttcttgtctgagttgccccgagaacacctcgactgtaaaaagaggagccgttaatatctcagcttgcggtgtgccatgtcccgagggtaagttcagtaggtcaggtctcatgccttgtcacccttgccctcgggattattaccagccaaacgcaggaaaggctttctgcctagcctgccctttttatggcaccaccccattcgctgggtcaagatcaatcacggagtgtagcagcttcagctctactttttctgccgccgaggagtcagtggtgcctccggccagtctcggccacatcaaaaaacgccacgagataagttcccaggtcttccacgaatgcttcttcaatccttgccacaattccggcacatgtcaacagctggggcgcggctatgtctgtttatgcccactggggtacacgggactaaagtgtgaaaccgatatcgacgagtgttcaccactaccctgtcttaataacggcgtatgcaaagatttggtgggtgaattcatttgcgagtgtcctagcgggtacaccggccagcgctgcgaggagaacattaacgagtgttcctcttcaccgtgccttaataaaggtatctgtgttgacggagtggccggataccgctgcacttgcgtaaaaggattcgtgggcctgcactgcgaaaccgaggtgaatgaatgccagtctaatccatgcctgaacaatgccgtgtgcgaggaccaggtgggtggattcctttgtaagtgcccccctgggttcctaggcacacgctgcggtaaaaacgtggatgagtgcctttcacagccctgtaagaatggggccacctgcaaagacggagcaaacagctttaggtgcctctgcgcggctggcttcaccggttcacactgcgagctcaacattaatgaatgccaatcaaatccctgcaggaatcaggccacctgtgtcgatgagttaaatagctattcttgtaaatgtcagcccgggttttccggaaagcggtgcgagacagaacagtccacgggtttcaatctggacttcgaggtgtctggcatctacggatatgtgatgctggatggtatgctgccatctctccacgcgctgacttgcacattctggatgaaaagcagtgacgacatgaactacgggacccctattagctacgccgttgataacgggtctgacaataccctcttgttaaccgattacaacggatgggtcttgtacgtgaacggcagggagaaaatcactaactgccctagtgtgaatgacgggcggtggcaccatatcgcaatcacatggactagcgccaacgggatttggaaggtctatattgacggaaaattgtctgacggtggcgctggcctgtccgtgggcttgcccatcccaggcggcggagctctcgttctgggtcaggaacaggataaaaagggagagggctttagtcctgccgagtccttcgtgggctcaattagtcagttgaacctgtgggattacgtgctgtcccctcagcaggtcaaatcactggccacctcctgtcctgaagaactgtccaaaggcaacgtactggcctggccagatttcctgtcgggcatcgttggaaaggtcaagatcgatagcaagagcatcttttgcagcgactgccctcggctcggcgggtctgtgccccacctgcgaactgcatctgaggatctaaagccaggtagtaaggtaaatctgttttgtgaccccggattccagctggtggggaacccagtccagtactgcctcaatcaagggcaatggacacagccgctgccgcactgcgagcggatctcctgtggcgtgcccccccctcttgaaaatgggttccactccgcggatgatttctacgctggctctacagtgacgtatcagtgcaacaatggatactatctgctcggagatagtaggatgttctgtaccgacaatggttcttggaatggagtctctccttcgtgtctcgacgttgacgagtgtgccgtggggtccgattgtagcgaacatgcatcctgtctgaacgtcgatggcagttacatttgcagttgcgttccgccttataccggagacgggaaaaattgcgccgagccaattaagtgcaaggcacccgggaaccccgagaatgggcactccagtggcgaaatatacaccgtgggagcggaggtgacattctcttgtcaggagggataccaactgatgggcgtgaccaaaattacatgtctcgaatccggagaatggaatcacctgataccttactgcaaggccgtgtcatgcggcaaacccgctattccggaaaacggttgcattgaggaactggcctttacattcgggagcaaagtgacatacaggtgtaacaaagggtatacattggccggcgataaagagagctcctgcctggcaaactcctcctggagtcattcgccacccgtttgtgagcccgtgaaatgctcctctccagaaaatataaataacgggaagtatattttgagtgggctgacgtacctgagtactgcctcttacagctgcgatacgggatattccctgcagggcccgtcaatcatagaatgtacggcttccggcatttgggatagggctccaccggcctgccacctggttttctgtggcgaaccccccgcaattaaggacgcagtgattacaggaaacaatttcacctttagaaataccgtcacctacacctgtaaagaaggttacactctggctgggctggacaccattgagtgtctggccgacggtaagtggagtcgctctgatcagcagtgtctggcggtgtcttgcgacgagccccccatagtggaccacgcatcaccggaaactgcccacaggctgttcggggatattgcattttactattgttcagacggatactccttagccgataattctcaactgctgtgcaatgcacagggcaaatgggtccctcctgagggacaggatatgcctaggtgcatagcccatttctgtgagaagcctccaagcgtgagctacagcattctggagtcagtctcaaaagccaagtttgccgccggctctgttgtgtcttttaaatgtatggaggggtttgtgctgaacacttccgctaagatagagtgcatgcgcgggggacaatggaaccccagccctatgtcaatccaatgcattccagtccgctgcggagagcccccctctataatgaacggatatgcatcaggaagcaactatagctttggcgctatggtcgcatactcatgcaacaagggcttttatataaagggggaaaagaaatccacgtgtgaagccacaggccagtggagttcgccaatccctacctgtcacccagtgtcctgtggggagccacccaaggtagaaaacggcttcttagagcacacaacaggcaggattttcgaatctgaggtgaggtatcagtgtaatcctggttacaagagtgtcgggtcccctgtatttgtgtgccaggctaataggcactggcattccgagtcacccctaatgtgtgtgccgctggactgcgggaaaccgccacccatacagaacggatttatgaagggggagaacttcgaggtgggaagcaaggtgcagttcttctgcaatgaggggtatgagctggtgggcgattcctcctggacctgtcagaagtctggaaaatggaacaaaaaaagcaatccgaagtgtatgcctgccaaatgtccggagccccctttgctggagaaccagttagtccttaaagagttaaccactgaggttggtgtggttacattttcgtgtaaggaagggcacgtgctgcagggaccaagtgtgctgaaatgtttgcctagccagcagtggaatgacagtttccccgtatgcaaaattgtgctgtgcacacctcctcctctgatatcctttggagttcctatcccatcttcagcgctgcactttggcagtaccgtcaagtactcttgcgtgggggggttttttcttcgcggaaattccacaactttgtgtcaacccgacggtacctggagcagtccactccccgagtgcgtgcccgttgagtgcccccagccagaggaaatccctaatggcattattgatgtgcagggactcgcgtacctctccaccgctctctacacctgcaaacccggttttgagctggtggggaataccacaacgctgtgcggggaaaacggtcactggctcgggggtaaaccaacatgcaaggcaatagagtgcctcaagccaaaggaaattttgaatgggaagttctcttataccgacttgcattacggccaaactgtgacttacagttgtaaccggggcttccggctcgaggggccatccgctctgacctgcctggaaaccggggattgggacgtggatgcgccgtcatgcaacgccattcattgtgattccccacagcctatcgaaaatggatttgtcgaaggggcagattactcctacggtgccatcataatctatagctgttttccaggctttcaggttgcgggccatgctatgcagacctgcgaagaatctggctggtcctcatcgatcccgacttgcatgcctatcgattgtggcctgcctcctcacatcgactttggcgactgtacaaagcttaaagatgatcagggatatttcgagcaggaggacgacatgatggaggttccctatgtgacacctcatccaccataccaccttggagcggtggccaaaacgtgggagaataccaaggaatccccggccacccacagctctaattttctctatggaacaatggtcagctacacatgcaacccgggatacgaactcctgggtaaccccgtcctcatatgtcaggaggatggaacctggaatgggtctgcacctagttgcatcagcatcgaatgcgacctgccaacagcccccgagaacgggttcctgcggtttactgagacttcaatgggatcagccgtgcagtactcatgtaaacccggacacatcttggcaggaagcgatcttcgactgtgcctggagaataggaagtggagcggggcttcaccaagatgcgaggccattagctgcaagaagcctaatccagtgatgaatggatccatcaaggggtcgaattacacctaccttagcacgttgtactacgagtgcgacccagggtatgtgttgaacggtacagagcgccggacctgtcaggatgacaaaaactgggatgaggacgagcccatctgtatcccagtggactgttcctccccaccagtgagtgcaaatgggcaggtgaggggggacgaatacactttccagaaggagatagagtacacttgcaatgagggatttctcctggagggagctcggtcccgtgtctgtctagctaatggctcctggtccggggcaactcctgactgtgtcccggtgagatgtgctacgcccccacagctcgctaacggcgtgactgagggtctggattacgggttcatgaaggaggtgactttccattgccacgagggctacatcctgcacggcgcccctaagttaacctgccagtccgatgggaactgggacgctgagattcctttgtgcaagcctgtcaattgcggcccacccgaagatctggcccatgggttccccaatggattctcatttatccatgggggccacattcagtatcagtgtttcccaggttataagcttcacgggaatagttcgcgtcggtgcctgagcaacggctcatggtccggaagtagcccctcctgcctgccttgtcggtgcagtacccccgttattgagtatggtaccgtaaatggaactgactttgactgtgggaaagctgcaagaatccagtgcttcaagggattcaagcttctgggtctatcagaaataacctgcgaagctgacggccagtggtcctctgggtttccgcattgtgaacacacatcatgcggtagtttaccaatgattccaaatgcatttatttctgaaacctcaagctggaaagaaaacgtaatcacgtattcttgccggtcaggctatgtgattcaggggagcagcgatctgatatgcactgagaagggcgtgtggtcgcaaccgtatcctgtttgtgaacccctgtcctgtggcagccctcctagtgtcgccaacgccgtggcaaccggtgaggcccacacctatgaatcagaagtcaaacttcgctgcttagaaggctatactatggacaccgataccgataccttcacctgccagaaagacggccggtggtttcccgaaaggattagctgcagccctaagaagtgtcccctgcctgagaatattacccacattctggtacacggcgacgatttttctgtgaatcggcaggtgagcgtctcatgtgcagaggggtatacgttcgagggagtaaacattagcgtgtgtcaattagacggcacctgggaacctcccttctctgacgagagttgctccccagtaagttgtggcaagcccgagagccccgagcacggattcgttgtgggatctaagtacacatttgagagcactatcatttatcagtgcgaaccaggttatgagctggaaggcaaccgcgagcgggtatgtcaggagaataggcagtggtctgggggggtggcgatttgcaaagaaacgcgatgcgagactccactggaatttctaaacggtaaagctgatatcgagaaccgaacaactggacctaatgtagtgtacagttgcaacagaggatacagcctcgagggtccttccgaggcgcattgcaccgagaatggcacctggtcacacccagtgcccctgtgcaagcccaacccatgccccgttccatttgtgattcccgagaatgcactgttgagcgaaaaggaattctacgtagatcaaaacgttagtattaaatgccgggaggggtttctcctccaaggccacgggataattacctgtaatccagacgagacctggacccagacatcggcaaagtgcgagaaaatttcatgcgggccccccgcccatgtggaaaacgcaatcgcgcgcggcgttcactaccagtatggggacatgatcacctattcttgctattcgggttacatgttggaagggtttctgcggtcagtatgtctcgagaatggaacatggacgtccccacctatttgtcgagccgtgtgtcgcttcccatgccagaatggcggtatttgtcagcgccccaatgcctgctcatgtcctgagggctggatgggtcgcttatgcgaggagccaatctgtatcttgccatgtctgaatggcggcagatgcgtggccccttatcaatgcgattgcccccccggttggactggctcgcgctgtcacacagccgtatgtcagtccccctgtctaaatggaggcaagtgcgtgagacctaaccgctgccactgcctgtcatcatggactgggcataactgcagccgtaagcggagaaccggcttttag

SEQ ID NO: 207528 - DNA, 1356 bp, synthetic construct
  misc_feature 1..1356: note = Description of Artificial Sequence: Synthetic coding sequence
  source 1..1356: mol_type = other DNA
atggacttcgacgtgggccggaccacccacctgagcagcagcccctgctccgcctcgaatggcggagagtctggacaggtcagcaagcgccgatgtctgattggagagagcggccacgacacaccatggtgttcccctatcaaagtaaagtacggcgatgtttattgcagagccccacaaggcggttactacaagactgccctgggcaccagatgtgacattcgctgccagaagggatatgaattacacggttcttccctgctcatctgccagagcaacaaaaggtggtctgacaaggtgatttgcaagcagaaacgatgtccaactctggcaatgcccgcgaacggggggtttaaatgtgtggacggggcttatttcaactcccgttgcgagtactactgctcccccggatataccctgaaaggcgagcgcactgtgacctgcatggacaacaaggcttggagcggacgtccagcttcttgcgtggatatggaaccacccaggataaagtgcccatccgtgaaagaacgtattgctgaacctaacaagctgaccgtgagggtgagttgggaaaccccagaggggagggacacggccgacggcatcctgacggatgtgattctcaaaggtttaccgccagggtcaaatttccccgagggggatcacaagatccaatataccgtttatgatagagctgagaacaaaggcacgtgtaagttccgcgtaaaggtgagggtaaagcggtgtggcaaactgaacgcccccgagaatggctacatgaagtgctcctccgatggagataattacggggctacctgtgagttctcctgtatcggtggatacgaactccagggatcaccagcccgcgtgtgtcagtccaacctggcctggagtggaacagagccgacctgtgccgccatgaatgtgaatgttggagtaagaaccgcagctgcattgcttgaccagttttatgaaaaacgcaggttactgattgtgtctactccgacggcaagaaatcttttgtatcgtctgcagctggggatgttgcagcaagcacagtgcggcctcgacttgagacatattaccgtcgtagagctggttggtgtcttccctactctcattgggcggataggcgctaaaataatgcctcccgccctagctctccagctgcggttgctgttgagaataccgctgtacagcttctctatggttctcgtagataagcatggcatggataaggaacggtatgtgagtctggtcatgccggtcgctttgttcaacctgatcgatacttttcccctgagaaaagaagaaatggtgttacaggcagaaatgagccagacttgcaatacatag

SEQ ID NO: 207529 - DNA, 1395 bp, synthetic construct
  misc_feature 1..1395: note = Description of Artificial Sequence: Synthetic coding sequence
  source 1..1395: mol_type = other DNA
atgggcagccccgcccaccggcccgccctgctgctgctgctgcccccactattgctgctgctcctccttagggtacccccatctagatctttcccagggagtggcgactcgccattggaggacgatgaagtgggatactcccacccgagatacaaggatactccttggtgttctcccattaaggttaaatacggagatgtatattgtcgggccccgcaaggtggctattacaagaccgcgttagggacaagatgcgacatcagatgccagaagggttatgaattgcacgggtcatccttactgatctgccagtccaacaaaagatggtcagataaagtaatctgcaaacagaaacggtgcccaactcttgctatgcccgccaacggggggttcaaatgcgtagacggagcctatttcaactcccggtgtgagtattactgtagccccggttataccttaaaaggcgagaggaccgttacgtgtatggacaataaggcttggtccggaaggccggcctcatgtgtggatatggaacctccccgcatcaaatgcccgagcgtcaaggaacgtatagcagagcccaacaagttgaccgtgcgcgtttcgtgggagacacctgaaggaagagatacagcggacggcatcctgacagacgtgatcctcaaaggcttaccgccaggatccaatttccctgaaggagaccataagatccagtacaccgtgtacgatagggccgaaaacaagggtacatgtaagtttcgggtaaaagtgagggtgaaacggtgcggaaaactcaacgccccagaaaatggctacatgaaatgcagtagcgacggggacaattacggtgcaacctgcgagttttcttgcatcgggggctatgaactgcagggctctcctgcgagggtctgccagtccaacctcgcatggtccgggaccgagcccacatgtgctgccatgaatgtgaacgtgggggttagaacagcggcggcactcttagatcagttttacgagaaacgtcgcctcctgatcgtcagcacgcccaccgcccggaacttgctgtaccggctgcagctgggcatgctgcaacaggcccagtgcggactcgacttgcggcatattacagtcgtcgaacttgtgggtgtgtttcccacgctcatcggacgcatcggtgcaaagattatgccaccagcactcgcacttcaattacggctcctgttacggatccctttgtatagcttctccatggtgctcgtggacaaacacggcatggacaaggagcggtatgtgtcactggttatgccagtcgcactgttcaatttgattgatacctttccacttcggaaggaagaaatggtgctccaagccgagatgtctcagacttgtaacacgtag

SEQ ID NO: 207530 - DNA, 1218 bp, synthetic construct
  misc_feature 1..1218: note = Description of Artificial Sequence: Synthetic coding sequence
  source 1..1218: mol_type = other DNA
atgggcagccccgcccaccggcccgccctgctgctgctgctgccccccctgctcctcctgctgctgctccgtgtgcctccatctaggtcgttccctggctctggagattccccgctcgaagacgatgaggtgggctattcccaccctaggtacaaggatactccatggtgctcaccaattaaggtcaaatacggggatgtatactgcagggccccccaaggaggatactacaaaactgccctcggcacaagatgtgacatccgctgccagaaaggctatgaactgcatggctcctcccttctcatctgccagagtaacaagcgctggagcgacaaagtgatatgtaagcacatggagcctccacgcatcaagtgcccatcagtgaaagagcgcatcgcagaaccgaataagctcacggtccgagttagttgggaaacccccgaggggagagatacagcggatggcatcctaacagacgtcattctgaaaggactgccacccggaagcaacttcccagagggggaccacaagattcaatataccgtctatgatcgcgcagagaataagggtacatgcaagtttcgggtaaaggtcagggtgaaacgatgcgggaaactcaatgctcctgagaacggctacatgaaatgtagcagcgatggcgacaactatggagcgacctgcgaatttagttgtattggagggtatgaactgcagggctctccggcgcgcgtgtgccaaagtaaccttgcttggtctggcactgagcccacctgtgccgccatgaacgttaacgtgggcgtgagaactgcggctgcattactggatcagttttatgaaaaacggcgtctgctcatcgtatcgacccccactgcgagaaacctcctgtacaggctccaactgggcatgctgcagcaggctcagtgtggactagacctcagacatataacagtcgttgaactagttggggtgttccctaccctgattgggagaatcggcgctaaaatcatgcccccggctctagccctgcagttgagattactccttcggattcccctgtactccttctctatggtcctagtcgacaagcacggcatggacaaagaaagatatgtctctctggtcatgccggtggccctgtttaacctgatcgatacattccctctgcggaaagaggaaatggttctccaggccgagatgtcccaaacctgcaacacctag

SEQ ID NO: 207531 - DNA, 1140 bp, synthetic construct
  misc_feature 1..1140: note = Description of Artificial Sequence: Synthetic coding sequence
  source 1..1140: mol_type = other DNA
atgggcagccccgcccaccggcccgccctgctgctgctgctgccccccctgctccttctgctcctgctacgggtacccccctccaggtccttccctggatccggcgatagccccctggaagacgatgaggtgggctattcacacccccgctataaggacaccccatggtgtagccctatcaaggttaaatacggagatgtgtactgcagggcaccccagggaggctactacaagactgccctgggaacacggtgtgatatcaggtgccagaaagggtatgaactacatgggagtagtcttctcatttgtcagagtaacaaaaggtggagcgacaaggtcatttgtaagcagaagcgatgccccacactggccatgcccgcgaacggtggatttaagtgcgtggatggagcatacttcaattcccgctgtgagtattactgttcgccagggtacactctgaagggtgaaagaacggtcacctgcatggataataaggcttggtctggtaggcccgcctcgtgcgtcgacatggaacctccacgcatcaaatgtccttcagtcaaggagaggattgccgaaccaaacaaactcaccgttagagtctcatgggaaacacccgaagggagagacaccgcagatggtattctgactgatgtgattctgaagggtcttccccccgggtctaacttcccggagggtgatcataagatacaatacaccgtctatgatcgggccgagaataagggcacctgcaaattccgtgttaaagttagagtgaaaagatgtggcaaactgaatgctccagagaacggatacatgaaatgcagtagtgatggggataattatggtgccacctgcgagtttagctgtattggcggttatgaactacaaggcagccctgcccgggtctgtcagagcaacctggcttggtccggcactgagccgacttgtgcagccatgaacgtgaatgttggggtacgaacagctgccgccctgctggaccagttttatgaaaagagacgcttgctgatcgtgagcacacccaccgcaagaaatctgctttaccgtctccagctgggtatgctccaggccgtcgccgctaatccaactttgctcctgcaatacggtgcgagcggctag

SEQ ID NO: 207532 - DNA, 1335 bp, synthetic construct
  misc_feature 1..1335: note = Description of Artificial Sequence: Synthetic coding sequence
  source 1..1335: mol_type = other DNA
atgggcagccccgcccaccggcccgccctgctgctgctgctgccccccttacttttgctcctcctgctccgtgttcctccttcccgttcctttcccgatacgccctggtgttctccaataaaagtgaaatacggggacgtttactgccgcgccccccagggtgggtattacaaaaccgccttaggaaccagatgtgatataaggtgccaaaaaggctatgagctccatggttcttctttactgatttgccagagcaacaaacgttggtctgacaaagtgatttgcaagcagaaacgatgtcccactctcgctatgccagcgaacggcggctttaagtgtgtcgatggagcctatttcaactcgaggtgtgagtattattgctcccccgggtataccctcaagggagaacgcacagtgacctgtatggacaataaggcttggtctgggcgccctgcgtcttgtgtcgacatggagccacccaggatcaagtgccctagcgtgaaggaacggatcgccgaacccaataagcttacagtccgtgtgtcatgggagacaccggagggccgagacaccgccgatggcattttgaccgatgtcatcttaaaaggactcccaccagggagtaacttcccagagggagatcataaaattcagtataccgtttacgaccgggctgagaataagggcacatgtaagttcagagtgaaggtccgcgtgaaaagatgtggcaaactcaacgcgccggagaacggctatatgaaatgttcgagcgacggggacaattacggagccacctgcgagttctcgtgcataggagggtacgagctgcagggatcgcctgctagagtgtgccagtcaaacctggcttggagcggaaccgagccaacctgcgccgctatgaatgtgaacgtgggggtgcgtacagccgcagcgctgcttgaccagttctacgaaaagcgtcgcctgttgatagtgagtacaccgacagcccggaatctgctgtacagactccaactgggcatgctgcagcaggcccagtgtgggctggacctgcgacacattactgtcgtggagctggttggcgtcttcccaacactcatcggacgcatcggagccaaaattatgccaccagctctggccctgcagctccgcctgctgctgcgtatccccctgtattccttcagcatggtcctggtagacaaacacggcatggacaaggagcggtacgtcagcctggtaatgcccgtggcgctgtttaatctcatcgatacattccctctccgaaaagaggagatggtgcttcaggccgaaatgagccaaacttgcaatacgtag

SEQ ID NO: 207533 - DNA, 1398 bp, synthetic construct
  misc_feature 1..1398: note = Description of Artificial Sequence: Synthetic coding sequence
  source 1..1398: mol_type = other DNA
atggccagccagctgacccagcggggcgccctgttcctgctgttctttctcacacccgcagtgaccccaacatggtatgccggcagcggctattacccggatgagagctataatgaggtctatgctgaggaggtacctcaagctcctgccctcgactaccgagttccgcggtggtgctacacactgaacatccaagatggagaggcgacatgctactcgcccaagggcggaaactaccatagctcccttggcaccagatgcgaactatcctgcgatcgaggatttaggctcatcggccggagatcagtgcagtgtctgccttctcgccggtggtcgggcacggcatactgtcgccagatgcgatgtcacgccctcccatttatcacctcaggaacatatacttgtactaacggcgtccttttagactccaggtgcgactacagctgcagcagcggctatcacctggaaggggaccggagccgtatctgtatggaggacggaagatggagcggcggggaaccagtgtgtgtggacatcgatccacccaagataaggtgtcctcactctcgggaaaaaatggcagagcccgagaaactgaccgcacgcgtatattgggaccctccacttgtcaaggactccgccgatggcacgatcaccagggttacgctcaggggacctgaaccagggagccatttccctgaaggggagcatgttatccgttacaccgcttacgatcgggcatacaaccgggccagctgcaagtttatcgtgaaggtgcaagtgcgccgatgtccaacgctgaaacctccgcagcatggatacctgacatgtaccagcgcaggtgataattatggcgcgacctgcgaataccactgcgacggagggtacgaccggcagggaacaccttcccgcgtttgtcagtcgagccgacagtggagcggtagtccccccatttgcgcccctatgaagattaacgtgaatgttaactccgccgccggactgctcgaccagttttacgagaagcagagactcctgataatatcagcacccgatcccagcaatcggtactacaagatgcagatatccatgcttcaacagagcacgtgcggacttgatctgcgccatgtgacaatcattgagttagtcgggcaacccccacaggaggtgggcaggatccgcgagcagcaactgagcgccaatattattgaagagttgcgacagttccaacgcctgaccaggagctactttaatatggtgctgatcgataaacaaggcatcgatagagacaggtacatggagcctgtgactcccgaagagatatttactttcatcgatgattacttactgtccaaccaagagctcactcagaggcgcgagcagagggatatatgtgaatag

SEQ ID NO: 207534 - DNA, 1452 bp, synthetic construct
  misc_feature 1..1452: note = Description of Artificial Sequence: Synthetic coding sequence
  source 1..1452: mol_type = other DNA
tgaaccttcatggtggaggacgccgtggaggccatcggcttcggcaagttccagtggaagctgtccgtgttgaccggtttagcctggatggccgacgccatggagatgatgatactctctatcctggcgccccagctgcactgcgagtggaggctgccttcctggcaggtagccctgttaacttccgtcgtctttgtcggcatgatgtctagttccaccctgtggggaaacatctcggaccagtacggcaggaagaccggcctgaagataagtgtgctatggacgctttattatgggatcctcagcgctttcgctcctgtctacagttggatactggtcctccgcgggctggtcggctttggcattggtggggttccccaaagcgtgaccctgtacgccgaatttcttccgatgaaggcccgcgcaaaatgtatactccttatcgaagtgttctgggcgattggaaccgtgttcgaggttgtactggcagtgttcgtgatgccgagtctagggtggagatggctgcttatactgagtgctgtgcctttactgcttttcgctgtgctgtgtttctggttaccagaatcagcaagatatgacgttctgtctggaaatcaggaaaaagctatagccacccttaaacgcatcgccactgagaacggagcccccatgccccttgggaagctgatcatcagccgccaagaggacaggggaaagatgcgcgatctattcactccccacttcaggtggaccacattactgctgtggttcatttggttcagcaacgccttcagctattacggcctagtgctgctgactacagagcttttccaggccggcgatgtatgcggaatctcctcaaggaagaaggccgtggaggccaagtgctctttggcgtgcgaatatctatccgaggaagattacatggaccttctgtggacgactctgagcgaatttcccggagtgcttgtcactctgtggataatagatcgactgggacggaagaaaaccatggccctttgctttgtcatcttttctttttgcagtctgttgctgtttatctgtgtgggccgcaacgtcctaaccctccttctttttatcgcccgggcctttatctccggaggatttcaagctgcctacgtgtacacacctgaagtgtaccccacagcaacccgggctctaggactgggcacatgctccggcatggcccgggtgggcgcgctgattacaccgttcattgcccaggttatgctcgagagctctgtttatttaactctggccgtgtactctgggtgttgcttgctggccgcattggcaagttgttttctgccaattgaaactaaagggcgtgggttacaggagagttctcaccgcgagtggggacaggaaatggttggaaggggaatgcacggcgctggggtgacaagaagtaactctggtagccaggagtag

SEQ ID NO: 207535 - DNA, 39 bp, synthetic construct
  misc_feature 1..39: note = Description of Artificial Sequence: Synthetic coding sequence
  source 1..39: mol_type = other DNA
atggaggaggacctgttccagctgcggcagctgccctag

SEQ ID NO: 207536 - DNA, 1023 bp, synthetic construct
  misc_feature 1..1023: note = Description of Artificial Sequence: Synthetic coding sequence
  source 1..1023: mol_type = other DNA
atggccgccggccggctgatcatcaagaccgagttcctgcccaccaagtatagaggctatatgctgccactgtcccaggtgttttggttggctggctctcttttgattattggcctggccagtgtcatcattccaaccattggttggagatggcttatcagagtggcctctattcctggcatcatactgatcgttgcatttaagtttattcccgaaagtgcccgattcaacgtctctacaggaaatacacgcgcggccctcgccacccttgagcgggtagcaaagatgaaccgcagcgtgatgcctgagggcaagctcgtggagccagtgctggagaagagggggcgctttgccgacctcctggacgctaaatacctcaggacaaccttacaaatttgggtaatctggcttggcatttccttcgcctactacggcgttattctggccagtgctgaacttctggagcgggatttagtctgtggtagcaagagtgattcagccgtggttgtgacgggcggggactcaggcgagagtcagagtccttgctattgccatatgtttgctccctccgactatcgtacaatgattatttccacaatcggggagatagctctcaatcccttgaatatcctagggatcaacttcctggggaggcgactgagcctaagcatcacaatgggatgtaccgcgctcttctttctcctgctgaatatctgtactagctccgctggactcatcggctttctgtttatgctgcgggccctggtggccgcaaatttcaataccgtgtatatatacaccgctgaagtgtatccaaccaccatgagggccctgggtatggggaccagcgggtcgttatgccggatcggcgccatggtggcccctttcattagccaagtgcttatgtctgcatccatactcggagctctttgcttattcagcagcgtgtgcgtggtctgtgccatcagcgcgttcacactcccaatcgagacaaaggggcgggccttgcagcagattaaatag

SEQ ID NO: 207537 - DNA, 1479 bp, synthetic construct
  misc_feature 1..1479: note = Description of Artificial Sequence: Synthetic coding sequence
  source 1..1479: mol_type = other DNA
atggccaccaagcccaccgagcccgtgaccatcctgagcctgcggaaattgtcgttaggtacagccgagccacaggtaaaagagcctaagaccttcacagtggaggatgcggtcgaaacaattggcttcggacgttttcatatagctcttttcttaatcatgggtagtacaggcgttgtcgaggccatggaaattatgctgatcgccgtcgttagccctgttatccggtgtgagtggcagctggaaaattggcaagtcgcactggtgacaacaatggtgttttttggttacatggtgttctccatcctgtttggacttcttgccgacaggtacgggcggtggaaaatccttctaatatccttcctgtggggcgcatatttctcactgctgacgagcttcgccccatcttatatctggtttgtgtttttacgcacgatggtcggatgcggagtgagtgggcactctcagggacttattattaagactgagttcctcccaacgaaatacaggggctatatgctacccttgtctcaggtcttctggcttgctggctcacttctaattattggcctggcctctgtgatcatccctactatcgggtggagatggctcattcgcgtagcctccatacctggcatcattttgattgttgcctttaaatttatcccagagtctgcgcgatttaacgtgagcactgggaacacccgtgccgccctagctactctcgagcgggttgctaagatgaatcggtcagtcatgccagaaggtaagcttgtggagcctgtgttggaaaagcggggtaggtttgctgacctcctggacgcgaagtatctgcggaccactctgcagatatgggtgatttggttgggcattagtttcgcttactacggcgtcatccttgcctccgctgaactgctggaacgggatctcgtttgtgggagcaagagcgactcagccgtcgtggtgaccgggggagactcgggagaatctcagagtccctgttattgtcatatgttcgctccttctgactacaggacgatgatcataagtaccattggcgaaattgccctcaatcctctgaacatcctgggcattaactttcttggtagaagactctccctgtcaattaccatgggctgcacagctcttttctttttacttctgaatatttgtaccagctcagcgggactgatcgggtttctgttcatgctcagagctttagtggccgcaaatttcaacacagtgtacatttacaccgcagaggtatatcccaccaccatgcgcgctctggggatggggacatccggttctttgtgccgcatcggagccatggtcgcacccttcatatctcaagtgcttatgagcgcctctatcctgggcgcactttgcctgttctcatcagtgtgtgtggtttgcgcaatcagtgccttcaccctcccgattgaaacgaagggtcgagctctgcagcagatcaaatag

SEQ ID NO: 207538 - DNA, 1023 bp, synthetic construct
  misc_feature 1..1023: note = Description of Artificial Sequence: Synthetic coding sequence
  source 1..1023: mol_type = other DNA
atggccgccggccggctgatcatcaagaccgagttcctgcccaccaagtacaggggatatatgcttcccttgtcccaggttttctggctggccgggtccctgttaattatcggtcttgcctctgtgattatccccacaatagggtggagatggcttatacgggtggcctctattcccggcataattctgatagtagcttttaaattcataccagagtccgctcgtttcaatgtcagcactgggaatacaagggccgctctggccaccctcgagcgagtggcaaagatgaatagatcagtgatgcccgagggaaagctggtcgaaccagtgctggaaaagcgaggcaggtttgcagacctgttggatgccaagtacctgagaaccacactgcagatttgggtcatttggctgggtatttcttttgcctactacggtgtcattctcgcctctgcagaactgctggaacgagatctggtgtgcgggagcaagtccgattcagcagttgtggtgacaggcggggactccggtgaaagtcagtcgccctgctactgccacatgttcgctccgtctgattaccgaactatgatcattagtaccatcggcgaaatcgccctgaacccgcttaacatactcggcatcaactttctcggccgcaggctgtctctgagcatcaccatggggtgcaccgcccttttttttctgctcctaaacatttgcacctcttccgccgggcttatcggttttctattcatgctgagagctctggtagccgctaacttcaataccgtttatatttacactgccgaggtctaccccaccacaatgagagctctgggaatgggcacttccggttctctatgccgcataggtgccatggtggcgccctttatcagccaggttctgatgtctgcatcgatcctgggtgcactctgtcttttcagcagtgtctgcgtcgtctgcgccatctccgcattcaccctgcccatcgagacaaaggggcgagccctgcagcagataaaatag

SEQ ID NO: 207539 - DNA, 1758 bp, synthetic construct
  misc_feature 1..1758: note = Description of Artificial Sequence: Synthetic coding sequence
  source 1..1758: mol_type = other DNA
atgggcagcctgaaggaggagctgctgaaggccatctggcacgcctttaccgcactggaccaggatcattccggaaaggtgtccaagagccagcttaaagtcctgtcacataacctgtgtacagttttgaaggtaccccacgaccctgttgccctggaggaacacttccgagacgatgacgaagggccggtgagcaatcaggggtatatgccctatttgaatcgatttattttggagaaagtgcaggataactttgacaaaattgaattcaataggatgtgctggactttgtgcgttaagaaaaacttaacgaagaacccattactcataaccgaggaggatgcattcaagatttgggtgatttttaactttctgtcagaggacaagtaccctcttatcatcgtgtcggaagagatcgagtacctcctgaagaagctgacagaggcgatgggcggaggctggcagcaggaacagtttgagcattacaaaattaattttgacgatagtaagaatgggctttcagcttgggaacttatagagctgattggtaacgggcagttcagtaagggaatggatcgccaaactgtgtccatggcgattaacgaagtgttcaatgagctgatcttagatgtacttaagcagggctatatgatgaaaaaagggcatcgaagaaagaactggaccgaaaggtggtttgttctaaagcctaacatcatttcctactatgtgagcgaggacctgaaagacaagaagggtgacatactactagatgagaattgctgcgtggaatctttgccagacaaggatggtaagaaatgtctgtttctggtgaagtgctttgacaagacattcgagatttctgcttccgataaaaagaagaaacaggaatggatccaggctatccattcaaccattcatctgctgaagctcggatctcccccaccacacaaggaggcccgacagaggcgcaaagagcttcggaagaaacagctggccgagcaggaggaactggaacggcagatgaaggaactccaggccgcaaacgaatcaaaacagcaggagctggaggccgtgcgaaagaaactcgaggaggccgctagcagggcggccgaagaggaaaagaagcggcttcagactcaggtggaactccaagcaaggttctccacggaattggagcgggagaaacttattcggcagcagatggaggagcaagttgcccagaaatcatccgagttggagcagtatctgcagcgggtccgggaactggaagatatgtacctcaagcttcaggaagcgctggaagatgaacggcaagcacgccaggacgaagagacggtccgcaagctccaggcgcgactgctggaggaagaaagcagcaagcgtgctgagctggagaagtggcatctcgaacaacagcaggccattcagaccacagaggcagaaaagcaggagctggagaatcagcgagtgctgaaagagcaagcgctccaagaagccatggagcaacttgaacagctggaattggagaggaagcaggcccttgagcagtacgaggaggtcaaaaaaaaactcgaaatggctacgaacaagactaagagttggaaagacaaggtggcccaccatgagggtctgatcagactgattgaaccagggtcaaagaaccctcacctgattactaactggggcccagcagcttttacggaagcagagcttgaggagcgcgagaaaaactggaaggaaaaaaagacaacggagtag

SEQ ID NO: 207540 - DNA, 3129 bp, synthetic construct
  misc_feature 1..3129: note = Description of Artificial Sequence: Synthetic coding sequence
  source 1..3129: mol_type = other DNA
atggagcaggacaccgccgccgtggccgccaccgtggccgccgccgacgctacagccacaattgtggtcatagaagatgagcagccaggaccaagcacttcacaagaagaaggcgcagcagcagccgctaccgaagccaccgccgctacagagaagggtgagaagaaaaaagagaagaacgtgtcaagcttccagctcaagctagccgcaaaggcaccaaagtccgagaaggagatggatcctgagtacgaagagaagatgaaggctgaccgtgctaagcgtttcgaattcctcttgaaacagactgagcttttcgctcacttcattcagccatcagcccagaagagcccaacctcccccctgaacatgaaactgggaagaccacgaatcaaaaaggatgaaaagcagtccctgatttcagccggcgactaccgacacagacgtacggagcaggaggaagacgaagagcttttatctgaatccaggaagacatcgaatgtgtgcatcagatttgaggtgtccccgtcctacgtgaagggcgggcctctacgggactaccaaatccgcggactgaactggctaatttcgttgtatgagaacggagtcaacggaattctcgcagatgagatggggctgggtaaaaccctacagacgattgccttgctgggctatctgaaacactatcgaaacattccaggcccccatatggttctggtgcctaaatccacacttcataactggatgaatgagttcaagaggtgggtaccttcgctccgggtgatatgtttcgttggggacaaagacgctcgcgccgcttttatccgggacgaaatgatgcccggtgagtgggacgtatgcgtgacctcctatgagatggtgatcaaggagaagtccgtgtttaagaagttccattggcgttacctggtgatagacgaggctcatcggataaagaatgaaaaatctaaactctcagaaatagttcgggaatttaaatctactaacaggcttcttctgaccggaacacccttgcagaataatctccatgaattgtgggccctgctgaactttctcctgccagacgtgttcaattccgccgatgacttcgattcatggttcgatactaaaaactgtctgggggatcagaagttggtggagcgcctccatgctgttctgaagccattcctgttgcggcgcattaaaacagacgtcgagaaatcactgcccccaaagaaggaaattaagatctatcttgggctgagcaaaatgcagcgggagtggtatacaaaaatcctgatgaaagatatagatgtgttaaactcctccgggaaaatggacaagatgaggcttctgaacatccttatgcagttgaggaagtgctgcaaccacccctatctgtttgacggtgctgagccagggcccccctatacaaccgatgaacacattgtgtccaattccggcaagatggtggtgctggacaaattactcgctaaactcaaggaacagggcagtcgagtcctgattttctcccaaatgactcgactgctagatatcctggaagactattgtatgtggcgtggatacgaatattgccgtctggacgggcagaccccccacgaggagcgcgaagaggccattgaggctttcaacgcccccaactcttctaaattcatcttcatgctgtccacaagagcaggggggctgggtatcaacctcgcgtcggcagatgtcgttattctatacgattcagattggaaccctcaagtcgacctccaggccatggaccgagcccatcggatcggtcagaaaaaaccagtccgagtcttccgattgattacggacaataccgttgaggaaagaatagtggaaagagccgaaatcaaattacgcctggactccatcgtgatccaacaaggcaggcttattgaccagcagtcaaacaagctcgccaaagaagagatgcttcagatgattaggcatggcgccacacacgtgtttgcctcaaaggaatctgagcttaccgatgaggatatcacaactatcctggagcgcggtgagaagaaaacagcagagatgaacgagcggttacaaaagatgggggaatccagtttacgcaatttccgaatggacattgagcaatccctgtacaagttcgaaggggaagactatcgggagaaacaaaaactcggcatggtcgaatggatcgaacctcccaaacgggagagaaaagctaattacgccgtcgacgcatactttcgtgaagccctgagggtgtcagaaccgaaaatacccaaggcccctcgtccaccaaagcagccaaacgtgcaggactttcagttcttcccacccagactatttgagctcctggaaaaggaaattctctattaccggaaaacaatcggttacaaggtgcctcggaatcctgatattccaaatccggcgctcgcccaacgcgaggaacagaaaaaaatagatggagctgaaccactgacaccagaagagacagaagagaaggaaaagcttctaacccaagggttcaccaactggacaaagcgagatttcaatcaatttattaaagcgaacgaaaagtatggccgggacgacatcgacaacattgcccgggaggtggagggaaaaagcccggaagaggtcatggagtacagcgccgttttctgggagcgctgcaatgagctgcaagatatagagaagataatggcccagattgagagaggtgaagctaggatccagcgacggatttctattaagaaggccttggacgcaaaaatagcacgctacaaggcgcccttccaccagctgaggattcagtatggaaccagcaagggtaagaattatacagaagaagaggataggtttctcatctgtatgctgcacaagatgggatttgaccgagagaatgtatatgaggagttgagacagtgcgtccggaatgctcctcagttccgattcgactggttcattaaatcaagaactgccatggagttccagcgccgatgtaatacattaatctctttgattgagaaagagaatatggagattgaggaacgcgagcgagccgagaagaagaaacgggccacgaagacacccatggtgaagttcagtgccttttcgtag

SEQ ID NO: 207541 - DNA, 3165 bp, synthetic construct
  misc_feature 1..3165: note = Description of Artificial Sequence: Synthetic coding sequence
  source 1..3165: mol_type = other DNA
atggagcaggacaccgccgccgtggccgccaccgtggccgccgccgacgcaacggctacgatcgtggtgatagaagacgagcagcccggcccttctacatcacaggaggaaggtgccgctgccgccgctacagaggccacagccgctactgaaaagggcgagaagaagaaggaaaaaaatgtgagcagtttccagcttaagctagctgctaaagctccaaagagcgaaaaggagatggaccctgagtacgaagagaaaatgaaagcagacagagccaagagattcgagttcttgctgaagcagaccgagctgttcgctcactttattcagccctccgcccagaagtcaccaacctcacctttgaatatgaaactgggcagacctaggattaaaaaggacgagaagcagtcactgatcagcgccggtgactacaggcaccgccgcacagagcaagaggaagacgaggaactcttgagcgagtccagaaaaactagcaacgtgtgcatccggttcgaggtctccccaagctatgtcaaagggggcccgctgcgggactaccagatccggggcctgaactggcttatcagcctgtatgaaaacggcgtcaatggcatcctggccgacgagatgggcctgggaaagacccttcagacaatagctctgttgggctaccttaagcattatcggaacatccccggccctcacatggtgctcgttccaaagtctaccctgcataattggatgaatgagtttaaacgctgggtgccaagcttacgtgtcatatgcttcgtcggggacaaggatgccagagcagcttttatccgggacgagatgatgcccggggaatgggacgtgtgcgtgaccagttacgaaatggttataaaggaaaagagcgtgttcaagaagtttcactggcggtacttagttattgatgaggcccatcgcatcaaaaacgagaaaagcaagctcagcgaaatcgtccgggagtttaagtcaacaaatcgtttgttgctgaccggtactcccctccagaacaacctccacgagctgtgggccctcctgaactttctgctgccggacgtttttaatagtgctgatgacttcgactcttggtttgacactaagaattgtttaggtgatcagaaattagtcgaacggttacatgcagtcctaaagccattcttgctgaggcgaattaagactgacgttgagaaaagtcttccacccaagaaggagattaaaatttaccttggactcagcaagatgcagcgcgaatggtatacaaagattttaatgaaagacatcgacgtgctgaattccagcggaaagatggacaaaatgcgcttacttaacattctcatgcaactcagaaaatgctgtaaccatccctatctgtttgacggcgctgaacctgggcctccgtatactactgacgaacatatcgtgtccaattctggcaagatggtggtgcttgataagctgttggcaaaactcaaggagcagggctcacgggttttaattttcagtcagatgacgcggctgctcgatatactcgaggactattgtatgtggagggggtacgagtactgcagactggacggacagaccccgcatgaggagcgggaagacaagttcctggaagtggaatttctaggacagagagaagcgattgaggcttttaacgccccaaactcttccaagttcatttttatgctctcaacaagggctggtggactgggcataaacctggcttccgccgacgtggttattctttatgactcagattggaatccgcaagtggacctgcaggctatggaccgggcccaccgtatcggacagaaaaaaccagtgcgggtctttaggttgattactgataacaccgtggaagaacgtatcgtggagagagctgaaatcaagttgcgactcgactccatagtgattcaacagggcagactgatcgatcagcagtctaacaagcttgccaaggaggaaatgctccagatgatccgccacggtgccactcatgtgttcgcatccaaagagtccgagctaaccgacgaggacatcactacaatcttagaaagaggagagaaaaagactgccgagatgaatgagaggcttcagaagatgggggaatcctctcttcgcaacttcaggatggacattgagcaaagcctttataagtttgagggagaggattaccgcgaaaagcagaaactcggcatggttgagtggatcgaacccccaaagcgggagcgcaaggcaaattatgccgtggatgcctactttagagaggccttgcgggtcagtgagccaaagattcctaaggcccctaggcctcccaagcagcccaacgtgcaggatttccagtttttcccaccccgtctcttcgaactattagaaaaagagattttgtattaccgaaaaaccatcggctataaggttcccaggaaccccgatatccccaaccccgcactagcacaaagagaggagcagaagaaaatagacggcgcggaacctctaactcccgaggaaactgaagagaaggagaaactgctgacccagggctttaccaattggacgaaacgcgactttaatcagtttatcaaagcaaatgagaagtacggcagagacgacatagacaacatagctagggaggtcgagggcaagagtcccgaagaagttatggaatatagcgccgtgttctgggagagatgcaacgaacttcaggatatagagaaaattatggcacaaatcgaaaggggagaagcaagaattcagagaaggatcagcatcaaaaaggctctggacgctaagatcgcccgctacaaagccccctttcaccagttgagaatccagtatggcacttctaagggaaagaactacaccgaggaagaggaccggttcttaatctgcatgttgcacaagatgggcttcgacagagaaaacgtgtatgaggagctgagacaatgcgttagaaacgcaccacagtttcggtttgactggttcataaagagccgcacagctatggagtttcagcgccgctgtaatacactgattagcttaatcgaaaaggaaaatatggaaattgaggagagggaaagagccgagaagaagaagcgtgctaccaagacacccatggtgaagttctcggcctttagctag

SEQ ID NO: 207542 - DNA, 3129 bp, synthetic construct
  misc_feature 1..3129: note = Description of Artificial Sequence: Synthetic coding sequence
  source 1..3129: mol_type = other DNA
atggagcaggacaccgccgccgtggccgccaccgtggccgccgccgatgcaacagccactatagtggttatagaggatgaacagcctggaccatcaacaagtcaggaggaaggtgccgctgccgcggcaaccgaggcgacagccgcaacagagaagggagagaagaaaaaggaaaagaatgtatcctcttttcagctgaaactcgccgcaaaggctcccaagtctgaaaaggagatggaccccgaatatgaggagaaaatgaaggctgatcgagctaagagattcgagttcctgctcaaacaaaccgaattattcgctcatttcatccagccttccgcccaaaaatctcctactagtccactcaacatgaagctcggacgcccccgcataaagaaggatgagaaacaaagcctgatctcagctggtgactaccgacacagacgtacagaacaggaagaggacgaggaactattgagcgagtcccggaaaactagcaacgtgtgcatcaggttcgaggtgtctccgagttatgtgaagggcggaccgctgagggactaccaaattcgcggcctgaactggctaatctcactttatgagaacggggtgaacggaatcctcgcagatgaaatgggtcttgggaagactttgcaaacaatcgccttgctggggtacctaaagcattaccgcaacattccaggaccccacatggttcttgtcccgaagtcaaccctccacaactggatgaatgagtttaagagatgggtgccaagcctgcgcgttatctgcttcgtgggagacaaggacgcccgggccgctttcatccgcgatgagatgatgccaggcgaatgggacgtctgtgtgacctcctacgagatggtgatcaaagaaaagtcagtgttcaagaagtttcactggcgctatttggtgatcgatgaagcccaccggatcaaaaatgaaaaaagtaagctctctgagatagtgcgggagttcaaatccaccaaccgcctgctgttaacaggaacgcccctacaaaacaatctgcacgaattatgggctttgctgaatttcctgctccctgatgtattcaacagcgccgacgatttcgattcctggtttgataccaaaaattgcctgggggaccagaaacttgtggagaggcttcatgctgtgcttaagccttttctgttgaggcggatcaaaacagatgtggagaagtcgctacccccaaagaaagaaattaagatctatctaggtctttctaagatgcagagagagtggtacacaaagatcttaatgaaggacatcgatgtgctgaattcttctggcaagatggataaaatgcgactccttaatattctgatgcagctgaggaagtgttgtaaccacccgtatttgtttgatggggcagaacccggtcccccctacacaacagacgagcatatagtcagcaattctggcaaaatggtcgttctggataagctgctcgcaaaactgaaagaacagggttcacgggtgctcatttttagccagatgacccgcctgctggacattctggaggactactgcatgtggcggggatacgagtactgcaggctggacgggcagacccctcacgaggagcgcgaggaagccattgaagcatttaacgctcctaacagttccaaattcatatttatgctctcaacccgggcaggcggactgggtataaatctcgcctccgcagacgtcgttatcctgtatgacagtgactggaaccctcaggtcgatctgcaggcaatggatcgagcccacagaatcggacagaagaagcctgtgcgggtttttcggttaattaccgataacaccgttgaggagagaatagttgagagagcggagattaagttgaggttagacagcatagtgatccaacaagggcggctgatcgaccagcaatcaaataaacttgctaaggaggagatgttacagatgattaggcatggggcaacacatgttttcgcatcaaaggaatccgaactgacagatgaggatatcaccacgatcctcgaacggggtgaaaagaaaaccgccgagatgaatgaaaggttacagaaaatgggggaaagctcactgagaaattttaggatggacattgaacaaagcctgtacaagttcgagggtgaggattacagggagaagcagaaactgggtatggtggagtggattgagccgcctaagcgcgaacggaaggctaactatgctgtggatgcctactttagggaagcccttcgagttagcgagcccaagataccaaaggctccacgccctcccaagcaacctaacgtgcaggatttccagttttttccgccccgtcttttcgaactgttggagaaggagattttatattataggaagacgatcggatataaggtcccacgaaatcctgatatccccaaccctgcacttgcccaaagagaagagcaaaaaaaaatcgacggcgccgagccacttacccccgaagagactgaagagaaagagaaactactgacccaggggttcaccaattggacaaagagggactttaaccaatttattaaagccaacgagaaatatggccgggatgacatcgataacatcgcgagggaagtggagggcaagagccccgaggaggtgatggagtacagcgcggtcttttgggaaagatgtaacgaactgcaggacatcgagaaaatcatggcacaaattgagcggggtgaggctcgaatccagcgccggatcagcatcaaaaaggctctagatgcaaaaattgctcggtacaaagcacccttccaccagctgcgcattcagtatgggacctctaaaggtaaaaactataccgaagaggaagatagattcctgatttgtatgctgcacaagatgggattcgacagagagaacgtgtacgaggagctgcggcaatgcgtgagaaacgccccacagtttcggttcgactggttcatcaagtcccgaactgcaatggaattccagcgccggtgcaacacacttatcagcctgatagagaaggaaaacatggagatcgaggaacgggagagggccgagaagaagaagagagcaaccaagaccccaatggtgaagtttagcgccttctcatag

SEQ ID NO: 207543 - DNA, 3018 bp, synthetic construct
  misc_feature 1..3018: note = Description of Artificial Sequence: Synthetic coding sequence
  source 1..3018: mol_type = other DNA
atggagcaggacaccgccgccgtggccgccaccgtggccgccgccgacgccaccgcaacgatcgttgtgatagaagatgagcaacctggtccttccactagccaggaagaaaaaaatgtctcatccttccaactcaagctcgcggcaaaggcccccaaatcagaaaaagagatggatcctgagtatgaagaaaaaatgaaggccgaccgagccaagcggttcgagttcctactgaaacagacagagctgtttgctcacttcattcagccttccgctcagaagagcccgacgtcacccctcaatatgaagctgggacggccgcgaattaaaaaggacgagaagcagagcctcatctcagctggtgactacagacatagacgcactgagcaggaagaggacgaggaacttctgtctgagtcacgaaagaccagtaatgtgtgtatccggtttgaagtatctccatcttacgtgaaggggggccctcttagagactatcagatcaggggcctcaactggcttatttcattgtatgaaaacggggttaatggcatcctcgcagatgaaatgggtttggggaaaacccttcagacaattgctctcttaggctaccttaagcactatcgcaatattccagggccccacatggtgcttgtgcctaagagcacgttacacaactggatgaatgaatttaagagatgggtgccatctcttcgtgtgatctgcttcgttggggataaggatgcaagagccgcctttattcgggatgagatgatgccaggtgagtgggacgtttgcgttacctcatacgagatggttatcaaggagaagtccgtttttaagaagttccactggcggtatctggtgatcgacgaagcccaccgcatcaaaaacgagaaaagtaaactttctgagattgtgcgagaattcaagtctaccaaccgacttctactcacgggcactcccctgcagaataacctgcacgagttgtgggccctgctgaatttcctcctccctgatgtatttaattcagccgatgatttcgactcgtggtttgacactaagaattgtctaggggaccagaaattagttgaacggctgcacgctgtcttgaagcccttcttgctccgccgtatcaagacagacgtggagaagtccttacctcctaagaaagagatcaaaatttatctgggactgtcaaaaatgcagagggagtggtacacaaagattctgatgaaggacatcgatgtactaaatagcagcgggaaaatggacaaaatgcgtctgcttaacattttgatgcagcttcgtaaatgttgcaaccacccctacctctttgacggggccgagcctgggcctccttacacgaccgacgaacatattgtgagcaacagcggcaaaatggtggtgttagacaagctcctggccaagctaaaagaacagggcagtagagtactcattttttctcagatgacacgcctgcttgacatccttgaggattattgcatgtggcgcggctatgagtactgcagattggatggccagaccccgcatgaagaaagggaggataagtttttagaggtggagtttcttggccaacgggaagcgatcgaggccttcaatgcaccgaactcttcaaaattcatattcatgctgtccactcgagccggtggccttggcatcaatctggccagtgccgatgtggtaattctatacgactctgactggaatccccaggtagacttgcaagcaatggaccgcgcacatagaatcgggcagaaaaaacccgtcagggtcttcaggcttatcactgacaacacagtcgaagaacgtattgtggagcgggccgaaattaagctacgtctagactcgattgtgatccagcagggcaggttgatcgatcagcagagcaataaactggcgaaggaggaaatgttgcaaatgataaggcatggtgctacccatgtcttcgccagtaaggagtccgagctgaccgacgaggacattacaacgatcttggagcgtggggagaaaaagaccgcggagatgaacgaacgactgcagaaaatgggtgagagttctctgcgaaactttagaatggatattgaacagagcctctataagttcgagggcgaggactacagagagaaacagaaactggggatggtcgaatggatagagccccccaaaagggagaggaaggcaaattacgccgtggacgcatatttccgagaggcactccgggtgtccgagcccaagatcccaaaagcccctagaccccctaaacagccaaacgtccaggactttcaatttttcccccctcgattatttgaactactcgagaaggaaatcctgtactatcgcaaaaccattggctataaagttccaaggaacccagacatacccaatcccgctttagcgcagagagaggagcagaagaagattgacggcgccgagcctctcacacccgaggaaaccgaggagaaagaaaagctgctcacccaaggattcacaaactggaccaagagagactttaatcagttcatcaaggctaatgaaaaatacggacgggacgatatcgacaatatagcccgggaggtagaggggaagtcacctgaggaagtgatggagtactccgcagtgttctgggaacgctgtaatgaactccaggacatcgaaaaaataatggcccagatcgagcgcggagaagctaggatccagcggagaatatcaatcaaaaaagcactggacgccaaaatcgcccggtacaaagcacccttccatcagttgcgtatacagtatgggacatcgaagggcaaaaactacacagaagaggaagaccgctttctgatctgcatgttgcataaaatgggtttcgatcgggagaacgtgtatgaagagctccgccagtgtgtgaggaatgcaccccagttccgcttcgactggtttatcaaatctcggacagccatggagtttcagcggcgctgtaacacgctgataagccttattgagaaggagtag

SEQ ID NO: 207544 - DNA, 837 bp, synthetic construct
  misc_feature 1..837: note = Description of Artificial Sequence: Synthetic coding sequence
  source 1..837: mol_type = other DNA
atgctgatgaagcggctggccgcccggtgcttcgccggcctgctgatcctgtcccccctgacagtcataagcgacagcagacctgccgatagtggcaaagcaattgaagacggaaatcttgaagagatggaagaggaagtccgccttaagaagcgtaaacgacgccgcaacgtggataaagatcctgccaaggaagacgtcgaaaaagctaaaaaaaggagaggacgcccacccgccgagaagctgtctccgaatcccccaaaactcacgaaacaaatgaatgccattatcgacacagtcatcaactataaggactcatctggaagacagctcagcgaggtttttatccaactgccatctagaaaagagcttccggaatactatgaactcattaggaaaccagtggacttcaaaaagataaaagagaggattagaaatcacaagtacaggtctttaggcgatctagagaaggatgtaatgctgctttgccataatgcgcagacatttaacctggaggggtcccagatctacgaagactctatcgtgctgcagagcgttttcaagtcagcccggcaaaagatcgccaaagaggaggaatccgaagacgaatccaacgaggaggaggaggaggaagatgaggaggaaagcgagtcagaggccaagtccgtgaaagtgaagataaaactgaataagaaagatgacaagggacgcgacaagggcaagggaaagaagcgccctaatcgcggcaaagcaaagcctgttgtttctgacttcgattccgacgaggagcaagatgagcgggagcagtcagagggctccggaacagacgacgagtag

SEQ ID NO: 207545 - DNA, 711 bp, synthetic construct
  misc_feature 1..711: note = Description of Artificial Sequence: Synthetic coding sequence
  source 1..711: mol_type = other DNA
atggaggaggaggtgcggctgaagaagcggaagcggcggcggaacgttgataaagacccggccaaggaagatgttgagaaggcaaagaagcggcgggggcgtcccccagctgagaagttgagcccgaatcccccgaagctaaccaagcaaatgaatgcgatcattgatactgtcataaattacaaggattcaagcggccgacagctctccgaggtgtttatccagcttccatcccggaaggagctcccagagtattatgagctcatccgaaaacctgtggactttaagaaaataaaggagcgtattcgcaatcataagtacagatcacttggagacctcgagaaagatgtgatgcttttgtgccacaacgcccagacctttaatctggaaggctcccagatctacgaagatagcattgtccttcagagcgtgttcaaatcggcccggcaaaagattgcaaaggaagaagagagtgaggacgaatctaatgaggaagaagaggaggaagacgaggaagagtccgaatcagaggcaaaaagcgtgaaagtgaagatcaaacttaacaaaaaagacgacaaggggcgagataaaggcaaagggaagaaaagacctaacagaggtaaagctaagcccgtggtctccgacttcgatagcgacgaggagcaggatgagcgtgagcaatcagaaggtagtggaaccgacgacgaatag

SEQ ID NO: 207546 - DNA, 4773 bp, synthetic construct
  misc_feature 1..4773: note = Description of Artificial Sequence: Synthetic coding sequence
  source 1..4773: mol_type = other DNA
atgagcacccccaccgaccccggcgccatgccccaccccggcccctctcccggccctggcccgtctcccggacctatccttggaccgagcccaggcccggggccatcccctggcagtgtccatagcatgatgggccccagtcccggacccccgtcggtttcacatcctatgccaactatgggttcaaccgacttcccacaggagggtatgcatcagatgcacaagcccattgatgggattcatgataagggcattgtcgaggatattcactgcgggtccatgaaaggcactggtatgcggcccccccacccagggatggggcctcctcaaagtcctatggaccaacactcccagggctacatgagccctcatccgtcgcctctgggggccccagagcacgtgagcagcccgatgtcaggcgggggtcctaccccgcctcaaatgccacctagtcagcctggggcattgattcccggcgatccccaagctatgtcccagcctaacaggggcccgtctcccttcagtcctgtccagctgcatcagcttcgagctcagatcctcgcctacaaaatgctggctaggggtcagccacttcccgagacactgcagctggcggtacagggaaagcgtaccctcccagggttacagcagcagcagcaacagcaacaacaacagcagcagcagcagcaacagcagcagcagcagcagcaacagcctcagcagcaaccccctcagcctcagacccaacagcaacaacagccagctctggtgaactataatcggcctagcggacctggacctgaactctctgggcctagtacaccccagaaacttccagtgcctgccccaggagggaggcctagtcctgccccaccggccgctgcgcagccccctgccgccgcggtaccgggtccatcagtgccgcagcctgctccagggcaaccgagccccgtgctccaactgcaacagaagcagtctcggataagccccatccagaagccccagggactcgatcctgttgaaatcttacaggagagggagtataggctgcaggcaaggatagcgcacagaatccaggagttagaaaatctccccggtagcctaccaccagacttaaggacaaaagcaacggttgaattaaaagcgctcaggcttctaaatttccaacggcagctgcgacaggaagttgtcgcctgcatgagaagagacactactctggaaacggctctgaattcaaaggcctacaagaggagtaagcggcagaccctcagggaggctcgtatgaccgagaagctcgagaagcagcagaagattgaacaggaacgaaagagaagacagaagcaccaggagtacttgaacagcattctgcagcatgcaaaagattttaaggaataccacaggtctgtcgccggcaaaattcaaaagttaagtaaggccgtggcaacttggcatgctaacactgaaagggaacagaaaaaggagaccgagagaattgagaaggaacggatgaggcgccttatggccgaggatgaagagggctacaggaaactgatagaccaaaagaaagaccgccggctggcttatctcctgcaacagaccgacgagtacgtcgctaatttaaccaatcttgtttgggagcacaaacaggcccaggcagcaaaagaaaaaaagaagcggcgcaggcggaaaaagaaggcagaggaaaacgccgaggggggagaatccgcccttggaccagacggcgagcccattgacgaatcaagccagatgtcagatcttccagtcaaagtgacacataccgaaacaggaaaggtgctttttgggcccgaggcgccaaaggcttctcaattagacgcctggctcgagatgaatcccggatatgaagtcgcgcctcggtccgattctgaggaatcggactctgactatgaggaagaagacgaagaagaggagagctcaaggcaggagacggaagagaaaatcctcttggatcctaacagtgaggaggtatcagaaaaggatgccaaacaaatcatcgaaaccgccaagcaagacgtggatgacgaatactcaatgcagtattccgcccgcggatcacaaagctactacaccgtggcacacgctatttccgaacgggtcgagaaacagagcgctctcctgattaacgggacactgaaacattatcaactccaggggctcgaatggatggtcagcctatacaacaataacctgaacggcatcctcgccgacgaaatggggctcggaaaaactatccagacgatcgctttgatcacgtatctgatggaacataaaagacttaatggaccctacttaatcattgtccctctgagcacactttcaaattggacttacgagttcgacaagtgggctcctagcgtggtgaaaatttcttacaagggcacccccgccatgcgccgatccctggttccacaactcagatccggaaaattcaatgtgctcctgactacttatgagtacattataaaggacaaacacattctggccaagattagatggaagtatatgatagtggacgaagggcacaggatgaagaaccatcactgtaagctcacccaggtgctgaatacacattacgtcgcgccgcgccgtattctgctgacgggaaccccacttcagaataaactccccgagttatgggccttgctcaattttctgcttcctacaatttttaagagctgttcaacttttgagcagtggttcaacgccccattcgcaatgacaggggagcgcgtggacctcaacgaggaagaaacaattctcataattcgccggctgcataaggtgctgagacctttcctgctccgacggcttaaaaaggaagtggagtcccagcttcccgagaaagtggagtacgttattaagtgcgatatgtctgccttgcaaaagattctgtatcggcacatgcaggcaaagggcatactgctaactgacggcagcgaaaaggacaaaaagggaaaagggggcgctaaaacgttgatgaatactatcatgcagctgaggaaaatctgtaaccacccgtacatgttccagcatatcgaggaatccttcgccgagcaccttggatactccaatggagtgatcaatggggcagagctctaccgggcctctggcaaattcgaactgctcgacaggattctgcccaagttgagagcaacaaatcaccgcgtgctgctgttttgtcaaatgaccagcctgatgactatcatggaggactacttcgccttcaggaacttcctgtatctgagactggacggcactaccaagtccgaagatcgtgcggctctgctgaaaaagtttaacgaacctggcagccagtacttcatcttcctgctttctactagggctgggggcctaggactgaatttacaagctgccgacacagtggtaatatttgattccgattggaatccacatcaggacctgcaggcccaggacagggcccatcgaataggtcagcagaacgaggtacgcgttctgcggctgtgtaccgtaaattcagtggaggagaaaatcctagccgccgcgaagtataagctgaacgtcgatcagaaagtgattcaggcgggaatgttcgatcagaagtccagtagtcacgaaagacgagcgttcctgcaggctatcttggaacatgaggaggagaacgaagaagaggacgaggttcctgacgatgaaactttgaatcaaatgatcgcacggcgggaagaagagtttgatctctttatgaggatggatatggatagaaggagagaggacgcccggaacccaaaacgaaagcccaggctgatggaagaagacgagcttccttcatggattattaaagacgatgccgaggtggagcgtctgacatgcgaggaagaggaggagaaaatttttggcagaggatccaggcagagacgcgacgtcgactactctgatgccctcacggagaagcagtggctgcgcgcaatcgaagacggaaaccttgaagagatggaggaagaggtgcgcctcaaaaaacgcaagcgcaggaggaacgtggataaggatcccgcaaaagaggatgttgagaaggctaagaagaggaggggccgcccaccagcggagaagttaagccctaacccccccaagctgactaaacagatgaacgccattattgataccgtcataaactataaggatcggtgtaacgtggaaaaagtaccgtctaatagccagctggagatcgaaggcaacagttcgggaaggcagttgtctgaagtatttattcagctaccaagccgtaaagagttgccagaatactacgaactaatccggaagcctgtggatttcaaaaagattaaagaacgcattcgcaaccacaagtacagaagtttgggggatctcgaaaaagatgtgatgctgctgtgtcacaatgcccagacattcaacttagagggatcgcaaatctatgaggacagcatcgtgctgcaaagtgtatttaagagcgcccggcagaagatcgccaaggaagaggaatccgaagatgaaagcaatgaagaggaggaggaagaggatgaagaggagtccgaatcggaagcaaaatctgtgaaggttaaaatcaaattaaacaaaaaagacgacaagggccgcgataagggcaaaggcaagaaaaggcctaatagagggaaggcaaagccggtcgtaagcgactttgattccgatgaggagcaggacgaaagagagcagagtgagggctcaggaaccgatgacgagtag

SEQ ID NO: 207547 - DNA, 4719 bp, synthetic construct
  misc_feature 1..4719: note = Description of Artificial Sequence: Synthetic coding sequence
  source 1..4719: mol_type = other DNA
atgagcacccccaccgaccccggcgccatgccccaccccggcccctcgccaggtcctggcccctcccccggcccaattttgggacctagcccgggccccgggccgagccccggctctgtccattctatgatgggaccaagccctggacccccctcagtcagccacccaatgcccacaatgggcagtactgatttcccccaggagggaatgcaccaaatgcacaagcctatcgatggaatccacgataaaggtatcgtcgaagatatccactgcggatctatgaaaggtacaggaatgagacccccgcacccaggcatgggccctccccagtcccccatggaccaacacagtcaaggttatatgtcaccacatccttctccgctaggggcacctgaacatgtttcctcgccaatgagcggcggcggacccaccccaccacagatgcctccctcccaacctggcgccttaattcctggtgacccacaggctatgtcccaacccaaccgcggaccttcgcccttctcgccagtgcaactgcaccagcttcgggctcaaatactggcctacaaaatgctcgccagaggacagcctcttccagagacactccaattggcagttcaggggaaaaggaccctgcccggcctgcaacaacagcagcagcagcaacagcagcagcagcagcagcaacaacagcaacagcagcagcagcaacagcctcaacagcagccaccacaaccacagacacagcagcaacaacaacctgcgttggtcaattacaatcgcccgtcgggacccggtccagaactcagcgggccatcaactccacagaaattacccgtgcctgcacccggtgggcggcccagccccgcccctccggcagcagcacaacctcccgctgccgcagtaccaggtccctccgtgccgcagcctgcccccggtcagccttcccctgtgctgcaattgcagcagaagcaaagcagaatatcacccatccagaagccacagggacttgatcccgttgaaattctccaggagcgcgagtaccgtcttcaagctagaatcgctcatcgaattcaggagctggaaaacctcccagggtcactgcctcccgacctcagaaccaaggccaccgtagaacttaaggccttgaggctcctcaacttccagaggcagttgaggcaggaagtggttgcatgtatgcgaagggatacaactttagagaccgctttgaattcgaaggcttacaaaagatcgaaacgccagaccctgagagaggctagaatgaccgagaagctcgagaaacaacagaaaatcgagcaagaacggaagcggcgacagaaacaccaagaatatctgaatagcattttacagcatgctaaagatttcaaagagtaccacaggtctgttgccggcaagattcaaaaactgagcaaggctgtcgcaacatggcatgcaaacactgaaagggagcagaaaaaggagacagaacgcattgagaaggagcgcatgaggaggctaatggcagaagatgaggagggttataggaaactcatcgaccagaagaaggatcgcaggctcgcatatctgctgcaacagactgacgaatatgtggccaatctgacaaatctggtttgggagcacaagcaagcccaggccgctaaagagaagaagaagcgtagacgcaggaagaaaaaagcggaagagaatgccgagggtggcgaatcagctctgggccccgacggcgaacccattgatgagagctctcagatgagtgatttacctgtcaaagtaacccatactgagacgggaaaggtcctctttggtcccgaggcgcctaaggcttcacaactcgacgcctggctggaaatgaatccgggatacgaggtggctcctcggagcgatagtgaggaatccgactccgactatgaagaagaggatgaagaagaagagtcatcgaggcaggaaaccgaggaaaagatccttttggatccaaacagcgaagaggtcagtgaaaaggacgcaaaacaaatcattgagactgccaaacaggatgtcgatgatgaatattcgatgcaatacagcgcacgggggagccagtcctactacaccgtggcccacgcgataagcgagcgagtcgagaagcagtccgcgttgctgatcaacgggaccctgaaacattatcagctccagggtttggagtggatggtgagcctgtacaacaacaacctgaatgggatcctagcagatgagatgggcctgggaaaaactattcaaaccatcgctctcatcacatacctgatggaacacaaacgcctcaatgggccatatttgatcatcgttcctctctctactctttccaactggacgtacgagtttgacaagtgggccccctctgtggtgaaaatctcatataaagggactcccgcgatgcgccgtagtctcgtgcctcagctgcggtccggaaagtttaatgttctattgactacttatgagtacattattaaagataagcatatcttggcaaaaattcggtggaagtatatgattgtcgacgaaggtcatagaatgaaaaatcaccattgtaagctgacacaggtgttgaatacccactatgtggctccccgacgcattttactgacgggcacgccgcttcagaacaagttacccgagctatgggcacttcttaatttcctactccccacaatcttcaagagctgctccactttcgaacagtggtttaatgctcctttcgctatgacaggggaacgggtggatctgaatgaagaagaaaccatcctgattatacgccggttgcataaggtgctgcgtcctttcctgttgagacggcttaagaaggaggttgaatcgcagctgcccgagaaagttgagtatgtcataaagtgcgatatgagcgccttacagaagattttgtaccgtcacatgcaggccaaagggatcttgctgacagatggctctgagaaggacaagaagggcaagggcggcgcgaagaccctgatgaacactattatgcaactacgcaaaatctgtaatcatccttatatgtttcaacatatagaagagagctttgccgaacacttgggatactctaacggcgtcattaatggtgccgaactgtaccgggcttccggcaagttcgagctgctggatagaatcctgccgaaactgcgggcgaccaaccacagggtgttactgttttgtcagatgacctcactgatgaccataatggaagactacttcgcatttcggaatttcctgtatctcaggttagacggcacgacaaagtccgaggatcgggccgcattgctaaaaaagttcaacgaaccgggcagccaatacttcatctttctactgtcaacgcgcgccggtggtttgggcctgaacctgcaggcagccgacaccgtggtgattttcgacagcgattggaatcctcatcaagacctacaggcccaggatagagcacatcgcattggtcagcagaacgaagtgcgcgttcttagactctgcaccgttaacagtgttgaggaaaagattctcgcggccgcaaagtataagctaaatgtcgatcagaaggtcattcaggccggtatgtttgaccagaaatcttcctcacatgagaggagggctttcctacaggcgattctggagcacgaggaagagaatgaagaagaggacgaagtccccgacgacgagacactcaatcaaatgatcgctaggcgcgaagaggagtttgacctgttcatgcggatggacatggaccgccgtagggaagatgctaggaatcctaaacgcaagcctcgtctgatggaagaggacgagctgccctcttggataattaaggacgacgctgaggtggagcggctcacctgtgaagaggaggaagaaaagatctttggaaggggctcgcgtcagagaagagacgtcgactattccgacgcactgacagaaaaacagtggctgagggcaattgaagatggaaacctagaggagatggaggaagaggtacgtctaaagaaacgaaaacgaaggcgcaatgtagataaggaccccgctaaggaggacgtggagaaagccaagaaacggagagggcgccctccagccgagaaactctcacccaatcctcccaaactcaccaaacagatgaatgcgatcattgatacagttatcaactacaaggactctagcggacggcagctgagtgaagtgttcatccagcttcctagtcggaaggaactgcctgagtactatgagcttatccgaaaacccgtggatttcaagaaaatcaaggaaagaatccggaaccataagtatcggtccctgggggacttggaaaaagatgtgatgttactgtgccacaacgcccagacattcaacctggaaggctctcagatttatgaagattctattgtgttacagagtgttttcaagagtgctcggcaaaaaatcgccaaagaagaggagtctgaggacgagagtaacgaagaggaggaggaagaagacgaagaggagtcagagtcagaggctaagagcgtcaaagtgaaaatcaagctcaacaaaaaagatgacaaggggagggacaaaggcaaggggaagaagagaccaaaccgggggaaggccaagccagtcgtatccgattttgatagcgatgaagagcaggacgagagggagcagtcagagggttccggtacagatgatgagtag

SEQ ID NO: 207548 - DNA, 360 bp, synthetic construct
  misc_feature 1..360: note = Description of Artificial Sequence: Synthetic coding sequence
  source 1..360: mol_type = other DNA
atgctgctgtgccacaacgcccagaccttcaacctggagggcagccagatttatgaggactcaatagtgcttcagagcgtatttaaatcagccagacagaagatcgctaaagaggaggagtctgaggatgaatcaaatgaggaggaagaggaagaggatgaggaggagtcagaaagcgaagccaagagcgtcaaagtgaagataaagcttaataagaaagacgataaggggagagataaagggaaaggaaagaaacgtccaaataggggcaaggctaaacccgttgttagcgactttgactccgacgaagaacaggatgagcgggagcagtccgaagggagtggcactgacgatgaatag

SEQ ID NO: 207549 - DNA, 711 bp, synthetic construct
  misc_feature 1..711: note = Description of Artificial Sequence: Synthetic coding sequence
  source 1..711: mol_type = other DNA
atggaggaggaggtgcggctgaagaagcggaagcggcggcggaacgttgataaggaccccgcgaaagaggatgtcgaaaaggcaaaaaagcggagaggtcgccctcctgctgaaaagctgtctcctaacccacctaaactgacaaagcagatgaacgccatcattgatacagtgattaattacaaggactcctcagggcggcagctctctgaggtttttatccaactgccgtcaagaaaggaactcccagagtattacgaacttatacggaaacccgtggatttcaagaaaatcaaggaaagaattaggaaccataagtacaggtctctgggcgacctggaaaaagatgtgatgcttttatgtcataatgcccaaacatttaacctcgaaggttctcaaatttatgaagactccatcgtcttgcagtcggtgttcaagtccgctcgacagaaaatagccaaagaggaagagtctgaggacgaatccaacgaggaggaggaggaagaagatgaggaggagagtgaaagcgaagccaaaagcgtgaaggttaagatcaaattaaacaagaaggacgataagggcagagacaaaggaaagggcaagaagcgtcctaacagagggaaagccaaaccagtagttagcgactttgacagcgacgaggagcaggacgagcgggaacagagtgaggggtccggaacagacgatgagtag

SEQ ID NO: 207550 - DNA, 711 bp, synthetic construct
  misc_feature 1..711: note = Description of Artificial Sequence: Synthetic coding sequence
  source 1..711: mol_type = other DNA
atggaggaggaggtgcggctgaagaagcggaagcggcggcggaacgtggataaagatcccgctaaagaggacgtggaaaaggctaagaaacgccgcggcaggccgcctgccgagaagctgagccctaatcctcctaaactcaccaagcagatgaacgctattatcgatacggtaatcaattataaggacagtagtgggcggcagctgagtgaggtgttcatccagcttccttctcgaaaggaactgccagagtactacgaattgataagaaaaccggtcgacttcaaaaagatcaaagagaggatccggaaccacaaatacaggtccctgggggaccttgaaaaggatgtaatgttactctgtcacaacgcccaaaccttcaatctcgaaggctcccagatttacgaggattctatcgtgctgcagtctgtgtttaagtccgctaggcagaagatcgccaaggaggaggaaagcgaagacgaatcgaacgaggaggaagaggaagaggacgaagaagagtcggaatccgaggccaaatctgtaaaggtaaaaattaagcttaataaaaaagacgacaaggggagagacaaagggaagggcaagaaaagacccaatcggggcaaagccaagccagtggtcagcgactttgatagcgacgaagaacaagacgagcgggagcagtctgaggggagtgggacggacgatgagtag

SEQ ID NO: 207551 - DNA, 765 bp, synthetic construct
  misc_feature 1..765: note = Description of Artificial Sequence: Synthetic coding sequence
  source 1..765: mol_type = other DNA
atggaggaggaggtgcggctgaagaagcggaagcggcggcggaacgttgataaagatcccgccaaagaagacgtggagaaggccaaaaagcgtagggggagacctcccgcagagaagctgagtcccaatccccccaaattaacaaagcagatgaatgccataattgacaccgtgattaactataaggaccgatgtaatgtggagaaagtgcccagcaacagtcagctcgagatcgaaggcaacagttcaggacgtcagctgagcgaggtgtttatccaactcccgtctagaaaggagctgcctgaatattatgagctcatccgcaaaccagtggactttaaaaaaattaaagagagaatcagaaaccacaagtacaggtctcttggcgatcttgagaaggatgtcatgctgctatgtcacaatgcccagacgtttaatttagaaggctcgcagatttacgaagattccattgtgctgcagagcgtgttcaagtctgctagacagaaaatcgccaaagaggaggagagcgaggacgagtctaatgaggaagaggaggaggaggacgaggaggaatcagaatcagaagccaagtccgtcaaggtgaagatcaaactgaataaaaaggacgataaggggagggataaaggcaaagggaaaaagaggccaaataggggaaaggcaaagcccgtcgtatccgatttcgattcagacgaggaacaggacgagcgtgaacaatcagagggatccggtactgatgatgagtag

SEQ ID NO: 207552 - DNA, 4719 bp, synthetic construct
  misc_feature 1..4719: note = Description of Artificial Sequence: Synthetic coding sequence
  source 1..4719: mol_type = other DNA
atgagcacccccaccgaccccggcgccatgccccaccccggcccctcacccggccccggtcccagtcccggccctatcctcggaccctcgcccggaccaggaccatctccagggagcgtccacagcatgatggggccctcccctggccccccgagcgtgtcacaccccatgcctactatgggctcaactgattttcctcaggagggtatgcaccaaatgcataaacccatcgacggtattcatgataaggggatagttgaggatatacactgcggaagtatgaagggtacaggaatgcgccctccccaccctggtatgggtccaccccagtcccctatggaccagcattctcagggttacatgagccctcacccatccccactgggggctccagaacatgtgtcgagtcccatgagcggaggcgggccgacccctccgcagatgccaccatctcagcccggtgcattaattcctggagatccccaggccatgtctcagcccaaccggggacccagcccattcagccctgtgcagcttcatcagttgcgggcacaaatccttgcctacaaaatgttagccagaggccagccactgccagagactcttcagctggctgtacagggcaagcgcaccctccccggcctccagcagcaacagcagcagcagcagcagcagcagcagcagcagcagcaacagcagcagcaacagcagcaaccccaacagcagccccctcagccgcagacccagcagcaacaacagcctgccctggttaactataaccgcccatcagggcctggacccgagctatcaggaccttctactcctcaaaaactccccgttcctgccccaggaggtcgcccgtcccctgccccgccggctgctgcccagccaccagccgcggcggtgcccgggccaagcgtgccacaaccagcccctggacagccttcaccagtccttcaactgcagcagaagcagtcacgcattagtcccatccaaaagccacagggactggaccccgttgagattctacaggaaagggagtatagactccaagctaggattgcccaccgaatccaggagctagagaatctccccggaagcctgccccccgatctcagaacaaaagcaactgtggagctcaaggctcttaggctgctgaattttcagcggcagttgaggcaggaagtggtcgcctgtatgcgaagggacacaacgctggagacagcccttaactctaaggcctataagcggagtaaacggcagacccttcgcgaagctcgcatgacagagaagctagaaaaacagcagaaaattgaacaagaacgaaagcgaaggcaaaagcatcaggagtaccttaacagcattctgcaacacgcgaaggacttcaaagagtaccaccgcagtgtggcaggcaagatccagaaactcagtaaagccgtggcaacttggcatgccaataccgagcgggagcagaagaaagaaaccgaaagaatcgagaaagaaaggatgaggcggttgatggccgaggatgaggaaggctaccgcaaattgatagaccagaaaaaagaccggagactagcttacctcctgcagcagacagatgaatacgtggctaatctgacaaatttggtgtgggaacacaagcaggcccaggccgccaaggagaagaagaagcggagacgacgcaagaagaaggccgaagaaaatgccgaaggcggcgagagcgcactaggacctgatggggagccaatagacgaatcttcccaaatgtccgatttgcccgtgaaggtgacccacacggaaacgggtaaagtccttttcggccccgaagcacccaaggcctcccagctggatgcctggctggaaatgaatcctggttacgaagtcgctccgcgctcagatagtgaagagtccgattccgactatgaggaagaagacgaggaggaagagtcctcaaggcaggaaacagaggaaaaaatactcctggacccaaacagcgaggaggtcagcgaaaaggatgctaaacaaataatcgagaccgccaaacaagatgtggacgatgagtatagtatgcagtattccgccagggggagccagtcgtattacacagttgcccacgcaatttctgaacgcgtagaaaagcaatccgcccttcttataaatggaactctgaagcattaccagctacaagggcttgaatggatggtgtcattgtacaacaacaatctgaacggcatcctcgctgacgaaatgggtctgggaaaaaccattcagaccatcgccctgattacttacctaatggagcataaacgactgaacggcccttacctgatcatcgtgcctctttccaccctatctaactggacctacgaatttgacaagtgggctccttccgtcgttaagatatcatacaagggcacaccagccatgagaagatctcttgttccacaattgcggagtgggaaattcaatgtactcctgaccacctacgagtatattatcaaagataagcatattctcgccaagatcaggtggaagtacatgattgtggacgagggacatcgaatgaaaaatcatcactgtaaacttacgcaggtgctgaatacccattacgttgctccaagacgtatcttgctaacaggcacaccactccagaataaactgcctgagctctgggctttgctgaatttcttacttccaacgatcttcaagtcctgtagtacctttgaacagtggtttaatgctccttttgccatgacaggtgagcgtgtcgacttgaatgaggaggaaaccattttgatcatcaggcggctacacaaggtgcttagacccttccttctaaggaggctaaaaaaagaggtggagtcccaactccctgaaaaggtggagtatgtgatcaaatgtgatatgagtgccctgcagaaaatcctctacaggcacatgcaggctaaaggcatcctactcaccgacggcagtgaaaaagataaaaagggaaagggcggcgccaagactcttatgaatacgatcatgcaactcagaaagatctgtaatcatccgtatatgtttcagcacatcgaggaaagcttcgccgaacacctaggttatagcaatggggtaatcaatggtgccgagttgtatcgagcaagtggcaagttcgaactccttgaccgcattttacccaaattgcgggcgaccaaccacagagtcctattgttctgccagatgacaagtctcatgaccattatggaagactattttgctttcagaaatttcttgtacctcaggcttgatgggactactaaaagtgaggacagggctgcgctgctcaagaaatttaatgagcctggtagccagtactttatcttcttattgtctacacgcgccgggggcttagggcttaatctgcaggccgccgatactgtcgtgatctttgacagtgattggaacccgcatcaagatttacaggcacaggatcgggcacatcgaataggacagcagaacgaagtcagggtgctgaggctctgcactgtgaattcagtggaagaaaaaatactcgcggcagccaagtacaaactcaacgtggatcaaaaagtcatccaagcgggaatgttcgaccagaaaagtagttctcacgagcgcagggcttttctgcaggcaatcctcgagcatgaggaagagaacgaggaagaagacgaggtaccggatgacgagactctgaatcagatgatcgcccgacgagaggaggagtttgacttattcatgcgcatggacatggacagacgtcgagaggatgccaggaatccaaaaagaaaaccccggctcatggaagaagacgagcttcccagctggattataaaggacgacgctgaggtcgaaaggctcacctgtgaggaagaagaggagaaaatttttgggcggggaagtagacagagaagggatgtcgactattcagacgccctgaccgagaaacaatggttacgcgcaatcgaggatggtaatcttgaagagatggaggaagaggtgaggcttaaaaaaaggaagaggcgccggaatgtagataaagatcccgcaaaagaagacgtggagaaggccaaaaagaggcgcggccggccaccagctgaaaaactcagccccaaccccccaaaattgaccaagcagatgaacgcaatcattgatacggttatcaattacaaggacagtagtggaagacagctgtcggaagtgttcatccaactgcccagccgcaaggaactgccagagtactatgaacttatccgaaaaccagtagacttcaagaaaattaaggaacgcattcggaatcataagtaccggtcactcggggaccttgaaaaggatgtcatgctcctttgtcacaacgctcaaacgttcaacctggaaggctctcagatttatgaggactctatagtgctgcaaagcgtgttcaagagcgcgcggcagaaaatcgctaaggaagaggagtcagaggatgagtctaacgaagaggaagaagaggaagacgaggaggaaagcgaatcagaagccaaaagtgtgaaggttaagataaagctgaataaaaaagatgataaaggccgggacaaggggaaaggcaaaaagcgcccaaaccggggcaaggctaagcctgtggtgtccgacttcgattcagacgaggagcaggatgagagagagcaatccgagggcagtggcactgatgatgaatag

SEQ ID NO: 207553 - DNA, 4773 bp, synthetic construct
  misc_feature 1..4773: note = Description of Artificial Sequence: Synthetic coding sequence
  source 1..4773: mol_type = other DNA
atgagcacccccaccgaccccggcgccatgccccaccccggcccctcacctgggccgggccccagtcctggaccaattctgggcccatcgcccgggccaggtccttccccaggctccgtgcactctatgatgggcccctcacctggaccaccctcagtgtcccatcccatgcctacgatgggttccactgattttccacaagaagggatgcaccagatgcataaaccaatcgatggtatacacgataagggaattgtagaagatatacactgcggctcgatgaaagggactggcatgcgccccccacatcctggcatggggcctccgcagtcccctatggatcagcattcccagggctacatgtctccacacccctctcctctgggtgcacctgaacacgtaagttcacctatgagtggcggtggccctacacccccccaaatgccacccagtcagcctggggcattgattcctggagatccccaggcaatgtctcaaccaaacaggggcccctcgcctttctcacccgtacaattgcaccagctgcgggctcagatactcgcctacaagatgctggcccgaggccagccattgccagagacccttcagctggctgtccagggcaaacgcaccctaccaggtttgcagcagcaacagcaacaacaacaacagcaacaacagcagcagcagcagcaacagcagcagcagcagcagccccaacagcagccaccacagcctcaaactcaacaacagcagcagcccgctctggttaactacaacagaccatctggccctggtccggaactttccggaccttcaacaccacagaaactaccagttcccgctccagggggacgccctagccctgccccacccgccgctgctcagccgccggctgcagccgttccagggccctctgtgccacagcccgcgcccgggcaaccctcacccgtcctgcaattacaacagaaacagagtcgcatctcgcccatacagaagccgcaggggcttgaccctgtggagattctccaagaacgagaatatcgccttcaagccaggatcgcacaccggatacaggagcttgagaatctgcccggctccttaccccctgatctgcggaccaaagcgactgttgagctcaaggctcttcggctactgaattttcagagacagctgagacaggaggtagtcgcctgcatgcggcgggacaccaccctggaaaccgcgttgaattcaaaagcttacaagcgctccaaacggcaaactctgcgtgaggcacgtatgacagagaaactggaaaagcaacagaagattgagcaggaacgaaagcgaaggcagaaacaccaagagtacctgaattccatcctacagcacgcaaaggatttcaaggaataccaccgctctgtggccgggaaaattcaaaaactaagcaaggccgtggccacgtggcacgccaataccgaaagggaacagaagaaagagaccgaacgtatcgagaaagaacgaatgcgacggctaatggccgaggatgaagaaggatataggaagctgattgaccaaaagaaggataggcgccttgcctacttgcttcagcaaactgatgaatatgtggcaaaccttaccaatctggtctgggaacacaaacaagctcaggctgctaaggaaaagaagaagcgtaggagacggaagaaaaaggccgaagagaacgcagaaggtggggagagcgcccttgggcctgacggggagccaatcgatgaaagctcccagatgtctgatctgcccgtgaaagtgactcacacagagacgggaaaagttctgtttggacctgaagcccctaaggccagccaattagacgcctggttggaaatgaatccaggctatgaggtagcaccaaggagtgatagtgaagagtcagacagtgattacgaggaagaagacgaggaggaggagagcagtcgtcaagaaaccgaggaaaagattctgctcgatccaaatagtgaggaagtctccgaaaaggatgccaagcagattattgaaactgccaagcaggatgttgatgacgagtatagcatgcagtattctgctcgaggctcccagagttattacactgtggcccacgctatctccgagcgcgtcgagaagcaatccgccctgcttattaacggaaccctaaaacattatcagctgcagggcctggagtggatggtatcattatacaacaacaacttaaatggaatccttgccgacgaaatgggcctggggaagacaatacagacgatcgccttgattacttatcttatggaacacaagaggttaaacggcccttacctgatcatagtgccactgagcaccctaagcaattggacctacgagttcgacaagtgggcaccatctgtggtgaaaattagctataagggcacacccgccatgaggagatccttggtcccccaactgcggtcgggcaagttcaacgtgctattgaccacttacgaatatatcataaaggataagcacattctggccaagatccgatggaagtatatgattgttgacgaggggcatcggatgaaaaatcaccactgcaagctgactcaagttctgaatacacactatgtcgcccccaggcgtatacttctgacgggcactccattacagaacaagctgccagagctctgggctcttctgaattttctactgccaactatatttaagtcctgttccacctttgaacagtggtttaacgcaccctttgccatgacaggtgaacgagtcgatttaaacgaggaagaaacaatcctgatcatacgacgacttcacaaggtcctgcggccttttctgctcagaaggctaaagaaggaggtggaatcacagttgccagaaaaggttgaatacgtcattaaatgcgacatgtccgccctgcagaaaattctgtacagacacatgcaagccaaaggtattctcctgaccgacggttcagagaaagataaaaaagggaagggcggtgcaaagactctcatgaacacaattatgcagctccgtaaaatatgtaatcacccttatatgttccaacacatcgaggagagttttgccgaacatctcggctattcaaacggggtgattaacggggcagagctctatcgagcgtcaggaaaattcgagctgctcgatcgaattctgcctaagttgcgggccaccaaccatcgggtgctactgttttgtcaaatgacatctttaatgactatcatggaagactattttgcgttccggaactttctgtacctgagactggatgggaccacaaaaagcgaggacagagccgcactgcttaagaaatttaatgagcctggctcccagtacttcattttcctattaagcacaagagcagggggactgggcctaaacctgcaggctgccgacacagtggtgatcttcgattccgactggaatccccaccaagatctgcaggcccaggaccgggcgcatagaattggccagcagaacgaggtgagagtgctgagactatgtaccgtgaacagcgttgaagaaaagatcctcgccgcagccaaatacaaactgaatgtggatcaaaaagttatacaagctgggatgtttgatcagaagagcagctcacacgagcgccgcgcctttctccaggctattctggaacacgaggaggaaaacgaggaagaagatgaggtgcccgatgatgagactctgaaccaaatgatcgccaggcgggaggaggaattcgaccttttcatgaggatggacatggaccggcggagagaagatgcccgtaatccgaaacggaaaccaaggctaatggaagaggatgagcttccttcatggataatcaaggatgacgccgaagtggaaagattaacttgtgaagaggaggaagagaaaatatttgggcgtggatctaggcaaagaagagacgtagactactcagacgccctaacagagaagcagtggctgcgcgccatcgaggatggaaacctggaagagatggaagaagaagtgagactcaagaaacgcaagcggagacgtaatgtggacaaagaccctgctaaggaagatgtggagaaagcgaagaaacgtcggggccgccccccagccgagaagctgagcccgaacccccccaaacttaccaagcagatgaacgctatcattgacacggtaattaattataaggaccgctgcaacgtcgaaaaggttccctccaattctcagttagagatagaggggaattccagtgggcgtcagctgagtgaggtgtttatccagctgccctctcggaaggagttgccggagtactatgaattgataaggaagcccgttgacttcaaaaagattaaagaaagaattcgcaaccacaagtatcggagcctgggggacctggaaaaggacgtgatgcttctctgtcataacgcacagacattcaatcttgagggctcccagatttatgaggatagcattgtgcttcagtccgtgtttaagtctgcccgtcagaaaattgctaaggaagaggagagtgaggatgagagcaatgaagaggaggaggaggaagacgaggaagaatccgagtctgaagcgaaatcagtcaaagtaaagattaagttgaacaagaaggacgacaaaggcagggataagggcaagggtaagaaaaggcctaaccgtggaaaagctaaaccggtggtcagcgatttcgacagcgacgaggaacaggacgagagagagcagtctgaagggtctgggactgacgatgaatag

SEQ ID NO: 207554 - DNA, 534 bp, synthetic construct
  misc_feature 1..534: note = Description of Artificial Sequence: Synthetic coding sequence
  source 1..534: mol_type = other DNA
atggaggaggaggtgcggctgaagaagcggaagcggcggcggaacgtcgataaggaccctgctaaggaggacgtggagaaagccaagaagcgccgaggaagacccccagccgagaagctgagccccaacccgcccaaactgaccaaacagatgaacgctatcatagacacagtaattaattacaaggattcctcaggcaggcagctttccgaggtattcatccagcttccctcccggaaagagctacctgaatattatgaactcattaggaaacctgtggacttcaaaaaaatcaaagaaaggattaggaatcataagtaccggagcctgggggatctcgagaaggatgtcatgctgctctgtcataatgcacaaacatttaatctggagggctcacagatatacgaggattcgatcgttctccagagtgtattcaagtccgcaaggcagaagatcgctaaagaggaagagagcgaagatgaatccaacgaggaggaggaggaggaggatgaggaagagagcgagagcgaatag

SEQ ID NO: 207555 - DNA, 816 bp, synthetic construct
  misc_feature 1..816: note = Description of Artificial Sequence: Synthetic coding sequence
  source 1..816: mol_type = other DNA
atgaagcggctggccgcccggtgcttcgccggcctgctgatcctgtcaccactcacagtaatttcagattcccggcctgccgacagcggaaaagccattgaggacggcaatctagaagagatggaggaggaggtgagacttaaaaagaggaagaggcgcaggaatgtggacaaggatccagccaaggaagacgttgaaaaggccaaaaagagacgaggcaggccaccagcagagaagctttcccctaacccacctaaactcaccaagcagatgaatgccatcatcgatacagtgatcaactataaagattccagtggcaggcagctgtcagaggtctttattcagctgccgagccgtaaagaactcccggaatactacgaacttatccgcaagccggtagacttcaagaaaatcaaggagagaattcggaaccataagtaccggtctttgggagacctggaaaaggacgttatgttgctttgtcacaatgcacagaccttcaatctggagggaagtcagatctacgaagactctatcgttctgcagtcggtttttaaaagtgcacgtcagaagatcgcaaaggaggaggaatcggaggacgagagcaatgaggaggaggaagaggaagatgaagaggagagcgagtccgaggcgaagagcgtcaaagtgaaaataaagcttaacaagaaagacgataaaggaagagacaaaggcaagggaaaaaaaagaccaaaccgtggaaaagcaaaacccgtcgtgagtgatttcgacagtgacgaggaacaggacgaacgtgtaagcgtggcggattggtag

SEQ ID NO: 207556 - DNA, 462 bp, synthetic construct
  misc_feature 1..462: note = Description of Artificial Sequence: Synthetic coding sequence
  source 1..462: mol_type = other DNA
atgaagcggctggccgcccggtgcttcgccggcctgctgatcctgtccccgctcactgtaatctcggattcccgaccagctgactccggcaaggcgatagaagatggaaatttggaggaaatggaggaagaagtccgcctgaaaaagcggaagagacggcggaacgttgacaaagatcccgctaaagaagacgtggagaaagctaaaaagcgccgcgggcgcccacccgcagagaagctgtcccctaacccaccgaaactgaccaaacagatgaatgccatcatcgatactgttatcaactacaaggattcctccggccgacagctcagcgaagtgtttatccagctgccctctcggaaggagctgcccgagtattacgaactgatcaggaagccagtcgacttcaagaagattaaggaaagaatccgtaatcacaagtaccgcagtctgggcgatctatag

SEQ ID NO: 207557 - DNA, 468 bp, synthetic construct
  misc_feature 1..468: note = Description of Artificial Sequence: Synthetic coding sequence
  source 1..468: mol_type = other DNA
atgagcacccccaccgaccccggcgccatgccccaccccggccccagtccaggccccggcccctctccaggacccatcttggggccaagccctggacccggcccatccccaggatcggtccatagtatgatgggacccagccctgggccccctagtgtgtcccaccccatgcccaccatgggctcgaccgattttccccaagaaggcatgcatcagatgcacaagccaattgacggtattcacgataagggaattgtggaagatatacactgcggatccatgaaaggtactggtatgcgccccccacaccccggaatgggccctccacagtctccgatggatcaacattcacagggatacatgagcccccacccaagcccccttggtgctccagagcacgtctcctcccccatgtcagggggcggacctaccccaccccagatgcctccttcccaacccggggcctag

SEQ ID NO: 207558 - DNA, 1680 bp, synthetic construct
  misc_feature 1..1680: note = Description of Artificial Sequence: Synthetic coding sequence
  source 1..1680: mol_type = other DNA
atgagcacccccaccgaccccggcgccatgccccaccccggcccctcacccggacccggcccctctccaggaccaattctcgggccctcccctgggcccgggcccagtcccgggtctgtccactcaatgatgggtccttcaccaggcccacctagtgtatcacaccccatgccaaccatgggtagtacagactttccgcaagagggcatgcatcagatgcacaagcccatcgatgggatccatgacaaggggatcgtggaggatattcactgtgggtccatgaaggggacggggatgcgcccacctcatccggggatgggccccccgcaaagcccaatggaccagcacagtcagggttacatgtccccacatccttcaccactaggggcacctgaacatgtctcttcacctatgagcggaggaggccccactccgccgcagatgcccccatcccagccgggcgcattgattcccggagacccacaggccatgtcgcaaccgaatcgcgggccctctccgttctcacccgtgcagctgcaccaactccgtgctcagattttggcgtataagatgctggccaggggacagcctttaccggaaacactccagctcgctgtccaaggcaagagaacgctgcccgggctccaacagcagcagcaacagcagcaacagcagcagcagcagcagcaacagcagcagcaacagcagcagcagccgcaacagcagccccctcagcctcagacccagcaacagcagcagccagcgttagtgaactacaataggccgtccgggcccgggcccgaattgagcggcccctcgaccccacagaagctgccagtaccggcgcctggcggaagaccctcaccagcaccgcccgctgccgctcagccccccgctgcagctgtcccaggcccatcagtcccacagcctgctccaggacagccgagccctgtcttgcagctacagcagaaacagtcaagaatttctccaatacaaaagccacagggcctcgacccagtggaaatactgcaggagagagagtacaggcttcaggctagaatcgcacatagaattcaggagctagaaaatctgccaggctcccttcccccagacttacggacaaaggccacagtggaattaaaggctcttcgcttgctgaattttcagcgccagctccgtcaggaggttgtcgcctgcatgcggcgtgataccaccctggaaacagccctgaattcaaaagcctacaagcggagcaagcgccagacactgcgcgaggcacgcatgactgagaagctagaaaagcagcagaaaattgaacaggagcgcaagaggaggcagaaacaccaggaatatttaaattccattctgcagcacgccaaggattttaaggagtatcacagaagcgtcgctgggaagatccaaaaattgtctaaagcagtggcaacctggcacgcaaacacagaaagggagcagaaaaaggaaacggagaggatcgagaaggagaggatgaggaggctgatggctgaggatgaagagggttatcgcaagctaatcgatcagaagaaggataggagacttgcttatctgttgcaacagactgacgaatatgtggccaatcttaccaatctcgtgtgggaacacaaacaggcccaagccgcgaaggagaagaagaagcgttag

SEQ ID NO: 207559 - DNA, 516 bp, synthetic construct
  misc_feature 1..516: note = Description of Artificial Sequence: Synthetic coding sequence
  source 1..516: mol_type = other DNA
atggaggaggaggtgcggctgaagaagcggaagcggcggcggaacgtggataaagatcctgctaaggaagatgtggagaaagccaagaagcgccgcggtcgtcccccggccgaaaaactttcacccaacccccctaagctgactaagcagatgaacgccatcattgacactgtgataaattacaaggatcggtgtaacgtcgagaaggttccaagcaacagccagttggaaatcgagggtaattcttccggcaggcagctatctgaggttttcatccagctgcccagccggaaagagcttcccgagtattacgagctcattcgaaaaccagtagactttaagaagattaaggaaagaatccgaaatcacaaatacagatcccttggagaccttgagaaagatgtgatgttgctgtgtcataatgcccagaccttcaatctagaggggtctcagatatatgaggatagtattgtgctacagagtgttttcaagtctgctcgtcagaaaattgcgtag

SEQ ID NO: 207560 - DNA, 201 bp, synthetic construct
  misc_feature 1..201: note = Description of Artificial Sequence: Synthetic coding sequence
  source 1..201: mol_type = other DNA
atgagcacccccaccgaccccggcgccatgccccaccccggcccctcccctggccccggccctagtcccggcccaattcttggccctagccctggtccaggccccagtcctggctcagttcactctatgatggggccttccccaggtcctccttctgtgtctcatcctatgcctactatgggtagcaccgacttcccatag

SEQ ID NO: 207561 - DNA, 4944 bp, synthetic construct
  misc_feature 1..4944: note = Description of Artificial Sequence: Synthetic coding sequence
  source 1..4944: mol_type = other DNA
atgagcacccccgacccccccctgggcggcaccccccggcccggcccttcgcctggccctggcccctcaccaggtgcgatgttgggcccatctcctggcccatctccaggttcagctcacagtatgatgggccccagcccagggccaccgtctgccggccatcccatacccacacaggggccagggggatatccacaagataacatgcatcagatgcacaaaccaatggaaagtatgcacgagaaagggatgagcgatgatccaaggtacaaccagatgaaggggatgggaatgagatctggcggccacgcaggtatgggccccccaccgagcccgatggatcagcactcccagggctatcctagccccttgggcggaagcgaacatgcatcctctccggtgcctgcctctggacctagttccggaccacagatgtcttctggtcctggcggcgccccgctggacggagccgaccctcaggccttgggccagcagaatcgcggccccactcccttcaaccagaaccagctacatcaactgcgagctcaaatcatggcttacaaaatgctggccagaggacagccactgcccgaccacctgcagatggccgtgcagggaaaacgtccaatgcccggtatgcagcagcagatgcccaccctcccgcctccatcggtctcagcaaccggtcctggaccagggccagggccggggcccggaccgggccctggcccggccccgcccaattattcacgcccacatggtatgggtggccccaacatgcctccgccagggccatccggagtgcccccaggtatgccaggacaaccccccgggggccctccgaagccctggccagagggacccatggccaatgccgctgctcccacatcaacgcctcagaaactgatacctccgcagccaacagggaggcccagccctgcaccccctgcggtacctcctgctgcgagtcctgtgatgcccccccagacacaaagtcctggacagcctgcacagccggcaccaatggtgcctttgcatcagaaacagagccgcatcaccccaattcagaaacccagaggtcttgatccagtggaaatcttgcaggagagagaatacagactccaggccagaatcgcacacagaatacaagagctcgaaaacctgcccggctccctagcaggggacttgcgaactaaggctacaatagaactcaaggctctgaggctcctgaatttccaaaggcaactgcgccaagaagttgtagtgtgtatgcggagagacactgcactggaaactgccttgaacgcgaaagcgtacaaacggagtaaacgccagtccctgagagaagcacggatcactgaaaagctggaaaagcaacagaaaattgaacaagagagaaagaggcgccagaaacatcaagagtacctaaacagtatactccagcatgccaaggacttcaaggagtaccatcgttctgtaaccggcaaaatccaaaaattgactaaggcggtcgctacatatcacgctaataccgagcgggaacagaagaaggagaatgagagaatcgagaaagagcgcatgaggaggctaatggccgaggacgaggaaggttatcgtaagctcattgaccaaaagaaggacaaacgcctggcgtatcttctgcaacagacagacgagtacgtggcaaacttgactgagttggtgcgccagcacaaagctgcccaggtggccaaggaaaaaaagaagaagaaaaaaaagaaaaaagccgaaaatgcagagggccagaccccagccataggacccgatggcgagccgcttgacgagacaagtcagatgagcgacctgcctgtcaaggtaatccacgttgagagtggaaaaattcttactgggacagatgcgcctaaagctgggcagctggaggcatggctagagatgaaccctggttacgaagtagccccaagaagcgatagcgaggaaagcggctcagaagaagaagaggaagaagaggaggaagagcagcctcaggcagcacagccaccgaccctcccagttgaagaaaaaaaaaaaattccagaccctgactccgatgatgtgagtgaagtcgatgccaggcatatcatcgaaaacgctaagcaggatgtcgatgatgaatatggagtttcacaggccctagcaagaggacttcagtcctattacgctgtggcccacgctgtgaccgaacgtgtcgataaacagtccgccctgatggtcaacggtgtcctgaaacagtaccaaatcaaaggactagagtggctagtgagtctatataataataacctgaacgggatccttgccgatgaaatggggctgggaaagaccattcaaaccattgccctgatcacctatttaatggagcataaacgaattaacggtccattccttattatcgtcccactaagcacgctgagtaactgggcgtatgaatttgataaatgggcccccagtgtagtgaaggtttcctataagggttcccccgcggcccgcagggcattcgtgcctcaactgcggtcaggcaaatttaacgtactgctgacgacatacgaatatatcatcaaagacaaacacatcctcgcaaagatccgctggaagtatatgatcgtggacgagggccacaggatgaaaaaccaccactgcaagctcacgcaggtgctgaatactcattatgtggcccctcggcgactgcttctgactggcactccactgcaaaataagcttcccgagctttgggctctgcttaattttctcctacccacaatctttaaatcttgctcaacatttgaacaatggtttaatgcccctttcgccatgaccggggagaaggtcgatttaaatgaggaggagaccattttaattattagaagactacacaaggtgctgcgccctttcctcctgcggaggctcaagaaggaagtggaagctcagttgccagaaaaagtggaatatgtcataaagtgtgacatgtccgccctgcaacgcgtcctctataggcacatgcaagcaaaaggcgtgcttctgaccgatgggtctgagaaggataaaaaaggaaaaggtgggacgaaaaccctcatgaacactatcatgcagctgcggaaaatttgcaatcatccctacatgtttcagcacattgaggagagctttagtgaacacctgggcttcactggaggtatcgtgcaaggcttagacctataccgggcgtctgggaagtttgagcttctggatcggattctccccaagttacgggccactaaccataaggtccttctgttttgccagatgacatctcttatgactatcatggaagactacttcgcttatcgggggttcaaatatcttagactggatggcaccacaaaggccgaggacagggggatgctgcttaagacatttaatgagcctggaagcgagtatttcatttttctcctctctacaagggccggtggactcggcctgaacctgcaatccgcagatacagtgatcatcttcgactccgactggaaccctcaccaggacctgcaggcccaagatagagctcacaggataggccagcagaatgaggtaagagtgctgcgtttgtgcaccgttaactcagtggaagagaagatacttgccgctgcgaaatacaagctgaatgtagaccagaaggtgatccaggccggtatgttcgatcaaaaatcatccagccacgagcgcagagccttcctgcaagcaatccttgaacatgaagaacaagacgagtcacggcactgcagcactgggtccggctccgccagttttgcacacacggccccgccacccgcaggagtgaatccagatctggaagagcctccccttaaagaggaagacgaggtgccggatgatgagacagtgaatcagatgattgcccgccatgaagaagagtttgacctgtttatgcgaatggatctggacaggagacgagaagaggccagaaatcccaaaagaaagcccagattaatggaagaggacgagctcccgtcctggattatcaaagatgatgcagaagtggagcgcctcacatgtgaggaggaagaagagaagatgtttggcaggggatctcggcaccgcaaggaggtcgattactccgacagcctcacagagaagcagtggctgaaggccatcgaggagggtactctcgaggaaattgaagaggaagttcgacagaagaaatctagccgcaagcggaagcgagattccgacgccgggagcagcactcctaccacatccaccagaagccgcgacaaggatgatgaaagcaaaaagcagaagaaaagaggtcgaccaccagctgagaagctttctcccaacccaccgaacttgacaaaaaagatgaaaaagattgtcgacgccgtgatcaagtataaggacagcagtagtggaaggcaattgagcgaggtgtttatccaactaccttccaggaaagagctgcccgagtattatgagctgattcgcaagccagtcgatttcaaaaaaatcaaagagagaattaggaatcacaagtatcggtccttgaatgatctggagaaggacgtgatgctcctgtgtcagaatgctcagacgttcaatctggaaggttctctaatatacgaggacagcatcgtcctgcagtccgtattcaccagcgttagacagaagattgagaaagaagatgattcagaaggcgaagagtcagaggaagaggaagagggcgaagaagaaggcagcgaaagcgagtctcggtctgtcaaggtgaagattaagctggggagaaaggagaaggcacaggatcggctaaagggtgggaggaggagaccctctagaggctccagggctaaacctgtagtgagcgatgacgactccgaagaggagcaagaagaggatcgatcgggatccggcagcgaggaagattag

SEQ ID NO: 207562 - DNA, 5040 bp, synthetic construct
  misc_feature 1..5040: note = Description of Artificial Sequence: Synthetic coding sequence
  source 1..5040: mol_type = other DNA
atgagcacccccgacccccccctgggcggcaccccccggcccggccccagtcccggcccagggccttcgcccggggctatgctcggcccctctccaggaccaagccccggttccgctcattcaatgatgggaccctctccaggcccccccagcgcgggtcaccctatccccacccaaggacctggaggttacccccaggataacatgcatcaaatgcacaagccaatggagagcatgcacgagaagggaatgtcggacgacccgcggtacaaccagatgaaagggatgggtatgcgcagtggggggcacgccggtatgggcccaccaccctctccgatggatcagcatagccagggctacccaagcccgcttggcgggtcagagcatgctagtagtccagttccagcctctgggccaagctccggaccccagatgtcatcaggccctggcggggcacctttagatggggctgatccgcaggcgttggggcagcaaaataggggcccaacccccttcaatcaaaatcagctgcaccaactgagggctcagattatggcatacaagatgcttgctagagggcagccactgcctgatcatcttcagatggcagtccagggaaagagaccaatgccaggcatgcagcagcagatgccgacgctgcctccgccttctgtctcagccactgggcccggacctggcccaggcccagggcccggccctggaccaggcccagccccccctaattactcccgcccccacggcatgggtggcccaaacatgcctccacccggaccctctggagttcctcctggaatgcctgggcagcctcccggcggtcccccaaaaccgtggcctgagggccccatggctaacgccgccgccccgacaagcacccctcagaaacttatacctccgcaacctacaggcaggcctagtcctgcccccccggctgtgccccctgcagcaagtccagtcatgcctccccagacccaatccccaggccagcccgcacagccagctccaatggttcctctccatcaaaaacagtctagaataactccaatccagaagccaagaggtcttgatccagtggaaatcttgcaagagcgcgagtaccgattgcaggcacgtattgctcatcggattcaggagctggaaaatctaccggggagcctcgctggggacctgagaacgaaggctactattgaattgaaagcactgaggctcctcaattttcagcgacagttgcgacaggaagttgtggtctgtatgcgcagggacaccgcgctggagaccgctctgaatgctaaagcctacaaacgttctaagagacagagtttgcgggaagcacgtattactgagaaactggagaaacaacagaagatcgaacaggagcgcaagcgcagacagaagcaccaggagtatctcaactctattctgcagcatgctaaggacttcaaagaatatcataggagcgtaaccggtaaaattcaaaaacttaccaaagctgtggccacctaccatgccaataccgaacgggaacaaaaaaaggagaatgagcgcatcgaaaaagaacgcatgcggcgcctcatggcagaggacgaggaaggttaccgtaagctcatcgatcagaagaaggataaacgcctggcatatctcctacagcagacagacgagtatgtggccaatctcaccgaactggtcagacagcataaagcagcccaggtcgctaaagagaaaaaaaagaagaagaaaaagaaaaaggctgagaatgccgagggacagacccccgctatcggtcccgacggagagcccctggacgagacatcccagatgtctgacctcccagtcaaggtgatacatgtggagtctgggaagatcttgacaggcactgatgcccctaaagcgggtcagctagaagcttggcttgagatgaatccgggatatgaagtggcaccgaggtcagatagcgaggagtctggctcagaggaagaggaggaagaagaggaagaggaacagccccaggccgcccagccccctactcttccagtcgaagaaaagaaaaaaattcccgacccagactcagatgatgtcagcgaggtggacgccagacacattatcgagaatgccaaacaagatgtggatgacgaatatggagtcagtcaggccctagcccgcggactgcagagctactatgcagtcgctcacgccgttactgaacgggtggacaagcagagtgccctcatggtcaacggagtgctgaagcagtaccagattaaaggcctcgagtggctggttagtctctacaataataacctgaatggtattttagccgatgaaatgggccttggaaagaccattcaaactattgctctaatcacctacctcatggaacataagcgcatcaacggaccttttctgatcattgtccccctctcaactctatcaaattgggcctacgagtttgacaaatgggcccccagtgtggtgaaggtcagctataaaggaagtcctgccgcgcggagagccttcgtgccacagctgagatctggtaaatttaacgtgctcctgaccacttatgaatacattattaaagacaagcacatcctggctaagattcggtggaagtatatgatcgtggatgaggggcatcggatgaagaaccaccactgtaaactgacccaggtgttgaatactcactatgtggcaccccgacggctcctgctcactggaacgccactgcaaaacaagctgccagagttgtgggctctgctgaatttccttttgcctaccattttcaaaagctgttctacattcgagcaatggtttaacgccccattcgctatgacaggtgaaaaggtcgacctgaatgaagaagagacaatactgattattcgtagactgcacaaagtgttaaggccattcctcttgcgcagactgaagaaggaagtagaggcacagctgccggagaaggtagagtacgttattaagtgtgatatgagcgcactgcagcgcgtcctttatagacatatgcaagccaagggcgtgctgttgacggacggctcagaaaaagacaaaaaggggaagggtggcactaaaaccctgatgaataccatcatgcagctgcggaagatctgcaatcatccatatatgttccagcacatcgaggaatccttctctgaacacctgggattcacaggtggaattgttcaggggctggatttgtaccgagcttctgggaaatttgagctcctggaccggattttgccaaagttgcgggcaaccaaccacaaggtcctgctgttttgccaaatgactagtctaatgacaattatggaggactattttgcataccgtgggttcaagtacctgagactggacggcacgacaaaggctgaagataggggcatgcttttgaaaaccttcaatgagccagggtcagaatacttcatatttctactgtctacgagggctgggggcctaggacttaacctacagagtgccgatacagtgattatattcgacagcgactggaacccacaccaagacctgcaggcgcaagatcgtgcccatcgcattggccagcagaacgaagtgcgtgtgctgcgtctgtgtacagtcaattcggtcgaggagaaaatcctggcggctgctaaatacaagctcaacgtagatcagaaagtgatccaagccggaatgtttgaccaaaagtctagcagtcatgagcgccgggcctttttgcaggccatcctggaacacgaagaacaagacgaatcacgccattgttctaccggtagtggctccgcctcttttgcacataccgctccaccacccgcgggagtcaatccagacctggaagagccccctctgaaggaagaagatgaagtccctgatgacgaaaccgtgaatcagatgatcgcgaggcacgaagaagagtttgacctgttcatgcgaatggacttggaccgtcggcgcgaggaggcgcgaaaccccaagcggaaaccgcgccttatggaggaagatgaactgccctcctggatcatcaaggatgatgctgaagtggaaagactgacatgcgaggaggaagaggagaaaatgttcggaaggggatccaggcaccggaaggaggtggactactctgactccctcaccgagaagcagtggcttaagaaaattacaggcaaagacatacacgacaccgcaagttcagtggccagggggctgcagttccagcggggccttcaattttgcacccgtgctagtaaagcaatcgaagagggtactttggaagaaattgaagaagaagtgagacagaagaagagctctcgcaaacgcaagagggactcagatgctggcagttctactccaacaacatccactcgctcacgggacaaagatgacgagtccaaaaaacagaagaaacgtggcagacctccagcggaaaagttgagtcctaaccctcctaatctgactaaaaagatgaagaaaatagtggacgccgtgatcaaatataaagactccagcagcggcaggcagctgtccgaggtctttatacagctgccctcaaggaaggagctgccagagtattatgagttgattaggaagcccgtagattttaagaaaattaaagagcgcattagaaaccataaatatcgctcactcaacgacctcgaaaaagacgtgatgcttctatgtcagaatgcccagacattcaatcttgagggtagcctaatctatgaggattccattgttctgcagtcagtgtttactagcgttagacagaagatagaaaaggaagatgattctgaaggtgaagaatcggaagaggaggaggaaggtgaagaagagggctcagagtctgagtctaggagtgtgaaggtcaagatcaagttgggaaggaaggagaaagcccaggacaggctgaagggtgggagacgaaggccctcacggggttcccgggcaaagcccgttgttagcgatgacgactctgaagaggagcaggaagaagatcgcagtgggagcgggtcggaagaggactag

SEQ ID NO: 207563 - DNA, 4854 bp, synthetic construct
  misc_feature 1..4854: note = Description of Artificial Sequence: Synthetic coding sequence
  source 1..4854: mol_type = other DNA
atgagcacccccgacccccccctgggcggcaccccccggcccggccctagtcctggcccaggccctagcccaggcgctatgcttggtccttcaccaggccccagccctgggagcgcccattcaatgatggggcccagtccgggcccgccatcagccgggcacccaattcctactcagggacctggaggctatccgcaagataatatgcatcaaatgcataagcccatggaatccatgcatgagaaagggatgagtgacgatccaagatacaatcagatgaagggaatgggtatgcggtcaggaggacacgccgggatggggcctccaccgtcccccatggaccagcactcccaggggtatccatcgccgctcggtggctccgagcatgcgtctagccccgtaccagcctcaggaccatcttcgggtcctcagatgtcatccggtcccggtggggccccccttgatggcgctgacccacaggcccttggccaacaaaatagaggccccacgccatttaatcaaaaccagctgcaccaactaagagcccagatcatggcctacaagatgctggcacgggggcaacccctgcctgaccacctacagatggccgttcagggaaagaggcccatgcctggaatgcagcaacagatgcccactctcccgcctccgtcagtgagtgccactggtcctggccctggcccgggaccgggtcccggaccaggtccagggcccgcgcctcctaattactcaagaccccacggtatgggcgggcccaatatgcctccaccagggccctccggagtcccacccggcatgcctgggcagccaccagggggccctcctaagccttggccagagggcccaatggccaacgcagctgctcctacaagtactccgcagaagctcatcccacctcagcccaccgggcgaccgtctcctgcccctcctgctgtgcccccggcagccagcccagtgatgcccccacagactcaatcccccggccaacccgcccagcctgccccgatggtccctctgcatcagaaacaaagcaggattacgcctatccagaagcctaggggactagaccctgtggagatcctgcaggagagggagtacaggttgcaagcgaggatcgcccatcgaattcaggagcttgaaaacctgccaggttcccttgccggcgatctgaggactaaggctacaattgagctgaaggccctgagactgctcaacttccagagacagctccgtcaggaggtggtggtctgtatgaggcgagatactgctctcgaaaccgcactgaatgctaaagcctacaagagatctaagcggcagtccctgcgtgaagcacggataacggagaagttagagaagcagcaaaagatcgagcaggagaggaaacgtagacagaagcatcaggagtacctgaattccatcctgcagcacgccaaggattttaaagaataccacaggagcgtaacagggaagatacagaaattgactaaagccgttgctacataccacgccaataccgagagagagcaaaaaaaggagaatgagcggattgagaaagaaagaatgcgaagacttatggcggaggatgaagagggatacaggaaactgatcgaccagaaaaaagataagagattggcctatctcctccagcagacagatgagtatgtggccaacttaaccgagctcgtgcgtcagcataaggctgcccaggtggccaaagaaaagaagaaaaagaagaagaagaagaaggcagagaatgcggagggtcagactcccgcaatcggccccgatggtgaaccactggacgagacatctcagatgagtgacctgcctgtgaaggtgatccacgtggaaagtgggaaaatcctcacaggcaccgacgctccaaaagctgggcaacttgaagcctggttagagatgaatcccggctacgaggttgctccacgctcagactccgaagagagtggcagtgaagaagaggaagaggaggaggaggaagagcagccccaggctgcccaacctccgacgcttccagtggaagagaagaagaagattcccgaccctgatagtgatgacgtgtctgaggttgatgcaagacatatcattgagaacgcaaaacaagatgttgacgatgagtatggggtgtcccaagccctggccagaggcctgcaaagctactatgcagttgcgcacgccgtgacggagcgagtagacaagcagagcgcacttatggtcaacggcgtgctgaagcagtaccagattaaagggttggaatggttggtttctttatacaacaataacctaaacggcatcctggccgacgaaatgggattgggaaaaacaattcagacaatcgctctgatcacatacctgatggagcacaaacgaataaatggccccttcctgatcattgtccctttatcaactttgtcaaattgggcctatgagttcgataaatgggcgccttctgtggtcaaagtgtcctataaaggttccccggcagcgcgccgcgcctttgtcccacagctgaggagcgggaagttcaacgtgttacttaccacatacgaatatataatcaaggacaaacacattctggctaaaattcgatggaaatacatgatcgtggacgaaggtcataggatgaaaaaccatcactgcaagctgacccaagtcttaaatacccactatgtggctccacgaagactgctcctgacaggaacaccactgcagaataaattgcctgaactgtgggccctactgaacttcctgcttcctacaatctttaagtcatgttctacatttgagcagtggttcaatgccccattcgcgatgactggagaaaaggtcgacttaaatgaagaggagacaatcttgatcattaggaggctgcacaaggttctccgaccctttctgctgcggaggctgaagaaggaagtggaggctcagctccctgagaaggtcgagtacgtgattaaatgtgatatgagtgctctccagcgagtgctttatagacatatgcaggccaagggagtgttactaaccgacggatcagaaaaggacaaaaagggaaaaggcggcaccaagaccctgatgaataccattatgcagctacgaaagatatgcaaccatccgtatatgttccagcatatagaagagagtttcagcgaacacctaggtttcaccggaggtatcgtgcaaggcctggacttataccgcgcttcgggcaaattcgagctcctggaccgcattctgccaaagctgagggctaccaaccacaaggttttgctgttttgtcagatgacatccctcatgaccataatggaggattactttgcatacagaggatttaagtacctgcggctggacggcactactaaagccgaggaccgagggatgctgctgaaaacattcaacgaacccggctcagagtacttcatcttcctcctttctactcgtgccggcggactgggcttgaacttacaatcagcggatacagtcattatatttgattctgactggaatccccatcaggaccttcaagcacaggatcgggcccaccgtattgggcagcagaatgaagtacgggtcctccgtctttgtaccgtgaacagtgtcgaggagaaaattcttgcagcagcaaagtacaagctgaacgtggatcaaaaggttatccaagccggcatgttcgatcagaagtcttccagtcatgaacgaagggcctttctccaggccattttagaacacgaagagcaggacgaggaagaggatgaggtacccgatgacgaaaccgtgaaccagatgatcgccagacacgaggaggaatttgacttattcatgcgcatggacttagaccggagacgggaggaagcacgtaatccgaagcgaaaaccacgactgatggaggaagacgaattgcccagctggataataaaagacgacgcagaagtggaacgcctcacgtgcgaagaggaagaggagaaaatgttcggcagagggtccagacatagaaaagaggtggactattctgactctctcaccgagaagcaatggctgaagactctcaaggcaattgaggaaggcaccctcgaggaaatcgaagaagaagtgcggcagaagaagtccagtcgaaagagaaaacgcgacagcgacgctgggagcagcacaccaaccaccagcacacgctctcgggataaggatgatgagtccaaaaagcaaaaaaaacgaggaaggccccccgccgagaaattgagcccaaacccgccaaacctgacgaaaaagatgaagaagatagtcgatgctgttatcaaatacaaggactcaagcagtggcagacagctgtcagaggtgttcatacagcttccgtcccggaaagaattgccagaatattatgagctcattaggaagccagtcgatttcaagaagattaaagagaggatcaggaaccacaaatacagaagcctgaacgatctcgaaaaagacgtcatgctgctctgccagaatgctcaaacctttaacctagaagggtcattgatatatgaggactccatagtcttacagagcgtgttcacttcagtccgacagaaaatcgagaaggaagatgactctgaaggagaggaatccgaagaagaagaagagggtgaggaggaaggaagcgaatcagagagcagatctgtgaaagttaagattaaactggggcgcaaggagaaagcacaggacaggctcaaaggaggaaggcgtcggccctctaggggatccagagcgaaacccgttgtcagcgatgacgacagcgaggaagaacaggaagaggaccgcagtgggagcgggtccgaggaagattag

SEQ ID NO: 207564 - DNA, 5046 bp, synthetic construct
  misc_feature 1..5046: note = Description of Artificial Sequence: Synthetic coding sequence
  source 1..5046: mol_type = other DNA
atgagcacccccgacccccccctgggcggcaccccccggcccggcccatcaccaggccctgggccatctccaggggctatgctggggccatcaccagggccgtccccgggatctgctcactcgatgatgggcccctctcctggtccccccagcgcagggcatcccatcccaactcagggtccaggaggctatccgcaggataacatgcatcaaatgcacaaacccatggaatcaatgcatgaaaagggcatgagtgatgatccccgctataatcagatgaagggtatgggtatgcgctcaggggggcacgccgggatggggcccccccctagtcccatggatcagcactcccagggctacccatccccgcttggtggaagcgagcacgcaagctctccagtccccgctagtggcccttcatcgggaccacagatgtcatccggccccggaggagcacctctagacggtgccgacccccaggctctggggcagcagaatcggggccctacgccatttaaccagaatcagctgcatcagttacgtgctcagattatggcctataagatgcttgctcgaggccagccgttgcctgaccacctccagatggccgtgcagggtaaacgtcccatgccgggtatgcaacagcaaatgcccaccctccctcctccgtctgtgagtgctacagggccagggcctggacctgggccaggacctggcccaggccccggacccgctccccctaattacagccgccctcacgggatggggggcccgaatatgcctccaccaggcccatcaggtgtgccacctggcatgcctggccaacccccaggggggccaccaaaaccgtggcctgagggccctatggcaaacgccgctgcccccacttcgacccctcaaaagctaatcccaccccaacctactggcaggccaagcccagcaccacccgccgttccacccgctgcatcccctgtgatgcctcctcagacgcagagtcctggccagccagcgcaacccgcccccatggtacccttgcatcagaaacagtcacgaatcacacctatacagaaaccccgagggctggatccagtcgaaatcttgcaagaacgtgagtataggctccaggcgaggatcgcccatcgcattcaggagctcgaaaacttgcctggatcactcgccggcgatttgagaactaaggctaccattgaactaaaggccttacgcttactgaacttccaacggcagctaagacaggaggtggtggtgtgcatgcgccgcgatacagctctcgagaccgcactgaacgcgaaagcctacaagcgaagcaaacgacaaagtctcagagaggctcggatcactgagaaactggagaagcaacagaaaatcgaacaggagcgcaagcggaggcagaaacaccaagagtatttgaattccattctgcaacacgcaaaagatttcaaggagtaccataggtctgtaaccggcaaaatccagaagctgactaaagctgtggcaacgtaccatgccaacactgagagggagcaaaagaaggagaacgaaaggattgagaaggaacggatgaggagactaatgggacaacgggaaaaatctaggagaggcttgggctcacagtcctgggctcgcatttttgcagacctgagtgatcatcaaaacgactgcgtgactagcgtaacagagagtttggttggccagattctggcagcatgctccggagaggagggagaggtcgagtggaaagggcgagatagagtaagacgtttacgagcagaagacgaggaaggatatcgcaagctcatcgatcagaagaaagacaagcgtctcgcttatctcctgcagcagaccgacgaatatgtagctaacctgaccgagctggtgagacaacacaaggcagcacaagtcgcgaaggagaaaaagaagaagaaaaaaaaaaaaaaagcagaaaatgctgaagggcagacgcctgccatcggcccagatggagagccactggacgagacatctcagatgagtgatctgcctgtcaaagtgatccacgtggagagcgggaagatcctcactggtacggacgccccaaaggctggccagctcgaggcatggctggagatgaatccaggatatgaagtggccccgcggtcggactcagaggaatccgggtccgaagaggaggaggaggaggaagaagaagaacagccccaagctgctcaaccccctacactgccagtcgaagagaagaaaaagattcctgacccagattctgatgatgtgtctgaggtggatgctcggcatattatcgagaacgcaaagcaggatgtagacgacgaatacggggttagccaggctttggccaggggtttgcagtcgtattatgccgtggcccacgccgtcaccgaaagagtcgacaagcaatctgcccttatggtaaacggtgtactcaaacagtatcagataaagggactcgaatggctggtttccctatacaacaataatctcaatggtatcctcgcagatgaaatgggcctaggcaagacaatccaaacaatcgccttgatcacataccttatggaacacaaaagaataaacggcccatttctgattattgtgcccctgtctacactgtcaaattgggcctatgaatttgataagtgggcaccctctgtcgttaaagtttcctacaaaggtagtcctgccgccaggcgtgcttttgttcctcagctccgctcaggaaaatttaatgttcttctgactacctacgaatacatcataaaagataaacacattctggccaaaattcggtggaaatatatgattgttgacgaagggcatcgcatgaagaaccaccattgcaagctgacacaagtactgaatacccattacgtagcgcctcgtcgcctgctgctgaccgggactcctcttcaaaacaagcttcctgaactgtgggccttactgaacttcttgttacccacaatctttaagagctgctcaaccttcgagcagtggtttaatgctcctttcgcaatgaccggagaaaaggtagatctcaacgaagaggagactatcctgattatcaggcggctgcataaagttctgcgaccattcttgctgagaaggttaaaaaaggaggttgaggcccagctgcccgaaaaagttgagtacgtgattaaatgcgatatgtcagcccttcagcgcgtgctctacagacacatgcaggcaaagggcgtcctgcttactgatgggagcgagaaggacaagaagggcaaggggggcaccaagaccctgatgaacaccatcatgcagctgcgcaagatctgtaatcacccctacatgttccagcacattgaggaatcattctccgaacacctgggctttacaggaggcatcgttcagggcctcgatttatatagggcttctggcaagttcgagcttttagaccggattctgccaaaattgagggctaccaaccacaaggtgcttctgttttgtcagatgacgagtctgatgaccattatggaggattacttcgcctacagaggtttcaagtatctccggttagacggaaccacgaaagcagaagatagaggcatgctgctgaaaacctttaatgagcccggttccgaatatttcatatttctccttagtacaagggctggcggcctcgggctcaaccttcagagcgctgataccgtcattattttcgatagcgactggaatcctcatcaagatcttcaagctcaagaccgcgcccacagaatcggacaacagaacgaagtgcgtgttctgagactgtgtacagtgaactccgtggaagaaaaaatactggccgcggccaagtataagttgaatgtggaccagaaagtcattcaggcagggatgttcgatcagaagagcagctctcacgagcggcgggcgttcctgcaggctatcctggagcacgaggaacaggacgaagaggaggacgaagttccggatgacgaaacggtaaatcaaatgattgctcggcatgaagaagaatttgatttatttatgaggatggatcttgacaggcggcgcgaggaggccaggaatcccaagcgtaaacccagattaatggaggaagacgagttgccgtcctggatcatcaaagatgatgcagaggttgagagattgacctgtgaggaagaggaagagaagatgttcggcaggggcagccgccatcggaaggaggtggactactctgattctttgaccgagaaacaatggcttaaaactttgaaagccattgaggaaggaacgcttgaggagatagaagaagaagtgcgccagaaaaagtcttctagaaaaaggaaaagggattcagatgctggatcatccaccccaaccacatctactcgcagccgtgacaaagacgacgaatccaagaagcagaaaaaacgaggaagaccacccgccgaaaagttaagtcctaaccccccgaatctgaccaagaagatgaaaaagatcgtggacgctgtgattaagtacaaagactccagtagcgggcggcagctttcggaggtctttattcagttaccttcacgaaaagagcttccggagtactatgaactaattaggaagccagtcgattttaagaaaatcaaggagcgaattagaaatcacaaatatcgctcgctgaatgatctcgaaaaggacgtgatgcttctttgccaaaacgcccagacgttcaacctcgaaggaagtctaatctacgaggattcaatcgtactgcagagcgtgtttacttccgtcagacagaagatcgagaaggaagacgattcggagggggaagagtcagaagaggaggaggaaggagaggaggagggatcagaatctgaatctcgttcagtcaaggtcaagattaaattagggcggaaggagaaagcccaggatcgactgaagggtggccgaagaaggccttcacggggcagccgggctaagcctgtggtgtccgatgatgatagtgaggaggaacaagaagaggaccgaagtgggtcgggatcagaagaagactag

SEQ ID NO: 207565 - DNA, 4944 bp, synthetic construct
  misc_feature 1..4944: note = Description of Artificial Sequence: Synthetic coding sequence
  source 1..4944: mol_type = other DNA
atgagcacccccgacccccccctgggcggcaccccccggcccggcccctccccaggtccgggcccatctcctggcgccatgctcgggccttctccaggcccatcgccaggcagcgcccattccatgatgggtccgtcacctggaccaccaagcgccggacatccaatacctacacagggacctggtggctacccacaagacaacatgcatcagatgcacaaacctatggaatcaatgcacgaaaaaggaatgagcgacgatcccagatacaatcaaatgaaggggatgggaatgcgatctgggggacatgctgggatggggccacctccctctccgatggatcagcactctcagggctacccaagtccactgggcggaagcgagcatgcctcatccccagtgccagcgagcggcccttcctctggaccgcagatgagttccgggcctgggggtgcacctctagacggcgccgacccacaggctctgggacagcagaatagaggacctaccccttttaatcagaaccaattacatcagttgagagcgcagattatggcttacaaaatgctagcccggggacagcctctcccagaccatcttcagatggctgtgcaagggaagcgtccaatgcctgggatgcaacagcagatgcccactctgccccccccaagcgtgtccgctaccggccctgggccgggcccaggtccagggcctggcccgggccccggcccagccccacccaactactctagaccccatggaatgggaggtcccaatatgcccccgcctgggccctcgggcgtgccaccagggatgcccggccagccacccggcgggccccctaaaccatggcccgagggtccaatggccaatgctgctgccccaacaagtacaccacaaaagctgataccaccccaacccacgggtagacccagtcccgccccacctgctgtccctccggccgctagtcctgtaatgcctccccagacccagagcccagggcagcctgctcaacctgcccctatggtccccctgcaccagaaacagtctcgaatcactcccattcagaagcccaggggcctggacccagttgaaattctgcaggagagagaatatagattgcaggccagaattgcccatcggatccaggagctggagaatttgcctgggagtctggccggagacttgcggactaaggccaccattgagttgaaagcgctgagactcttgaacttccaacggcagctcagacaggaagtagtcgtctgcatgcgccgtgacacagccctggagactgcgctgaacgctaaggcctacaagagatccaagcggcagtctctccgggaggccagaataactgagaaattggaaaagcagcagaagattgaacaggaacggaagcgacggcaaaagcatcaagaatatcttaacagcatactgcagcacgccaaagactttaaggaataccacagatccgtgaccggcaagatccagaaacttactaaagccgtcgcaacctaccatgccaatacagagagggagcaaaagaaagaaaacgagcggattgaaaaggagaggatgcgtcgattgatggctgaagacgaggagggatacagaaaactgatcgatcaaaagaaagacaagaggctagcctatcttctgcagcagacggacgagtacgtggccaacttgacagagcttgtcaggcagcacaaagccgcacaggttgccaaggaaaagaagaaaaaaaaaaaaaagaaaaaagcggagaatgccgaggggcagacaccagccatcgggcccgacggggagccgctcgatgagacaagtcagatgagcgatttgcccgtgaaggtaatccacgtagaatccggtaagattcttacaggcaccgacgctccaaaagcgggccagctggaggcctggctcgaaatgaatcctgggtatgaggttgcacctcgctcagattctgaggaatcggggtctgaggaagaggaagaagaggaggaggaggagcaaccccaagccgcccagcctcccacgctgcctgtggaggaaaaaaaaaaaattcccgatcctgatagcgacgacgttagtgaggtggatgcacgccatatcatcgaaaacgccaagcaggacgtagacgatgagtatggagtctcccaggccctggctagggggctacagtcctattacgctgtcgcccatgctgtgacagagagagtcgacaagcagagcgctcttatggtaaatggcgtgctgaaacagtatcagatcaaagggctcgaatggctggtgagcctctataacaacaaccttaacggtatactcgcagacgagatgggactcggtaagaccatccagaccatagctcttattacctatctcatggagcacaaacgtattaatgggccattcttgattatagtcccactttcgaccctgtctaactgggcctacgagtttgacaagtgggcccctagcgtagtgaaagtctcctataagggttcacctgctgccagaagggccttcgtgccgcagctaagatcaggtaaattcaatgtgctactgaccacatatgagtacataattaaagacaaacacattctggccaaaatacgttggaaatatatgattgtcgatgagggtcatcgtatgaaaaaccaccattgcaagctgacgcaagtgttgaatactcattatgttgcgccccgcaggctgctgctgactggaactccactccagaataaactgccagaactctgggcattgctgaacttcttactccccacaatttttaaaagctgctcaacgtttgagcagtggtttaatgccccctttgcaatgactggggaaaaggtggacctgaacgaggaagaaacgatcctgattatcagaagattacacaaggtccttaggccattcctcctgagaaggctcaagaaagaagtcgaggcccaactaccagaaaaagtggaatatgtcatcaaatgcgacatgtctgcccttcagcgcgtgctgtatcggcacatgcaggccaaaggagtgttgctgactgatggttctgagaaggacaagaagggcaaaggtgggaccaaaactttaatgaatacaattatgcagcttcgcaaaatatgcaaccacccatacatgttccaacacattgaggaaagcttctcggagcatctggggttcactggcggcatcgtccagggcctggacctgtaccgcgcgtcaggcaagtttgagctccttgataggatcctgcccaagttgagggcaaccaatcacaaggtgcttctcttctgccagatgacaagtctgatgactataatggaagactacttcgcataccgcggatttaagtatctgcggctcgatggcacaaccaaggcggaggatcgcgggatgctgctgaaaacttttaacgaaccagggtcagaatattttatctttctgctaagtacacgggccggcggactcggactgaacctccagagtgccgacacagtgatcatttttgattcggattggaaccctcatcaagatttgcaagcccaggatagggctcacagaatcggacagcagaacgaggtcagggtcctgcgactttgtactgttaattcggttgaggaaaagatactggccgctgcaaaatacaagctaaacgttgaccaaaaggtgatccaggcggggatgttcgaccagaaatccagttcccatgagcggcgagcttttctccaggccattttagagcatgaagagcaagatgaaagccggcattgttcaacaggatccggatccgcctcatttgcacacaccgctcctccacctgcgggggtgaatcccgacctcgaggaaccccctctgaaagaggaggacgaagtgccggacgacgagacagtgaaccagatgatcgcacgccatgaagaagaattcgacctgttcatgcggatggatcttgaccggcgtagagaggaagctcgtaatcccaagaggaaaccaagactgatggaggaggacgagttgccctcctggatcataaaagacgatgccgaggttgagcggctgacatgcgaagaggaggaagaaaaaatgtttggacgtgggtccaggcatagaaaggaggtcgactacagtgattcattgacagagaagcagtggctcaaggcaatcgaggaaggtacactggaggagatcgaggaggaagtgagacaaaaaaaatctagcaggaaacggaaacgggactccgacgccggaagcagtactccaaccacttcgacaaggtccagggacaaggatgatgaatctaagaagcaaaagaagaggggccggcctcctgctgagaagctatccccaaatcccccaaatctgactaagaagatgaaaaaaatagttgatgccgtcataaaatacaaggattcaagctcaggtaggcagctgagcgaagtctttatacagctgccttcaagaaaagaactccctgagtattatgaactgatacggaaacctgtggatttcaagaaaatcaaggaaagaatcagaaatcacaagtatcgcagcctgaacgatctggaaaaggacgtgatgctgctctgccagaacgcccagacatttaacttggagggatccctgatttatgaggactctattgtgcttcagagcgtgtttacctctgtgcggcagaagatagaaaaggaagacgactccgagggcgaggagagtgaagaggaggaggagggagaagaggagggctcagagtccgaaagtagatctgtcaaagtcaaaattaaacttgggaggaaagagaaggcacaggatcgactcaaaggggggcggcggaggccctcgagaggcagtcgggccaagccagtggttagtgacgacgactctgaagaagagcaagaggaagacagatctgggtcaggatctgaggaggactag

SEQ ID NO: 207566 - DNA, 4842 bp, synthetic construct
  misc_feature 1..4842: note = Description of Artificial Sequence: Synthetic coding sequence
  source 1..4842: mol_type = other DNA
atgagcacccccgacccccccctgggcggcaccccccggcccggccctagtccaggaccgggacccagcccaggggctatgctcggcccctcccctggcccttccccggggagtgcccatagtatgatgggccctagccctggccctccatccgcaggccatcccatcccgacccagggtccaggtggctatcctcaggacaacatgcatcaaatgcacaaacctatggagagtatgcacgagaaaggtatgtccgacgatccgcgctataatcaaatgaaaggaatgggcatgaggagtggggggcatgctggaatgggaccaccaccctctccaatggaccagcattcccaaggttatccttcgccacttgggggtagcgagcacgcaagtagtcctgtgcctgcctcaggcccgagttccggcccccaaatgtcttcaggtccagggggggcccctttggatggggcagatcctcaggccctgggccagcagaacagaggtccaaccccattcaatcagaatcagctccatcagctacgagctcaaatcatggcttataaaatgctcgcccgtggccaacccctccctgatcatctgcaaatggctgtccagggtaagagaccaatgcctggcatgcagcaacagatgcctacactgcccccaccctccgtctcagcaactggccctggcccaggcccagggccaggacccggacctggtcctggccccgctcctcctaactactcccgacctcacggcatggggggaccgaacatgcccccccccgggccaagtggagtcccccccggcatgccggggcagccccccggcgggccccccaaaccttggcctgaggggcctatggcgaacgctgccgcacctacgtctaccccccagaagctcattccccctcagccaacaggcaggcccagtcccgcacccccagccgtgccacccgcagcctcaccagtgatgcccccacagacccagtcacctggacagcctgcacagcccgcgccgatggtcccgctgcaccagaagcagtctcggatcactcctatacaaaaacctcgcggtcttgatcctgtggaaatcctccaggagcgcgagtataggctgcaggcacggatcgctcacagaattcaagagctggaaaatcttccaggctccctggcaggggatttacgcaccaaagcaaccattgagctgaaagccctccgtctgctcaacttccagagacagctgcgacaggaggttgtcgtatgcatgagacgcgacactgctctggaaaccgctctaaacgcaaaagcatacaagagaagcaagcggcaatccctgagagaggctaggataaccgagaaactggagaagcagcaaaagatcgagcaagagagaaagcgcagacaaaagcaccaagaatatctcaacagtatccttcaacatgccaaagattttaaggagtaccatcggtccgtgacaggcaaaatacagaaacttaccaaagccgtggcgacctatcacgctaacactgaacgggagcagaagaaagagaacgaacgcattgaaaaggaaagaatgaggcgtctgatggcagaggacgaggaaggttatcgaaaactgatcgaccagaaaaaagacaaacgacttgcgtacctgctgcaacagacagacgaatatgtggctaacttgaccgaactggttaggcagcacaaagctgcgcaggtcgccaaagaaaaaaagaagaagaagaaaaagaagaaagcggaaaacgctgaaggacaaacacctgctatcggtcctgacggcgagccccttgatgagaccagccagatgagtgacttgccggtgaaagtgatacacgtggagtccggaaaaattctgacaggcaccgacgccccaaaggctggccagctagaggcgtggctggagatgaaccccggatacgaggtagctcctcgctccgacagcgaggagagtggatccgaagaggaggaagaagaggaagaagaggagcaaccacaggccgcacagcctcccaccctcccagtggaagagaagaaaaagattccagaccccgacagcgacgatgtgagcgaagtggatgccaggcatattatcgaaaacgcaaagcaggacgtcgatgacgaatacggcgtcagccaggccctcgcccgaggactgcagtcttattacgcagttgctcacgcagtaactgaacgagtggataagcagtccgccctgatggttaacggcgttctaaaacagtaccagattaagggtctcgagtggttagttagcctttacaataataatctcaatggcatcctggctgacgagatgggcctgggcaagaccattcagacaatcgctctgattacatatctcatggagcacaagcgcattaatggaccgttccttatcatcgtacccttatctactctatctaactgggcttacgagtttgacaaatgggccccttctgtggtgaaagtgtcctataagggttcacccgccgcacgccgggcctttgtgccccagctgcgttccggcaagtttaatgtcctacttacaacatacgagtacatcataaaggacaagcatatacttgccaaaatccggtggaagtatatgatcgtagacgaaggacaccgaatgaaaaatcaccactgtaagctgactcaggtgctgaacacacattacgtcgctcccagacgtctactgctcaccggaacaccgctccagaacaagctgcctgaactctgggccctccttaactttctgcttcctaccattttcaagtcctgcagcacttttgaacaatggttcaatgcgcccttcgccatgaccggcgagaaagttgatctcaatgaggaagaaaccatacttatcataaggaggttgcacaaggtactgaggcctttccttctgcggcgcctgaaaaaggaagttgaggcacagctccctgaaaaggtcgaatacgtgattaaatgcgacatgtcggcactgcagcgggttttgtaccgtcacatgcaggctaagggagtgctcctcactgacgggtcagaaaaagataagaaaggcaagggcggaaccaagacgctcatgaataccattatgcaactgaggaagatttgcaatcacccttacatgtttcagcatatcgaagaatcctttagcgaacacctagggttcactgggggtatcgtgcaagggctggacctgtatagggcttccggcaaatttgagttacttgacaggatcttgcccaaactgcgcgctacaaaccataaggtgcttctgttttgccaaatgacatcactgatgactatcatggaggactacttcgcctatcgagggtttaagtacctgaggcttgatggcacgacaaaggctgaagacaggggtatgcttttaaagacttttaatgagcctggttccgagtacttcatctttctcttgtctacccgtgctggcggcttggggttgaatctccagagtgccgacacagtgataatctttgactcagactggaatcctcatcaggacctccaggcccaggatcgcgcccaccgcattggacagcagaacgaagtgagggtgctgaggctgtgtaccgtcaactcagttgaagaaaaaattctggccgccgcaaagtacaagctcaatgtggatcagaaagtgatccaggccggcatgttcgaccaaaagtctagttctcacgagaggagggcttttctgcaggctattctcgaacatgaagaacaagacgaagaagaggacgaagtacctgatgacgagaccgtcaatcagatgatcgcgaggcatgaagaggagttcgacctgttcatgcgtatggaccttgatcgtaggcgggaagaggctcggaaccccaagagaaagccccggttaatggaggaagacgaactaccaagctggatcattaaggatgacgccgaggtcgagcgtctgacgtgcgaagaggaggaggaaaaaatgttcggtcgcggtagtagacatcggaaagaggttgactatagcgatagccttactgaaaaacaatggctcaaagccatcgaagaagggactttggaggaaattgaggaggaagtccgacagaagaagtcaagccggaagcgaaagagagattcagatgccggctccagcaccccgactacaagtaccaggtctcgagacaaagacgacgagtctaaaaaacaaaagaaacggggaagacctccagcagagaagctgagtcccaatccaccgaacctgaccaagaagatgaagaaaatcgtggacgctgtgatcaaatacaaggacagctccggtaggcagctgtctgaggtgtttatccaactaccatccaggaaggagttgcctgaatactacgagctgatcaggaagccagtggattttaagaaaattaaagagcggattcggaatcacaaatacagatccctcaatgacctcgagaaggacgtgatgttactctgtcagaatgcacagacattcaatctggaaggttctctcatctacgaagatagtattgtcttacaatccgtcttcacttctgtcaggcaaaaaatcgaaaaggaggacgactctgagggagaggaaagtgaggaagaagaagagggcgaggaagagggcagcgagagcgagtcccgctctgtgaaagtcaaaatcaagttgggccgcaaggaaaaggctcaggatagattaaaaggaggcaggcgtaggcccagtagggggtctagagcaaaacccgtcgtttctgacgacgattccgaggaagagcaggaggaggaccgatctgggtcgggcagcgaagaggattag

SEQ ID NO: 207567 - DNA, 4851 bp, synthetic construct
  misc_feature 1..4851: note = Description of Artificial Sequence: Synthetic coding sequence
  source 1..4851: mol_type = other DNA
atgagcacccccgacccccccctgggcggcaccccccggcccggccccagcccggggcccggtccttctccaggagccatgttgggaccatcgcccggacctagtccaggctccgcccactcaatgatgggtcctagtcccggaccccctagcgcaggacaccctattcctactcagggtccaggtgggtacccccaagataatatgcaccagatgcacaagcctatggagagcatgcatgagaagggtatgtccgacgatcctagatacaatcagatgaaaggaatggggatgcgaagcggagggcatgccggtatgggccctcccccttcaccgatggaccagcattcccagggatacccgtcacccctgggcggctcagagcacgcttctagccctgtgccggcctccggccccagttcaggaccccagatgtcctcagggcctgggggagcccccctggatggggccgacccccaggctctcggtcagcagaatagaggacctaccccgttcaaccaaaatcaactccaccagctacgcgcacagatcatggcatataagatgctcgcccggggacagccgctgcctgatcatctccaaatggccgttcaagggaagagaccaatgcccgggatgcagcaacaaatgcccacactcccccctccaagtgtgtctgccacaggacctgggcccgggccagggcccggacccggcccaggtcccggcccggccccacctaactactctagacctcacgggatgggcggcccaaatatgccacccccaggacccagcggggttcctcccgggatgcctggacaaccacccggagggccccccaagccctggcctgagggaccgatggccaacgctgccgcccccacaagcacaccccaaaaactcattccaccacagcccactggtagaccgtctcccgcgcccccggccgtgccccccgctgcgagcccagtaatgccaccacaaacacagtcaccaggacaaccagctcagcccgcacctatggtgccattgcaccaaaagcagagccgcatcacacccattcagaagccacgggggctggaccccgtggaaatactacaagagagagagtaccggctgcaggcccggatcgcccaccggatccaggagcttgaaaacctcccaggttcactggcaggcgacttgagaactaaggctacaatagagctcaaagccctcagactgttgaattttcaaaggcaattgaggcaggaggtagttgtttgcatgcgaagagacactgctttggagaccgccctgaacgccaaagcttacaagcggtctaaaaggcagtcccttagagaggcgaggatcactgagaaattggagaaacagcagaagattgaacaggagcgcaagaggcggcagaagcaccaagaatacctgaactccatactgcaacacgcgaaagactttaaagaatatcatcgctctgtcaccgggaagattcagaaactgacaaaggccgtggccacatatcatgctaacaccgaaagggaacagaagaaggagaacgaaagaattgagaaagaaaggatgaggaggctaatggccgaggacgaggaaggctatagaaaattgatcgaccagaagaaggataaacggcttgcatatctcctgcagcaaacggacgagtacgttgctaatctgaccgaacttgtcaggcagcataaagcagcgcaggttgccaaagagaagaaaaaaaagaagaagaagaagaaggcagaaaacgccgagggccaaaccccagcgatcggcccggatggggagccgctggacgagacatcacagatgtccgacctgccagtgaaagtcatccatgtagagtctggcaagattctgactggtacagatgcaccaaaggcagggcagctggaagcgtggctggaaatgaaccccggctacgaggtagcaccaaggagtgactctgaagaaagcggatccgaggaagaggaggaagaggaggaggaggagcaacctcaggccgcccagcccccgaccctaccggtggaggagaaaaaaaagatcccagaccctgactctgatgatgtgtctgaggtcgacgcgaggcacatcatagaaaatgcaaaacaggatgtggacgacgaatacggtgtgtctcaggctctggcccgaggcctccagtcctactacgcagtggcccacgccgtgacagaacgcgtggacaagcagtccgcccttatggtgaacggcgttctgaaacaatatcagattaagggcttggaatggctggtctcattgtataacaacaatctgaacgggatcctggctgatgagatgggtctgggcaagaccatccagacaattgcccttataacgtatctgatggagcacaaaaggattaatgggcctttcctcataattgttcctctaagcacactctcaaattgggcctatgaattcgacaaatgggctccatcagtagtgaaagtgtcctataaaggctcccccgccgcacgcagagcattcgtgccccagctgagaagtggaaagtttaatgttctactgacaacctacgaatatattattaaagataagcatatcctggctaagattaggtggaagtatatgatcgtcgacgaggggcacaggatgaaaaaccatcactgtaagctcacacaggtgctgaatacacattacgttgccccacgacgtctcctgctgacggggacaccactgcaaaacaagctgcctgagttgtgggcattgttaaacttcttactgccgaccatcttcaagagctgctcaacttttgaacagtggttcaacgcaccttttgccatgactggcgagaaagttgatcttaatgaagaggagacaatcctcattatcagaagacttcataaagtcctccggccctttctgctgcgcagactgaagaaagaagttgaagcgcagctgccagagaaggtggagtatgtgatcaaatgtgatatgtcagcactgcagcgcgtgctttacaggcatatgcaggccaaaggtgtgcttctaaccgacggcagtgagaaagataagaagggtaaaggcggaactaagaccctgatgaatacaataatgcagttgcggaaaatttgcaaccacccttatatgtttcagcatatagaggagtcattttctgaacaccttgggttcacagggggcatcgttcaaggattagatttataccgagcgtctgggaagttcgagctgttggatcgcatcttgcccaaactgcgagccacgaatcataaagtgttgctgttttgccagatgaccagcctgatgacaatcatggaagactactttgcctatcgcgggttcaagtatctcagactcgatggaacaacaaaggccgaagacaggggaatgctccttaagacctttaacgagcccggatccgaatactttatttttttactgagcacgagagccggcgggcttgggctcaatcttcagagcgccgataccgtaattatctttgactccgactggaatccgcatcaggatctgcaggcccaggatagagcccacagaatcggtcagcagaatgaggtgagagtccttcggctgtgtacagtgaacagcgttgaagaaaagattctcgccgcagcgaaatacaagctcaacgttgatcagaaagtcatacaggccggcatgttcgatcagaagtccagctcccacgagcgacgcgccttcttacaggctatactggagcatgaggaacaggacgaggaggaggatgaggttcccgatgacgagacagtgaaccaaatgattgctcgccacgaggaagagtttgacctgtttatgcggatggacctggacaggcgtcgcgaggaggcccgcaatcccaagagaaaacctcgtctgatggaagaggatgagcttccttcatggattatcaaggatgacgccgaagtagagcgccttacctgtgaggaggaggaggaaaaaatgttcggccggggatcacgccacaggaaagaggttgactatagcgatagccttacggagaaacagtggttgaagacgttgaaagctatcgaggagggcacgctggaggagattgaggaggaagtccggcagaagaagagctcccgaaaacggaagagggactcagatgccggaagctctacccccacaacatccaccaggtcacgcgataaggatgacgagtctaaaaagcaaaaaaaacgaggaaggcctcctgccgaaaagctgagcccaaaccctcccaacctgaccaagaagatgaagaaaatagtggatgcagtcatcaaatacaaggacagttcaggaaggcagcttagtgaggtttttattcagctgccgagtagaaaagagcttcctgagtactacgaattaatcaggaaacccgttgatttcaaaaaaattaaggagaggatacgaaatcataagtacaggtccctaaacgatctcgaaaaagatgtgatgctgttatgtcaaaatgcacaaacttttaacctggaagggtctctaatttatgaggactctattgtgttacagagcgtgtttacaagtgttcgccagaaaatcgagaaggaagacgattctgaaggagaggaaagtgaagaagaggaggagggcgaggaggagggatcagagagcgaatcgaggagtgtgaaggttaaaataaaactagggaggaaggaaaaagcccaagaccggctaaaggggggtcgcaggagaccaagtcgcggatctcgggccaaaccggtggtcagcgatgatgacagtgaggaggagcaggaagaagaccgctcaggcagcgggtccgaggaggattag

SEQ ID NO: 207568 - DNA, 4845 bp, synthetic construct
  misc_feature 1..4845: note = Description of Artificial Sequence: Synthetic coding sequence
  source 1..4845: mol_type = other DNA
atgagcacccccgacccccccctgggcggcaccccccggcccggccctagccctggccccggaccttcccctggagccatgctcgggccctccccaggtccaagtccaggttctgcccatagcatgatgggcccctcaccaggacctccgtctgccggccaccccatccctacccagggacctggcgggtatccacaggataatatgcatcagatgcacaagcccatggaatccatgcacgaaaaggggatgagcgacgaccctagatacaatcagatgaagggaatgggcatgaggtctggcgggcacgcaggcatgggaccaccgccttcgccaatggatcagcattcccaaggctatccctctcccctgggcgggtcggagcatgcctcttcccctgtccccgcgtcagggcctagcagtggcccccagatgtcttccggacccggtggcgctccactcgacggcgctgatccccaggcccttggacaacaaaatcgggggcctacgccatttaatcagaatcagctgcatcagctcagagctcagatcatggcgtacaagatgctcgcccgcggccaacctcttcccgatcacctgcagatggctgtccagggaaagcgaccaatgccaggaatgcaacagcagatgccgacacttccccctcctagtgtgtcggcaaccggtcctggacctggcccagggccagggcctggtccaggcccaggtccggcaccacccaactactcaagaccacacggcatggggggccctaatatgccgcctccaggacccagtggggtcccacctggaatgcctggccagccacccgggggccctcctaaaccttggcctgaagggccaatggccaacgcggcggctcccacaagtaccccacaaaagctaatcccaccgcaaccaacgggcagacctagtcctgctcctcccgctgtaccccccgccgcttctccagttatgccaccccagactcaaagtcccggtcaacctgcccaacctgcacccatggtcccactgcaccagaagcagagccgcataactcccatccaaaagcccagggggctcgatccggttgaaatcctccaagaacgggaatacaggttgcaggctcggattgcacacagaatccaagagctggaaaatctcccaggcagcctcgctggagacctgaggaccaaggccacaatcgagctgaaagcactgcgcctgctgaactttcaacgtcaacttagacaggaagtcgtcgtctgcatgcgacgtgataccgcactggagactgcactgaatgccaaggcgtacaagcgaagcaaacggcagagcctacgggaggctcggatcaccgagaaactcgagaaacagcagaagattgaacaggaacgtaagcgtcgccagaagcaccaggagtatctgaactccattctgcagcatgctaaagacttcaaggagtaccaccgctccgtaacgggcaaaatccagaaactgaccaaggctgttgcaacctatcatgctaacactgagagagagcagaagaaggagaacgagagaattgagaaagaaaggatgaggcgattgatggcagaagacgaggagggataccggaaactgattgaccagaagaaagacaaacgcctggcctatctactccagcagaccgatgagtatgttgccaaccttactgagctggtcagacagcacaaagctgcgcaggtggcgaaggagaaaaagaaaaagaaaaaaaagaaaaaagccgaaaatgccgaaggccagacccccgcaatcgggcctgatggtgaacccttggatgaaacaagccagatgtccgacttaccggtgaaagtgattcacgtcgagtcaggcaagattttaaccggcacggatgcaccaaaggcgggacagctggaagcatggcttgaaatgaatcccggctacgaggttgccccacggagcgacagtgaagagagcggtagtgaagaagaagaagaagaggaggaagaagaacagccacaagccgcgcagcctccaacattgccggtggaagagaaaaaaaagatccccgatccagatagtgacgatgtgtctgaggtcgatgcgcgccacatcattgagaatgcaaagcaggacgtcgacgacgaatatggcgttagccaggcattggcacgcggtctacagtcatactatgctgtagcccacgctgtgactgaacgggtcgataaacagtctgcgcttatggtcaacggcgttctcaaacagtatcaaattaagggtctcgaatggttagtgtccctctataacaacaatctcaacggaattcttgctgacgaaatgggcctggggaagaccattcagactatcgctctgataacttatctgatggagcacaagaggatcaatggaccctttttgattatcgttcccctttcaaccctaagcaactgggcttacgagttcgacaaatgggctccctctgtggtgaaggtcagctacaaggggtctccagctgcccgacgcgccttcgtgccccagctgagatccggtaagtttaatgttctgcttactacctacgagtacattattaaagacaagcatatcctagctaagatcaggtggaagtacatgatcgtagacgaagggcatcgtatgaaaaatcaccattgtaagctcacacaagtgctgaatacccactatgtggccccgcgtcgtctactgttgactgggactcctttacagaataaactgccagaactttgggcacttctgaatttcctgttaccaaccatttttaaaagctgttccacctttgaacagtggttcaatgcaccctttgctatgacaggcgagaaggtggacctgaatgaggaagagaccattctgattatccgccgcctgcacaaggtgctcagaccatttcttcttagacgtcttaagaaggaggttgaggcacagttgcctgagaaggttgagtacgtgattaagtgtgatatgtcagcactccagcgcgtgctgtatcgtcatatgcaggctaaaggcgtattgctgacagatgggtcagaaaaggacaaaaaaggcaagggggggactaagacattaatgaataccatcatgcagcttcgaaagatttgtaatcacccttacatgtttcagcatatagaagaatcatttagcgaacacctcgggttcacgggagggattgtacaggggctggacttgtacagagctagtgggaaatttgaactcttggacagaatattgccaaaactccgagcaacgaaccataaagtgttgctcttctgccaaatgacttctctgatgactattatggaagattactttgcttatcggggattcaaatacctgcgcctcgacgggactactaaagctgaggaccgcgggatgctcctgaagacttttaatgagcctggatcagaatatttcatctttctgctgtctaccagggccggaggattgggactcaacctgcaaagtgccgataccgtcatcatttttgatagtgattggaacccacaccaagacctgcaagcccaagacagggcacaccgcatcggacagcagaatgaggtcagggtacttcggctgtgcactgtcaactcggtcgaggaaaagattcttgctgcagccaaatacaaactgaatgtcgaccagaaggtcattcaggccgggatgtttgaccaaaaaagctctagtcatgagcgaagagcctttctacaagccatcctcgagcatgaggaacaagacgaagaggaagacgaagttccagatgatgagaccgtaaaccaaatgatcgccaggcatgaagaggagttcgatttgttcatgaggatggatctggatcgccggagagaggaggcccgcaatcctaaacgtaagcctcggctgatggaggaggacgagttacctagctggatcataaaggacgacgccgaggtcgagcggcttacatgcgaggaggaagaagagaaaatgtttggcaggggctctcgccaccggaaggaggtcgactactccgattcattgacggagaagcagtggctgaaggcgattgaggagggaactctggaagagattgaagaagaagttaggcaaaagaagtcctccagaaaacggaagagagattccgatgccggttcttctacccccacgacttcaacaagatcacgggataaggacgacgaatctaagaagcagaagaagcgtggccggccaccagccgagaaactgagtccaaatcccccaaacttgaccaaaaagatgaaaaaaatcgtcgacgcagtgatcaagtataaagactcctcatccggccggcagctgtcggaggtcttcattcagctgcctagtagaaaggaactcccggagtattacgaactgattaggaaaccggttgacttcaagaaaatcaaagagagaattaggaatcataaatatcgctcactgaacgacctggaaaaggacgtgatgctcctatgccagaatgcacagacttttaacctggaaggatcactcatttacgaggacagcatagtgcttcaatccgtgtttacaagcgttaggcagaaaattgagaaagaagacgattccgagggggaggagtctgaagaggaggaggaaggcgaggaggaaggttcagaatccgaatcccggtctgtgaaggtcaagattaagttgggtcgtaaggagaaagcacaggacagactgaagggaggccgccgtcgccctagccgaggttcaagagcaaaaccagttgtttccgacgatgatagcgaagaggaacaggaggaggaccgatccggctcaggcagtgaagaggattag

SEQ ID NO: 207569 - DNA, 3159 bp, synthetic construct
  misc_feature 1..3159: note = Description of Artificial Sequence: Synthetic coding sequence
  source 1..3159: mol_type = other DNA
atgagcagcgccgccgagcccccccccccccccccccccgagagcgcaccgtccaagcctgcagcaagcattgccagcggcggctcaaatagttcgaataagggtgggccagaaggagtcgcggcccaggcggtcgcgagcgccgccagcgctggccctgccgacgccgaaatggaagagatcttcgatgatgcctcccctgggaaacaaaaagaaattcaggaaccagaccccacctatgaagaaaaaatgcagacagatcgagccaatcgtttcgagtacctcctgaagcagacggaactgttcgcccacttcatccagcccgctgcccagaagactcctaccagtcccctgaaaatgaaaccgggccgaccaaggattaaaaaggacgaaaagcagaacttgctgagtgtgggcgactaccgtcatcgaaggactgagcaggaagaagacgaggagctcctaacagagtcatccaaagctacaaacgtttgcacgaggttcgaagatagtccctcttacgtcaaatggggcaagttaagggattatcaggtgcggggacttaactggttgatttccttgtatgagaacggaatcaacggtatcttggccgatgagatggggcttggaaaaacactgcagactatttccctgctcggatatatgaagcactataggaacatacctgggccacatatggtcctggtccccaaatcgacacttcataattggatgtcagagtttaagagatgggtacctacactgaggtctgtttgcctgatcggcgataaagagcagcgagcagctttcgtgagggacgtcctgctgcctggggaatgggacgtctgtgttacctcatacgagatgctcataaaggagaaatccgtgtttaagaagtttaattggcgttatctggtaattgacgaggcgcacagaattaagaacgagaagagcaaactgtccgaaattgtacgggaattcaagacgacaaaccgcctgctgctcactggcactccacttcaaaacaatcttcacgagttgtggtctcttctgaattttttgcttccagatgttttcaatagcgctgatgacttcgacagctggttcgacactaacaattgccttggcgaccaaaaattggtagaaaggctccatatggttcttcgcccgttccttttacggcgaatcaaagcggatgtcgagaagagcctgccacccaagaaggaagtgaagatatatgtcggactcagcaaaatgcagagagagtggtacaccagaattctgatgaaggatatcgatattctgaatagcgctggaaaaatggacaagatgcgactcctgaatatcctaatgcaactccggaagtgttgtaatcacccttatctctttgacggtgccgagcccggtccgccatacacaacagatatgcacctggtcacaaactctgggaagatggtcgtgctcgacaagctattgccgaagctcaaggagcagggtagccgcgtgctgatcttttcccagatgactagagtgctcgacatcctggaagattactgcatgtggagaaattacgaatactgccggctggacgggcagacgccacacgatgagcgacaggattctatcaacgcatacaatgagcccaatagcactaagtttgtgtttatgcttagcacacgcgctggcggactgggaattaacctagcaaccgcagacgtggtaattctctacgattccgactggaacccacaggtagacctgcaagccatggaccgagcccaccggatcgggcagacaaagactgtgagggtattccggttcattaccgacaacacagttgaagagcggatcgttgaaagggcagaaatgaagcttcgtctggacagcatcgtgatccaacaaggacgcctggtggaccaaaatttgaataagattggaaaagacgagatgttacagatgattagacacggggctacacacgtgtttgcatccaaggagtcggaaatcacagatgaagacattgatgggattctggaacgcggggctaagaagactgctgagatgaacgagaagctctccaaaatgggtgaatcttctctgcggaattttactatggataccgaatcttccgtttataatttcgagggcgaagactatcgcgagaaacagaagatcgcctttaccgaatggattgagccgcccaagcgggagcgtaaggccaattacgcggttgatgcttattttcgggaggcacttcgcgtgtcggaacctaaggcgccaaaagcgccacgacctcctaaacagccgaatgtgcaggattttcagttcttccccccgcggctttttgaactattggaaaaggagatcctgttttacaggaagacgataggctacaaggtgcctagaaatcccgagctgcccaatgcagcacaggcgcaaaaggaggagcagcttaagatcgacgaggccgagagtcttaacgacgaagagttagaggagaaggaaaaactcctgacccagggcttcaccaattggaataagcgcgatttcaaccaattcataaaagcaaacgaaaagtgggggagagatgacatagagaacatcgcaagagaggtcgaaggaaagaccccagaggaagtgatcgagtatagcgctgtgttttgggaacgctgcaacgagctgcaggacatagaaaagattatggcacagatcgaaaggggcgaggcgagaattcagaggcgcattagcatcaagaaggcgttagacaccaaaataggaagatacaaagcacctttccatcagttgaggatctcatatggcaccaataaaggcaagaattacacggaagaagaagatcgttttttaatctgtatgcttcacaagctcggcttcgataaagagaatgtctacgacgagttaagacagtgcatccgaaattccccacaatttcgctttgactggtttctgaaatcgagaaccgccatggagctccagagacgctgcaatactctgattaccctgatcgagagagaaaacatggagctggaagagaaggagaaagccgaaaagaagaagcggggcccaaaaccatcaactcagaaacgcaaaatggacggtgcgcctgatgggaggggtagaaaaaagaagctgaagctctag

SEQ ID NO: 207570 - DNA, 2988 bp, synthetic construct
  misc_feature 1..2988: note = Description of Artificial Sequence: Synthetic coding sequence
  source 1..2988: mol_type = other DNA
atggaggagatcttcgacgacgccagccccggcaagcagaaggagatccaggaaccagacccaacgtacgaagagaaaatgcaaaccgaccgcgcgaatcggttcgagtacttgctgaaacagactgaactgtttgcccactttatccagcccgccgcccaaaaaaccccaacaagccccctgaagatgaaaccagggcgcccccgcatcaagaaagatgagaaacagaacttactgagcgtgggtgattaccgacaccgacgcaccgaacaggaagaagacgaggagctgctaaccgagtctagcaaggcaactaatgtgtgcacacggtttgaggactccccttcttacgtcaaatggggcaaactgcgcgattatcaagttaggggcctgaactggcttatctctctttatgaaaacggaataaacggaatcctcgctgacgagatgggcctgggaaaaaccctgcagactataagcctgctaggatacatgaagcattataggaacatacccggcccacatatggtactggtcccaaagtcaaccttgcacaactggatgagcgagtttaagaggtgggtgcctacactgcgatccgtatgcctgattggcgacaaggaacaaagggccgcctttgtgagagacgtactgctgcccggtgaatgggatgtgtgtgtgacgagttacgagatgctcataaaagagaaaagcgtttttaagaagttcaattggcgctacctggtcatcgacgaggctcaccgcataaaaaatgagaaatccaagctcagcgaaatagtcagggaatttaagactactaacaggctgctgctcacaggaacacctctgcagaataacctgcacgagctgtggagccttctgaattttttgctgccggacgtttttaattcagccgacgactttgacagttggttcgacaccaacaactgcctaggtgaccagaaactggttgagcgcttacacatggtgctgcggcccttcttgctccggaggattaaagccgacgtggagaagagcctccctccaaaaaaggaagtgaagatctacgtggggctgagcaagatgcaacgagaatggtacacccgaatccttatgaaagacatcgacattctaaactcggcgggaaaaatggacaagatgcgtcttctgaatattctgatgcagctgcgaaagtgctgtaaccacccctacctgttcgatggcgcggagcccggccccccttacaccaccgacatgcatctggtaacaaactcaggtaagatggtggtcttggacaagcttctcccaaagctgaaagagcagggatcgcgggtactgattttctcacagatgacgagagtacttgatatactggaagactactgcatgtggcggaactatgagtactgccgcctggacggacagacacctcatgacgagcgccaggattccatcaatgcgtataatgagcccaacagtaccaaattcgtgtttatgttgtctacaagagctggcgggcttggcataaatctggccacagctgacgttgtgattctgtacgattctgactggaatcctcaggtggacctgcaagcaatggaccgcgcacacaggataggccagaccaagacagtccgcgtgtttcggttcataacagacaacactgtggaggagcgcatcgttgagcgtgctgaaatgaaactccgcttggacagtattgtcatacagcagggccgactggtggaccagaatcttaacaaaatcggaaaagatgagatgctgcagatgatacggcacggcgctactcacgtgttcgccagcaaggagtccgaaattactgatgaggatatcgacggaattctcgaacggggcgctaaaaagactgctgagatgaatgagaaactttcaaagatgggcgagagtagtttacggaacttcacaatggacaccgaaagttccgtgtataatttcgaaggagaggactacagggagaagcagaagattgctttcacggaatggattgagccccccaagcgagaacgcaaggcaaattacgctgtcgacgcttactttagggaagccctccgcgtgtccgaaccaaaggctcctaaggcgccacgccccccaaagcagccaaatgtccaagatttccagttctttcctccacggttgtttgagcttttagagaaggaaatcctgttctatagaaaaacaattggatataaggtcccacgaaacccggaactgccaaacgctgctcaggcgcagaaggaggaacagctcaagatagacgaggctgagagtttgaatgatgaggagcttgaagagaaggagaaactcctgacgcagggctttacgaactggaacaagcgggactttaatcagtttattaaggccaatgagaagtggggtcgtgatgacatcgagaacatcgcccgggaggtggagggaaagacccccgaagaggtcatcgaatatagtgccgtgttttgggagaggtgtaatgaactccaggacatcgaaaagattatggctcagatcgagaggggagaagcccgcatccagcggcgtatcagtataaaaaaggccttagacaccaaaattggaaggtataaggcaccctttcaccagttgagaatttcttatggaacaaacaaagggaagaattacaccgaagaggaggataggttcctcatttgtatgctccacaaactggggtttgataaagagaatgtatatgatgagcttcgccaatgtatccgtaactcgccacagtttcgctttgattggtttctcaagagccggacggccatggagttgcaacggaggtgtaataccttaatcacactgatcgagagagagaacatggagctagaagaaaaggaaaaagccgagaagaaaaaacgcgggcctaagccctctacacagaagcgtaagatggacggggcgcccgatggtcgtggtcggaaaaagaagttaaagttatag

SEQ ID NO: 207571 - DNA, 2988 bp, synthetic construct
  misc_feature 1..2988: note = Description of Artificial Sequence: Synthetic coding sequence
  source 1..2988: mol_type = other DNA
atggaggagatcttcgacgacgccagccccggcaagcagaaggagatacaggaacctgatcctacctatgaagaaaagatgcagactgaccgtgccaatagattcgagtacttgctcaaacagaccgagttgttcgcccatttcattcagccagcagctcagaagacaccgaccagtccccttaaaatgaagcccggccggccacgcattaaaaaggacgagaagcaaaacctgcttagtgtcggggactaccggcacagacgaaccgaacaagaggaggatgaagagctgcttacggagtcttcgaaagccacaaacgtgtgcacccgctttgaggactcccccagttatgtgaagtggggcaaactccgagactatcaagtcagaggactgaattggcttatctcactgtatgaaaatgggataaatggtattctggccgacgaaatgggactgggcaagacactgcagaccatctctctactggggtatatgaagcactatagaaacatcccaggtccccacatggtactggtccctaaatctaccctccacaattggatgtcagagtttaagcgatgggtgccaacattgagatccgtgtgtctgattggggacaaggaacagcgtgcggccttcgtgcgcgacgttctgctacctggcgagtgggatgtttgtgtcacttcatatgagatgctcattaaggagaagagcgtgttcaaaaagttcaactggaggtacctcgtcatagatgaggcccacaggatcaaaaatgaaaagagtaagctctccgagatcgttcgtgaattcaagacaactaaccgactgcttctaacaggtacaccgttacagaataacctgcacgagttatggagcttgctgaatttcttgcttccagatgtcttcaattctgccgatgattttgattcatggttcgatactaataattgtttgggggaccagaaattggtggagcggctgcacatggtcctcaggccttttctactgcgacggatcaaggccgatgtagaaaagtcgttacccccaaaaaaggaggtgaagatatacgtcggcctgtccaagatgcagagagagtggtatacacggattctgatgaaagatatcgacatattaaactcagcagggaaaatggataagatgcggcttctaaatatcctgatgcagctaagaaaatgttgtaaccacccatacctgttcgacggggccgagcccgggccaccttatactacagacatgcacctggtgactaattcagggaagatggtggttctggataagctgctgcccaaactgaaagagcaagggagtcgggtcctgattttcagtcagatgacacgggtgctggacattctcgaggactattgcatgtggaggaattatgagtattgtcggctggacggccagacaccccatgacgagcggcaggacagtatcaacgcatacaacgagcccaactcaaccaagtttgtgtttatgctgtccacccgtgctggaggccttggcattaacctggcaactgccgatgtcgttatcctgtacgattccgactggaatccccaggtggacttacaggccatggaccgcgcccatcgaatcggccaaactaaaacggttagagtgttcaggtttattaccgataataccgtagaagagcgcatagtggaaagagctgagatgaagcttagactggacagtatcgtcattcagcagggccgactggtggatcagaatcttaacaagatcggaaaggacgagatgctgcagatgattagacacggggcaacccatgtcttcgcctcaaaggaatctgagattaccgacgaagatattgacgggattttggagcgcggggccaaaaaaaccgccgaaatgaatgaaaagttgtccaaaatgggggaatctagcctgagaaacttcacaatggatactgagagcagtgtttacaactttgagggcgaggattacagggagaagcagaagattgcttttacggagtggattgagccaccaaaacgcgagcgcaaggctaattacgcagtggatgcctacttcagagaagctcttcgcgtctccgaacctaaggcccctaaggccccccgtccccctaaacagcccaacgtgcaggatttccagttcttccctccacgcttgtttgagctgttagaaaaggagattttattttaccgaaaaacaatcggctacaaagttcctaggaatccagaactacccaacgcggcacaagctcagaaagaagaacaactgaagattgacgaagctgaatctctgaacgacgaagaacttgaagagaaggagaagttgctgacacaaggctttaccaattggaacaagcgggattttaaccagttcatcaaggccaatgaaaaatggggccgggacgacatcgaaaatatcgccagggaagtggagggcaagacaccggaagaggtgatcgagtattccgcagtgttctgggagcgctgtaacgagttacaggatatcgagaagattatggcacaaatcgagaggggagaagcccggatccagcgtcgcatatccattaagaaagcccttgacactaagattggcagatataaggcaccctttcaccagcttagaatatcgtatggtaccaacaagggcaaaaactacactgaagaggaggataggttcctgatatgcatgcttcacaaactgggcttcgacaaagagaacgtctacgatgaactgcgccagtgcattcggaattccccccaatttaggtttgattggtttctgaagtcccggaccgcaatggaactgcagagaaggtgtaacaccctgataactctcatagagagagagaacatggaacttgaggagaaggaaaaggccgagaaaaagaagcggggaccgaaaccaagcacccagaaacgaaaaatggacggggcccctgacgggcgtggccggaaaaaaaagctaaagctttag

SEQ ID NO: 207572 - DNA, 2865 bp, synthetic construct
  misc_feature 1..2865: note = Description of Artificial Sequence: Synthetic coding sequence
  source 1..2865: mol_type = other DNA
atgagcctgcccctgaccgaggagcagcggaagaagatcgaggagaatcgccaaaaggccttggcccgtcgcgcagagaaactgcttgctgagcaacatcaacgcacaagttctggcacctccatcgccgggaatcctttccaagccaaacagggaccttctcagaattttccgcgggaatcttgcaagcctgtgtcccatggtgtgatttttaaacagcagaatctgagctcttcttccaacgcagatcaacgcccacatgattctcactcctttcaggccaaggggatctggaagaaacccgaggagatgccaactgcatgccccggccatagcccccgtagccagatggccctcaccggaatcagtcccccacttgcccagtcaccccctgaagtgcccaaacagcaactgctgagttatgagctaggtcaaggccacgctcaggcttcaccagaaatccggtttacacccttcgctaatccaacccacaagccgctggccaaacccaaatccagccaggagacgcccgcccacagttcagggcagccgccacgtgacgcaaagctcgaggccaagacagccaaagcgagtcctagtgggcagaatatttcctatattcactccagttcagagagcgttacaccgaggaccgaaggccggctgcaacagaagagtggctcttccgtgcagaaaggagtgaacagtcagaaggggaagtgcgtccgaaatggtgaccgattccaggtgctgataggctataatgcagaattgatagcagtcttcaagaccctgcctagcaagaactacgaccctgatacaaaaacctggaacttttcgatgaacgactactctgcccttatgaaggccgcacagagcctgccaacggtgaacttgcagccacttgagtgggcttatggcagcagcgaatccccctccacctcctccgaaggtcaagctggcttaccttcggcgccttccctgagcttcgtgaaaggcagatgtatgctcatttcaagggcatacttcgaggcggacatttcatacagtcaggacctgatagccctctttaaacagatggactcgcggcgttacgacgtgaaaacccgcaagtggtcctttctactggaagaacatagcaaacttatcgctaaggttaggtgcttacctcaggtccagctggatcctttgcccacaacactcactttggcattcgcaagccagctcaaaaagacaagcttatcactgacacctgatgtgccagaagccgacttgtccgaggtggacccaaagttggtatccaatttaatgcccttccagcgagctggagtgaactttgccatcgccaagggaggccgcttgctgctcgccgacgatatgggcttgggcaaaactattcaggccatatgtattgcagccttctatcgaaaggaatggccccttttagtcgtcgtccccagctccgtgcgtttcacctgggaacaagccttcttacgctggctgccaagcttgagcccagattgtattaatgtggttgtcaccggtaaggaccggcttacagcgggtcttatcaacattgtcagttttgacctgctttctaaactggaaaaacaattaaagactccctttaaggtcgtgatcatcgacgaatcccacttcctgaagaattcacgcaccgctaggtgtagagcggccatgccagtcctgaaggttgcaaagcgggttatcctcctctcagggaccccggctatgagccggcctgctgaattgtatacccaaataatcgcagtcaaacctacattttttccccagttccacgcgtttgggctcagatactgcgacgctaaacgaatgccttggggatgggattactcaggctcctccaatctaggcgaactcaaactcctgctggaggaagccgtaatgttgcggagattgaagagtgatgtcctgagccaattacctgctaaacaaagaaaaatcgttgtgatcgcgccagggcggattaacgccaggactcgcgccgccctggacgcagccgccaaggagatgactactaaggacaagaccaaacagcagcaaaaggacgcactcatcctcttttttaatcgcactgccgaggctaagattcctagtgtgatcgagtacattctggatttgcttgaaagcggacgggaaaagttcttagtctttgcgcaccataaagtcgtgctggatgccatcacccaggagctggaacgaaagcacgtccagcacattcgcatcgacgggagcactagcagcgcggagcgggaagatctgtgtcagcagtttcagctgtccgagcggcatgccgttgctgtgctttcaattacggccgctaatatggggttgacgttctcatctgcggacttagtagtgttcgccgaattgttttggaatccgggcgttctgatccaggctgaggaccgggtgcataggattgggcagacctcaagcgtggggatccattatttagtggcaaaagggactgctgacgactatctgtggcccctgatacaggagaagataaaagttctggctgaagcagggctgtctgagacaaacttcagcgaaatgacagagtccaccgactatctctataaagatcccaagcaacagaagatctatgacttgtttcagaagtccttcgagaaagagggtagcgatatggagctactggaagcggctgaaagttttgaccctgggtcagcgagtgggacatctgggagcagctctcagaatatgggtgatacccttgacgaatcctctctaaccgcttcaccacagaaaaagagacggtttgaattttttgataactgggactcatttacctcgccactgtag

SEQ ID NO: 207573 - DNA, 2865 bp, synthetic construct
  misc_feature 1..2865: note = Description of Artificial Sequence: Synthetic coding sequence
  source 1..2865: mol_type = other DNA
atgagcctgcccctgaccgaggagcagcggaagaagatcgaggagaacagacagaaggccctcgccagacgtgcggagaagctcctggcagaacagcatcaaagaacttccagcggtacctcaatcgccggcaaccccttccaagcaaagcagggaccctcacagaacttcccacgggagagctgtaaacctgtatcgcacggggttatcttcaagcaacagaatctgtcatcttcctctaacgctgatcaaagacctcatgattcccactcgtttcaggctaagggcatctggaaaaagccagaggagatgcctacagcctgccctggccattcccccagatcccagatggcccttactggcatctcgccgcctctagcacaatctcctcctgaagttccaaagcagcagttgttgagctatgaacttggacaaggtcacgcacaggctagcccagaaattagattcactccttttgctaatccgacacacaagcccctcgctaagcctaagtcttcccaggaaacacccgcccattcgtcgggacagccccctcgcgacgcaaagctcgaagctaagacagccaaagcttccccctctggccagaacattagctacattcacagttccagtgagagtgtcacacctcggacagaagggagattacagcagaaaagcggttcttctgttcagaaaggggtgaactcccagaaggggaaatgtgtaagaaacggagataggttccaggtactgataggatacaatgccgaactgattgccgttttcaaaactttaccctccaaaaactacgaccctgataccaagacctggaattttagcatgaacgactattccgcactgatgaaggcagctcagtcactgccgacggtcaacctgcaaccattagagtgggcctacggctcctcagagtcgccctccacttccagcgaaggtcaggccgggttacccagcgccccgtccctctcgtttgttaaggggaggtgtatgctgattagccgggcgtactttgaagcagatatctcatatagccaggacttaatagcactgtttaagcagatggacagcaggaggtatgacgtgaagaccagaaagtggagtttcctgctggaagagcacagcaaactgatcgctaaggtccggtgcctgccacaggtccagctggatccgctgcccaccaccttgactctggcttttgcgagccagctcaaaaaaacaagtctcagtctcaccccagatgtccccgaggccgatctctccgaggtcgaccctaaactggtctcgaacctcatgcctttccagagagccggggtgaacttcgctatagccaaagggggccgcctgctgttagctgacgacatgggattgggtaaaaccatccaagccatttgcatcgccgccttctaccgaaaagaatggccacttctggtggttgtgccgtccagcgttagattcacctgggagcaggccttcctgaggtggttgccgtcactctctcccgactgcataaatgtggtagtcaccggtaaggaccgcttgacagctggtctgatcaacatcgtgtcctttgatctgctgtccaagctcgaaaaacaactgaaaacgccatttaaggtggtgatcatcgacgaatcacatttcctgaaaaatagtagaactgcgcgctgccgcgctgccatgccagtattaaaggtggcaaaacgtgtcatcctgctgtcaggcaccccagccatgtctcggcccgctgaactgtacacccagataatcgccgtgaagccaaccttcttcccacagttccacgcttttggcttacgatattgcgatgcgaagcggatgccttggggctgggattattccggctcctccaatctgggcgaactgaaacttctgctagaggaagcggtgatgttgcgacgtctgaaaagcgacgtcctatcacaattacccgccaagcagagaaaaattgttgtcatcgcgcccggacgcattaacgcccgcacaagggctgcacttgatgctgccgctaaagaaatgaccacaaaggacaaaactaagcagcagcagaaggatgcgctaatactgttttttaatcgcactgcagaagccaaaatcccttctgtgattgagtatatcctggacctgttagagtcagggagggagaagttcctggtcttcgcacaccacaaagtggtgctcgacgcaatcactcaggaacttgagagaaagcacgtgcaacatataagaatcgatgggtctacttctagcgcagagcgggaggatctttgtcagcagttccaattgagcgaacgccacgctgttgccgtgctgtccattaccgccgctaatatgggccttacattctccagtgcggatctcgtagtgttcgcagagctcttctggaatccaggggtgctcattcaggcagaggatagggtacaccggatcggtcagactagcagcgtgggtattcattatcttgtggctaaaggaactgccgacgattacctttggccccttatccaagaaaaaatcaaggtgctggccgaggccggcctctccgagaccaacttctctgaaatgacagagtctaccgactatctctacaaagatccaaagcagcaaaagatctacgatctgttccaaaagtcctttgaaaaggaggggtctgacatggagctgttggaggccgccgagtctttcgatcccggctcggcctcaggaacttcaggctctagcagtcagaacatgggggacaccctcgacgagagctctctgacggcaagtccccaaaagaagcggcgatttgagtttttcgataattgggatagcttcacatcccccctgtag

SEQ ID NO: 207574 - DNA, 60 bp, synthetic construct
  misc_feature 1..60: note = Description of Artificial Sequence: Synthetic coding sequence
  source 1..60: mol_type = other DNA
atgagcctgcccctgaccgaggagcagcggaagaagatcgaggagaaccgtcagaaatag

SEQ ID NO: 207575 - DNA, 441 bp, synthetic construct
  misc_feature 1..441: note = Description of Artificial Sequence: Synthetic coding sequence
  source 1..441: mol_type = other DNA
atgagcctgcccctgaccgaggagcagcggaagaagatcgaggagaatcggcagaaggcccttgcccgacgggccgagaagttgctggccgagcaacatcagcgcactagttccgggacttccatcgctggcaacccgttccaggctaagcaagggcccagccaaaatttcccacgagagagctgcaagcccgtgagccatggagttatttttaaacaacagaatctcagttcgtctagcaatgcagaccaacgccctcacgactctcacagtttccaggctaaggggatttggaagaaacccgaagagatgcctaccgcttgtcctggacatagtccccgtagtcagatggccctcacgggaatatctccgcccctggctcagtctccccctgaggttccgaaacaacagttactctcttatgagctgggacagggatag

SEQ ID NO: 207576 - DNA, 279 bp, synthetic construct
  misc_feature 1..279: note = Description of Artificial Sequence: Synthetic coding sequence
  source 1..279: mol_type = other DNA
atgagcctgcccctgaccgaggagcagcggaagaagatcgaggagaataggcagaaagctttggccagaagagccgaaaaactgctggccgagcagcaccagcgcacaagctctggcacatctatcgcagggaatccttttcaagcaaaacagggacccagccaaaatttccctagggaaagttgtaaacctgtgtcacatggtgtgatctttaagcagcagaaccttagcagttcaagcaacgccgaccagaggccgcatgactcacactccttctag

SEQ ID NO: 207577 - DNA, 393 bp, synthetic construct
  misc_feature 1..393: note = Description of Artificial Sequence: Synthetic coding sequence
  source 1..393: mol_type = other DNA
atgagcctgcccctgaccgaggagcagcggaagaagatcgaggagaataggcagaaagcactggcccggagggcagaaaaactgttagcggagcagcaccaaaggacttcttctggaactagtatcgccgggaacccttttcaagccaagcagggcccctcacaaaatttcccaagggaaagttgcaagccagtgtcccacggggtgattttcaaacagcagaatctatcctccagcagcaacgccgaccagcgaccacatgactctcattccttccaagcaaaggggatttggaagaagcctgaggagatgcccaccgcttgcccagggcacagtccacggtcccagatggctcttacgggcatcagccccccattagcacagtcgccctag

SEQ ID NO: 207578 - DNA, 3318 bp, synthetic construct
  misc_feature 1..3318: note = Description of Artificial Sequence: Synthetic coding sequence
  source 1..3318: mol_type = other DNA
atggccgccgccgccggcggcggcggccccggcaccgccgtgggcgccaccgggtccggcattgcggccgctgccgctggactggctgtgtaccggcgcaaagatggcggtccagctaccaagttttgggagagtcccgagaccgtctctcagttggattcggtgcgggtctggctcggaaagcattataagaaatatgtgcacgccgatgccccaacaaataagacactggccggactcgttgtgcagctgctccagtttcaggaagatgcattcgggaaacacgtgaccaacccggcattcacaaagctacccgccaaatgctttatggatttcaaagctggcggggccttgtgtcacattctgggggccgcatataagtacaagaacgagcaggggtggagacggtttgatctgcagaatccttctcggatggatcgtaacgtagaaatgttcatgaatattgagaagacattagttcaaaataattgtcttactcggccaaatatatacctcatccccgatattgatctgaaactggcaaataagcttaaagatatcattaagagacaccaggggacatttacggatgagaagagcaaagcgtcccatcatatctacccgtacagcagctctcaggacgatgaagagtggctcagaccggtcatgcggaaggaaaagcaggtgctcgtgcactggggtttctacccagacagctatgacacctgggttcattctaacgacgtggatgcagaaatagaagatccgcccattccagagaagccatggaaggtccacgtgaaatggattctcgacaccgacatatttaacgagtggatgaacgaggaagactacgaggtcgacgagaatcgcaagccagtgtccttccggcaacgtatctctactaagaatgaagaacctgtaagaagccctgaacggagggatcgcaaggcttccgctaatgcaaggaagagaaagcactctccatcccccccgccacccacaccaacagaaagtcggaagaagtctggcaaaaagggccaagcctccttgtacggtaagcgcaggtcgcagaaagaggaagatgagcaggaagaccttaccaaggacatggaagacccaactccagtgccaaatattgaagaggtggtactgccaaagaacgtcaatttaaagaaagactccgagaacacccctgttaagggggggactgtggcggatctagacgagcaagacgaagaaaccgtgacagccggcggaaaagaagatgaggacccagccaagggtgaccaaagcagaagtgtagacctgggagaagacaacgtgaccgaacagaccaaccatatcattattccttcttatgcgtcttggtttgattacaactgcattcacgtgatagagcggagggctctgccagagttctttaatgggaagaataagagtaagactccagaaatttatcttgcctaccgaaactttatgatagatacataccggctaaacccacaggaatatcttacctccaccgcatgtcggagaaacctgacgggagatgtgtgcgcggtaatgagggtgcacgcgttcctggagcagtggggcctggtgaactaccaggtggacccggaaagccggccgatggcaatgggcccccctcccactccacacttcaacgtcctcgccgacaccccaagcggcctcgtcccattgcacctgagaagtccccaggtccctgcggcacaacagatgcttaattttccggagaaaaataaagagaaacccgtcgacctccagaacttcgggcttcgcacagatatatatagcaaaaagacattggcaaagtctaagggcgcaagcgccggaagagagtggaccgaacaggaaaccttgcttctgctcgaggcgcttgaaatgtataaggatgactggaacaaggtgtcagagcacgtagggtcacgcacgcaggatgagtgcatcctgcacttcctgaggctgcccatagaggatccatacctggagaattctgacgcttccctggggcctctggcataccaaccagtgcccttctcacaatccggcaatcctgtcatgtccacagttgcattcctggcatcagtggtggaccctcgggttgcgtcagccgcagcaaaagctgctctggaagagtttagccgggttcgggaagaggtccccctcgagctggtggaggcccatgtgaagaaagtacaagaggctgcacgcgcctctgggaaggtagaccccacctacggacttgaatcctcctgtatcgcaggaacgggcccagacgaacctgaaaaactggaaggcgctgaggaggagaaaatggaggcggatcctgatggccagcagcccgagaaagccgagaacaaagttgagaacgaaactgacgagggtgacaaggcacaagacggagagaatgaaaaaaactccgaaaaggagcaggacagtgaggtttccgaggacacaaagtccgaagagaaagaaaccgaagaaaacaaggaactgacggacacctgtaaggaaagggaatccgacactggtaaaaaaaaggtagagcatgaaattagcgaaggcaatgtggcaacagctgccgccgctgcgttagctagtgccgctacaaaggctaagcatctggccgcagtcgaggagcggaagattaaatcactggttgccctgctcgtggagacccagatgaagaagttggaaataaagttgcgccatttcgaggagttagaaacaattatggacagagaaaaggaagctttggaacagcagcggcagcagttgctgaccgagcgccaaaattttcacatggaacagctgaagtacgcggaattgcgcgctaggcagcagatggagcagcaacagcacggacagaaccctcagcaggcgcaccagcattcgggggggcctggcctggctcccctgggcgcggctggccaccccggaatgatgcctcatcagcaacctcccccatatccattgatgcatcaccagatgcctccgccccacccaccacagcccggacagatacccggcccaggctccatgatgcctggtcagcacatgccaggccgcatgattcccacagtggcagccaacatccatccttccgggtcgggccctactccacctggtatgccacctatgcccggtaacattcttggaccgagggtccccttgaccgcccctaatggcatgtatcccccccctccccaacagcagcctccccctcccccacccgccgatggcgtgcctcctccaccggcacccggtccaccggcatctgccgctccttag

SEQ ID NO: 207579 - DNA, 3645 bp, synthetic construct
  misc_feature 1..3645: note = Description of Artificial Sequence: Synthetic coding sequence
  source 1..3645: mol_type = other DNA
atggccgtgcggaagaaggacggcggccccaacgtgaagtactacgaggccgccgacacagttacacagtttgacaacgtgcggctctggttgggaaagaactataagaagtacattcaggccgagccccccacaaacaaatctctgtcatccttggttgttcagctcctgcaattccaggaggaggtttttgggaagcacgtgtcaaatgcgccgttgaccaagctgcctattaagtgttttctggactttaaggctgggggatctctttgtcacatccttgccgccgcatataagttcaagtctgaccagggctggcggaggtacgacttccagaaccccagcaggatggatcgcaacgttgaaatgtttatgacaatcgagaaatccctggtacaaaataattgcctgagcaggccaaacatcttcctgtgtcctgaaatcgagcctaagctcctaggcaaattgaaggacataattaaacgccaccaggggactgtcacggaagataagaacaacgcaagccatgtggtgtacccggtgcctggcaacctggaggaggaggagtgggttcgccccgtgatgaagcgcgacaagcaggttctgctgcactggggctattaccccgattcgtacgatacatggattcctgccagcgaaattgaggcttccgtggaggatgcccctacaccggagaagccaaggaaggtccatgctaagtggatcctggacaccgatacattcaatgagtggatgaacgaagaagattacgaagttaatgatgataaaaaccctgtaagtcggcgaaaaaaaatttccgccaaaaccttaactgacgaggtgaattctccagattcagacaggagggataagaaaggtggtaactataaaaagcgcaaaaggagcccttctccttcccctacaccagaagccaaaaagaagaatgcaaagaaaggaccttccactccttataccaagtctaaacgaggccacagggaagaagagcaggaggatttgaccaaagacatggacgagccatcccccgtacccaacgtcgaagaggtgactcttccgaagactgtgaatacaaagaaggactcagaaagcgcccctgtgaagggagggaccatgacagatcttgatgaacaggaggatgaatccatggagacaacagggaaagacgaggatgagaactctacagggaataaaggagaacagaccaagaatcccgatctgcacgaagataatgttactgagcagactcatcatatcatcatcccaagctacgctgcatggttcgactataatagcgttcacgccatagagcgcagagcgcttcccgagtttttcaacggaaaaaataaatctaagaccccggagatctatctggcctacagaaacttcatgatcgatacatatcgtctaaatccgcaagagtacctcacatctaccgcttgcagacggaacctggccggggatgtttgcgcgataatgcgggtgcacgccttccttgagcagtggggcctcattaattaccaagtggatgcagagtctcgccccaccccaatggggcctccgcctacatctcacttccacgtgctggcagacactccgagcggtttggtgcctctccagccaaagaccccccagcaaacttctgcatcccagcagatgttgaacttcccagacaaggggaaggaaaagccgaccgacatgcagaatttcgggcttcggaccgacatgtacaccaaaaagaacgtgcctagcaagtctaaggcagcagcatccgccacccgagagtggactgaacaggagacactgctgctgctggaagctctcgaaatgtacaaggatgattggaataaggtgtccgagcacgtcggaagtcgaactcaggatgaatgtatactacattttctccgactgccaatcgaggacccctacctcgaagattcagaagcctcgttaggtccactcgcataccagcccatacctttttcccagtcaggtaaccctgtgatgtcaacagtggctttccttgcctccgtcgtggatccacgggtggccagcgcagcagccaagtcagcactagaggagttttccaagatgaaagaggaggtcccaaccgctctggtggaagcccacgtgcggaaagtcgaggaggccgctaaggtgaccggcaaggccgatcccgcctttggtctggagtcatctgggatcgcaggtacaacttccgatgaaccagagaggatcgaagaaagtggtaacgatgaggcacgggtggaggggcaagcaacagacgagaagaaggaacccaaggagcctcgtgaaggcgggggagcaatagaggaggaagccaaggagaaaacaagcgaagcacccaaaaaggatgaggagaagggtaaggaaggtgactcagagaaggaatctgaaaagtccgatggcgatccgatcgtggatcccgaaaaggagaaagaaccaaaggagggtcaggaggaggtgttgaaggaagtggttgaatccgaaggcgagcgcaaaactaaagtagagcgggatattggtgagggtaatttaagcacagctgccgctgcagccctagcagccgcagcggtaaaagcgaagcatttagccgctgtggaggaaagaaaaattaagtcactcgtagccctgctggtcgaaacacaaatgaaaaagctggaaatcaagctacggcatttcgaagagttagaaacaattatggatagggagagggaggctctggaatatcagagacagcagctgcttgctgacaggcaggcctttcacatggaacagctgaaatatgctgagatgagggcgcgccaacagcactttcagcagatgcatcaacagcagcaacagcccccccccgccctcccaccgggctcacagccaatccctccaactggcgcagccggcccgccagcggtgcacggcctggccgtagccccagcttctgtggtcccggcacccgccggctctggggcacccccaggctctctaggcccatcagagcagattggacaagcgggcagcaccgcagggccccagcagcaacagccggccggagcgccgcagccgggagctgttccccctggggtgccacctcccggaccacacgggccatcgcctttcccaaaccagcagacccctccttccatgatgcctggcgccgttccgggctccggccacccaggagtggccggaaacgctccactagggttgccttttgggatgcctcctcctccccccccgcccgccccctctataattccttttgggtccctggccgatagcatctcaatcaatcttccagcccctcctaatctgcatggccaccatcaccacctcccattcgcccctgggactctgccgccgccaaacttaccggtttcaatggctaatcccctgcatccaaatcttcccgcgacaactacaatgcccagtagtctgcccctgggccccggtctgggatccgctgcagctcagtcacccgccatcgttgctgctgtgcaaggcaacctgctgcctagtgcaagcccccttcccgatccagggacccccctacccccagatcctacggctcccagtccaggcaccgtcactcccgtgcccccacctcagtag

SEQ ID NO: 207580 - DNA, 3393 bp, synthetic construct
  misc_feature 1..3393: note = Description of Artificial Sequence: Synthetic coding sequence
  source 1..3393: mol_type = other DNA
atggccgtgcggaagaaggacggcggccccaacgtgaagtactacgaagccgccgacactgttacacaatttgataacgttagactctggctgggcaaaaattacaagaaatacattcaggcagagccccctacgaataagagtctgtcttctctcgtcgtgcaactcctacagtttcaggaggaggtgttcgggaagcacgtctccaacgccccacttactaaactgcctatcaaatgcttcctggattttaaggccggaggctccctttgtcatattcttgcagctgcttacaagtttaaatccgaccagggatggaggagatatgacttccaaaatccttcccgaatggaccgcaatgtcgagatgtttatgacaattgagaagtctttggtgcagaataactgcctgtccaggccgaacatctttctctgccccgagatcgagccaaagcttctggggaaactcaaagatatcatcaaacggcatcagggcactgtgacagaggacaaaaacaatgcttcacatgtggtctatcccgtccctgggaacttggaggaagaagaatgggtacgacccgtcatgaaaagggacaaacaagttctcctccattggggatattatccagacagctacgacacatggatccctgcttccgaaatcgaagctagcgtggaagatgcacctacccccgaaaagccaagaaaggtgcacgctaaatggatccttgacacggatacctttaatgaatggatgaacgaggaggactacgaggtcaacgatgacaaaaacccagtgtcccggaggaaaaagatcagcgcaaagacactgacggacgaagtgaacagtccggactccgaccggagagacaagaagggaggaaactacaaaaaaagaaagaggtctccatcacccagtcctaccccagaggctaagaagaagaacgcgaaaaagggccctagcaccccttacacaaaatcaaagagaggccatagggaggaagaacaggaggacttaacaaaggacatggacgaaccctcccccgtgcctaacgtggaagaggtgaccctcccaaaaactgtgaacacaaaaaaagattcagagagcgcccccgttaaagggggcacaatgaccgacttggacgaacaggaagacgagtcgatggagaccacaggcaaagatgaagatgagaatagcactggaaacaagggtgaacagaccaagaaccccgatctccacgaggataatgtgaccgagcagactcaccacattatcataccttcctacgccgcatggtttgattacaatagcgtgcatgctattgagcggcgcgccttgcccgagttcttcaatggaaaaaacaaaagtaaaacacctgagatctatctagcttacagaaactttatgatcgatacttaccgccttaatccccaggagtatttaacttccactgcctgcaggagaaacttggcgggcgatgtgtgtgcaatcatgcgcgtacacgccttcctggaacaatggggactgatcaattaccaggtagatgccgaaagccgccccaccccgatggggcccccccctacttcccacttccacgttctggccgacactccttctggactggtccctctccagcccaagacgcctcagggacggcaggttgacgccgacacaaaggcgggaagaaaaggcaaggagctggatgatttggtaccggagaccgccaaggggaagccggagctgcagacaagcgcatcacagcaaatgctgaatttccctgacaagggcaaggagaaacccacggacatgcagaactttggcctcagaaccgatatgtacacgaaaaagaacgttccctctaaatcaaaggcagctgcatctgccactcgcgagtggacagagcaggaaactctgctgctcctcgaagcattagagatgtacaaggatgactggaacaaggtctctgagcatgtggggtcacgtacgcaggatgaatgtatcctgcactttttgagactgcccatagaagacccctacctggaagactctgaggcctcactgggaccactcgcttatcagcctatccctttctcccagtcaggaaaccctgtaatgtcaaccgtggcgttcctcgcaagcgtggtcgatcccagggtggcttctgcggccgctaagtccgccttggaagaattctcaaaaatgaaggaagaagtgcccacagccctggtggaggcccatgttcgaaaagtagaggaggcagccaaagtgacgggtaaagcagatcctgcctttgggctcgagagcagtgggattgcaggtactacatccgatgagcccgagaggatcgaagagagtggcaacgatgaagcacgtgtggaaggtcaagccacagacgagaaaaaggaaccaaaagaacctagagaaggcggaggcgcaatcgaagaagaagccaaagagaagacgtccgaggctcccaaaaaggacgaggaaaaaggtaaggaaggggactcggaaaaggagtcggagaagagtgatggggaccccatcgtggaccctgagaaagaaaaagaaccgaaagaaggacaagaagaagtcttgaaggaagttgttgaatcagagggagagagaaagacaaaggtcgaacgggacattggcgagggaaatctgtcgacagcggccgccgcagctttggcagccgccgccgtgaaggctaagcacctcgctgccgtagaggagaggaagattaaatctcttgtggctctgcttgtggagacgcaaatgaaaaagttggaaattaagctgcgtcactttgaggagctggaaactattatggatcgggaaagggaggcacttgagtatcagcgacaacagctgctggcagatcgacaggccttccatatggaacagctgaagtacgctgaaatgagggcaaggcagcaacattttcaacagatgcaccaacagcagcagcagcccccaccggcgctccctcctggaagtcagcctattccacctaccggagccgccggccctccagcagtgcatggtcttgccgtggcccctgctagtgtagtgcccgcccccgccgggtcgggcgcaccgcctgggtccctgggtccatcggaacagatcggccaggccggcagcacagcggggccacagcagcagcagcccgccggagccccacagcctggcgccgtgccaccaggtgttcccccaccaggcccgcacgggccctccccattccctaatcagcagactcctccatctatgatgccaggcgcagtcccagggagcgggcatcccggagtggccgaccccggcacccccttacctcccgaccccacagctccttcccctggtactgtgactcctgtgcctcccccccagtag

SEQ ID NO: 207581 - DNA, 3459 bp, synthetic construct
  misc_feature 1..3459: note = Description of Artificial Sequence: Synthetic coding sequence
  source 1..3459: mol_type = other DNA
atggccgtgcggaagaaggacggcggccccaacgtgaagtactacgaggctgccgacaccgtcacccaattcgataacgtgcggctgtggctcgggaaaaactataaaaagtacatccaggccgagccccctacgaataaatccctctctagcctcgtggtgcagctgctacagtttcaagaagaggtgttcggcaagcacgtcagcaatgcccctctgaccaagctccctattaaatgctttctcgacttcaaagccggaggctcattatgtcatatcctggcagcagcctataaatttaaatccgaccaaggttggcgacggtacgactttcagaatccatcccggatggatcggaacgttgagatgttcatgacgatcgagaagtcactggtacagaataactgtctatccagacccaacattttcttgtgtccggagatcgagcctaaactgctgggcaagcttaaagatataatcaaacgccaccagggaaccgtgacagaggacaagaataatgcctcacatgttgtatatcccgtgcccgggaacctggaggaggaggaatgggtccgccccgtgatgaaacgagataagcaagtgctgctgcactggggctactacccagacagttacgatacatggatccccgcctccgaaatcgaggcctctgtggaggatgcacctacaccggagaagccccggaaggtgcacgccaagtggattcttgatacagataccttcaatgagtggatgaacgaagaggattacgaggtgaatgacgacaagaatccagtcagcaggagaaagaagatctctgctaagacacttacggacgaagtaaatagcccagactccgacagacgagacaaaaaaggcggtaactacaagaagaggaaaaggtcccccagtcccagtccaacccccgaggccaaaaaaaaaaacgccaagaaaggaccttccacaccatatacaaagtccaagcggggccatagggaagaggagcaggaggacctgactaaagatatggacgagccaagccccgtgccaaacgttgaagaggtgacactgccaaaaactgtaaacacaaaaaaagattctgagtccgcccctgtgaagggaggaactatgaccgacctggatgaacaagaagatgagagcatggagaccacgggaaaggacgaagacgagaatagcaccggcaacaaaggtgagcagactaagaatcccgacctccatgaggacaatgtgactgagcagacacaccacatcataattccttcatatgctgcgtggtttgactacaacagcgtgcacgctatcgaacggagagcactacctgagttttttaacggtaaaaacaaaagcaaaactcccgagatctacctggcctacagaaactttatgatcgacacttaccggctgaacccccaagagtatttgacctccacagcatgccgccgcaacctggccggggacgtgtgtgccattatgcgggtacatgcattcctcgaacagtggggattaatcaattaccaggtggatgccgagtccaggcctactcctatgggccccccccccacgtcgcactttcacgtgctagccgacactccctcaggcttagtgcctttgcagcccaaaaccccccagggccgccaggtcgacgccgataccaaggccggccgcaaaggcaaagagctcgacgacctggtgccagagaccgccaaggggaagcccgaactacaaacatcagcctcacaacagatgttgaactttcccgataagggcaaagaaaaacccacagatatgcaaaacttcggactccggaccgacatgtacaccaagaaaaatgtgccctctaagagcaaggccgcagcaagcgctacaagagagtggacagaacaagaaacactcctcctgttagaagctctggagatgtataaggacgactggaacaaggtgagcgagcacgtggggagccgcacacaggatgagtgcatcctacattttttaaggctgcccattgaagatccatatctggaggatagtgaagcttccttgggcccgctagcctatcaaccaattccattctctcagtccggtaacccagtaatgtcaacagtagcattcctcgcctctgttgttgaccctcgagtagcatccgccgcagctaagagcgccctggaggagttttcgaagatgaaggaggaagttccaactgcactggtagaagcccatgtgcgcaaagtggaagaggcggcaaaggtcacaggcaaggccgaccccgcatttggtctcgagtccagtggaattgcggggactacaagcgatgaaccggagaggatcgaagaaagtggaaacgatgaagctagggtagagggacaggcaactgacgagaagaaggaaccaaaggagcctagagaaggaggtggggcgatcgaggaggaggccaaggagaagacctcggaggctcccaaaaaagacgaggagaagggaaaagagggggattctgagaaggaaagtgaaaagtcagacggggatcctattgtcgacccggagaaggagaaagaaccaaaggagggacaggaggaggttctcaaagaagttgtggagtccgagggcgaacgtaagacaaaagtggagcgtgatatcggagaaggtaatttgagcaccgcagctgccgcagcattggcagctgcggccgtcaaagccaaacacctggcagcggtcgaagaacgtaagattaagtccttagttgctctgctggtcgaaacacagatgaagaagctggagatcaagcttcggcactttgaggagttggagacgatcatggaccgcgagagagaagccttggaataccagaggcaacagctcctggctgataggcaggccttccacatggaacaactcaagtatgcagagatgcgggccaggcagcagcactttcaacagatgcatcagcagcagcagcagccgcctcccgccttgcctcccggctctcagccgatcccccctactggggccgcaggcccgcccgccgtgcacggtctagcagtcgcgccagcttcggttgtccctgcacctgccgggtcaggagcccccccaggttcgctgggcccatcagagcagatagggcaggccgggtctactgcaggccctcaacagcagcagcctgccggcgctccccagccaggagccgtgccgcccggggtgccccctccggggcctcacggcccatcaccattccctaaccagcagacgcccccttctatgatgcccggggccgtacctgggtcaggtcatcccggggttgcagcacagagtccagctatcgtcgccgccgtgcaagggaatttgttacccagcgctagtccgctgcctgatcctggtactccactccccccagaccccacagccccaagccccggaactgtgaccccggttcctccccctcaatag

SEQ ID NO: 207582 - DNA, 1425 bp, synthetic construct
  misc_feature 1..1425: note = Description of Artificial Sequence: Synthetic coding sequence
  source 1..1425: mol_type = other DNA
atggccgcccgggccggcttccagagcgtggcccccagcggcggcgcgggcgcaagtggcggggctggagccgctgccgccctcggcccagggggaacacccggcccccctgtacggatggggcctgctcctggacaagggctgtaccggagtcctatgccaggcgccgcttatccgcgacctggtatgttgcctggaagtcgtatgacgccgcaaggcccctccatgggcccccctgggtatggaggcaatcccagcgtacggccgggactggctcagagtggcatggaccagtctcgcaagaggcctgcaccgcaacagatccaacaggtacaacaacaggctgtccagaatcgcaatcataacgcaaagaaaaagaagatggctgacaagatcctcccacagcggattcgtgaactcgtgcccgaatctcaggcctatatggacctgttggcgtttgaaagaaagctcgatcaaacaatcatgcgcaaacggctagacattcaggaagccctgaagaggcctatcaagcagaagcgtaaattaagaatatttataagcaatacctttaatcccgcgaagtcagacgccgaggacggggagggcaccgtcgcctcatgggaactgcgggtcgaggggcgtttactggaggatagtgctttatctaagtacgatgcgacaaaacaaaagcgcaaattttccagctttttcaagtcactcgtcattgaattggacaaggatctatacggaccggacaaccatctggttgaatggcataggaccgcaacaacccaggagacagatggattccaggtgaagagacctggagacgtgaatgtcaggtgcactgtactcctgatgcttgattaccagcccccacagtttaagcttgatcctagattagccaggttgctgggaatacacacccagacccggcctgtcataatccaagctctttggcagtatattaaaacccacaagctgcaagacccccacgagcgcgagtttgtgatctgtgataaatacctgcagcagatttttgaaagccaacggatgaagttctccgagattcctcagcgtctccatgctctgctgatgcctccagagccgatcatcataaatcacgttatttcagtggatcccaacgaccagaagaaaactgcttgctacgacattgatgtagaggttgacgatacgttgaagacccagatgaattccttcctactgtcaacagcctctcagcaggagattgctactttggataacaagaccatgacagacgtcgtggggaaccctgaagaggagagaagagctgagttctattttcagccttgggcgcaggaggctgtctgtagatatttttattcaaaggtgcagcagcgtcgccaggagctcgagcaagctctcggaatccggaatacctag

SEQ ID NO: 207583 - DNA, 1548 bp, synthetic construct
  misc_feature 1..1548: note = Description of Artificial Sequence: Synthetic coding sequence
  source 1..1548: mol_type = other DNA
atggccgcccgggccggcttccagagcgtggcccccagcggcggcgccggagcctctggaggagctggcgctgcggccgctctgggacctgggggaactcccgggccccccgtgaggatggggcccgctcccggccaagggctttaccgtagcccaatgccaggggctgcttatccgagacctggcatgctgcccggctctcgaatgactccacaaggcccgagcatgggccccccaggctacggaggaaatcccagcgtgcggcccggactagctcaatccggcatggaccaatctcgcaaaagaccagctcctcagcaaattcagcaggttcaacaacaggcagtgcagaataggaatcataacgcaaagaagaagaagatggctgataagattctgcctcagaggatccgggagctggtgcccgaatcccaggcttatatggatctgctggcttttgagaggaagctggaccagactatcatgaggaagagactcgatatacaagaggcattaaaaaggcctatcaagcagaaaagaaaacttagaattttcatctctaacacattcaaccccgcaaagtccgatgccgaagacggcgagggtacagttgcatcgtgggaactgcgggtggaggggcgtctgctcgaggattctgctctgagtaaatatgatgccacgaaacagaagagaaagttttcatctttttttaaatccctcgtaattgagctggataaagacctgtacgggccagataaccacctggtggaatggcacagaaccgccaccacacaagagacggatgggttccaagtaaagcgtccaggcgatgtgaacgttcggtgcaccgtcttgctgatgcttgactatcagcccccacagttcaagctggatccacgcctcgcccgattactgggaatccatacccaaacacgccccgtaattattcaagcactctggcaatacattaaaacccataagctgcaggatcctcatgagagagagttcgtgatctgcgacaagtatctccaacagatcttcgaatcacagcggatgaagttttcggaaatcccccagcgcctgcatgctttgctgatgccgcctgagcccattatcattaaccacgtaatcagcgtcgacccgaacgatcagaaaaaaactgcatgctatgacatcgatgtggaggtggacgacaccctgaagacccagatgaacagtttcctgctgtccaccgccagtcaacaagaaattgccaccctggacaataaaatccacgagaccattgaaaccatcaaccaactcaagacgcagcgggagttcatgctgagtttcgctagagatccacagggattcattaatgactggttacaatcccagtgtagggatctcaaaaccatgactgatgtggtgggaaatccagaagaggaaagaagagctgagttttattttcagccctgggcccaagaggctgtttgccggtacttctactccaaggtgcagcaaagaaggcaagagctggaacaggcccttggaatccggaatacttag

SEQ ID NO: 207584 - DNA, 876 bp, synthetic construct
  misc_feature 1..876: note = Description of Artificial Sequence: Synthetic coding sequence
  source 1..876: mol_type = other DNA
atgatgcccctgaacaagcggggcagcagcctgcccttcaagagcttggtgatcgaactggacaaggacctatacggtcctgataaccacctggtggaatggcatagaactgcaaccactcaggaaacggatggatttcaggtgaaaagaccaggggacgttaacgtcagatgcacagtgctgctgatgctggactatcaacccccccaatttaagctcgacccacgcctggcacgactgttggggattcatacccagacgagaccggtgatcatccaggccttgtggcagtacataaagacgcacaagttgcaggatccccatgaaagagaattcgtcatctgtgacaagtacctgcaacagatcttcgagtcacagcgcatgaaattctctgaaatcccgcaacggttacacgcattgctcatgcccccggagcctattattatcaaccacgtcatatccgtcgaccctaacgatcaaaagaagacagcatgctatgatattgacgtcgaggtcgatgacaccctcaagactcagatgaattccttcctgctgagtactgccagccaacaggagattgctacgttggataacaagattcacgagacaattgaaactatcaaccaactcaaaacacagcgggagttcatgttgagcttcgcgagggatccacagggcttcattaatgattggctgcagtctcagtgccgagatctgaaaaccatgacagacgtggtgggaaatcccgaagaagaaagaagggccgaattctattttcaaccctgggcacaagaagcagtatgccgttatttttactccaaggtccagcagagacggcaggagctggaacaggccctggggatcaggaacacttag

SEQ ID NO: 207585 - DNA, 1362 bp, synthetic construct
  misc_feature 1..1362: note = Description of Artificial Sequence: Synthetic coding sequence
  source 1..1362: mol_type = other DNA
atgagcaagatcagcgaggccgtgaagcgggcccgggccgccttctcctcaggccgcacacgcccactgcaatttcgcattcagcagctggaagccctccagcgcctgatccaagaacaagagcaagagctagtgggggcactcgccgccgatttgcacaaaaacgagtggaatgcctactatgaggaagtcgtatatgtccttgaagagattgagtatatgattcagaaactgcctgagtgggccgccgacgagcctgtcgagaagactccgcagacccagcaggacgagttgtacattcacagtgaaccactgggggtggtacttgtgatcggaacctggaattacccattcaatcttacaatccagccaatggtgggagccatcgctgcaggaaattcggttgtgctgaaaccgtcagagctgagtgaaaatatggcaagcttgctcgcaacaatcattcctcagtacttggacaaagatctatacccagtgattaatggtggcgtgcccgagaccacagagctcttaaaagagcggtttgatcacatactttatacaggctcgaccggcgtcggaaagataatcatgacggctgctgctaaacatttaacccccgtgactctcgaacttggcggtaaaagcccttgctacgtcgataaaaattgcgacctcgacgtggcctgtaggcgtattgcctgggggaaattcatgaactctggccaaacctgtgtcgctccggactacatcttatgtgacccttccatccagaaccagatcgtcgagaagctgaagaaatcactgaaggagttctacggcgaggatgctaagaaatccagagattacggtcgtataatctctgcacggcatttccagcgtgtgatggggctcattgagggtcagaaggttgcatacggtgggaccggtgatgccgctacaaggtatatcgcccctaccattctgactgatgtggacccacagagcccagtaatgcaggaggagatttttggcccggtcctccctatagtatgcgtccgctcgctggaggaagctatccagttcatcaaccagcgcgagaagcccctggctctgtatatgttcagctctaatgataaagtcatcaaaaagatgatagctgaaacaagctccgggggtgttgcagctaacgacgttatagtgcacattacgctgcatagcctcccgttcgggggggttggcaattctggtatgggctcgtatcacgggaaaaaaagttttgagacctttagtcatcgcaggtcctgtttggtccggccccttatgaatgacgaaggccttaaagtacggtatcccccgagtccggctaaaatgactcagcattag

SEQ ID NO: 207586 - DNA, 1452 bp, synthetic construct
  misc_feature 1..1452: note = Description of Artificial Sequence: Synthetic coding sequence
  source 1..1452: mol_type = other DNA
atgggccggcgggtgggcgtggaggtgaccccccggtgggccccccagaaatgccagggagcaaggccgcagaggccaggtatgtccccaggaaatcgcatgcccatggcaggcctccaagttgggcccccagcagggtcaccttttggggctgccgcccccctaaggccaggaatgccaccaacgatgatggacccttttcgaaagcgattgcttgtcccgcaggcacaaccccccatgcctgcacagaggaggggactgaaacgccggaagatggcagacaaggtcttgccccagaggattagagagctcgtgcctgaatctcaggcgtatatggatctgcttgctttcgagaggaagctagaccagactattgctcgcaaaaggatggaaattcaggaagccattaagaaaccactgacccagaaacggaagctgaggatctatatctcaaacacctttagccctagtaaagcagaaggggactccgcgggcactgccggcactcccggtggcacccctgccggcgataaggttgcgtcctgggaactcagggtagaaggtaagctcctcgacgacccgagcaaacagaaaaggaaattcagcagtttctttaagagccttgtgatagagttagacaaagagctctatggtccggataatcatttagtggaatggcaccgcatgccgaccacccaggagacagatggatttcaggtgaaacggcctggcgacctcaacgtgaagtgtacccttctgcttatgcttgatcaccagcccccacagtataaactggatccacgcttagcaagactcctgggggtgcacacccagactagagccgctattatgcaagcgctctggttatacattaagcacaatcagctgcaggacggccacgaacgagaatacataaattgtaacagatacttcagacagatattcagctgtggccgccttagattttcagagattccaatgaagttggctggactgctacaacatcccgaccctattgtgattaaccacgtaattagcgttgaccctaatgaccaaaagaagaccgcctgctacgatattgacgtggaggttgacgacccccttaaggcccaaatgtctaattttttagccagcaccacgaatcagcaagaaatagccagtttagatgtgaagatccacgaaacaattgaatcgattaaccagctgaagactcaaagagacttcatgctgtcctttagtacagaccctcaggactttattcaggagtggttgaggagccagcgaagggatctcaaaattataactgacgtgatcggaaatccggaggaagagagacgcgcggcattctatcatcagccttgggctcaggaggccgttgggaggcacatcttcgccaaagtacagcaacggcgtcaagagctagaacaggtgctcggcatccgtttaacctag

SEQ ID NO: 207587 - DNA, 1596 bp, synthetic construct
  misc_feature 1..1596: note = Description of Artificial Sequence: Synthetic coding sequence
  source 1..1596: mol_type = other DNA
atgagcggccggggcgccggcggcttccccctgccccccctgagccctgggggaggcgctgtcgctgcagcactgggcgccccaccgccgcccgccgggccaggcatgctccccggtccagccctgcgtggccccggaccggccggaggggtgggaggcccaggggcggccgccttccggccgatgggcccagcgggccctgcggcccagtatcagagacccgggatgtcacctgggaatagaatgcccatggctggtctgcaggtcgggccccccgccggcagccctttcggcgccgccgctcccctgcgtcccggcatgcctccaacaatgatggatcctttcagaaaacgactgttggtgccccaggctcagcctcccatgccggctcagcggcgggggctgaaacggcgaaagatggccgacaaggtcttaccgcagagaatacgagaactggtacctgagtctcaggcttatatggatctgcttgcctttgaacgtaaattggaccagacaattgcacgtaaacggatggaaatacaggaggccattaaaaaacctctgacacaaaagagaaagcttcggatatacatctctaacactttttctccgtcaaaggctgagggggatagtgcgggcacagctggtacacccgggggtaccccggctggggataaagtggctagctgggagctgcgcgtcgaggggaagttactcgacgacccaagtaagcagaagcggaaatttagttccttttttaagtctttagttattgagctggataaagaactgtacgggcccgacaaccatctcgtggagtggcacagaatgccaaccacacaggaaacagatggtttccaggtgaaaagaccaggggacctgaacgtgaaatgtactctgctgctcatgttggaccaccagcctccccagtacaaattagaccctagactggctaggctcttaggcgtgcacacacagaccagggcagcaattatgcaggcactgtggctctatataaagcacaaccaacttcaggacggccacgaaagagagtacatcaactgcaaccgatacttcagacagattttttcatgcggccgtctccgcttctcagagatccctatgaaactggccggattgctgcagcatccagatccgattgtcataaaccatgtcatctccgtcgacccaaatgatcagaaaaaaactgcatgttatgatatagacgtggaggtggatgatcccctgaaggcgcagatgtccaatttcctagcctcaacgacgaaccagcaggagattgcaagtctcgatgtcaagatccacgagactatagagtccattaatcagctgaagactcagcgagactttatgctgtcttttagtacggatccccaggactttattcaggagtggctcaggtcacagcggagggacctgaaaatcataacggacgtgattggaaaccctgaagaggaaaggcgagctgctttttaccaccagccctgggcccaggaagctgtgggccggcacattttcgcgaaagtgcaacagaggagacaagagctggagcaagtgctgggtattcggctcacttag

SEQ ID NO: 207588 - DNA, 1485 bp, synthetic construct
  misc_feature 1..1485: note = Description of Artificial Sequence: Synthetic coding sequence
  source 1..1485: mol_type = other DNA
atgagcggccggggcgccggcggcttccccctgccccccctgagccccggcgggggtgctgccttccgccctatgggccctgccggccctgctgcccagtatcagcgccctggaatgagccccggcaacagaatgccgatggcgggactccaggtcggccctcccgctgggagccccttcggagcagctgcaccacttcgccccggcatgcctcccacaatgatggacccgttcaggaagcgtttgcttgtaccacaggcacagcccccaatgcctgcacagcgccggggactgaagcgccgtaagatggccgataaggttctgccacagcgaattcgtgaactagtgcccgagtcgcaggcctacatggatctactggcctttgaacgtaagctggatcagaccatcgctaggaagaggatggaaatccaagaagcaattaagaagcctctcacacagaagcgcaagctcagaatttatatatctaacactttctccccatccaaagctgaaggcgactcagccggaactgcggggacgcccgggggcactccagcgggtgataaagtcgcctcatgggagttaagagtggagggcaaactgctggatgatccgagcaagcagaagcggaaattctcgtcattttttaaaagcctcgtcatcgagttagacaaggagctgtacggccctgataatcatctggtggagtggcacagaatgcctactacccaggagacggacgggttccaggtcaaacgcccaggcgacttaaatgtcaagtgtaccctgttgctcatgctcgatcatcagcctccgcaatataaattagatcctaggcttgcgagattgttgggggtgcacacgcagacaagagccgctatcatgcaggctctgtggctgtacatcaagcacaatcagctgcaagacggacacgagagagaatatatcaattgtaatagatatttccgtcaaatattctcatgtggcagacttcggttctccgagattccaatgaaactggccgggctgttgcagcaccccgaccctatagtcattaaccatgtgatctctgttgacccgaacgatcaaaagaagactgcatgttacgacatagacgtggaagttgacgacccactgaaagcccaaatgagtaactttctcgcgagcactacgaatcagcaggagatcgccagtctcgacgttaagatacacgagaccatcgagtcgattaatcagttgaagacccagcgagacttcatgctctctttcagcacagatccacaagatttcatccaggaatggctgaggtctcagcgacgagacctgaagatcatcacagacgttatcggtaaccccgaggaagagaggcgggccgcgttttaccaccaaccctgggcacaggaagcagtcggaagacacatttttgctaaagtgcagcagcggcgacaagaactggagcaggtgctgggaattaggttgacgtag

SEQ ID NO: 207589 - DNA, 1452 bp, synthetic construct
  misc_feature 1..1452: note = Description of Artificial Sequence: Synthetic coding sequence
  source 1..1452: mol_type = other DNA
atggccgccgacgaggtggccggcggcgcccggaaggccaccaagtctaaactatttgagttcttagttcacggcgttcgccccggcatgccttcaggtgctcgcatgccacaccagggtgcgcccatgggaccacctgggtctccatacatgggaagccccgccgtgcggccaggcttggcgcccgccggaatggagcctgctagaaagagggctgcacctcctcccggccagagccaggctcagtcccagggtcaacctgtccctactgctcctgcacggtcaaggagcgctaagcgacgaaagatggctgataagattctgccacaacggattcgggagctggtgccggagtcccaagcctatatggaccttttggcctttgagcgcaagcttgatcaaaccatcatgcgcaagcgtgtcgatatccaggaagcactaaaaaggcctatgaagcagaagcgaaagttacggctatacattagcaacacctttaaccccgcaaagcccgatgctgaagacagcgatggcagtattgcctcatgggaactgagggtcgaaggcaaattgctggacgaccccagcaaacagaagaggaaattcagctcgttttttaagtcactggtgatcgagctcgataaggacctctatgggccagacaatcatctcgtagaatggcatcgcaccccgactacgcaagagactgatggattccaagtaaagcggcctggtgacttgtccgttagatgcactttgttgcttatgctggattatcagcccccccagtttaagttggaccctcgcctggcccgtttactgggattgcatacacagagtaggagcgcaattgtgcaagccctatggcaatacgtcaagactaacaggcttcaggactcccacgataaggaatacattaatggggacaagtattttcagcagatcttcgattgtccaagattgaaattttccgagattcctcagcgcctgactgctcttctactcccacccgatcctattgttatcaatcacgttatctcagtagacccctcagatcagaaaaagactgcctgctacgatatcgacgtggaggttgaggaacccctgaagggccagatgtcttcatttctgctgtccacagctaaccaacaagaaataagtgctctggactctaaaatccatgagaccattgaatcgatcaaccaactaaagattcagcgggacttcatgctgtcattttctagggatcccaagggctacgtacaagatttactgcgcagccagagtcgcgatctgaaagtaatgactgatgtcgccggcaaccctgaggaagaacggcgagcagaattttatcatcagccctggtcacaggaagcagtctctcgttacttttactgcaagattcagcagcgccgacaggaacttgaacaaagtcttgtggtccgtaatacttag

SEQ ID NO: 207590 - DNA, 1308 bp, synthetic construct
  misc_feature 1..1308: note = Description of Artificial Sequence: Synthetic coding sequence
  source 1..1308: mol_type = other DNA
atgacccccggcctgcagcacccccccaccgtggtgcagcggcccggtatgccctcaggggccagaatgccccatcagggtgctcctatgggacctcctgggtctccctatatggggtcacccgccgctccagcgcgctcccgatccgcaaagcggaggaagatggctgataagattctccctcagaggattcgagaattagtgccagagagccaagcatacatggatctcctcgcttttgaacggaaactggaccagactattatgcggaagcgggtagacatccaggaggcccttaaaagacccatgaagcagaagagaaagttgcgtctgtatatttctaacacttttaaccctgccaaacccgacgccgaagactctgacggcagtatcgcttcatgggagcttcgggttgagggcaagctgctggatgacccctctaagcagaagcgcaaattttcttcattttttaaatctttggtaatagaactggacaaagatctgtacggaccggataaccacctagtggagtggcacaggacgcctactacacaggagacggatggtttccaggtgaagaggccaggcgaccttagcgttagatgcactctgctcctgatgttggactaccaaccaccccagtttaaactggatcctcggttggctagactcctgggcctgcatacccagtctcgcagcgcgattgttcaagccctttggcagtatgttaagaccaataggctacaagactcccacgacaaggagtatatcaacggagacaaatacttccaacagatcttcgattgccctaggctgaagttcagtgaaataccccagaggctgacagccctgctgctcccccctgatcctattgtaattaaccacgtcatcagcgttgatcccagcgatcaaaaaaagacggcatgttacgacatcgatgtggaagtggaagaaccactcaaaggccagatgtcctcatttcttctaagcacggcaaaccagcaagagatttccgctttggattcaaagatccacgaaactatcgagtcaattaatcagctgaaaattcaacgcgacttcatgctttcctttagtagggatcctaaggggtacgttcaagacctcctcagatcacagtctcgagatcttaaagtcatgacagatgttgctggcaatcctgaagaggaacgccgtgccgagttttaccatcagccatggtctcaagaggctgtgtccagatacttctactgcaaaatacaacagagacggcaggagctggagcagagtctggtcgtgcggaatacctag

SEQ ID NO: 207591 - DNA, 1413 bp, synthetic construct
  misc_feature 1..1413: note = Description of Artificial Sequence: Synthetic coding sequence
  source 1..1413: mol_type = other DNA
atgacccccggcctgcagcacccccccaccgtggtgcagcggcccggtatgccaagtggggctagaatgcctcaccagggggctccgatggggccacctggcagcccctatatggggagccctgccgtccgccccgggttggcgcccgcaggcatggaaccagcccgaaaacgtgccgcccccccgccaggccaatctcaggcgcagagccagggacagcccgtccccacagcccccgcaagatcgcgatctgcaaagcgaaggaagatggccgacaaaattttacctcaaagaattagagagttggtgcctgaaagtcaggcatatatggacctgctggcttttgagaggaagctggatcagactatcatgcgcaagcgggtggatatccaggaagccctcaaacggcccatgaaacaaaaacgtaagctgaggctctatatatccaacacctttaaccccgctaaacccgacgccgaggacagcgacgggagtatcgcctcctgggagttaagagtggaggggaagttgctggacgacccctccaaacagaagagaaagttctcctcattcttcaaaagcctggtgatcgagctggataaagatttatatggcccggacaatcatcttgtggagtggcatcgcaccccaaccacccaagagaccgacggcttccaagtaaagaggccaggcgacttgagcgttcgctgcactctcctcttgatgctagattaccagccaccacagttcaaactggacccaaggcttgcccgcctgctgggcctgcacactcagtctcggtccgcaattgttcaggctctctggcagtatgtcaagacaaacagactgcaggattctcacgacaaggagtacatcaatggagacaaatatttccagcagatttttgactgcccgcggctgaagttctccgaaataccacagcgtttgaccgctctgttgttaccacctgatcccatcgtgataaaccatgtgatcagcgttgatccctccgatcaaaaaaagaccgcatgttacgatatcgacgtggaggttgaagagcctttaaagggacagatgtcttcatttctgttaagtacagcaaatcaacaggaaatttccgcactggatagtaaaatccacgaaacaatcgagtccatcaaccagctcaaaattcagcgcgactttatgctttcgttctcccgggatccaaagggatacgtacaagatctgttgagaagccaaagccgagatctcaaggtgatgactgacgtggccggaaaccccgaagaagagaggcgggctgagttttaccaccagccgtggtcccaggaggctgtctctaggtatttctattgcaaaattcagcagcggagacaggagctggagcagtccttggtcgtcaggaacacgtag

SEQ ID NO: 207592 - DNA, 1413 bp, synthetic construct
  misc_feature 1..1413: note = Description of Artificial Sequence: Synthetic coding sequence
  source 1..1413: mol_type = other DNA
atgacccccggcctgcagcacccccccaccgtggtgcagcggcccgggatgccatcaggggcccgtatgccacaccagggggccccaatgggccctcccggatcaccatacatgggctcccccgctgttcgtccgggactggcgcccgccggtatggaaccagcaagaaaacgtgccgctccacccccgggccagtcacaggcccagtctcagggccagcccgtgcccacagctcctgctcggtctcgcagcgctaagcgcagaaagatggcggataaaattcttccacaaagaattcgcgaactggtgcccgagtcacaagcttacatggacctgctggccttcgagaggaagctcgatcagacaattatgaggaagagggtcgatattcaggaagcccttaagcgtccgatgaagcagaaacgcaagttaaggctgtacatcagcaatacctttaacccagccaagccagatgcggaggatagtgatgggtcaattgcatcctgggagctgcgcgtggagggaaaactgctggacgacccttcgaaacagaagaggaagtttagcagcttttttaagagcctggttatcgaactggataaggacctgtatgggcccgacaatcacttggtggagtggcaccgaactccaactactcaggagacggacggatttcaggtaaagcgacccggggacctgtccgttcgatgcactctactcctgatgttggactaccagcccccacagttcaaactcgatccacgcctggccaggctgttaggtttacacacccaatcccggagcgccatcgtccaggccctctggcagtatgtgaagaccaataggctgcaagatagccacgacaaggaatacatcaatggggataaatattttcagcagatttttgattgcccaagacttaaattttcagagataccgcagcgactgactgcactcctccttccaccagatcccattgtcatcaaccacgtgattagcgtggacccttcagatcagaagaaaactgcttgttatgacattgatgtggaagtcgaggagccactgaagggtcagatgtcatcctttctactttcaacagctaaccagcaggagatatcagccctggatagcaagatccacgaaacaatagagtctataaaccagctgaagatacagcgcgactttatgctcagtttcagccgggaccctaagggctatgtgcaggatctcctacggtctcaatcaagagatttgaaggtcatgacggacgttgctgggaaccctgaggaggagcggcgggcggagttctatcaccagccctggagccaggaggctgtgtcacgctatttttattgcaagatccagcagaggagacaggagctcgaacaaagtctggttgtacgaaacacttag

SEQ ID NO: 207593 - DNA, 420 bp, synthetic construct
  misc_feature 1..420: note = Description of Artificial Sequence: Synthetic coding sequence
  source 1..420: mol_type = other DNA
atgacccccggcctgcagcacccccccaccgtggtgcagcggcccgggatgccatccggcgccaggatgcctcatcaaggcgcccccatgggacctcccgggtcgccctatatggggagtcctgcggtccgccccggactggcacctgccggcatggaaccagctcgaaaaagggcggcgccaccccccgggcaaagtcaggctcagagccaggggcaacctgtgcccaccgcccccgccaggtcacgctcggccaaaaggcggaaaatggctgataagatcctgcctcaacggatacgggaacttgttcccgagagtcaagcttacatggatctcctcgcttttgaacgtaaactggatcagaccatcatgcgcaagcgcgtagacattcaggaagccctgaagaggcccatgaaatag

SEQ ID NO: 207594 - DNA, 3081 bp, synthetic construct
  misc_feature 1..3081: note = Description of Artificial Sequence: Synthetic coding sequence
  source 1..3081: mol_type = other DNA
atgaacctgttcaacctggaccggttccggttcgagaagcggaacaagattgaagaagctccggaggccacacctcaacctagccagccagggccatcctcaccaatttcattatcagctgaggaggaaaatgctgagggagaggtttcgcgcgcaaacacccctgatagcgacataaccgaaaagacagaagatagcagtgtgcccgagacgccggataatgagcgcaaagcctccatttcttattttaagaaccaacgagggatacagtatattgacctttctagcgatagcgaggacgttgtgagtcccaattgttccaacaccgttcaagaaaaaacgttcaacaaggacacagtcattatcgtcagcgagccaagcgaggacgaagagtcacaaggcctgcccacaatggcgcggaggaatgacgacatctctgagctcgaggatctctccgaactggaagacctgaaggacgctaaactgcagaccttgaaagaactatttccgcagagatccgacaacgacctccttaaactaatcgaatccacatccacgatggatggcgccatcgcagccgctctcttgatgtttggagatgccggaggcggccctaggaagcggaagctgagctccagttcggagccttatgaagaagacgagtttaacgatgaccagtcaatcaaaaagaccagattggaccatggcgaagagagcaacgagagtgcagagtcaagttccaactgggagaagcaggagagtatcgttctcaagctacagaaagaatttccaaattttgataagcaggaactgagggaggtgctgaaggaacatgagtggatgtacaccgaggccttagagtcactgaaagtgtttgccgaagatcaggatatgcagtatgtctctcagagcgaagttccaaatggcaaggaggtgtcaagtcggtctcagaactacccgaagaatgccaccaagaccaagctgaaacagaagttctcaatgaaagctcagaacggtttcaacaaaaagagaaagaagaatgtgttcaatccgaagagagtggtggaagatagcgaatacgactcaggttccgatgtggggtccagcttggacgaagactattcatctggggaggaggtgatggaagatggatataagggcaagattttacacttcttgcaggacgctagcattggtgaactcactttaatccctcagtgctctcagaaaaaggcccaaaagataacggagttgaggccttttaatagttgggaggccctgtttacaaaaatgagcaagacaaatggcctctcggaggacctaatatggcactgcaaaacactgattcaggagcgcgacgtggtgattcgtttgatgaataaatgtgaggatattagcaataagctgacaaagcaggttaccatgctgacgggcaacgggggaggctggaacatcgagcagcccagtatcctcaatcagagcctgagcctgaagccgtatcagaaggtcgggttgaactggctagccctggtgcataagcacgggctgaacggcatcctggctgatgaaatgggactgggcaagactatccaggcaattgcctttctagcctacctgtatcaggagggaaataatgggccacacctgatagtcgtgcctgccagcacaatagacaattggctccgggaagtgaatctttggtgcccaacactgaaagtgttgtgttactacggcagccaggaggaacgcaaacagatccggtttaatattcactcacgctatgaggactacaacgttatcgttactacatacaattgcgccattagtagcagcgacgacaggagtctcttcaggaggctaaagttaaattacgccatattcgacgagggccatatgctgaagaacatgggttctattcgctaccagcacttaatgacgataaatgctaacaatcgattgctgctgaccggcactccagttcagaataacctgctggaactcatgtccctgctgaactttgtcatgccccacatgttctcatctagcacttcggagatccgtcgtatgtttagtagcaaaactaagagtgccgacgaacagtcgatatacgaaaaggagaggatcgctcacgcaaaacagattataaagccctttattctcagaagagtgaaggaagaggtcctcaaacagctgcctccgaagaaggataggatcgagctgtgtgccatgtccgagaagcaggagcaactgtatctcggcctgtttaatcggcttaaaaagtcaattaacaacctggaaaagaacacagaaatgtgtaacgtaatgatgcagctgcggaaaatggctaaccacccccttctgcatagacagtactataccgctgagaaactgaaggagatgtcacagcttatgttaaaagagccaacccattgtgaggctaatcccgaccttatcttcgaggatatggaggtgatgactgactttgagttgcacgtgctgtgcaaacaatacagacacatcaataacttccagttggatatggacttgattctggacagcgggaaattccgcgtcctcggctgcattctctctgagttgaaacagaaaggagatagagtagttctattctctcagttcaccatgatgctggacatcctggaagtgttgctgaagcatcatcaacaccggtacctgcgtctggacggaaagactcaaatctctgaacgtatccacctgatcgacgaattcaacacagatatggacattttcgtgttcctgctgtcaacgaaagctgggggcctcgggattaatcttacctccgcgaacgtcgttatcctgcacgacatcgactgcaacccctacaatgataagcaggcagaagacaggtgccatagggtgggccaaacgaaagaagtgctagtgatcaaacttatttcacaaggaaccattgaagaaagtatgctcaagataaatcaacagaagctgaagcttgaacaggacatgacaacagtagacgagggcgacgaggggtctatgcctgcagacatcgcaacgctcttgaagacaagcatgggtttgtag

SEQ ID NO: 207595 - DNA, 3087 bp, synthetic construct
  misc_feature 1..3087: note = Description of Artificial Sequence: Synthetic coding sequence
  source 1..3087: mol_type = other DNA
atgaacctgttcaacctggaccggttccggttcgagaagcggaacaaaattgaggaagctccggaagcaacaccacagccgagccagcctggcccctcgagtcccatctccctgtctgctgaagaagaaaacgcagaaggcgaggtgagccgggccaacaccccagactccgatatcaccgagaagacagaggattcatcagttcccgagacgcctgacaatgagcgcaaggcctccatcagttactttaaaaatcaacgcgggattcagtacattgacttgtctagcgattccgaagacgtggtgtcaccaaactgctccaatacagtgcaggagaaaacctttaataaggataccgtgatcatagtcagcgagccttccgaggatgaagaatcccagggcttgcctactatggccagaaggaatgatgatataagcgaactcgaagatcttagcgagctcgaagatctcaaagacgccaaactccagacactgaaggaactgtttccccagcgatcagataacgatctgttaaagctaattgagagcacaagtacaatggacggagctatagctgcagctttgttgatgtttggagatgctggggggggtccgaggaagaggaagctcagctccagttccgagccttatgaggaagatgaattcaatgatgatcagtccatcaaaaaaaccaggctggaccacggagaagagtctaacgagagtgctgagagcagctcaaactgggaaaagcaggagtcgattgtgttaaagcttcagaaagagttccccaactttgacaagcaggagctgagggaggtgctgaaggagcatgagtggatgtataccgaagcgcttgaatccttgaaggtttttgcagaggaccaagatatgcagtacgtgagccagagtgaggtgcccaatggaaaagaagtgagcagccgctcacagaactatcccaaaaacgcgacaaaaactaaactcaagcagaagttcagcatgaaggcccagaatggattcaacaagaagcgaaaaaagaatgtcttcaatccgaaacgggtggtggaggactcagagtatgactcaggctccgatgtgggtagttcgttggatgaagattacagctcaggcgaggaagtcatggaagacggctacaagggcaaaatcctgcactttctgcaggacgcttcaattggggagctcacactgatcccacagtgcagccagaaaaaagcacagaagattactgagctcaggcctttcaacagctgggaggccctgtttaccaagatgtctaagacaaatgggctgagcgaggaccttatatggcactgcaaaaccctgattcaggagcgtgatgtggtgatcaggctgatgaataagtgtgaggacataagtaacaaactaaccaagcaagtcacgatgctgactgggaacggcgggggatggaacatcgaacaaccttctatcttgaaccagagtctcagcctaaagccctaccagaaagtggggctgaattggctagccctggtacataagcatggactgaacggcattctcgcagatgaaatgggactcgggaaaacaatccaggctatcgcgtttttggcttacctgtaccaggagggaaataatgggccccacctgatcgtcgtacctgcctccacaattgataactggctgcgcgaggttaacctgtggtgtccgacgctgaaggttctgtgctactacggctcccaggaagaaaggaagcagatccggttcaacatccacagcagatatgaggattacaatgtcatagtgactacatacaactgtgcgatctctagctcagatgaccgtagcttgttccggcgcttgaagttgaattacgcaatcttcgatgagggccacatgctcaagaatatgggatcaattcggtatcagcatcttatgaccataaacgcgaataaccgcctactcctgactggtactccagtgcagaacaatcttctggagttaatgtcactacttaactttgtgatgccacacatgttttcatcctcaacaagcgagatccgccgaatgttttcttctaagactaagagcgctgacgagcagagcatctacgaaaaagagcgaatcgctcacgccaaacaaatcatcaagccctttatcctgcgtagggtgaaggaggaggtcctgaaacagcttccccccaagaaggatagaattgaactgtgtgcgatgtccgagaagcaggaacaactgtatctggggctcttcaacaggctgaagaagagcatcaacaaccttgtgacggagaagaatactgagatgtgcaacgttatgatgcaactccgaaaaatggcgaatcaccctctgttacacaggcagtactacacagccgaaaaactgaaggaaatgtcacagctcatgctgaaggagcctacacactgtgaggccaatcctgatctcatttttgaggatatggaagttatgaccgactttgagcttcacgtcttatgcaaacaatatagacatattaataactttcagctcgacatggacctgatcctcgattccgggaaattcagggtgctcgggtgtatcctgagcgagctcaaacagaagggagatcgcgtagtactcttttctcagttcactatgatgttggacatattagaggttcttcttaagcaccaccagcatagatacctcaggttagacggcaagacacagatttcagagagaattcacctcatcgatgagttcaatacggacatggacattttcgtgtttctgttgtctaccaaagccggtgggctgggcatcaacctgacgtctgccaatgtggtgattcttcatgatattgactgtaatccctacaatgacaaacaggcagaggacaggtgccaccgggtgggccagacgaaagaggtgctagttataaagttgattagtcaaggaaccattgaagaatctatgctcaaaattaaccaacagaagctcaagctggagcaggacatgacaactgtggatgaaggggacgaaggtagtatgcctgcagatatagctactttgcttaaaacatccatggggctgtag

SEQ ID NO: 207596 - DNA, 3087 bp, synthetic construct
  misc_feature 1..3087: note = Description of Artificial Sequence: Synthetic coding sequence
  source 1..3087: mol_type = other DNA
atgaacctgttcaacctggaccggttccggttcgagaagcggaacaaaattgaggaggccccagaagctacaccacagccaagccagcctggaccttcttcacccatttccctgagtgctgaagaggaaaacgcagaaggcgaggttagccgagcaaacacgcctgattctgacatcaccgaaaagacggaggacagctccgtcccagagacgcccgacaatgaacgtaaggcaagtatttcctacttcaaaaatcaacggggcattcaatacattgatctgtcaagtgattctgaggatgtagtgagtccaaattgcagcaatacagtgcaagagaaaactttcaacaaggacaccgtgattatcgtttcagaaccctccgaagacgaggagagccaggggttaccaactatggcacggaggaatgatgacatcagcgagctcgaagatttgtccgaactggaggatctgaaggacgctaagttgcagacactgaaggagctcttccctcaaaggtctgacaacgacttgttaaaactcattgagagtacaagcactatggatggagcgattgctgctgctctgctcatgttcggagatgccggtggaggtcctagaaagcgtaagctcagcagttcctcagagccatatgaagaggatgagttcaacgacgaccaaagtatcaaaaaaacacggttagaccatggggaagaatcaaacgaatccgctgaaagcagctcaaattgggagaaacaggagagcatcgtgttaaaactgcagaaggaatttccaaatttcgataaacaggagctgagggaggtgctcaaagagcacgaatggatgtacacggaagccctcgaaagtcttaaagtatttgccgaagaccaggacatgcagtatgtgagccagtctgaggtgccgaatgggaaagaggtttcatcaagatcccagaactaccctaagaatgccaccaagacaaagctgaagcagaagttcagcatgaaggctcaaaacgggttcaataaaaagagaaagaaaaacgtgttcaatcccaaacgggtagtcgaggattctgagtacgactcagggtctgacgtgggttctagcctcgacgaggactattccagtggtgaggaggtgatggaggatggatataaaggcaagattctgcatttcctgcaggacgctagcatcggagaactcactttgattcctcaatgctctcagaagaaggctcagaaaattacagaactgagaccatttaatagctgggaggcgttattcacaaaaatgagcaaaactaacgggctgtctgaagacctgatctggcactgcaagactctcattcaggagcgcgatgtagtaatcaggctcatgaacaaatgtgaagacattagcaacaagttaacaaagcaggtgaccatgctgactggaaatggtggagggtggaacattgagcagccctccattcttaaccagtccctgagcctgaaaccatatcagaaagtgggtctgaactggttggccctggtgcataagcatggcctgaacgggattctggcagacgagatggggctagggaaaacaattcaagcaatcgcctttttagcgtatttataccaagagggcaacaatggaccgcatttaatcgtagtgccagcctcaaccatcgataattggctgagagaggtgaacctttggtgccctactctcaaggtgctgtgttattacggatcccaggaagaacggaagcagatcagatttaacatccactcccggtatgaagattacaacgtcatcgtgacaacctacaactgtgctatctcctcatccgatgaccggagcctatttaggagactgaaacttaattacgcgatcttcgacgaaggccatatgctgaaaaacatggggtcaattcgataccagcacctcatgaccattaacgccaataataggctgctactaacagggacaccagtacagaacaacctccttgagctcatgtctcttctgaattttgtcatgccacacatgttcagcagctcaacatccgagattcggcgcatgtttagtagtaaaaccaagtccgctgacgaacagagcatctacgagaaagaacggatagcccatgccaaacaaattattaagcctttcatcctccggagggtgaaggaggaggtcctgaagcaactgccacctaagaaggaccgtatcgaactctgtgccatgtcagagaaacaggagcaactttacttgggcctgttcaatagactgaaaaaatctatcaacaacctcgtcacagaaaagaataccgagatgtgtaacgttatgatgcagctccgtaaaatggcaaaccatcccctccttcaccgtcaatactataccgcagagaagctaaaggaaatgtctcaattaatgctgaaagagccaacacactgtgaggctaaccctgatctaattttcgaggacatggaagtgatgactgatttcgaattacacgtgctctgcaagcagtaccgccacataaacaatttccagcttgatatggatctaattctggactccgggaagttccgtgtgctcggctgcatattgtctgaactgaaacagaagggcgaccgtgtggttctcttttcccaattcaccatgatgctagacatcctcgaggtgctcctaaagcaccaccagcacagatacctgaggcttgacggtaagacccaaatctccgaaagaatccatttgattgacgagtttaatactgacatggacattttcgtgtttttgctgtcgaccaaggcgggtggtctgggcattaacctcacctccgctaatgtggtaattttacatgatattgactgtaacccgtacaacgacaaacaggccgaggaccggtgtcatagggtgggccaaacgaaagaggtcctggtcatcaagctgatatcccagggaactattgaagaatcaatgcttaaaatcaaccagcagaagcttaagctggaacaggacatgacaaccgtggacgagggagatgaaggctctatgcccgcagatattgccactctgctgaagacctctatggggctctag

SEQ ID NO: 207597 - DNA, 957 bp, synthetic construct
  misc_feature 1..957: note = Description of Artificial Sequence: Synthetic coding sequence
  source 1..957: mol_type = other DNA
atgaacctgttcaacctggaccggttccggttcgagaagcggaacaagattgaggaagcacctgaggccacaccccaacccagtcagcccggccctagctcacctatttcactcagtgccgaagaggagaacgcggaaggggaggtcagccgcgcaaacactccagactcggatattacagagaaaacggaggactcctctgtgccggagactcccgataatgagcgcaaagcctccatctcctatttcaagaatcaacgaggcatccagtatatcgatctgagcagtgacagcgaagatgtggtttctcctaactgctcaaataccgtccaggaaaagacattcaataaggacaccgtgatcatcgttagcgaacccagtgaagacgaggagtctcagggcctgccgaccatggccagaaggaacgacgatatcagtgagctggaagatctgtccgagctcgaggacctgaaggacgccaagcttcagaccctgaaagagctgttcccacagcggagcgacaacgatctgcttaaactgatcgagagtacctccactatggacggagccatcgctgccgcattgttgatgttcggtgacgctggagggggcccgcggaaaagaaaactctcaagcagctccgagccatatgaggaggatgaatttaacgatgaccagagtattaagaaaactcggcttgatcatggagaggagtccaatgagagtgcagagtcaagcagcaattgggagaaacaggagtctattgtgctgaaactgcagaaagagttccccaatttcgacaaacaggagctgcgcgaggtgttgaaagaacacgagtggatgtatacagaagcattggagagcctcaaggtctttgctgaggaccaggatatgcagtacgtgtcgcagagcgaggtgccaaatgggaaaaagaaggctcaaaaaaagaagaagtag

SEQ ID NO: 207598 - DNA, 732 bp, synthetic construct
  misc_feature 1..732: note = Description of Artificial Sequence: Synthetic coding sequence
  source 1..732: mol_type = other DNA
atggccgccatcgccgccagcgaggtgctggtggacagcgccgaggaaggatcccttgcagcagccgcagaactggcggcacagaagagagagcagcggctgcgcaaattccgtgaactgcatctgatgcgtaacgaagctcgcaagctaaatcaccaagaggtggtggaagaggacaagagactgaagttaccagctaactgggaagctaagaaagctcggcttgaatgggagttgaaagaggaggagaaaaaaaaggaatgtgccgctcgaggagaagattacgaaaaggttaagctgttagagatctcagccgaggacgccgagcgctgggagaggaagaagaaacgaaaaaaccctgacttaggcttctcagactatgcggcggcccaactgcgccagtaccatagacttaccaaacagattaaaccagatatggagacatatgagcgcctgcgcgagaagcatggcgaggaatttttccccacaagcaatagcttgctgcacggcactcatgtccctagcacagaggagatcgaccggatggtgattgacctggagaagcagatcgaaaagagggacaaatactcccggcgtcggccctataatgacgacgccgacatcgactatattaacgaaaggaatgcaaaatttaataaaaaggccgagcggttctatggcaagtataccgctgagatcaagcagaaccttgaacgtggcaccgctgtttag

SEQ ID NO: 207599 - DNA, 606 bp, synthetic construct
  misc_feature 1..606: note = Description of Artificial Sequence: Synthetic coding sequence
  source 1..606: mol_type = other DNA
atggccgccatcgccgccagcgaggtgctggtggacagcgccgaggaggggtctctagccgcagccgcggaactggccgcacagaaaagagaacagaggttgcggaagtttagggaactgcacctgatgagagagtgtgcagcaagaggtgaagattacgagaaggttaaactgcttgagatttcagctgaagatgctgaacggtgggaacgtaagaagaaaaggaagaaccccgaccttgggttcagtgactacgcagcggcccagctgaggcaataccaccgtctcaccaaacagattaagccagatatggaaacttacgaacggctgagggaaaagcacggagaagagttcttccccacgtctaattcactgcttcacgggacacatgtacctagcactgaagagatcgatagaatggtcattgatctggaaaagcagattgagaaacgtgataagtactctcgaagacgtccctataacgacgacgcggatatcgattacattaacgagaggaatgctaaattcaacaaaaaagccgagcgattttacggaaaatatactgccgaaattaaacagaatctggagcggggcaccgcggtatag

SEQ ID NO: 207600 - DNA, 777 bp, synthetic construct
  misc_feature 1..777: note = Description of Artificial Sequence: Synthetic coding sequence
  source 1..777: mol_type = other DNA
atggacggcatcatcgagcagaagagcatgctggtgcacagcaagatcagcgatgccgggaagaggaatggcctcatcaatacccgaaacctgatggccgaatctcgtgatggcttagtctcggtgtatcctgcaccccagtaccagtcgcatagggtgggcgccagcacagtgccagcaagcctggactccagccgatctgagccgatgcaacagctgttagaccctaatacacttcagcagtctgtggagagccggtaccggcccaacattattctctactctgaaggggttcttagatcgtggggcgacggtgtggccgcagactgctgcgaaactacttttatagaagatcgcagccccactaaggacagtctggagtaccctgatggaaaatttatcgacctgagtgccgacgatattaagattcatacactttcatatgacgtggaagaggaggaggagtttcaagaactagaatccgattatagttctgatactgaatcagaggataacttcttgatgatgccaccccgcgatcaccttggactgtccgtcttctccatgctgtgctgtttttggcccctgggtatcgctgcattttatctgtctcacgagaccaataaggccgtggcaaagggcgacctccaccaagccagtacgtctagtagacgggctctgtttcttgccgttctttcaatcactattggcaccggcgtatacgtcggggtcgccgtggccctcatcgcctatttgagcaagaataatcacctatag

SEQ ID NO: 207601 - DNA, 717 bp, synthetic construct
  misc_feature 1..717: note = Description of Artificial Sequence: Synthetic coding sequence
  source 1..717: mol_type = other DNA
atggagagcctgagcgagctgcagaaccccctgctgccccggagccctgcgcacctccacggaccctatccctacccagagacaccaccttcatggtcttgtcaggaaaagctctacagctacttgctagggggggcgggtcccgcaggcgctcaccagctgctggaccctggatccctgcagctggccgtggaggcctggtaccgcccttcctgtcttctaggacgcgacaaggtgaaggagcccagggcggggagttgtgagacatcattcactgaggaccgtgagccccaggaaggcccaccagaacagcccacaggcccaggtcaagcagctgaaaatgttactattcagacagtgtcttatggagtacaggaagagctccgagaccaagaggatgaccaagaagaggaagaatccgacgcaacgtccacggagtcggagagtgaagacaacttcttaactctccccccgcgggaccaccttggcctgacactgttttcaatgctttgttgcttttggccacttggaatcgctgctttttactttagccaaggcacctccaaggctatatcgaagggtgattttcgcttggccagtactacctctcgtagagctctgttcctggctacactggccatagctgtgggagctggcctgtacgtggccgttgtggtggcactggccgcttacatgagccaaaacgggcacgggtag

SEQ ID NO: 207602 - DNA, 717 bp, synthetic construct
  misc_feature 1..717: note = Description of Artificial Sequence: Synthetic coding sequence
  source 1..717: mol_type = other DNA
atggagagcctgagcgagctgcagaaccccctgctgccccggagccccgctcatctgcacggtccctatccatatcccgagactcccccatcatggagctgccaggaaaaattgtacagttacctgctggggggagccgggcccgcaggcgcacatcagttactagatccaggcagcctgcaattggccgtcgaagcctggtacagaccaagctgtttactgggaagggacaaagtgaaggaacctagggcaggttcttgcgagacaagctttaccgaggaccgggagccgcaggaaggcccaccagaacagcctactggccctggtcaagccgccgaaaacgtgactatacagacagttagttacggtgtgcaggaggagttacgagatcaggaagacgaccaggaggaggaggaatctgacgctaccagtaccgaaagtgagtcagaagacaatttcctgactttgcccccgagagatcatctcgggctgacactcttttccatgctgtgttgcttttggcccctgggcatcgcggccttctacttcagccagggcacctctaaagcaattagcaagggagactttagacttgcctctacaacctccagaagggcgctctttcttgctacccttgcaatagccgtgggggccggactttacgttgccgttgtcgtggcgctagctgcctacatgtctcagaacggccacggatag

SEQ ID NO: 207603 - DNA, 243 bp, synthetic construct
  misc_feature 1..243: note = Description of Artificial Sequence: Synthetic coding sequence
  source 1..243: mol_type = other DNA
atggagagcctgagcgagctgcagaaccccctgctgccccggagccccgctcatctccatggcccctacccatacccagagactccaccttcctggagctgtcaggagaaactgtactcatatctcctaggcggggccggcccggccggagcacatcagcttctagatcccggaagcttgcagttagccgtggaagcttggtatcggcctagttgtctcctgggaagggataaagtcaagtag

SEQ ID NO: 207604 - DNA, 2118 bp, synthetic construct
  misc_feature 1..2118: note = Description of Artificial Sequence: Synthetic coding sequence
  source 1..2118: mol_type = other DNA
atgaactacctgcggcggcggctgagcgacagcaacttcatggccaatctgcccaacggatatatgactgatctgcaacgccctcagcctcccccacctcctccaggtgcacactcacctggggctaccccaggccctggtaccgctacggctgagcggtcatctggtgtagcgcctgctgcgagcccagctgctcctagcccaggcagcagcggaggcggagggttcttttcgagtctgagcaacgcagttaaacagactacagcagcagctgctgccacctttagcgagcaggtaggcgggggctcaggaggagcagggaggggcggtgctgcctctagagtcttattagtgatcgacgagcctcacacagactgggccaagtacttcaaagggaagaagatacatggggagatcgatatcaaagtggagcaggcggagtttagcgacctgaacctggtcgcccacgctaatgggggttttagcgtagacatggaagtgcttcggaatggggtgaaagtggttcggtctctcaaacccgatttcgttcttattagacagcatgcttttagcatggccagaaacggcgattatcgaagtctggttatcgggcttcagtatgcaggcattccttccgtaaattctctgcatagtgtttataatttctgtgataaaccctgggtgtttgcccagatggtgagactgcacaagaagctgggcaccgaggagttccccctcattgaccagacattttatccaaatcacaaagagatgctatctagtacaacctacccagtcgtcgtcaagatgggacatgcacattctggtatgggcaaggtgaaagttgacaaccagcatgatttccaggacattgctagtgtcgtggctctcacaaagacatacgctacggcagagcctttcatcgatgctaaatacgacgtacgcgtccaaaagatcggtcagaattataaggcctacatgaggacaagtgttagcggcaactggaagactaatacggggagcgccatgctggagcagatcgctatgtctgatcggtacaagctgtgggtggatacctgcagcgagatatttggcgggctggatatatgtgctgtggaggccctacacgggaaggatgggagggaccatatcatcgaggtcgtgggttcttccatgcctttgataggtgatcaccaggatgaggacaaacagctcattgtagagctggtggtgaataaaatggctcaggccctgccaagacagaggcaaagagacgcttcacctgggaggggcagtcacggtcagacgccgagccctggcgccctgcccctggggagacagacgagccagcagccagctggtcctcctgcccagcagagaccccctccccagggtggtcccccacagccaggcccgggaccccaaaggcaaggacccccccttcagcagcggcccccccctcaaggtcagcagcatctgagcggcctgggaccccctgccggtagccctttacctcaacggttaccctcccccacctccgctccacagcagcccgcatcgcaggccgctcctccgactcaaggccagggcagacagtccagacctgttgccggtggccctggagccccaccggcagcccgccctccggcttcaccaagcccccaacggcaggctggcccaccgcaggccacgaggcagacctcagtctccggcccagcaccccctaaagcctccggagccccccccggcgggcaacagagacagggaccccctcagaaacctccaggccctgccggtccaacacgccaggctagccaggccggacctgttcctaggactggcccacctacaacccaacagccaaggccctccgggcctggacccgccggacggccaaagccccagttggcacagaaaccttcacaggatgtgcccccacccgcgacggcagctgccggtggaccaccgcacccgcaactgaataaaagtcagagcttgaccaacgcttttaatctccctgagccagcgccgccacggccttcgctctctcaggatgaagtgaaggccgagaccattaggtcactgcggaagtccttcgcttccttgtttagcgattag

SEQ ID NO: 207605 - DNA, 2010 bp, synthetic construct
  misc_feature 1..2010: note = Description of Artificial Sequence: Synthetic coding sequence
  source 1..2010: mol_type = other DNA
atgaactacctgcggcggcggctgagcgacagcaacttcatggccaatcttcccaatggttatatgaccgacctccagcggcctcagcctcctcctccaccacccggagcgcattctcctggtgccacccccggccctggcactgcaactgcagagcgctcttccggggttgcgcccgcagcctcccccgctgcgcctagccctgggagttcaggaggtggtggtttcttctccagcctgtccaatgcggtgaagcagacaaccgccgccgctgctgcaaccttctctgagcaggtcggtggcggctctggcggagcaggccggggtggcgccgcaagccgtgtcctactggtaatagatgagccccacactgactgggcgaaatactttaagggaaagaaaatccacggggaaattgatattaaggttgagcaggccgaattttcagatcttaatctagtagcccacgctaacggcggcttctcggttgacatggaagtcctgcgtaatggtgtaaaggtagtccgatccctgaagccagacttcgtgctgattcgccaacatgcgttctcaatggccagaaatggggactacaggagtctggtcattggtctgcagtatgctggtattcccagcgtaaacagcctgcatagcgtgtacaatttttgtgacaaaccatgggttttcgcacagatggtacggttgcataaaaaactggggacggaggagttcccacttatcgaccagaccttttacccgaaccacaaagagatgttgtcctctaccacctaccccgtggtcgtgaaaatgggccacgcccattctggtatggggaaggtgaaggtcgataatcagcatgacttccaggatatcgcgtcagtggtggctctaacgaagacttacgcaactgcagagcctttcattgatgctaaatatgatgttcgcgtgcagaaaatcgggcagaactacaaagcctacatgaggacttcagtgagtggaaactggaaaacgaatacaggcagcgctatgctcgaacaaattgcgatgagtgataggtacaagctctgggtagatacgtgcagcgaaatcttcggggggctggacatttgtgctgtggaagccctgcacgggaaagatgggcgcgaccatattatagaggtcgtgggcagttccatgccgctcatcggcgaccatcaggacgaggacaagcagttaatcgtggaactagtggtcaacaagatggctcaggccctcccccggcagcgacagagggacgccagccctgggcgtggctcccacggccagacaccaagcccaggagccctgccgttaggtcggcaaacgagtcagcagcccgctggaccccctgctcaacagaggcctccacctcagggaggaccacctcaacctgggccaggcccgcagcgtcaagggccacctctgcaacaacgccctccaccacagggacagcagcatttgagcggacttgggcctcccgccgggagcccactgccgcagaggttgcccagtcccacatccgctcctcagcaacctgcaagtcaggctgctccgcctacacaagggcagggccgccagtccaggcccgttgccggcggcccaggcgcaccccctgccgcccggcctcccgcctctccttccccgcagcgtcaggccggccccccccaggctactcgccaaacatctgtctccggaccagccccccccaaggcaagcggggcacccccagggggtcagcagcggcaggggccgcctcaaaagccacccggaccagctggtcccacccgacaggcctcacaggcagggccagtgcctaggacgggcccacccaccacccaacagcctaggccatccgggcctggccccgcagggcggcctaagccccagctggcacagaagccctcacaggacgtacccccaccagccaccgccgccgctggcggtccaccacacccccagttgaaggcctcccccgctcaagcgcagccgtag

SEQ ID NO: 207606 - DNA, 1743 bp, synthetic construct
  misc_feature 1..1743: note = Description of Artificial Sequence: Synthetic coding sequence
  source 1..1743: mol_type = other DNA
atgaacttcctgcggcggcggctgagcgacagcagcttcatggccaacctgcccaatgggtacatgaccgacctgcagcggcctgactccagcactagctcccccgcctctcccgccatggagcggaggcaccctcagcctctggcagcaagcttctcaagccctggctcatctctattctcatctctgtcttcggccatgaagcaggcaccccaggccacaagcggtctgatggaaccaccaggcccctctactcctatcgtacagcgtccaagaattctcctcgtaatagacgacgcccataccgattggtccaagtattttcacggaaaaaaggttaacggagaaattgaaatccgcgttgaacaagccgagtttagtgagcttaacctagctgcttacgtgaccgggggttgtatggtagacatgcaggttgtgcggaatgggaccaaggtggtcagccggtcattcaaaccagacttcattctggtgagacagcacgcttattccatggccctcggagaggattatcgatccctggttatcggtctgcagtacggtggactccctgcagtaaattctctttatagtgtttacaatttctgcagtaagccatgggtgttttcccagttaatcaagatcttccatagtctcgggcctgaaaagttccctctggtggaacagacgttcttccccaatcacaagcccatggtgacagcccctcacttcccagttgtggtaaagctgggccacgcccacgcaggcatgggcaaaatcaaagtggaaaatcagctggacttccaggatattactagcgtcgtggccatggctaagacatatgccaccaccgaagcgtttattgatagcaagtatgatattcggatacagaaaattggctcaaactataaagcatacatgaggaccagtatctccggaaattggaaagccaacaccgggtccgctatgctcgagcaggtggcaatgacagagcgctaccgtttgtgggtggactcttgtagtgaaatgtttggcggactggatatatgtgccgtgaaggccgtgcactctaaggacggccgagactatataatagaggttatggatagtagcatgcccttaattggcgaacatgtggaggaggatcggcagcttatggccgacctggtcgtcagcaagatgagtcagctgccaatgcctggggggaccgccccctcacccttgagaccctgggcacctcagatcaaatctgcaaagtctccgggacaggcacagctgggtcctcagctcggtcagccccagccaaggcctcctcctcaaggcgggccgaggcaggcccagagcccacagccccagcgctccgggtcgcccagccagcaacgccttagtccccagggacagcagcccctgtccccccagtcaggatcaccccagcagcagcggagcccaggtagcccccagctgtcaagggctagctccggctcatctccaaatcaggcctctaaaccaggcgccacactggctagtcagccacgtcccccagtgcagggtagatccacatcacagcagggtgaggaaagcaaaaaaccagcacccccccatccgcatctaaataaaagccagagtctcaccaattctttgagcacttcggacacctctcagcggggtactccctccgaggatgaggccaaagccgaaacaattagaaacttaaggaaaagcttcgcaagcttgtttagtgactag

SEQ ID NO: 207607 - DNA, 1743 bp, synthetic construct
  misc_feature 1..1743: note = Description of Artificial Sequence: Synthetic coding sequence
  source 1..1743: mol_type = other DNA
atgaacttcctgcggcggcggctgagcgacagcagcttcatggccaacttgccaaatggctacatgactgacttacagcgccccgactcttccacctcttcaccagcaagtccagcaatggaacgaaggcacccacaacctctggcagcatctttctcaagtccgggcagcagcctcttctcttccctgtcctccgccatgaaacaagctccacaggccactagcgggttgatggagccaccaggtccatccacacccattgttcagaggccgcgtatcctcctggtgatcgacgacgctcatacagactggtcaaaatatttccatgggaagaaggtaaacggtgaaattgagattagggttgaacaggccgagttctcagagctcaacctggctgcatatgtcaccggaggctgcatggtggatatgcaggtagtccggaatggaacaaaagtagtttcccggtctttcaagcccgacttcatcttggtgagacagcacgcttacagtatggctctcggagaggactacaggagcctggtcatcggactgcagtacggaggtcttccggctgtgaatagtctctattccgtgtataacttttgcagcaaaccctgggtcttcagccagctgatcaagatcttccactctctgggaccggaaaagttcccgttagtcgagcagacttttttcccaaaccataaacctatggtgactgccccccacttccctgtggttgtgaagctgggacacgctcatgctggaatgggtaagattaaggttgaaaatcagctggacttccaagatattacaagcgtggtggcgatggccaagacatacgcgacaactgaagcattcattgactcgaagtacgacatcagaatccaaaagattggcagcaattacaaagcctatatgagaaccagcattagtgggaactggaaagcgaacacaggatcggctatgctagaacaagtcgccatgactgaacgatatcgcctgtgggtggacagttgcagtgaaatgttcggaggcctcgacatttgcgcagtgaaggctgtgcatagtaaggacggtcgtgactatattatcgaagtgatggattcttctatgcctttgatcggtgagcatgtcgaagaagatcgccaattgatggccgacctcgtcgtgagtaaaatgtctcaactgccaatgccgggcggtactgcgcctagccctctgcgcccttgggcccctcaaatcaagagcgccaagtccccggggcaggcgcagctagggcctcaactgggccaaccacagccgcggccaccacctcaaggaggcccacgtcaggcccagagtccgcagccacaacggtctggttcaccatcgcagcagcgcctaagtcctcagggtcaacaacctctcagccctcagtccggctctccacagcaacagcgctccccaggcagtcctcaactttcccgagcctccagtgggtccagccccaaccaggcaagcaagccaggggccactcttgcctcgcagccgaggccaccagtgcagggacgctctacgtctcagcagggggaagaaagtaagaagcctgctcccccgcatccacacctcaacaaaagtcaatccctgaccaactcattgtctacttctgatacaagccagagaggcactccatctgaggatgaagccaaagccgagaccatcagaaacttgcgtaaatcttttgctagcctatttagtgactag

SEQ ID NO: 207608 - DNA, 1335 bp, synthetic construct
  misc_feature 1..1335: note = Description of Artificial Sequence: Synthetic coding sequence
  source 1..1335: mol_type = other DNA
atgaacttcctgcggcggcggctgagcgacagcagcttcatggccaacttgcctaatggatacatgactgatctgcagcgccccgattcaagcaccagtagcccagctagtcccgccatggaaagaagacacccacagccgctggcggcttctttttccagccctggctccagtttgttctcctccctaagcagtgccatgaaacaagcccctcaggccacatccggtcttatggaacctccaggcccatcgacaccaattgtccagagaccacgtatcctgctcgtgatcgatgatgctcacacagattggagtaagtatttccatgggaagaaggtaaacggagagatcgagattcgggtggagcaggcggagttttcagagctcaatttagctgcctacgttactggcgggtgtatggtggatatgcaggtggttcgtaatggcactaaagttgtgagcaggtcgtttaagccagactttatcctcgtgagacagcatgcctactccatggcattgggcgaggactatcgcagcttggtgatcggcctgcaatacggcgggctcccggcagttaactctctgtattccgtgtataatttttgctcaaaaccatgggtgttcagtcagttaattaagatatttcattcactggggcccgaaaagttcccccttgttgagcagacgttttttcctaaccacaaacctatggtgactgcaccacatttccccgtggttgtgaagctgggtcacgctcatgccggaatgggtaagatcaaagtggagaatcagctcgactttcaggacattacatcggtcgtagcaatggccaagacttacgccacgaccgaggcctttattgactccaagtacgatataagaattcaaaagattggatccaactataaggcatacatgaggacatcaatttctggcaactggaaggcaaacacaggaagcgccatgcttgaacaggtggctatgacagagagataccgattgtgggtggactcctgctctgagatgtttggggggctcgatatctgcgctgttaaggccgtacactcgaaggacggcagggactatattatcgaggtgatggattcctcgatgcccttaattggagagcacgtggaggaggacaggcaactgatggctgatttagtggtctccaagatgtctcaattgccaatgccaggcgggaccgcgccatctcccctgagaccatgggcaccacagataaaatcggccaagtcaccaggccaggcccaactaggcccacagctgggccagccacaaccacggccccccccacaggtctctttctctccgtag

SEQ ID NO: 207609 - DNA, 342 bp, synthetic construct
  misc_feature 1..342: note = Description of Artificial Sequence: Synthetic coding sequence
  source 1..342: mol_type = other DNA
atgaacttcctgcggcggcggctgagcgacagcagcttcatggccaacctccccaacggatacatgactgatctgcagcggccagactcttcaaccagtagcccagcgtcccctgcaatggagagacggcacccccaacccctggccgcctccttttccagccctgggtcaagcctcttcagcagcttgtcttcagcgatgaaacaggcgcctcaggccacctcgggcctaatggagccccccggtccgtccacgcctatagtccaacgaccacggatcctacttgtgattgatgacgcacacaccgactggtccaagtatttccacggcaagaaagtgtag

SEQ ID NO: 207610 - DNA, 372 bp, synthetic construct
  misc_feature 1..372: note = Description of Artificial Sequence: Synthetic coding sequence
  source 1..372: mol_type = other DNA
atgaacttcctgcggcggcggctgagcgacagcagcttcatggccaacctgcccaatggctatatgactgacttacagcgccctgacagtagcacctctagccctgcctctcccgcgatggagaggagacacccacagccgctcgccgccagcttttccagcccggggagctcactcttctctagtctttccagcgccatgaaacaggcaccccaggccactagtggcctgatggaaccgccggggccctcaactcctatcgtgcagagaccacgaatcctactcgtgattgacgatgctcatacagactggtccaaatatttccacggcaaaaaggtgaacggggagatcgagataagggtggaacagtag

SEQ ID NO: 207611 - DNA, 561 bp, synthetic construct
  misc_feature 1..561: note = Description of Artificial Sequence: Synthetic coding sequence
  source 1..561: mol_type = other DNA
atggacagcagcatgcccctgatcggcgagcacgtggaggaggacaggcagctgatggctgacctagtcgtttcgaaaatgtctcagttacccatgcctggaggaacagccccaagtcccctgcggccctgggccccccaaatcaagagtgctaaatctccaggccaggctcaactagggccacagctgggccagcctcagccaaggcctcctcctcaggggggcccccgacaagctcagtctcctcagcagcaaagatcccccggttctccccagttgtcaagagccagcagcggctcgagtcccaatcaggcctccaagcccggtgcgacactggcctcacagcctcggcctccagtccaaggcaggagcacttcccaacagggcgaggagtccaagaagccagccccaccccatcctcatctcaacaaatctcagtccttgacaaactcactgagtacaagtgacacctcacagcggggaaccccttcagaagacgaggcaaaagccgagaccattcggaacctcaggaagtcattcgcttctctcttttccgattag

SEQ ID NO: 207612 - DNA, 1212 bp, synthetic construct
  misc_feature 1..1212: note = Description of Artificial Sequence: Synthetic coding sequence
  source 1..1212: mol_type = other DNA
atgagccaccggaagttcagcgccccccggcacggcagcctgggcttcctgccacgcaagcggtccagccggcaccgcggaaaagtgaaaagcttccccaaagatgaccctagtaagcctgttcacctaaccgcttttcttggttacaaagctgggatgacacacatcgttcgcgaggtggatcgacccggctccaaagtaaacaagaaggaggtggtggaagctgtcacaatagtggagacacctcccatggtggtcgtcggcatcgtgggttacgtcgagaccccccgtggtcttcggacatttaagaccgttttcgccgaacacatcagtgatgaatgtaaacgccggttctacaagaattggcataaatccaagaagaaagcctttactaaatactgtaaaaagtggcaggatgaagacggtaagaaacagttagaaaaagatttcagttctatgaaaaaatactgccaggtgataagggttattgcccacactcaaatgcggctgctgcccctgcgtcagaaaaaagcccatctgatggagattcaggtaaatggcggcaccgtcgccgaaaagctcgattgggctagggagagattggaacagcaggttccagtcaatcaggtatttggccaggatgagatgatcgacgtcataggcgtgaccaagggaaaagggtataagggagtcacctccagatggcacaccaagaaactgccccggaagacccacagaggtctccgtaaggtggcatgcatcggggcttggcatcccgccagggtggctttcagcgtggcccgcgccggacagaagggctatcatcatcggactgaaataaataaaaagatctacaagattggacagggttacctgatcaaagacggaaagctgataaaaaacaacgctagcactgattacgacctctctgataagtctattaaccccctcggcgggttcgtgcactacggagaggtgaccaatgatttcgtcatgttgaaaggttgcgtggtgggaaccaaaaagagagtgctgacgttgcggaaatccctcctggtgcagacaaagcgtcgagcactggaaaagatcgacctcaaattcatcgacacaaccagcaaatttggtcatggcaggttccagacgatggaggagaaaaaggccttcatgggaccacttaaaaaggacaggattgctaaggaggaaggagcctag

SEQ ID NO: 207613 - DNA, 576 bp, synthetic construct
  misc_feature 1..576: note = Description of Artificial Sequence: Synthetic coding sequence
  source 1..576: mol_type = other DNA
atggagggcggcgcctacggcgccggcaaggccggcggcgccttcgatccttatacacttgttcgtcaaccacacacgatcctccgtgttgtcagctggctgttttctattgtggtcttcggctctattgttaacgaggggtatttgaattccgcatccgagggggaagaattttgtatatacaaccgaaaccccaatgcgtgctcttacggcgtcgcagtcggtgtcctggcctttcttacctgtcttttgtacctggctctggatgtctacttccctcagatcagttcggtaaaagaccgaaaaaaagcggttctctccgatataggcgtgagcgccttctgggccttcctgtggtttgtgggcttctgctacctggccaaccagtggcaggtatctaaaccgaaggataacccattgaacgagggcaccgatgccgcccgagctgctattgccttctcatttttcagcatcttcacttggagcctaaccgcagcactagcggtgaggaggtttaaagacctgtccttccaggaagaatactccactctcttcccagcttccgcccagccctag

SEQ ID NO: 207614 - DNA, 702 bp, synthetic construct
  misc_feature 1..702: note = Description of Artificial Sequence: Synthetic coding sequence
  source 1..702: mol_type = other DNA
atggagggcggcgcctacggcgccggcaaggccggcggcgccttcgacccttacaccctggtgcgccaacctcacacaattctccgcgtggtatcttggttattctctatcgtcgtttttgggtcgatcgtaaacgaagggtacttaaatagcgcatcagagggtgaggaattttgcatctacaatagaaaccctaatgcatgctcttatggcgtggctgtcggggttctggcattcctcacctgcctgttgtaccttgccttggacgtttactttccccagatatcttccgtcaaggatcgcaagaaggccgtgctgtccgacatcggagtgtccgccttctgggcgtttctgtggtttgtcgggttttgctacctggccaaccagtggcaagtgagcaaacccaaggacaatcctctgaatgagggtacagatgctgctagggcggcaatcgcgttttccttttttagcatcttcacgtgggccggacaggccgttctggcctttcagcgctaccagatcggcgccgatagcgccctgtttagccaggattacatggacccaagccaggacagttccatgccttacgctccgtacgtagaacccactgggcctgaccccgccgggatgggtgggacctaccaacagcctgctaataccttcgatacagaacctcaaggttaccaatcacagggatactag

SEQ ID NO: 207615 - DNA, 579 bp, synthetic construct
  misc_feature 1..579: note = Description of Artificial Sequence: Synthetic coding sequence
  source 1..579: mol_type = other DNA
atgctgaccctggagttcggcatcctggagttcgaccccagctggataggctcctggacccagcgatcatgggtctcttggaggtcccgccccggatgtgagctgttcagtatcgtagtcttcggtagtattgtcaatgaggggtatctgaattccgcttccgaaggcgaggagttctgcatatacaatagaaatccaaacgcctgcagctacggtgttgccgtgggcgtcctggccttcctgacgtgtcttctctacctggccctcgatgtctacttcccccagatctcgtccgttaaagatcgcaagaaagcagtccttagcgacataggcgtgtccgccttttgggcctttctgtggtttgttggcttctgctacctggcgaatcagtggcaggtgagtaaacctaaggacaacccactcaacgaagggactgatgctgccagggcagcgatcgcctttagctttttcagcatctttacctggagtcttaccgccgcgctagctgtgcgccgcttcaaggatctgagctttcaggaagaatatagtacactttttcccgcttccgcccagccatag

SEQ ID NO: 207616 - DNA, 510 bp, synthetic construct
  misc_feature 1..510: note = Description of Artificial Sequence: Synthetic coding sequence
  source 1..510: mol_type = other DNA
atggagggcggcgcctacggcgccggcaaggccggcggcgccttcgacccatacactctcgtgcgacagccgcatacaattttgcgcgttgtgagttggctgttttctattgtggtgtttggaagcattgtgaacgagggctacctgaactccgcatccgaaggggaggagttttgtatttacaacaggaatcctaacgcctgttcatacggggtggccgttggggtgctggctttcctcacttgtctcctgtatctggccctcgacgtgtatttcccgcagatttcctcagtgaaagatagaaaaaaagctgtgctctccgacattggggtcagtgccttctgggcattcctgtggttcgtgggcttttgttacctcgccaatcagtggcaggtgagcaaacccaaggataaccctcttaatgaaggtacggacgccgctagggctgcaatcgctttctcctttttcagcattttcacttggagatccggagccaccagcccgccttag

SEQ ID NO: 207617 - DNA, 297 bp, synthetic construct
  misc_feature 1..297: note = Description of Artificial Sequence: Synthetic coding sequence
  source 1..297: mol_type = other DNA
atggccagcggcgccggcggcagctggggccggagccccccccagtctgctgtccccacgccctgggtgacattcttacagcccctgtcgtgggcggtgcccccagccccaccacagccaggcagagtgaaagaagatttgcttgagttgatgatgctgcagaacgcccagatgcaccagcttctgctctcccggctggtcgccggtgccctgcagcctcgccctgcgtctccttgccctcaggagtcctgcgcgcccaccccgacccctcagtgtcaccgggattgcggctgctag

SEQ ID NO: 207618 - DNA, 690 bp, synthetic construct
  misc_feature 1..690: note = Description of Artificial Sequence: Synthetic coding sequence
  source 1..690: mol_type = other DNA
atggagggcgccagcttcggcgccggccgggccggcgccgccctggaccccgtgagtttcgcacgcagaccccagacactcctgagagttgcatcatgggtgtttagtattgctgtttttggacccatagtaaacgagggatacgttaacacggactctgggcccgagttaagatgcgtgtttaacggaaacgccggtgcttgtcggtttggtgtggctctgggtttaggcgcatttctggcgtgcgcggctttcctgttgctcgatgtgaggttccaacagatcagttcggtgagggaccggaggcgtgccgtccttctcgatctgggattttctggactgtggtcattcctgtggttcgtgggcttttgttttcttactaatcagtggcagcggacagcacctggcccggccacgacccaggccggtgatgccgctagggctgcaattgctttctcgttttttagcatcctttcatgggtggccttgactgtgaaggcacttcagaggtttcgattgggcacagatatgtccctgttcgcaaccgagcagctttctaccggggcctcccaggcttacccaggttacccagtcggctcaggggttgaagggacagagacatatcagtcaccgccttttacagagacattggacacatcaccaaaggggtaccaggttccagcttactag

SEQ ID NO: 207619 - DNA, 438 bp, synthetic construct
  misc_feature 1..438: note = Description of Artificial Sequence: Synthetic coding sequence
  source 1..438: mol_type = other DNA
atggagggcgccagcttcggcgccggccgggccggcgccgccctggatccagtcagctttgcccgccgaccccagactttgctgcgggtggccagctgggtgttcagcattgcagtgtttggaccgattgtcaatgaaggatacgtaaatacagatagcggacccgagttacgctgtgtgtttaatggcaacgcaggcgcttgccgctttggcgtcgcacttggtctcggagcttttttagcgtgtgctgcctttcttctgctggacgttagattccagcagtccggggggcggggtaagactcccccatcgccccaggactggggatcttggccactgttcccttctcatgtcccagtcggaagcgattgccttgtttccgtgatggtcgtccggccggtacggtctcattcccccctgagcctgacggggtgttag

SEQ ID NO: 207620 - DNA, 705 bp, synthetic construct
  misc_feature 1..705: note = Description of Artificial Sequence: Synthetic coding sequence
  source 1..705: mol_type = other DNA
atgcacatccccaagagcctgcaggagctggccaacagcgaggccgtgcagtttctcaggcggcccaagacaatcacacgggtgttcgagggagtcttcagcctaatcgtgttctcttcgctcttgacagatggatatcaaaataaaatggagtccccgcaacttcactgtatcctcaattccaactcagtggcatgctcctttgcagtgggagccggctttctggcatttctgagctgcctcgctttcctggtgttggatacacaggagacacggattgctggcaccagatttaagactgctttccaacttttagactttatcctcgccgtgctgtgggcggtggtttggttcatggggttttgcttcctggctaatcagtggcagcattctcctcccaaggagtttcttctgggcagctctagcgcccaggcagcgatcgcgtttaccttcttcagtattctggtatggatttttcaggcatacctggcatttcaagatttacgaaatgatgctcctgtaccatataaacggttccttgacgaaggcgggatggtcctgacaaccctacccctgccttcagccaacagccctgttaatatgccaacgactggaccgaactcgctgagttatgcttctagtgctttaagcccctgtctgacggcccctaagtctccgagactggcaatgatgccggataattag

SEQ ID NO: 207621 - DNA, 4722 bp, synthetic construct
  misc_feature 1..4722: note = Description of Artificial Sequence: Synthetic coding sequence
  source 1..4722: mol_type = other DNA
atggccttcagcaagggcttccggatctaccacaagctggacccccctcccttttcgctcatcgtggaaaccagacacaaggaagagtgtttaatgtttgagagtggtgcagtcgcggtgctgagttctgccgaaaaggaagctatcaaagggacatattcgaaagtgctggacgcctatggcctgctgggtgtcctgaggctgaatctcggagatacgatgctccactacttagttcttgtcaccggctgcatgtcagtgggcaagatccaagagtctgaggtgttccgtgtcacctcaacggagttcattagtctgcgcatcgacagttctgacgaagatcgtatcagcgaggtgcgcaaggtcctgaactcaggaaacttttattttgcatggagcgctagcggtatcagcctcgacctgtctcttaatgcgcaccggtctatgcaggagcaaaccacggacaacaggtttttctggaatcaaagtcttcacctccacctgaagcactatggagttaactgtgacgactggctactacgactcatgtgtggcggagtcgagatccgaactatctacgcagctcataagcaagctaaagcttgcctcattagccggctctcttgtgagcgagctggtactcgattcaacgtgaggggaacgaatgatgatggtcacgttgccaatttcgtggaaacggagcaggttgtgtacttggacgactcagtctcaagtttcatccaaatccgggggtctgttcctctgttctgggaacagcctggtctgcaagtcggctcccaccgcgttcgaatgagtagggggttcgaagcaaacgcgcccgcctttgataggcacttccgcacactcaaaaatctgtatggaaaacaaattatcgtgaacctcctaggatctaaggaaggcgagcatatgttatcaaaagcattccagagtcatctaaaagcttcagagcacgctgccgacatccagatggtgaacttcgactaccaccagatggtgaagggcggaaaagccgagaaattacacagcgtgctaaagcctcaggtgcagaaattcctggactatggctttttttacttcaatggttctgaggtacagaggtgccagtctggcaccgttcggaccaactgccttgactgtcttgatcgaacaaatagcgttcaggcattcttaggactcgaaatgcttgcaaaacagttggaggccctggggcttgctgagaagcctcagctggtcaccagatttcaagaagtgttccggagcatgtggtctgtgaacggggattctatttcaaagatttacgcggggaccggcgcacttgagggaaaagccaagctgaaagacggggcccgatccgttaccaggacaatccagaataatttcttcgatagttctaagcaggaggcaattgatgttctgctgctcggcaacactttaaattcagacctcgccgataaggcccgggcactcctcactaccggcagccttcgagtgtccgagcaaacgctacagtccgccagtagcaaggtgctgaagagcatgtgcgaaaacttttataaatattctaagcctaagaagatccgggtgtgcgttggtacttggaatgtaaatggtggaaaacagtttcgcagtattgcctttaaaaaccaaaccttaactgactggctgttagatgcccctaaactcgcaggcatccaagagttccaagataagcgctccaagccaacagacattttcgctatcggtttcgaggagatggtggaattgaatgcagggaacattgtttctgcatctaccaccaatcagaaactatgggcggtggaactgcagaagactataagcagagacaacaagtacgtgcttctcgctagcgagcaattggtaggtgtgtgtctctttgtgttcatccgcccacagcacgcgcctttcattcgggatgtggctgtggatactgtcaaaactgggatgggtggggccactggcaacaagggtgccgtcgcaatcaggatgcttttccataccaccagcctgtgctttgtctgtagtcacttcgctgccgggcaaagccaggttaaagaaagaaacgaagactttattgagatcgcgcggaagctcagttttcccatgggcagaatgctgttctcacacgattacgttttctggtgcggcgactttaattaccggattgatttacctaacgaggaggtaaaagaactgatcaggcaacagaattgggattcactgattgcgggagaccaacttatcaatcagaagaacgcaggtcaggtgtttcgaggatttctggaaggcaaagtcactttcgctccaacatacaagtatgacctgttcagtgacgattatgatacaagcgagaaatgcagaacccccgcttggactgaccgggtcctgtggaggcgaaggaaatggccattcgaccgctcagctgaagatcttgatcttctcaacgcgtcctttcaggatgaatcaaaaattctgtacacatggacgccaggaacccttctgcactacggtcgagcagagttgaagacttccgatcaccggcctgtggttgctctcatcgacattgacatcttcgaagtcgaagccgaggagaggcagaacatctacaaggaggtcattgcagtacagggacctccagacgggactgtcctcgtgagcatcaagtcttctctgcctgagaacaacttctttgacgatgctctgatcgacgagttactccaacagttcgccagcttcggcgaggtgattttaatccggtttgtcgaagataagatgtgggtgacctttctcgagggaagctcagcacttaacgtgctttctttgaatggaaaagagctcttaaaccggactatcaccattgcacttaagtctcctgactggattaaaaatctagaggaagagatgagcctcgaaaaaatatccattgccctgccatcaagcacttcttcgacactgcttggtgaagacgcagaggtggctgcagacttcgacatggaaggtgatgtagacgactactcagcagaggtcgaagagcttctgcctcaacatctgcagccttcttcctcgtctgggctgggcacctcgccttccagcagccccaggacttcaccgtgtcagtcaccaaccatatccgaggggcctgttccctcactaccaatacgtccttcacgcgcgcctagcagaaccccaggccccccttccgcgcaatcttctcctatcgatgcacagcccgcaacacccttgcctcaaaaagatcccgctcagcccctcgagccaaaaagacctccgccacctcggcctgtcgcaccccctactagaccagcccctccgcaacgtccaccacccccatctggggcccgctctcctgcacccactcgcaaggaatttggagggattggagctcctccttcacctggtgttgccaggcgcgaaatggaggctccgaaatcccctggtacgactcggaaggacaatatcggtcggtcccagccctctcctcaagctgggctggccggcccgggtccagcggggtactctacagcaagaccgaccataccaccaagagctggagtaatatcagctccacagtctcatgccagggcatcagcgggcaggctaacccctgagtcccagtcaaagacttcggagaccagtaaggggagtacctttttgccggaaccccttaaaccacaggccgcgttcccacctcaatcatccctacctccccctgctcagagactgcaggagccattagtgcctgttgccgcccccatgccacaaagtggacctcaacccaacttagaaacacctccccagccaccacccagatctaggagctcccactctctaccctcagaggcgtctagccagccccaggtcaagactaacggcattagcgatggcaaaagagagagtcctctgaagatcgacccctttgaagacctgtcatttaatctcttggcagtgtctaaggcgcagctgagcgtgcagacttctccagttcccactcccgatcccaagcgcttaattcagttgccctcagccacacagtccaatgtcttaagttctgtgtcgtgtatgccgactatgccccccattcccgcaaggtcgcagtcacaagagaatatgcggtcttctccaaatccgttcatcactggcctcaccaggactaaccccttctctgaccgcacagctgctccaggaaacccctttagggcaaaatcagaggaatccgaagcaacatcttggttctctaaggaagagccagtaacgatctcgccatttccttcacttcagcccttagggcacaataaaagccgggccagctctagcttagatggctttaaagatagttttgatttacaaggacagtctaccctcaagattagcaatccgaaggggtgggtcaccttcgaagaagaagaggatttcggcgtgaagggcaaatctaagtctgcttgctccgaccttctggggaatcagcccagctcattttccggaagtaaccttaccttgaatgacgattggaacaagggcacgaatgtgagcttctgcgtgctcccttcacgtaggccccctcccccacctgtacccctgctgccacccgggacttcccctcccgtggacccttttaccaccctggcttcaaaggctagtcccaccctggattttacagaaaggtag

SEQ ID NO: 207622 - DNA, 3888 bp, synthetic construct
  misc_feature 1..3888: note = Description of Artificial Sequence: Synthetic coding sequence
  source 1..3888: mol_type = other DNA
atggccttcagcaagggcttccggatctaccacaagctggaccccccaccattctctctgattgtggagacaaggcacaaagaagaatgcttgatgttcgagtccggagccgtggcagtgctgtcctctgcagagaaggaggcaattaaaggcacttattcaaaagtactggatgcttacggtctgttaggggtattgagactgaatcttggggacactatgcttcactacctggtattggtcacaggttgcatgagcgtgggcaagatccaggaatccgaggtctttcgcgtgacgagcaccgagttcatcagtctgcgcatcgactcgtccgacgaggatcggatatcggaggtaaggaaagtactgaacagcggcaacttttatttcgcgtggtctgccagtgggatcagcctggatctgagcttgaacgctcatcgtagcatgcaagaacagactactgacaatagatttttctggaatcagtctcttcacctacatttgaaacactacggtgttaattgcgacgattggctgctgagactgatgtgcgggggcgtggagattcggaccatctacgccgcacacaagcaggctaaagcttgtctaatcagtaggctgagttgcgagcgcgcaggaacacgcttcaatgtaaggggcacgaacgacgacggacacgtcgccaattttgttgagactgagcaggtggtctatcttgacgactccgtttctagctttatccaaatcagggggagtgtgcctctcttctgggagcagccaggactacaggttgggtctcaccgggttcgaatgagcaggggctttgaggctaacgctcccgcattcgatcgccacttcaggaccctgaagaacctatacggcaaacagattattgtcaatctgcttgggagtaaggagggggagcacatgttgagtaaggccttccaatcccatttaaaggccagcgagcatgcagcagacatccagatggtgaacttcgattatcaccagatggtgaaaggtgggaaagccgaaaagctccactctgtcctcaagcctcaggtgcaaaaattccttgactatggctttttttacttcaatgggtcagaggttcagcgatgccagtcgggaacagtaaggactaattgcctcgactgcttggacaggacgaactccgtccaggcttttctcgggctggagatgctggccaagcaactcgaagccttgggactggccgagaagccacagttggttacaaggttccaagaggttttccgttccatgtggtccgtgaacggtgatagtatatcgaagatttatgcaggcactggagccctcgaaggtaaggctaagctgaaggatggggctagatccgtaactcggacaatccagaataactttttcgactcgtctaaacaggaggccatcgacgtgctgttgttgggcaacaccctaaactcggacttagccgacaaagcacgcgcacttttaactactggatctcttcgcgtgtccgaacagaccctgcagtctgctagctctaaagtgctaaaatcaatgtgtgaaaatttttacaaatattctaaaccaaaaaagatccgagtctgtgttggtacatggaatgttaatggcggaaagcagttccgatcgatcgctttcaaaaatcagacactgactgactggctactggacgcccctaaactggcaggcattcaggagtttcaggacaagcgcagcaagccaacggacatctttgctatcggctttgaggagatggttgaacttaacgcggggaatattgtgtccgcatctactacaaaccagaagctatgggccgtcgagctgcagaaaactatctctcgtgataataaatacgtactattggcctctgagcagttggtgggggtgtgtctatttgtgttcattcgcccccagcacgctcctttcataagagatgtcgccgtagatacggtgaagaccggcatggggggcgctacgggaaataagggcgccgttgccataaggatgctgtttcacaccacatccctctgtttcgtgtgttcccatttcgccgctgggcaaagtcaagtgaaggaacgaaatgaggactttattgaaattgcaaggaagctgagtttcccaatgggcagaatgctattttcacatgattatgttttctggtgcggggactttaactatcggatcgacctcccaaacgaggaagtgaaggagttaatccggcagcaaaattgggacagcctgattgccggggaccagctaataaatcaaaagaacgccggtcaggtgttcagggggttccttgagggtaaggtgacattcgccccgacgtataaatatgacttattttctgacgattacgatacgtctgaaaaatgtcggacacccgcatggaccgatagggtattgtggcggagacggaaatggcccttcgaccgctctgctgaggacctggacctgctcaatgcatctttccaggatgaaagcaagatcttgtacacctggaccccggggaccctgttgcattatgggagagcagagctgaagacttccgaccaccggccagtggtggctctcattgatatcgacatcttcgaagtggaagcggaagaaaggcagaacatttataaagaggtcatcgcggtgcaggggccccccgacggaactgtcctggtgagtattaaatccagtctgcccgaaaacaactttttcgacgacgcactaatcgatgagctgctgcagcagtttgcttccttcggtgaggttatcctgatcaggtttgtggaggataagatgtgggtgacattcctggagggctcaagcgctctgaatgtcctaagcctcaatggcaaggaactcctgaataggacgattaccatcgcactgaagagtcccgattggatcaaaaatctggaagaagaaatgtcactcgagaaaatttcaatcgccctgccgtcctcgacaagttctaccttgctgggggaagatgccgaggtagcggctgacttcgatatggagggcgacgtggacgactactccgccgaggtggaagagctactgcctcagcatttgcaaccatcctcaagttccggtctcggcacctctcctagcagcagtccaagaactagcccatgtcaaagtccaacaatttccgagggaccagtgccgtctttacctatcaggcccagcagagctccatcccgcacaccggggccgccatccgcccagtcaagcccaatcgacgcacagcccgcgacacctttaccacagaaggatcccgcccagcctctggaacccaagcgacctcccccgccaagacctgtggccccccccacccgaccagctcctccccaacggcctccacctccgagcggggcacgcagcccagctcccaccaggaaggaattcggtgcccctaagagcccaggaaccacccgaaaggataacattggacggtcacagccatctccccaggcaggtctggcgggccctggtcctgctgggtatagcacagcccgcccaactataccccctcgagcaggcgtcatttctgctcctcagagtcatgccagagcaagcgctggacgcctgactcctgagtcacagtcaaagacttctgaaacttcgaaaggcagcactttcttaccagaacctctgaaaccacaagccgccttccccccccagtcgtcacttcctcctcccgcgcagaggctgcaagagccgctcgttcccgtcgcggccccaatgcctcaatccggccctcagccgaacctcgaaacacctcctcagccgccgccgcggagtcgctcatcccactctctgcccagcgaggccagctcccaaccgcagcaggaacagccatcaggttag

SEQ ID NO: 207623 - DNA, 4581 bp, synthetic construct
  misc_feature 1..4581: note = Description of Artificial Sequence: Synthetic coding sequence
  source 1..4581: mol_type = other DNA
atggccttcagcaagggcttccggatctaccacaagctggacccccctcccttttctcttatcgtcgaaacacgtcataaggaggaatgccttatgttcgagtctggcgcagttgcagttctttcctcggctgagaaggaagccattaagggcacgtattcaaaagtactagacgcatacgggctcctcggagtcctccggctcaatctgggagacactatgctccattaccttgttctcgtgaccgggtgcatgtctgtgggtaagatacaggagagcgaggtgttcagggtaacatccactgaattcataagtctgcgcattgattcatccgacgaggatcggatcagcgaagtccgaaaggtgcttaacagtgggaatttttatttcgcctggtccgcctccggcattagtcttgatctgtcgctgaatgctcataggagcatgcaggaacagaccacggataatagattcttctggaaccagagtcttcacctgcacttgaagcactacggggtcaattgtgacgattggctactgcggttaatgtgtgggggggtcgagatccggaccatttacgccgctcacaagcaggctaaagcctgtctcatatcaaggctctcctgcgagagggccggaaccagatttaatgtgcgggggacaaatgacgacggccacgttgctaacttcgttgagaccgaacaggtggtgtatcttgacgattctgtttctagtttcatccaaatccgcggttcagtgccgctgttctgggagcagcccggtctgcaggttggctcccatcgagtgaggatgtcgaggggattcgaggcaaatgctccagcttttgacaggcactttaggacgctaaagaacctgtatggcaaacagatcattgtgaacctgctaggaagtaaagaaggcgagcatatgctctctaaggcgtttcagtcacacctcaaggctagcgaacacgctgctgatatacagatggtcaattttgactaccaccagatggtgaaaggcggcaaagccgaaaagctccactcggtgcttaaacctcaggttcaaaaattcctcgattatggttttttttatttcaatggaagcgaggtccaaagatgccaaagcggcacggtccgtactaactgtctcgactgtctcgaccgtactaatagtgtccaggccttcctgggccttgaaatgttagccaaacaactggaggctctcgggttagccgagaaaccacagctggtaactaggtttcaggaagtgttccgctcgatgtggagtgtcaatggtgatagtattagtaaaatctacgcgggtaccggggccttggagggtaaggccaaggctggaaagctgaaggacggcgcgagatcagtcacccgaacaatccagaataacttcttcgattcttccaagcaggaagccatcgacgtgctgctcctcgggaataccctcaactccgatctggctgacaaggcacgcgcgctgctgaccactggcagcctacgagcgagtagtaaagtcctgaagagcatgtgcgaaaatttctacaagtactctaagccaaaaaaaattcgggtttgcgttgggacatggaacgtaaatgggggcaagcagtttaggagtatcgcctttaagaatcagaccctgaccgattggctcctggacgctcctaaattagcaggcatccaagaatttcaggataaaaggtccaagccaactgacatctttgctatcggcttcgaggaaatggtggagctgaatgctggaaacattgtctctgcctctaccaccaaccagaaattgtgggctgtggagctgcagaaaactatttctcgggacaacaagtacgtgctccttgcgtcggaacagcttgtgggggtctgtctgttcgtctttataaggcctcagcacgctccctttattcgtgatgtcgccgtggacactgtcaaaacggggatggggggggccaccgggaataagggagctgtcgcaattaggatgctcttccacacaacaagtctgtgttttgtgtgttcccacttcgccgccggacagtcgcaagtgaaagagcgcaacgaggatttcatcgaaatcgcccgcaaactgtccttccccatgggtcggatgctgttctctcatgactatgtcttttggtgtggggacttcaattatcgtatcgatctgcccaatgaagaagtgaaagagctcatcaggcagcaaaactgggatagcctcattgccggcgatcagcttataaaccagaagaacgctggtcaggtctttcggggttttttagagggcaaagtgacctttgcccctacatataagtacgatttgttttctgacgactatgacaccagtgaaaaatgccgaaccccggcttggacagatagggtcctttggaggcggcggaagtggccatttgatagaagcgctgaggacctcgacctccttaacgcatcatttcaagatgaatccaagatcttatacacctggactcctgggaccctgcttcactacggccgagcagagctgaaaacatccgatcatcgaccggtcgtggccttgatcgacatcgatatctttgaagtagaagccgaagaaaggcaaaatatctacaaagaggttattgctgtgcagggtcctcccgacggaactgtcttggtaagcatcaagagtagcctgcctgagaacaatttctttgatgacgccctcatcgatgagctgctccagcagtttgcatcattcggggaagtgattctgattaggtttgtggaggataaaatgtgggtgacctttttggagggctccagtgccctgaatgtactgtcgctgaatggcaaggagctcctaaaccgaaccatcaccatcgctctgaaaagtcccgactggatcaagaatctggaggaagagatgtcacttgaaaagatttccattgccctgccctcaagcactagcagcactcttctgggtgaggatgccgaagtcgcagctgattttgatatggagggtgacgtcgacgattacagtgccgaagtggaagagcttctccctcagcacctacagccatcttcgagttctggcctgggcacatccccttcctcatctccccggacaagcccgtgccagtcaccaacaatatccgaaggcccggtcccatcactgccaatacggcccagccgagcccctagtcgaacacctggtccaccttccgctcagagctctccaattgacgcccaacccgcgacccctctcccacaaaaggatcctgcacagccactggagccaaaaaggcctcctccaccgaggccggttgctccaccaactaggcctgccccgccccaaagaccgccaccccctagcgggcgctctcagcctagtccacaggccggccttgctgggccaggccccgcgggttattcaaccgcacggcccacaattcctccaagagctggcgtaatttccgctccacagtctcacgcccgggccagcgcggggagattgacgccagagagccaaagtaaaacttctgagacctcaaagggatctacgtttctccctgaaccactgaagcctcaggctgctttcccgcctcagagctcattacctccgcctgcacagaggctgcaggagcctcttgttccagtcgccgcacctatgccccaatctggcccacagccgaatctggaaacaccccctcagcccccaccgcgatcacgcagcagccattcactgccatctgaggcctcttcacagcctcaggttaagacaaacgggattagcgacggcaagagagagtcaccactgaaaattgatcctttcgaggatctcagtttcaatctactcgccgtttcgaaggctcagctgagcgtccagacaagtcctgtccctacacccgatcccaagagactcattcaacttccatcagccacccagtcaaatgtcctgagcagcgtctcttgtatgcccactatgccaccaatacccgccaggtcccagtcacaggagaatatgcgcagtagcccaaatccgttcatcacaggtttaaccagaacgaatccattctctgacaggacagcagcaccgggcaacccattccgagcaaaaagcgaggaatctgaggcaacgagctggtttagcaaggaagagcctgttaccatcagccctttcccgtccctgcagccgttggggcacaataaaagcagggcttcctccagtctcgacggcttcaaggacagtttcgatttgcagggacagtccacccttaaaatttctaatccaaagggctgggtcacattcgaggaagaagaggactttggcgttaaaggtaagtccaagagtgcctgctcagacctacttggcaatcagccctcatctttctccgggagcaatctgaccctcaatgatgactggaataagggtaccaacgtgagtttttgcgtcctgccctctagacggcctcccccaccacccgtccctctactgcctcctggaacctctccaccagtggacccctttacaaccctggcctctaaggcatcacccacccttgacttcactgagcgctag

SEQ ID NO: 207624 - DNA, 4053 bp, synthetic construct
  misc_feature 1..4053: note = Description of Artificial Sequence: Synthetic coding sequence
  source 1..4053: mol_type = other DNA
atgcggaagcggtgggcctgctggagcggcagcgacgcccccggcggctgtggcggtgggtgcggaaggaggaggagaagatcgagacggaaacgggccgcctctgaggaacggagaatggccttctctaagggcttcagaatctaccacaagctggaccctccccccttctctcttattgttgagacccgacataaagaagagtgtcttatgttcgagagtggcgctgtggcagttctgagcagtgctgaaaaagaagctatcaaggggacatactccaaagtgctagacgcctatgggctgttaggtgtgcttcgcctgaatctgggagataccatgctccactacctcgtgctggtgacagggtgcatgtctgttggcaagattcaggaaagcgaggtttttagagtgacatctaccgaattcatcagtttaagaattgactctagcgacgaagatcggatctccgaggttaggaaagtactcaattctggtaacttctactttgcatggtcggccagtggaatatctctggacctttcacttaatgcccatcgttccatgcaagagcaaaccaccgataatagattcttttggaaccagagcttgcacctccacttgaagcactacggcgtgaattgtgacgattggttgctgcggctcatgtgcggaggggtggagatccgtaccatttacgccgcacataagcaggccaaagcgtgcctgatctcccgtctcagctgtgagagagcagggaccagatttaatgtgcggggcacaaatgatgatggccatgtcgccaactttgttgaaaccgagcaggttgtatatctggatgattctgtgagttctttcatccagattaggggcagtgtcccactcttctgggagcagccggggttgcaggtcggctcacatcgggtgagaatgtctcgaggattcgaggcaaacgcccccgcgttcgatcgtcacttccggactctaaagaacctgtatggcaagcagatcatcgtgaatctgcttggctcaaaggagggcgaacacatgttgagtaaggcctttcagagccacctgaaggcttctgaacacgctgccgacattcagatggttaattttgactatcaccaaatggtgaaagggggcaaggccgagaaactacattcagtgttgaaaccacaggttcagaagttcctcgattacggcttcttttacttcaatggctccgaagtccagcgctgccagtccggtacggtccgaactaactgtctggattgcttggatcgcactaattcagtgcaggcctttttaggactagaaatgctggccaaacagttagaggctctgggactggcggagaaaccccaactagtgacacgtttccaggaagtgttcagatccatgtggtccgtcaacggagattccatttcgaagatttacgctgggaccggagcactggaagggaaggctaaactgaaagacggcgcccgcagcgtcacaaggaccattcaaaataatttttttgacagttctaaacaagaagccattgatgttctgttgctggggaatacactgaattcagacctggctgataaggctagagccctgttgaccactggatctctcagagtcagtgagcagactctccaatcagcgtccagtaaggtgctgaagagcatgtgcgagaatttttacaaatactcaaagcccaagaagattcgagtgtgcgtgggaacttggaacgtgaacggaggaaagcagttccgcagtatcgcttttaagaaccagaccctaaccgactggctgcttgacgctcctaagcttgccggcattcaggaattccaggataaaaggtccaaaccaacagacatcttcgccatcggttttgaggaaatggtggagctgaatgctggaaacatcgtgtccgcaagtaccactaaccagaagctctgggccgttgaactgcagaagaccatctcacgagacaataagtatgtgttactggcgagtgagcagctcgttggggtatgcctgttcgttttcatacgacctcagcacgcccctttcattagggacgttgcggtggatacagttaaaaccgggatgggcggtgcaactggaaataaaggcgctgtcgccatcaggatgctcttccacactacttccctgtgtttcgtgtgttctcattttgctgctggtcagtcacaggtgaaggaaaggaacgaagatttcattgaaattgcccgcaaactctctttcccaatgggcaggatgctgttcagtcatgactatgtgttctggtgcggagatttcaattaccgcatcgatcttcctaatgaggaggtgaaggagctgatcaggcaacagaactgggactcgctgattgctggagaccagctcataaatcagaagaacgctggtcaggtgttccgaggctttttggaagggaaagtcaccttcgcccctacctataaatacgacctgttctccgacgattacgacacgtcagagaagtgtcggaccccagcctggactgacagggttctatggaggagacgcaagtggcctttcgatcgatcagccgaagacttagatttgctgaacgcatcttttcaggacgagtcaaagatcctgtacacttggacccctggcactctcttgcattacgggagagctgagctgaagacttcagaccatcgcccagtcgtggccttaatcgacatcgacattttcgaggtcgaggcagaggaacgtcagaacatttataaagaagttatcgctgtgcaaggccccccagatggtaccgtcctggtttctatcaaatccagcctccctgagaataactttttcgatgacgctttaatcgatgagctcctccagcagtttgcctcattcggagaagtaatactgattaggttcgtcgaggataagatgtgggtgacattcttagaaggctcctccgcccttaatgtcctgagtcttaacgggaaggaactcctgaacagaactataacaattgccctgaagtcacccgattggattaagaatctggaagaagaaatgtctctagaaaagatctctattgccttacccagcagcacctcgtctaccctactgggtgaggacgccgaggtggcagcagatttcgacatggagggagatgtggacgactacagcgctgaagtggaagagctcttgccacagcatcttcagccatcatctagctcaggtctcggcacaagcccatctagtagccctcgcacatccccctgccagtctccaaccatctcagagggcccagttccctccctgcctatccgaccatctcgggcccctagccgaacacctggaccgccaagtgcccagtcctcacctatcgacgcgcagccagccacacctctgccccagaaagatcctgcccagcccctggaaccgaaacggcctccccccccgcgaccagtggcaccccctaccaggcccgcaccaccccagcgacctccacctccctctggtgctcgatctcctgctccgacaaggaaggaatttggagggatcggggccccccctagccccggtgttgccagacgcgagatggaggctcctaagagccccggcacgactaggaaggacaacattggccgttcacagccgtcaccacaagcaggcttggcgggcccaggccctgctggttattctacagctcgcccaactattccgcccagggccggcgtcattagtgccccccaatcccacgcacgtgcgagcgcggggcggctgactcccgaatcacagagtaagacttcggagaccagcaaggggagtacatttttgcctgagcccctcaagcctcaggcagcctttcctcctcaatcctctttgccacctccggcacagagactacaggaacctctggtgccagtggctgccccaatgcctcaatctggcccacagcctaaccttgagactccaccccagccccctccaaggagcaggtcgagccattctcttccctcagaggccagctctcagcctcagcaggaacagcccagtggttag

SEQ ID NO: 207625 - DNA, 4839 bp, synthetic construct
  misc_feature 1..4839: note = Description of Artificial Sequence: Synthetic coding sequence
  source 1..4839: mol_type = other DNA
atgcggaagcggtgggcctgctggagcggcagcgacgcccccggcgggtgcggaggcgggtgcggccgccggcggcgcaggtcccgacgaaagagggccgccagcgaagaacgaaggatggctttctctaaaggatttcggatctatcacaagctggacccgccacctttttccctcatagtagaaactaggcacaaagaagagtgcctgatgttcgaaagcggggccgtagccgttctctcttctgccgaaaaagaagccatcaaaggtacatattccaaagtcctggatgcatatggcctcctcggcgtgctgcgcctcaatctcggagatactatgctgcattacctagtactagtcactggctgtatgtcagtcggaaagatccaggagagtgaggttttccgcgtcacaagtacggaattcatctcccttcgtatagattcctcagatgaggacaggatatctgaggttaggaaagtgctgaactctggaaatttttacttcgcttggtctgcctcaggtatctcactcgatctgtcccttaatgcacataggtctatgcaggagcagaccacagacaacaggtttttttggaatcaaagtctccaccttcaccttaaacactacggagtgaactgcgatgattggctgttacgccttatgtgtggtggagtcgaaatcaggacaatttatgccgcacataaacaagccaaggcctgccttatttcccggctgtcctgtgagcgagcaggcaccagatttaatgtccgcggcaccaacgacgatgggcacgtggctaacttcgtggaaacagagcaggtagtgtacctggacgatagtgtctcttcctttatccagatacgcggcagtgttccattgttttgggagcagccggggctgcaggttggtagccatagagtgcgaatgtctagagggttcgaggctaacgctcctgccttcgatcgtcacttcaggaccttgaagaacctctacgggaagcagataatcgtgaatctcttgggaagcaaagaaggtgagcacatgctaagcaaagccttccagtctcatttgaaagcctcagagcacgccgccgatatccagatggtcaattttgattatcaccaaatggttaagggcggcaaggctgagaagctgcactcagtgctcaagcctcaggttcagaaattcctggattacggcttcttttatttcaatggctccgaagtgcaacgttgtcagtccggcacagttagaaccaactgcttagactgccttgatcggacaaattctgtgcaggcgtttctgggcctggagatgctggccaagcaactggaagccctcggcctggccgagaagccacaactggtgacccgctttcaagaggtgtttcgttctatgtggagtgtgaatggtgacagcatctccaaaatttacgcaggcactggcgctcttgaaggcaaagctaaactgaaagatggagctaggtctgtgacacggaccatccaaaacaacttcttcgatagctcaaaacaggaagctattgacgtactgctactggggaacaccctgaactctgatctcgctgataaagctcgcgctctcctcaccaccggctccctcagggttagcgagcaaacactccagagtgcttccagtaaggtcttgaagtctatgtgcgagaatttctacaagtattcaaaacccaagaagattagggtgtgcgtcggaacgtggaacgtcaatgggggtaaacagttccggtccattgccttcaagaaccagaccctgaccgactggctgctggacgcacccaaactcgccgggatccaggagttccaggataagagatccaagcccaccgacatatttgctattgggtttgaagaaatggtggaactcaacgcaggcaatatcgtttctgcctcaaccacgaatcagaaactgtgggctgtggaactgcagaaaaccatcagcagggacaataagtacgtgctgttagcctccgagcagctagtgggtgtttgtctctttgtattcatcagaccccagcatgcgccatttatcagggatgtggctgtggacacagtaaaaaccggcatggggggcgctacagggaacaagggagccgtcgcaatacgtatgctgtttcataccaccagtctgtgcttcgtgtgcagccactttgcagcagggcaatctcaggtaaaggaacgtaatgaggactttattgagattgctcggaagctctcattcccaatgggacggatgctgttctctcacgactatgtgttctggtgtggcgactttaattaccgcattgatttgccaaacgaagaggtgaaggaactgatcagacagcagaactgggactcccttattgccggagatcagctaattaatcagaagaacgcgggacaggtgttccgcggttttctggaaggcaaagtgacctttgcccccacatacaaatacgacctgttttccgatgattacgatacctccgagaaatgtcggacccctgcgtggaccgaccgcgtgctttggagaagacggaaatggccctttgaccgctccgctgaagacctggacttgctcaatgcttctttccaagatgagagcaagatcctgtacacatggacacccggaaccttgcttcactatggtcgtgcggagttaaagactagtgaccaccgcccggttgtcgcactcatcgatatagacatttttgaagtggaagctgaagagcggcagaatatttacaaagaagtcatagccgtgcaggggccgccggatgggacagtcctcgtaagcataaaaagcagccttccggaaaacaattttttcgatgatgccttgattgatgagcttctccagcagtttgcaagctttggcgaagtgattcttatacgcttcgtcgaagacaagatgtgggtgaccttcctagaagggtccagtgctctgaatgtcctgagtttgaacggcaaggaattgttaaatcgtacaataacaattgcgctaaagagccctgattggattaagaacctagaagaggaaatgagcctggagaaaatttctatcgccctccccagttccaccagttccaccctcctcggcgaggatgcagaagtggctgccgacttcgatatggagggagacgtggatgattattccgctgaggtggaagaactcttgccgcagcatctgcagccttcctcatctagcgggctggggacttctccttcctcttctccacgaacttcgccatgtcagtcccccactatctcggaaggccccgtgccttcactgcccatcaggccctcacgggccccttccagaacccccgggcctcccagtgcacagtccagccctatagacgcccagcccgcgaccccgctgccccaaaaagaccctgcccagccactcgaacctaagcgtccccctccaccacgccccgtcgccccaccgacaaggcctgcaccaccacaacgccccccgccgcccagcggggccagaagccccgcccctaccagaaaagaattcggcgggatcggcgcacctcccagtcctggggtagcaagacgcgagatggaggcaccaaaatcgccagggaccacaagaaaggacaatattgggagaagtcagcctagtccacaggcaggcctggccgggcctggacccgccggatattccactgccagacctacaattccccctagggccggagttattagtgctccccagtcgcacgcccgcgcctccgcaggtcggctcacaccagagtcacagtcaaagaccagcgaaaccagcaagggatcaaccttcttacccgaacccctaaaaccccaggccgcattcccaccccaatcatcccttccaccaccggcccagcgcttgcaggaacctcttgtcccagttgccgcgcccatgccgcagtccggcccacagcctaatctggagacacccccccagccacctccacgttccaggagttcccatagcctgccctccgaagcatcttcccagccccaagtgaaaaccaatgggataagcgatgggaagcgtgagagccccttgaagatcgaccctttcgaggatttgtcatttaatctgctggcagtatccaaggcccaactttccgtgcagacatcaccagtgcctaccccggaccctaaacgcttaatccagctccctagcgcgacgcagagcaatgttctgagctccgttagctgtatgcctacaatgcctccgattcctgctcgctctcagagtcaagaaaacatgaggagcagccctaatccgttcattacggggctaacaaggactaatccatttagcgatcgaaccgctgctcccgggaaccctttccgcgccaagagtgaggaatcggaagcaacctcatggttcagtaaagaagagccagtgacaatttctccctttcccagtttgcagccgctcgggcacaataagtcccgggcctccagctctctggacggattcaaagactccttcgacctgcagggccagagtaccttgaaaatctcaaacccaaaaggttgggtcacatttgaggaggaggaggacttcggagtgaagggtaagtccaaatctgcgtgtagtgacttgttgggaaatcagcctagctctttctcaggttccaatctcactctgaatgatgattggaataagggaactaacgtgtcgttttgcgtactgcctagtcgccggccgccaccccctcccgtgcctctcctaccccccggcacatctccaccagtggacccttttactaccctcgctagcaaggctagtcctactctggatttcactgagagatag

SEQ ID NO: 207626 - DNA, 4491 bp, synthetic construct
  misc_feature 1..4491: note = Description of Artificial Sequence: Synthetic coding sequence
  source 1..4491: mol_type = other DNA
atggccctgagcaagggcctgcggctgctgggccggctgggcgccgagggcgattgctcagtgctgttagaggcgaggggtagagacgattgtctgcttttcgaggccgggactgtggccacactggcccccgaggaaaaggaggtcataaagggtcagtatggcaaacttaccgacgcatacgggtgtttgggagaacttcgtctaaagagcggcggcacctcactgtctttcttggtactggtcaccggttgcacttctgtcggacgcatacccgacgctgaaatctacaaaatcaccgccactgacttttacccactgcaagaagaagccaaagaggaggagcgcctgatagcccttaagaaaatcctctccagcggggtgttctacttctcttggcccaatgacgggtcacgctttgacctcactgtccggacccagaagcaaggggatgacagttctgagtggggaaactcctttttttggaaccagcttctgcatgtgcccctcaggcagcatcaggtaagctgttgtgactggctcctcaaaatcatctgtggcgtcgtgacaatacgcacagtctatgcctcccataagcaggccaaggcttgtctggtttcccgtgtctcctgtgaacgcaccggaacgagatttcatacaagaggtgtgaatgacgacggacatgtgtcgaatttcgtcgagacagaacagatgatatacatggatgatggcgtttcaagcttcgttcaaatcagaggttcagtacccctgttttgggaacagccaggcctgcaggtgggcagccatcacctgcggctccatcggggacttgaggccaacgcccccgcttttgataggcacatggtgctgctcaaggaacagtacgggcagcaagtggtcgtgaacttgctgggttcccggggtggggaagaagtacttaaccgtgcctttaaaaagttgctgtgggcgtcttgtcacgcaggcgatacccccatgatcaactttgactttcaccagtttgctaaaggtggcaaacttgaaaagctggagacactgctgcgaccacagctcaaactgcactgggaggattttgacgtcttcaccaagggtgagaacgtgagcccccgctttcagaagggtacactgagaatgaattgtttggattgcctggaccggacaaacactgtccagtcattcattgcgctcgaagtgctgcatctccaactcaagacgctggggctttcctcaaagcccatagtagaccgattcgtggaaagcttcaaagctatgtggtctcttaacggccacagcctgagcaaagtgtttacagggagcagggctcttgagggcaaggccaaagtggggaagctgaaggacggcgctcgctccatgagtcgtactattcaatccaacttcttcgatggcgtcaaacaggaagcaattaagctcctcctggtcggagacgtttatggcgaggaagtcgctgacaagggtggcatgctgcttgactcaacagcactgctggtcaccccccgtattctgaaggccatgacagagagacagtccgagtttactaacttcaagcgaataagaatcgcgatggggacctggaatgttaatggcggcaagcaatttcgcagtaacgtcttaaggaccgccgaactcaccgactggctactggattccccacagctctctggcgctacagactcacaggatgactcttctccagcggatatctttgcagtcggtttcgaggaaatggttgagctgagtgcaggcaatattgtaaacgcctccaccacaaataaaaaaatgtggggagaacagctgcagaaagccatcagcagatcacatagatacatcctgttaaccagtgcgcagctggtcggggtgtgtctgtatatctttgtgcgaccctatcatgtgccattcatacgcgatgtggccatcgacacagtaaagactgggatgggcgggaaggcgggcaacaagggagccgtcggcattcgcttccagtttcactccacctccttttgtttcatttgtagtcatctcacagctggccagtcccaggtgaaagaacgtaatgaagactataaggaaatcacgcagaagttgtgctttccaatgggcaggaacgttttttcccatgattatgtgttctggtgtggtgactttaactacagaatcgatttgacatacgaagaagtattctactttgtgaagagacaggactggaagaagctccttgagtttgaccaacttcaactccagaagtcctcaggtaagattttcaaggatttccatgagggtgccatcaattttgggcccacttacaaatacgacgtggggtctgccgcctatgacacatcggataaatgtaggaccccggcttggaccgatcgggtgctatggtggaggaagaaacacccatttgacaaaacagcaggcgagctgaacctgttagattcagacttagacgtcgacaccaaagtccgtcatacttggtccccaggcgctctgcagtactacggcagagctgagctacaagcatctgaccaccgccccgtattagcgatcgtggaggtggaggtgcaggaggtggacgttggagctagggagcgcgtgttccaggaagtgtcgtccttccaaggacctctggacgcaactgtagtcgttaatctgcaaagtccaacactagaggagaaaaacgagttcccagaagacctccgcactgagctgatgcagaccctcggctcttacggcactattgtcctggtgcggatcaaccagggtcagatgctcgtgacatttgctgactcccattccgctctatccgtgttggacgtggatggaatgaaagtaaaaggccgggcggttaagattagaccaaaaaccaaggactggctgaagggtctccgcgaggaaatcattcgcaaacgtgacagcatggctcccgtgtcgcctacagcgaatagctgcctgctcgaagagaattttgacttcacttccctggactatgagagcgaaggagatatcctggaggatgacgaggactaccttgtagatgagtttaatcagcccggagtgtcagatagcgaattggggggagacgatctgtccgacgttcctgggccaacagcactggctccgcctagcaaatcacctgccttaaccaagaagaaacagcaccctacgtataaggacgacgccgacctggtcgaactcaaaagagaactcgaggccgtcggtgaatttagacaccgaagtccttctcggagtctctccgttccaaatagaccgcgccctcctcagccacctcagcgccccccaccaccaaccggcctaatggtgaaaaaatctgcctctgacgcatcaatatcttctggaactcatggccagtacagcatcctccagactgctcgcctgctcccaggcgccccacagcagccaccaaaggcccggactggaatatctaaaccatacaatgtaaagcagataaaaactaccaacgctcaggaagccgaggctgctatccgctgcctgctcgaggcccggggaggggcatctgaggaagccctaagcgccgtggctccacgggatctggaggcatcctcagagcctgaaccgactcccggggctgcaaaaccggaaacgcctcaggccccccctctgctccctagacgtcccccccctcgcgttcctgccatcaagaagccgactctgcgaaggaccggcaagcccttgtccccggaagaacagttcgagcaacaaacggtgcatttcaccattggacccccggagactagtgtcgaggctccccccgtggtgaccgcccctcgcgtccctcccgtgcccaagcctcgaacctttcaaccaggcaaggccgccgaacggccaagccacagaaagcccgctagtgatgaggctcccccaggggcgggggcctccgtcccgccgccactggaggccccccccctggtgcctaaagtaccccctcggcgtaaaaagtctgcccctgcggccttccacctccaagtgctgcagtcgaattcccagctgctccagggactgacttataattcttcggactcaccttctgggcatccgcccgccgctggtaccgtattccctcagggggattttctgtccacatccagcgccacctcccccgactctgacggtacaaaagcaatgaagcctgaagccgcccctcttctgggagactaccaggatcctttttggaatcttttgcaccatccaaagctattgaacaacacctggttatccaagagcagcgaccctctggactcaggaacccgcagcccaaagcgggacccaatcgaccccgtgtccgcgggcgcaagcgctgctaaagcagaactgccccctgaccacgaacacaaaacactgggacactgggttactatttccgatcaagagaagaggacagctctgcaggtattcgaccctctggccaagacctag

SEQ ID NO: 207627 - DNA, 1746 bp, synthetic construct
  misc_feature 1..1746: note = Description of Artificial Sequence: Synthetic coding sequence
  source 1..1746: mol_type = other DNA
atgcagaccctgggcagctacggcaccatcgtgctggtgcggatcaatcagggacagatgctggtgacatttgccgactctcattctgctctttccgtgctggacgttgatggcatgaaagtaaaaggaagggcagttaagatccgccccaagacaaaagactggcttaaaggtctgcgagaggagatcatcagaaaaagggatagtatggcaccagtgtcccccaccgctaattcctgtttacttgaagaaaacttcgacttcacaagcctcgattatgagtctgagggtgatatcctcgaggatgacgaagattacctcgtggacgagttcaatcagccaggcgtgagtgacagcgagttgggcggcgatgacctctccgacgtgcctgggccaaccgcgcttgctcccccctccaaatcccctgctctgacaaaaaagaagcagcacccaacctataaggatgacgccgatctggtggagctcaagagggaactggaagccgtaggggagtttcgccacagatccccaagtagaagtctgtctgtgcccaatcggccaaggccccctcaaccaccgcagcgacctccaccaccaacagggcttatggtgaagaaaagcgccagtgatgcctccatatcctctggcacccacggacagtactccatcctgcagactgcccgactgttaccgggcgcaccacagcagcctccaaaggcaaggaccgggatttctaaaccttacaatgtgaaacagatcaaaaccaccaatgcccaagaggcggaggccgccataaggtgcctcttagaggctcgggggggcgcttctgaggaagccctgtccgctgtggcccccagggatctcgaggcctcaagcgagcccgagccgactcctggtgctgcgaagccagaaactcctcaggcgcccccactgttgcccagacggcccccccccagagtgcccgcaatcaagaaacccacccttaggcgcaccgggaagccgctctccccagaggagcagtttgaacagcagaccgtccattttacaatcggtccaccagaaacctctgtggaggctcctcccgtggtgaccgctcctcgggtgccacctgtgcccaagccgcgcactttccagccaggaaaagccgccgagcggcccagccatagaaagcccgcttctgacgaagcccctcccggtgccggagccagcgtgccaccccctctcgaggcaccaccattagtaccaaaggtgccaccccgcaggaaaaagagtgcgcctgcggcatttcatttacaagtcttgcagagtaactctcaacttctgcaggggctgacatataattcaagcgatagcccctcgggccacccaccagcagcgggcaccgtgttcccccaaggcgattttctctccacttcttctgcaacctcgcccgactctgacggtactaaggccatgaagcccgaagccgccccactcctcggggattaccaggaccccttctggaacctccttcaccaccccaaactccttaacaacacatggctgagcaaaagcagtgaccctcttgatagtggcacaagaagccccaagcgggacccaattgacccggtgtctgcaggtgccagtgcagcaaaggcagaactgccccccgaccacgagcacaaaaccctcgggcactgggtgacaatcagcgatcaggaaaagaggaccgccctacaagtgttcgacccccttgcaaagacatag

SEQ ID NO: 207628 - DNA, 411 bp, synthetic construct
  misc_feature 1..411: note = Description of Artificial Sequence: Synthetic coding sequence
  source 1..411: mol_type = other DNA
tgaggccgggacgactgcctgctgttcgaggccggcaccgtggccaccctagcacccgaggagaaagaggtgatcaaaggccagtacggcaaattgacagacgcatacggctgtttaggtgaactcaggctgaagagcgggggcactagcctctctttcttggtgctcgttacaggttgcacctctgtcggaaggataccggatgctgagatttacaagataaccgcgaccgacttttaccccctgcaggaagaggccaaggaggaggaaaggctcatagcactgaagaagattctgagtagtggagtgttttatttttcttggcctaacgacggttctaggtttgacctgaccgttaggactcaaaaacaaggtgacgatagctctgagtggggcaactcattcttctag

SEQ ID NO: 207629 - DNA, 3867 bp, synthetic construct
  misc_feature 1..3867: note = Description of Artificial Sequence: Synthetic coding sequence
  source 1..3867: mol_type = other DNA
atggccctgagcaagggcctgcggctgctgggccggctgggcgccgagggagactgtagcgtcttgctggaggcccgaggaagggatgactgcttgctgttcgaggccggaacagtggctactttggccccagaggaaaaagaggtgatcaagggtcagtacggcaagttaactgatgcatatggttgtctgggggagctgagactgaagtccggcggaacttccctgtctttcctggttctggttactggctgtacttccgtggggagaatcccggacgccgagatttacaaaattacagccacggatttctaccctttgcaggaagaggctaaagaggaggaaagactgatcgcccttaagaagattctgagctccggcgtgttttattttagttggcccaacgacggatcaaggtttgacctgaccgtgcgcacacagaaacagggggatgattcgtctgagtggggcaatagctttttctggaaccagctcctacacgttccattaagacaacaccaggtatcttgctgtgattggctcttgaagattatttgcggtgtggtcacgatccggactgtgtatgctagccacaaacaagcgaaggcatgcttagtgagtcgtgtgtcctgcgaacggactggcacacggttccacacaagaggagttaatgacgacgggcacgtgagcaactttgtcgaaactgagcagatgatttacatggatgacggcgtgagctctttcgttcagatcagggggagcgtcccgctgttttgggagcaacccgggttacaagtcggatctcaccacctacgcttacaccgcggtctggaggcaaatgccccagcgttcgatcggcatatggtactgctaaaagaacaatacggccaacaggtggtagttaatctgctgggcagccgagggggcgaggaagtcttgaatagggcgttcaaaaagctgctctgggctagctgtcacgcaggcgatacccccatgatcaacttcgactttcaccagttcgcaaagggaggcaagcttgaaaaactggaaaccctcctgcgtccacagttaaagctccattgggaagactttgacgtgttcaccaagggagaaaatgtgtctccaagattccagaaaggtactctgagaatgaactgcctcgactgtctggaccggactaacacagtccagtcattcatcgcactagaagtccttcacctacagctgaagaccctggggctgagctcaaagcccatcgtggatagatttgttgagtctttcaaggcgatgtggagtctgaacggccactctctgtctaaagtgttcacagggtccagggcacttgagggcaaagctaaagtggggaaactgaaggacggcgctcgttccatgtcacggacgatccagtctaacttctttgacggggtgaagcaagaagcaatcaaactgctactggtgggcgacgtttacggtgaggaagtcgctgacaagggagggatgcttctcgactcaaccgcccttctggtgacaccgcggattttgaaagctatgacagagcgacagtctgaattcaccaattttaagcgtattcgtatcgctatggggacgtggaatgtgaacggtggtaaacagtttcggtccaacgtgctgcgaacagccgaactaacagactggctattggacagtccacagttatctggtgcgacggacagccaggacgattcgagccccgcggatatatttgcggtcggcttcgaggaaatggtcgaactgtccgctggaaatatcgtgaacgcatccaccactaacaaaaagatgtggggcgagcagctgcagaaagctatatccaggtcacaccgctacattctcctcacctccgctcagcttgtaggggtatgtctctatattttcgtgagaccataccacgtcccctttattagagacgtggccatcgacacagtgaagactggcatgggcgggaaggccggcaataagggtgcagtgggcatcagattccagttccattcaacgagtttctgcttcatttgttctcacctcaccgcaggccaatcccaggttaaagaacggaacgaagattacaaagagatcacccagaaactctgttttcctatgggcagaaacgtgttctcacatgactacgtgttctggtgcggggacttcaattatcggatcgacttaacttacgaggaagtgttctacttcgtcaagcggcaagactggaagaagctgctcgaatttgaccagttgcaactccagaagtccagtgggaaaatcttcaaggacttccatgaaggcgcaattaactttgggcccacatacaagtatgatgtcggatccgcagcctacgacacttccgacaagtgtcgcacgccagcatggactgacagggtgctgtggtggaggaagaagcacccctttgacaaaaccgcaggagagctgaatctgttggactctgatctggacgtcgataccaaggtgcgacatacctggtcccctggggcactgcaatattatgggagggctgaattacaggcctccgaccatcggccagttctcgcgatagtggaagtggaagtgcaggaagtggacgtgggtgcccgagagagagtgttccaggaagtgtcatcctttcaaggccccctcgacgccaccgtagtggtcaacttgcagtcgccgacactggaggaaaaaaatgagttccccgaagacctgcgcaccgagctgatgcagaccctgggatcttatggtaccatcgtgcttgttcgaattaatcagggccagatgctcgtcacctttgccgatagccacagcgccctcagcgtgctggacgtcgatggaatgaaggtgaaaggcagagctgtgaagatacggcccaaaacgaaggactggcttaagggcctgcgcgaagagatcattcgcaagcgagattctatggctccagtaagccccacagccaacagctgcctgctggaagagaatttcgatttcacttccctagactatgaatctgagggagacatcttggaggatgacgaggattacctggtggatgagtttaatcaacccggcgtgtccgatagtgagctggggggagatgacctttctgatgtgccaggacctacagctctggcaccaccatcaaagtcccctgctcttactaaaaagaagcagcacccaacttataaggatgacgctgatctggtcgagctgaaacgtgagcttgaggctgtgggagagttccgccatcggagcccatcccgaagcctgagcgtgccaaaccggcctcgccccccacagcctccccagcgaccccctccaccgaccggactcatggtgaagaaaagtgcctccgacgcttccatcagcagcggtacacacggccaatatagcattctgcagactgccagactactccctggggcacctcagcaaccacccaaagctcggaccggcatcagcaagccatataacgttaaacagattaaaactacgaatgctcaggaagcagaagcggccatccggtgtctgctggaggcacgcggcggcgcctccgaagaagctctgtccgccgtggccccacgagacctggaggcatcctctgaacccgagcctacaccaggggccgccaagcccgagactccgcaggctcccccattgctaccacggcgaccacccccgcgtgtaccggccattaaaaagccaacactaaggagaacaggtaagattgttttctgctcacggtctcaggcttcacaaccatgcctgttgctgcagcgccacgaattcgtacgaaccgttgctgctcaacgtttagcttcggtagacacctcaggttcatcagtctag

SEQ ID NO: 207630 - DNA, 4356 bp, synthetic construct
  misc_feature 1..4356: note = Description of Artificial Sequence: Synthetic coding sequence
  source 1..4356: mol_type = other DNA
atggccctgagcaagggcctgcggctgctgggccggctgggcgccgaaggggattgcagcgtactcttggaagccagaggccgagacgattgcctgctctttgaggctggcacggtggctaccttagcacccgaggaaaaagaagtgattaaggggcaatacggaaagctgactgatgcctatggatgtttgggagagctgaggcttaagagcggagggactagtttatcttttcttgtcctggtgaccggctgcacttccgtgggcagaattccggatgctgaaatctataagatcacggccaccgatttctatccattacaggaagaggccaaagaggaagaacgcctgatcgccctcaagaagatcctgtccagtggcgtattctatttcagttggccgaacgacgggtccagattcgatctgactgttaggacccaaaagcagggcgacgatagctctgaatggggtaattcttttttctggaatcaactgttgcatgtccccttgcggcagcatcaggtgagttgttgtgactggttactaaagatcatttgcggggtggtgacgattagaactgtgtacgccagccacaagcaggctaaggcctgtctggtgagtcgtgtcagttgtgagagaaccggcactagattccatacccggggcgtcaacgacgacggtcatgtgagcaattttgtggagaccgagcagatgatctacatggatgacggtgtgtcttcttttgtgcagattagaggttcagtacctctgttctgggaacagcctggcttgcaggtgggctctcaccatctcaggctccacagaggactggaggcaaacgccccagcttttgatagacatatggtgctcctgaaagaacagtacggacagcaagttgtggttaacctgctaggctcaagaggcggagaggaggtgctaaatagagcgtttaagaaactgctgtgggctagctgccacgccggtgacactcccatgatcaactttgactttcaccagttcgccaagggagggaaactggagaaattagagacactgctgcggccgcagttgaaattacactgggaggactttgatgtgttcacaaagggggagaatgtctctccaagatttcaaaaggggaccctgcgcatgaattgcctagactgtctagaccggacaaataccgttcagagttttatcgcactggaagttctgcaccttcaattgaagacgctgggactaagcagtaaacctattgtggaccggtttgtggagagctttaaagccatgtggtctttaaatgggcactccctctccaaagtcttcacagggtcccgcgcgctggaaggcaaggccaaggtgggaaagctcaaggatggggctaggagcatgtcccgcaccatccagagcaattttttcgatggcgtgaagcaggaggcaatcaagctcctcttagtcggagatgtttatggcgaagaggttgcggataagggcggcatgctgctggattccacggccctgttggttactccgagaatacttaaggccatgaccgaacgccagagcgagtttactaattttaaacgcatccgcattgccatgggaacatggaacgtgaatggtggaaaacagttcaggtctaacgttttacgaacagcagaactgaccgactggttactggactccccccagctaagcggtgccactgactcacaagacgactcgagccccgccgatatattcgccgttggattcgaggagatggttgagttatctgctggcaacatcgttaacgccagcaccacaaacaagaaaatgtggggggagcagctccagaaggctattagcagatctcataggtacatcctcctgactagtgcgcaacttgtgggtgtctgtctctacatcttcgtccggccctaccatgtgccatttatccgggacgtggccatcgatacagttaagaccggcatgggtggcaaagcaggtaacaagggggcagtgggtatcaggttccagttccacagcaccagcttctgcttcatttgttcccatctaaccgctggccagtctcaagttaaggaacggaatgaggactacaaggaaatcacccagaaactttgttttccgatgggccgtaatgtattttctcacgactatgtgttttggtgcggtgacttcaactatcgcattgaccttacatatgaagaggttttctacttcgtgaagcggcaggactggaaaaagcttctagagtttgatcagctccagctccagaagtctagcggcaaaatatttaaagacttccatgagggggctattaactttgggccaacctacaaatatgacgttggatccgcagcctatgacaccagcgataaatgtcgcacaccagcatggaccgaccgagtcctttggtggcggaaaaaacatccttttgataaaactgcgggggaactgaaccttctcgacagcgacctcgatgttgacaccaaagtgcgccatacgtggagcccgggcgcgctgcagtactacggccgcgcagaactgcaggcctcagatcaccgcccagtcttggctatcgtcgaagttgaggtgcaagaagtcgatgtgggtgcgcgagaaagagtgtttcaagaagtatcctccttccaggggccactcgacgcaaccgtcgtcgtcaacttacagagtcccactctggaagagaagaatgagttccctgaggatttaagaaccgaactcatgcagacactgggatcttacgggacaatcgttctggtaagaataaaccaggggcaaatgcttgttacattcgctgattcccatagcgcattatctgttctggacgtggatgggatgaaagtgaaagggcgcgctgtgaagattaggccgaaaacgaaggattggctgaaggggttaagagaggaaatcatacgcaagcgtgactccatggctccagtgagccccactgcaaactcttgtctcctggaggaaaatttcgatttcacttcccttgattatgaatcagagggcgacatcctggaagatgatgaggactatcttgtcgacgagttcaaccagcctggggtgtctgactcagagctggggggtgacgatttatccgatgtaccaggccccacggctttggctccgcccagcaagtctccggcgttgacaaagaagaagcagcatcctacgtataaggccggcctcatggtcaaaaagtccgcgtctgatgcctctatctcctcgggaacacatgggcaatactctattctgcagaccgctcgccttctgccgggagctccccagcaaccgcctaaggcacgcacagggataagtaaaccgtataatgtcaagcaaattaaaaccacaaatgctcaggaagctgaggccgccatccgctgtcttctcgaggccaggggtggggctagcgaagaggccctcagcgctgtcgcccctcgggatctggaagcttcatctgaaccagagcccacacctggcgccgcaaaacctgagacaccacaggcaccacctctgttgcctaggcgacctccaccacgcgtgcctgccataaaaaagccaacactgagacgaacaggaaaaccactaagtcctgaggaacagtttgagcagcaaactgtgcacttcaccattgggcctcccgaaacaagtgttgaggcacctcccgtcgttacagcacctagggttccccccgtgcccaagccaaggacctttcagcctggtaaggcggctgaacggcctagccacaggaagccagctagcgacgaagcaccacccggagcaggggccagcgtcccgccaccgctggaggctcctcccctagtgcccaaagtccctcccagacggaaaaaaagtgctccggctgcgttccatctgcaggtgttacagtccaacagccagctcctccagggtctgacttacaatagctccgattctccatccggccatcctccagcggccggcactgtctttcctcagggggactttctgtccaccagttctgccacaagcccagattcagacgggacaaaagctatgaagcccgaagcggcccctctcttaggcgattaccaggaccccttttggaacctcctacaccaccccaagctgcttaacaacacctggctgtccaagagtagtgacccgctggactcgggcacccgatctcccaagcgcgaccccattgatccagttagcgccggagcctcagcagcaaaggctgaattgccacctgatcacgagcacaagacactaggtcactgggtcacaatttctgaccaggaaaaacgcaccgccttgcaggtcttcgatcccctcgcgaaaacctag

SEQ ID NO: 207631 - DNA, 279 bp, synthetic construct
  misc_feature 1..279: note = Description of Artificial Sequence: Synthetic coding sequence
  source 1..279: mol_type = other DNA
atgttcctgtacgccagcggccccgccccccccgccggcacctgcagatgggggggccaggggggtactagtttgtcgttcttagttttagtgacagggtgcacctcggtgggaagaatccctgacgcggaaatctacaagatcactgcgacagatttctaccctcttcaggaggaagctaaagaagaggagaggctgatcgccctgaagaaaatcctcagcagcggggtgttctacttctcttggcccaacgacggaagtaggttcgatctaacatag

SEQ ID NO: 207632 - DNA, 1551 bp, synthetic construct
  misc_feature 1..1551: note = Description of Artificial Sequence: Synthetic coding sequence
  source 1..1551: mol_type = other DNA
atgttcctgtacgccagcggccccgccccccccgccggcacctgcaggtggggtggtcaggggggcacctctctgtcctttctcgtgctggtgacgggttgtacctccgtgggcaggatccccgacgcggagatctataaaattacagccacagatttctaccccctccaggaggaggcaaaagaggaggaaaggcttatcgcccttaagaagatcctctcttctggagtcttctactttagttggcctaacgatgggagccgatttgacctgaccgtcaggacacagaagcaaggggacgactctagtgagtggggcaatagcttcttctggaaccaactgctgcatgtgcccctgaggcagcatcaggtctcctgctgcgattggctcctcaaaataatctgtggtgtggtgacgattagaacagtgtatgcgtctcataaacaagccaaggcatgcctagtgagcagagtgtcctgtgagcgcacaggtactaggttccatactcgtggcgtcaacgacgatgggcacgtgagcaactttgtggagacagaacagatgatctatatggatgacggagtttcatcatttgtacagattcggggaagcgttccactcttttgggagcagccgggcctgcaggtgggctctcaccacttgaggctccatagggggttagaggccaacgcccctgccttcgatcgccatatggttctgctgaaggagcaatatgggcagcaggtcgttgtgaatctgctaggctcaagaggaggagaagaagtgctcaacagagcattcaaatttgctaaaggaggaaaactggagaagctcgagacactcctgaggccacagctgaagctgcattgggaagactttgatgtcttcacaaaaggcgagaatgtgtcgccgcgctttcagaagggcaccttaaggatgaattgccttgattgcttggaccggaccaacaccgtacagtctttcatcgccctcgaagtcctacacctccagctcaagacgctgggcctctcatctaaacccatcgtggacaggttcgtggagtcttttaaggctatgtggtccctgaatggccacagcctatccaaggttttcactggctctagagccctagaggggaaggccaaggtcgggaagctgaaagatggcgcccgctcgatgtcacgaacgattcagtccaacttctttgacggcgtgaagcaagaggccatcaaactgctcctcgttggcgacgtgtatggtgaagaggtggctgataaaggcggtatgttgttggactcgactgcccttctcgttacccccaggattctgaaagcaatgacagagcgccaatcagaattcaccaacttcaaacgaatacggatcgcgatggggacgtggaatgttaatggggggaaacagttcagatcaaatgtgctccgcacagctgaactgacagactggctgcttgattcacctcaattaagcggagctacagactcccagggcgagggctccgactttgggggagacaaaattcaacttcatctgacatag

SEQ ID NO: 207633 - DNA, 438 bp, synthetic construct
  misc_feature 1..438: note = Description of Artificial Sequence: Synthetic coding sequence
  source 1..438: mol_type = other DNA
atgaacggccgggtggactacctggtgaccgaggaggagatcaaccttacccgcgggccttcgggcctcggttttaatatagtggggggaaccgatcagcagtatgtctctaatgatagtggaatctacgtcagcaggatcaaagaaaatggggccgccgcattagatgggaggcttcaggagggcgacaagatcctttcggttaacggtcaggacctcaaaaatctcctccatcaagacgccgtggatctgtttcgaaacgcaggttatgccgtatcgctgagggtgcaacaccggcttcaggtgcagaatgggcctatcggccatcgcggcgagggcgacccctccggtattccaatcttcatggttttggtgccagtctttgctctgaccatggtggcagcttgggccttcatgcggtaccgtcagcagttgtag

SEQ ID NO: 207634 - DNA, 957 bp, synthetic construct
  misc_feature 1..957: note = Description of Artificial Sequence: Synthetic coding sequence
  source 1..957: mol_type = other DNA
atggccggccggagcctgaccagcaaggccgagcccaccgccggcgccgtagatcgcgcggagaaagccggcggccaggatacttcatcacagaagatcgaggacctgatggagatggtccaaaagctccagaaggtaggaagtctggagcccagggtggaggtactgattaaccggatcaacgaggtgcagcaggccaaaaaaaaggccaacaaagatctgggcgaggcaagaaccatctgcgaggctctgcaaaaggagctggactcgctgcacggcgaaaaagtgcaccttaaggagattttgtcaaagaagcaggagactctgcgcatcctgcggctgcattgtcaagagaaagagtctgaggcccacagaaaacacacaatgttgcaggaatgcaaggagaggatctccgcattaaaccttcagatcgaggaggaaaaaaacaagcagcggcagctccggctggcatttgaagagcagctggaagacctgatgggccagcacaaagacctgtgggactttcacatgcccgaacgcctggccaaagagatatgcgccctggactcatctaaagagcagctcctcaaggaagagaaactggtgaaggccacactcgaagatgttaaacaccagctctgctcattgtgcggtgcggaagggcccagcaccctcgacgaaggcctgtttctcaggagccaggaggctgccgccacggtccagttgttccaagaagaacataggaaggccgaggagctgctggcggcagcagcacaacggcaccagcagctgcagcagaaatgtcagcaacaacagcagaaacggcagcgcttaaaagaagagctggaaaagcacggcatgcaggttcccgcgcaggctcaatccactcaggaggaagaggcaggccctggcgacgtggccccgaggccgggccgcccggttacctggtggagctag

SEQ ID NO: 207635 - DNA, 1056 bp, synthetic construct
  misc_feature 1..1056: note = Description of Artificial Sequence: Synthetic coding sequence
  source 1..1056: mol_type = other DNA
atggccggccggagcctgaccagcaaggccgagcccaccgccggcgcagtggatagagcagagaaggccggaggacaggacacgagcagccaaaagatcgaggacctgatggagatggttcagaagctgcagaaggtgggcagtttggaacctcgcgtcgaggtgcttatcaacaggattaacgaggttcagcaggcaaaaaaaaaagccaacaaggacctgggggaggctcggactatctgtgaagcactccaaaaggaactcgatagtctccacggagagaaagtgcacttgaaagagatcttatcaaagaaacaggagaccctgagaatcctgagacttcattgccaggaaaaagagtcggaagctcaccggaaacatactatgctccaagagtgcaaagaacggatttcggcactcaacctccaaatagaagaagagaaaaataaacagaggcagctccgcctcgctttcgaggagcaactcgaggacctgatgggacaacataaggatctttgggattttcacatgccagagagactagctaaggaaatctgcgccctggatagtagcaaggagcagttactgaaggaggaaaaacttgtgaaagcgaccttagaggatgtgaaacatcagttatgcagcctgtgcggcgccgaaggcccgagcactctagacgaaggactgtttctgcgaagccaggaagccgcggccacagtacagctgtttcaggaggaacatcgaaaagctgaggagctgcttgcggctgcagcgcagcgtcatcagcaactgcagcagaaatgtcagcagcagcaacagaagcgacagcgtttaaaggaggagctggaaaaacacggcatgcaggttcccgctcaggcccagagtactcaggaggaggaagcaggtcccggggacgtcgcatccccaaagcctttgaagggagaacggcccggtgctgcccatcaggcaggcccggacgtgctgattgggcaggaggacacattgcatccagacttatccccgagaggctttcaggaaatcaaggaactgttctag

SEQ ID NO: 207636 - DNA, 849 bp, synthetic construct
  misc_feature 1..849: note = Description of Artificial Sequence: Synthetic coding sequence
  source 1..849: mol_type = other DNA
atggagatggtgcagaagctgcagaaggtgggcagcctggagcccagggttgaggtgctcatcaataggatcaatgaggttcagcaagctaaaaagaaggcgaataaagacctcggggaggccaggacaatctgtgaagcacttcagaaagaacttgactccctccacggagaaaaagttcaccttaaggaaatcctgtcaaaaaaacaggagaccctgcgcatcttgcgattgcactgccaggaaaaagagtccgaggcacatagaaaacatactatgttgcaagaatgtaaggaaaggatctcagcactgaacctgcagattgaggaggaaaagaacaagcagaggcagctgcgcttagcgtttgaagaacagttagaagatctcatgggccagcacaaggacctgtgggatttccacatgccagagcggctggctaaggaaatttgtgccctagattcctccaaagagcagcttctgaaagaagagaagctggtcaaggctacactggaagatgtcaagcaccaactctgtagcctctgcggcgctgaaggcccatccaccctcgacgaggggttgttcctccggagccaggaggccgcagccactgtccagctgtttcaggaagagcacaggaaggcggaggagctgcttgccgccgccgcccagagacaccagcagctgcagcagaagtgccaacagcaacagcagaaacgccagcgcctgaaagaggagctggaaaagcatgggatgcaggtgccagctcaggcacagtccacacaagaagaggaggctggcccaggggacgtggctccacgcccagggaggcctgtgacgtggtggagctag

SEQ ID NO: 207637 - DNA, 849 bp, synthetic construct
  misc_feature 1..849: note = Description of Artificial Sequence: Synthetic coding sequence
  source 1..849: mol_type = other DNA
atggagatggtgcagaagctgcagaaggtgggcagcctggagcccagagtagaagtgctgatcaaccgaataaatgaagtgcaacaagcaaaaaagaaggccaataaagatcttggtgaagccagaaccatctgcgaggcgttgcagaaagagctcgattctctccacggcgaaaaagtccacctgaaagaaattcttagcaaaaaacaggagactctgagaattctgcgactgcactgtcaagagaaggagagcgaggctcaccgaaaacatacgatgcttcaggagtgcaaggaaagaatatccgcgttgaaccttcagattgaagaggagaaaaacaaacagaggcagctgcgcttggcatttgaagagcagctggaggatctgatggggcaacacaaggacttgtgggacttccacatgcctgagcggctagctaaagagatctgcgccctggattcttctaaggaacagctgctaaaggaagaaaaattagtcaaggctaccctggaagacgttaaacaccagctctgtagcctatgtggcgccgaagggccgtcaacattggatgagggactctttctgaggtctcaggaagcagctgcgacagtacagctgtttcaggaggaacatagaaaagctgaagagttattagcagccgctgcccagcggcatcagcagctgcagcaaaaatgccagcagcagcagcagaaacggcaacgccttaaagaggagctcgaaaagcatggaatgcaggtgcccgcccaagcacagagcacccaggaggaagaggcaggaccaggcgacgttgccccaagaccagggcggccagtgacatggtggtcctag

SEQ ID NO: 207638 - DNA, 657 bp, synthetic construct
  misc_feature 1..657: note = Description of Artificial Sequence: Synthetic coding sequence
  source 1..657: mol_type = other DNA
atggagcggcagggcgtggacgtgccccacgtgaagtgcaaggaccaggagccacagcccctgggtgagtccaaagaacaccctcggtgggaggagaattgtgaggaggaggcaggaggtggacctgcctccgccagttgccagcttacagtgctggagggcaagagtggactgtactttagcagtttggattcatcaatcgacattcttcagaagcgtgcacaagaattaatcgagaatattaacaagtctcggcaaaaggaccatgctctgatgaccaacttccgaaatagcctgaagacgaaggtcagtgatctgacggaaaagttggaagaaaggatttaccagatttacaacgatcataacaagataatacaagagaaactgcaggagttcactcagaagatggccaagatctcgcacctcgaaacagagctgaagcaggtatgtcattcagtcgagaccgtctacaaagacctgtgtttgcagcctgaacaatctctgcgcctaagatgggggcccgatcacagccgcgggaagagccctccaaggcctggcaattcacaaccccccgacgtgttcgtgagctcggtggccgagaccacttcacaggccaccgccagcgaagtgcagacaaatagggatggggagtgctag

SEQ ID NO: 207639 - DNA, 2931 bp, synthetic construct
  misc_feature 1..2931: note = Description of Artificial Sequence: Synthetic coding sequence
  source 1..2931: mol_type = other DNA
atggagaagcagaagcccttcgccctgttcgtgcccccccggagcagctcgagccaggtgagtgccgtcaagcctcagacactcggtggggactctactttctttaaaagcttcaacaaatgtacagaggacgacttcgagttccccttcgccaagaccaacctttctaagaacggagaaaatatcgatagtgatcctgctctgcagaaggttaatttcctgccagtgctcgagcaggtcggaaactccgactgccactaccaagagggcctgaaggactccgatctggaaaattcagagggactcagcagagtctactccaaactgtataaagaggcagaaaagatcaagaagtggaaagtgtctaccgaggcagaactgcgccaaaaggagtccaaactccaggaaaacagaaagatcatagaggcccagcggaaggccatccaggagctacagttcggtaacgagaaggtttctctcaaactcgaggaagggattcaggagaataaggatctgatcaaggagaacaacgctaccaggcatctatgtaacctattgaaagaaacctgtgcccgcagtgccgaaaagaccaaaaagtatgagtatgagagggaggaaacacggcaggtctatatggacctgaacaacaacattgaaaaaatgatcaccgcgttcgaggagttaagggtgcaagccgagaacagtaggttagaaatgcacttcaaactaaaggaagactatgaaaagatccagcacctcgagcaggagtataagaaagaaattaatgataaggaaaaacaggtttcacttttgcttatccagatcacggagaaggagaacaaaatgaaagatctcacctttctgctggaagagagtcgcgacaaagtcaaccagcttgaggaaaagactaaacttcagtcagaaaatcttaaacagtccattgaaaagcagcatcatttaacaaaagaactggaagacattaaggtgtcactgcagagatccgtgtcaacacagaaggcgctagaggaggatctacagatcgctacaaaaactatctgtcagctaaccgaagaaaaggagacgcagatggaggaatctaataaagcccgagccgctcactcttttgttgtcaccgagtttgagacaactgtgtgttctctagaagagctgttgcgaactgagcaacagaggctagagaaaaatgaggatcaattgaagatcttgacaatggaacttcagaaaaaaagttcagagttagaggagatgactaagttgacaaacaataaggaagttgaactagaggagctaaagaaggttttgggtgaaaaagaaacgctgctatatgagaacaagcaatttgagaaaatagctgaagaattgaaagggaccgagcaggagctgatagggttattgcaggcgcgggagaaagaagtccatgacctggagattcagttgaccgccattacgacatctgaacaatactattcaaaagaggtgaaggatctgaaaacggagctggaaaacgagaaactgaagaatacagaactgacctctcattgtaacaagctctccttagagaataaagagctgactcaggaaacatccgacatgaccctggagctgaagaatcagcaggaagacataaacaataacaagaagcaggaggaacgaatgttaaaacagatagagaatttgcaagagaccgagacgcagctcaggaatgagcttgaatacgtgagggaggaactcaaacagaaacgagacgaggtgaagtgcaaacttgataagagcgaggagaactgtaataacctgcggaaacaagtagaaaataagaataagtacattgaggagctccagcaggaaaataaggcactgaagaagaaaggcactgctgaaagcaagcagctgaacgtctacgagatcaaagtgaacaaactggagttggaactagagtcagcgaaacagaagttcggggaaataaccgacacttaccaaaaggaaattgaggacaagaagatcagtgaagagaacctgctggaggaagtggaaaaggctaaggtgatcgcagacgaggccgtaaagctgcagaaagaaatcgataagagatgccagcacaagattgccgaaatggtggccctgatggaaaagcataagcatcaatatgacaaaattatcgaggagcgcgacagtgagctggggctgtataagagtaaggaacaggagcagtcatccctccgggcaagtttggaaattgaactctccaaccttaaagcagagctcctttcggtgaagaaacagcttgagattgaaagggaagaaaaagagaagctgaaaagagaagctaaggaaaatacagctacactgaaggaaaaaaaagataagaagacccagaccttcctgctggaaactcccgagatctactggaaactggattctaaagcagttccttcacagaccgttagccggaacttcacctccgtggaccatggaatctccaaagacaagagggattacttgtggacctcggccaaaaatactctgagcacaccactgccaaaagcctatactgtcaagacccccactaagcctaagttgcagcagcgcgaaaatcttaacatccctattgaagagagcaagaagaagcgcaagatggcctttgaattcgacatcaatagtgacagttctgagacaaccgatctgctgtccatggtgtccgaagaagaaaccctgaagactctgtatagaaacaacaacccacccgcatctcatttatgcgtgaagactcccaaaaaggcgccaagtagccttacgactcctggctctacattgaagttcggcgccatccgcaaaatgagagaagacaggtgggccgtgattgctaagatggacagaaagaaaaagttgaaagaggccgaaaagctctttgtctag

SEQ ID NO: 207640 - DNA, 2931 bp, synthetic construct
  misc_feature 1..2931: note = Description of Artificial Sequence: Synthetic coding sequence
  source 1..2931: mol_type = other DNA
atggagaagcagaagcccttcgccctgttcgtgcccccccggagctcgagcagccaagtatcagccgtgaaaccacagactcttgggggggattccactttcttcaaatcttttaacaaatgtaccgaagacgatttcgagtttcccttcgcgaagacaaacctgtcaaaaaacggtgaaaatattgactctgaccctgctctgcagaaggtaaacttcctgccggtgctggagcaggttgggaatagcgactgtcattaccaggaggggctcaaagatagcgatctggaaaattctgagggactgtcccgggtgtattcgaaactctacaaagaagctgagaagattaagaaatggaaggtgtctacagaagccgaactacgccagaaggaaagcaagctgcaggaaaataggaagataatcgaggcccagcggaaggccatccaggagctgcagtttgggaacgagaaggtcagcctcaaactggaggagggcattcaggagaataaagacctaataaaagaaaataacgccacaagacatctgtgcaacttactcaaagagacctgtgcaaggtctgcagaaaagactaagaaatacgaatacgaacgggaggagacccggcaggtctatatggatttgaataacaatatcgagaagatgatcaccgcctttgaagagctgcgcgtgcaggctgaaaattctaggctggaaatgcatttcaaactcaaagaggattatgagaaaatacaacatctagaacaggagtacaaaaaggaaattaacgataaggagaagcaagtgtcgttgctcctgatccaaatcactgagaaagagaacaaaatgaaggacctcacctttcttctggaagaatctcgagacaaggtaaatcagctcgaggagaagacaaaattacagtcagagaatctgaagcagtctattgagaagcagcaccatctcacaaaggagctggaagacatcaaggtgtccttgcagcggtccgtcagcactcaaaaagccctggaggaggacctgcagatcgcaacaaaaaccatctgccaactgactgaagagaaagagacacagatggaggagagcaataaagctagagcagcccattctttcgttgtaaccgaatttgagaccactgtgtgcagtttggaggaattgttgcgcactgagcagcagaggctcgagaagaacgaggaccagctcaaaattttgactatggagctacagaaaaagtcctctgaactagaggagatgacgaaattaacaaacaataaagaagttgaacttgaagagctcaaaaaagtcctcggagaaaaagagaccctgctatacgagaacaaacagtttgagaagattgcagaagaactcaaaggaacagagcaagaactgatcggccttttgcaagcgagggagaaggaagttcacgatctagaaattcagttaactgccataaccacgtcagagcagtactactctaaagaggttaaagatttgaaaactgagctggagaatgagaagctgaaaaacaccgagctaaccagtcattgcaacaagctttccctggagaacaaagagctgacccaggagacctctgatatgaccctggagctgaaaaatcagcaagaggatatcaacaacaacaagaagcaggaggagagaatgttgaaacaaattgagaatcttcaggagactgaaacacagctccgtaatgaattggaatatgttagagaggaacttaaacagaagcgggacgaggtgaagtgtaagctagacaaaagtgaggagaactgtaacaacctgagaaaacaagtagagaataagaacaagtacatagaagaactacaacaggagaacaaagccctcaagaaaaaggggaccgctgagtcaaagcagctgaatgtgtacgagatcaaggtcaacaagctcgaactcgaacttgagagcgctaagcagaaatttggagagattacggatacctatcagaaggaaattgaggataagaagattagtgaggagaatctgctggaagaagtggagaaagctaaagtgattgccgacgaggccgtgaaactgcaaaaagagatcgataaacgatgtcagcacaaaatcgccgagatggtggccctaatggagaaacataaacatcagtatgacaagatcatcgaggagcgggactcagaactgggactgtacaagtccaaagagcaggaacagagctctttgcgagctagcctcgaaatcgaattgagcaacctaaaagccgagttactcagcgtgaaaaaacagctcgagatcgagagagaggagaaagagaagctgaagagagaggcaaaggagaacaccgccaccctaaaggagaagaaggataaaaagacacaaacttttctcctcgaaacccccgaaatttattggaagctggatagtaaggccgtgcctagccagacagttagtcgcaactttacgtcagtggatcacggaatttcgaaggataagcgcgactatttgtggacaagtgccaaaaacacactctcaactccccttccaaaagcgtatactgtcaagacacccaccaagcctaaactgcagcagcgcgaaaacttaaacatacctatcgaagaaagtaagaagaagcggaagatggcctttgagtttgacatcaactccgacagttctgaaaccaccgacctgctctccatggtgtctgaggaggagactctgaagactctgtacaggaacaataaccccccagcatcacatctgtgtgtaaagacccccaagaaagctcccagctccctgactaccccgggatccacactgaaattcggcgctatccggaagatgcgggaagaccgctgggcagtgatcgctaaaatggatcggaaaaagaaacttaaggaagctgaaaaactctttgtttag

SEQ ID NO: 207641 - DNA, 2379 bp, synthetic construct
  misc_feature 1..2379: note = Description of Artificial Sequence: Synthetic coding sequence
  source 1..2379: mol_type = other DNA
atggagaagcagaagcccttcgccctgttcgtgcccccccggagctcttcatcccaggtaagtgcagtgaaaccccagactctgggcggagacagcacattctttaaatcttttaataagtgtacagaggatgatttcgaatttccattcgccaagaccaatttatccaaaaacggagagaacatcgacagcgaccccgccctgcaaaaggtcaatttcctccctgtgctcgagcaagtggggaacagcgattgccattatcaagagggcctcaaggactctgatcttgagaactccgaaggcttaagcagagtgtattcgaagctgtataaggaagcggagaaaatcaaaaagtggaaagtaagtacggaggctgaactgaggcaaaaagagagcaagctgcaggagaaccgcaagataatcgaagctcaaagaaaggcaatccaggagctccagtttggcaatgagaaggttagcctcaagctggaggaagggatccaggaaaacaaggatttaatcaaggaaaacaatgcaacaaggcacctgtgcaacctcttgaaagaaacatgtgccaggtctgcggaaaagaccaagaagtatgaatatgagcgggaggagaccagacaggtttatatggatcttaataataatatcgaaaaaatgatcacagcattcgaggaactgcgagtgcaggccgagaatagccggctcgaaatgcactttaaattgaaggaggattacgaaaagatacagcacctcgaacaggaatataagaaagagattaacgacaaggagaaacaagtaagcctgttactgatccaaatcacagagaaggagaataaaatgaaggacctgactttcctactcgaggaaagccgggacaaggtaaaccaacttgaagaaaagaccaaactgcagagcgaaaatctcaagcagagcatcgagaaacagcaccatttaaccaaggagctcgaagatatcaaagtgagtctgcaacggtcggtcagcacacagaaagcactcgaggaggatctccagatcgccacaaaaaccatatgtcaactaactgaagaaaaggaaacgcaaatggaagaaagcaacaaggctcgagctgcccactcttttgttgttaccgaatttgaaaccacagtgtgctccttggaagagctgctgagaaccgaacagcagagactcgaaaaaaacgaagatcagctgaaaatactgactatggagcttcagaagaagagttctgagctggaggaaatgacaaagctgactaacaataaggaagtggagttagaggagctcaagaaggtcctgggcgagaaagagaccctcctgtatgagaataagcagttcgaaaaaattgccgaggagctgaaaggaaccgaacaggaattgatcggattactccaagcgagggagaaggaggtacacgacctggaaattcaactcacagctatcacaaccagtgagcagtattattccaaagaagtgaaagacctgaagactgagttagaaaacgagaagctcaaaaacaccgagttaacttcccattgcaataagttatctctcgagaacaaagaattgactcaggaaactagcgacatgacactggagctcaagaatcagcaggaggatattaacaataataaaaagcaggaggagcgtatgctcaagcagattgaaaacctacaggagaccgaaacccagctgaggaacgaattagagtacgtgagagaggagcttaagcagaagagggatgaagtcaaatgcaagctcgataagagtgaagaaaattgtaataacctgagaaaacaagtggagaacaaaaataaatatattgaggaactgcagcaggaaaataaagcactgaagaaaaaggggacagccgaatcaaaacagctcaatgtgtacgagatcaaagtgaacaagttggagttggaactggagtccgcaaaacaaaaatttggcgagattacagacacttaccagaaagagattgaagataaaaagatttctgaagagaacctcctggaggaagttgagaaagccaaagttatagccgacgaagcagttaagctccagaaagagatcgacaagaggtgccagcataaaatcgccgagatggtcgcccttatggaaaagcacaagcaccagtacgacaaaattatcgaagagcgcgacagtgagctgggcctttataagtctaaagagcaggagcaaagcagcctcagagcctctttggaaattgaactgtcgaatcttaaggctgagctgctgagcgttaagaagcaattggaaattgaacgggaggagaaagaaaagcttaaacgggaggcaaaggaaaatactgcaacactaaaggaaaagaaatag

SEQ ID NO: 207642 - DNA, 2388 bp, synthetic construct
  misc_feature 1..2388: note = Description of Artificial Sequence: Synthetic coding sequence
  source 1..2388: mol_type = other DNA
atggagaagcagaagcccttcgccctgttcgtgcccccccggagctctagctcccaggtctctgcagtaaaacctcagaccttaggtggcgattctaccttctttaagagcttcaacaaatgcaccgaggatgactttgagttccctttcgccaaaaccaacctctcgaaaaacggcgaaaatatcgactctgaccctgccctccaaaaagtgaactttcttcccgtgctggaacaggtgggtaactccgattgccattaccaggagggcctcaaagatagcgatctggaaaattctgagggactgagcagggtatactctaagttgtataaagaggccgagaagatcaaaaagtggaaggtctctacagaagccgaactgaggcagaaggaatctaagttgcaggagaatcgcaagatcatcgaagctcagcggaaagccatccaagaactgcaatttggcaacgagaaggttagtttgaaactcgaagaaggtatccaggaaaacaaggacttgataaaggagaataatgctacacgccacttgtgcaatctgctcaaggagacttgtgcccgaagcgcagagaagaccaaaaagtatgagtatgaacgagaagagacaagacaagtttatatggatcttaacaataatattgagaagatgatcactgcctttgaagagctaagggtgcaggcagagaattcacgcctggaaatgcattttaagcttaaagaggactacgagaaaatccagcacctagagcaagagtataagaaagagatcaacgataaggagaagcaggtctctctgctgcttatccaaatcacggagaaagaaaacaaaatgaaggatttaactttcctgttagaagaaagcagagacaaagttaatcagctggaagaaaagacgaaactgcagtcagagaatctaaaacaatcgatcgaaaaacaacaccatctaacaaaggaactggaggatattaaagtgtcccttcagagatctgtgagtacccaaaaagcactagaggaggacctgcagattgctactaagactatatgtcagctgaccgaagaaaaagaaacccagatggaagagtctaataaggcaagagccgctcactctttcgtcgtgaccgagtttgaaaccacagtgtgttccctggaagagctgctgcgaactgaacaacaaagactcgagaagaacgaagaccaactgaagatcttgacgatggagcttcagaagaagagttctgaacttgaagagatgactaaactcacaaataacaaggaagttgaacttgaggagctcaaaaaagtgttgggggagaaagagactctcctgtacgaaaacaagcagttcgagaagatagccgaggagctcaaaggtactgaacaagaactgatcggactgcttcaagccagagagaaggaggtgcacgacttggagatccagctgactgcaattaccacctcagagcaatattattccaaggaagtgaaagacctgaagactgagctggaaaatgagaaactcaagaataccgagctcacatcccattgcaacaagctgagcttggaaaacaaggagctcactcaagagacctctgatatgaccctcgaattgaagaatcagcaggaggacatcaacaacaataaaaagcaggaagaacgcatgctgaaacaaatcgagaatcttcaggagactgaaacccagcttaggaatgaattagagtatgtgagagaggaactgaagcagaagcgcgatgaagtgaagtgcaagctcgataaatccgaggagaactgcaataacctgcggaagcaggttgaaaataaaaataagtatatcgaggagctgcagcaggaaaacaaagccctcaagaagaaaggtaccgccgagagcaaacagctgaatgtgtatgagattaaggtgaataagctggagctggagcttgagtcggccaaacagaagttcggtgagatcacagatacctatcagaaggaaatcgaggataagaaaatttctgaagagaatctcctggaggaggtcgaaaaggcgaaagttattgctgacgaagccgtgaagctgcagaaggaaatcgataagcggtgtcagcacaaaatcgctgagatggttgccctgatggaaaagcacaaacatcagtatgataagatcatcgaggagagagactctgaactcggactgtacaaaagcaaggagcaggagcaatccagtctccgcgcctccctggagatcgagctgagtaacttgaaggccgaactattgtcagttaagaaacagctggagatagaaagggaagagaaagagaagctgaagcgggaagccaaggagaacactgccaccctcaaagagaaaaaggataagaaatag

SEQ ID NO: 207643 - DNA, 4593 bp, synthetic construct
  misc_feature 1..4593: note = Description of Artificial Sequence: Synthetic coding sequence
  source 1..4593: mol_type = other DNA
atgcccatccggcccgacctgcagcagctggagaagtgcatcgacgatgctctgcgcaaaaacgacttcaagcctctgaaaacattactgcaaattgacatatgtgaagacgtcaagattaagtgttccaaacagttcttccacaaggtggataatctgatctgccgtgaactgaataaggaggatatccacaatgttagcgcaattctagtgagcgtgggacgctgcgggaaaaatatttcagtgcttggacaggccggtcttctaacgatgatcaagcagggacttatacagaagatggtcgcttggtttgagaaatcgaaagacataatacagtcccaggggaactcaaaagatgaggctgttctgaacatgattgaggacctggtcgatctactactagtgattcacgacgtgtcagatgagggaaaaaaacaggttgtggagtccttcgtaccccgtatatgctccctggtgatcgatagccgggtgaacatctgtattcaacaggagatcattaagaaaatgaacgcgatgctcgacaagatgcctcaagatgccaggaaaatcctgtctaatcaggaaatgttaatcttgatgtctagtatgggagaacgtattctggacgctggggattatgacctgcaggtaggcatcgtggaagcactgtgccgaatgactaccgagaagcagcgtcaggaattagcacatcagtggtttagtatggattttatcgcaaaagccttcaaaaggatcaaggacagcgagttcgagaccgattgcaggattttcctcaatttggtcaatgggatgctcggggataagaggcgggttttcactttcccctgcctctccgcattcctggataagtatgaactgcagatcccgtctgatgagaagctcgaggaattttggattgacttcaacctaggatcccagaccctgagtttctatatcgcaggtgacaatgacgatcaccagtgggaggctgttaccgtgcccgaggagaaagtgcagatctactctatcgaggtgcgtgaatccaagaagctcctgacaattattctaaaaaacaccgtgaagattagcaagcgcgagggcaaggaactcctgctttacttcgatgctagtctcgaaataacgaacgtcacccagaagatttttggcgctactaagcaccgcgagtccattcgcaagcaaggaatcagcgttgctaagaccagcctccatattctgttcgatgcttctggatctcagattctggtccccgagagtcaaattagccccgttggcgaggagttggtgtcgctcaaagagaagagtaagtctcctaaagaatttgcgaagccctcaaaatatattaaaaactcggataaggggaatcgcaacaattcccagcttgaaaagaccacgccatcgaaacgcaagatgagcgaagcttccatgatcgtctccggggccgatagatatacaatgcgctctccagtgctcttctcaaacacaagcattcctcctcggcgaaggaggatcaagccgcccttacagatgaccagttctgctgaaaaaccctcggtgtcacaaacaagtgagaatcgggttgacaacgctgcgtcattaaagtcccggagcagtgaaggcaggcataggcgagataatatcgataaacacatcaaaacagcaaaatgtgtcgaaaatacagaaaataaaaacgtggaattccccaaccagaatttcagcgagctccaggacgtaatccccgatagccaagccgctgagaagagagatcacaccatcctcccgggcgttctggataacatatgtggaaacaaaatccatagcaaatgggcttgctggaccccagtcaccaacatcgagttgtgcaataaccaaagagcgtcaacttcctcaggggacacgttaaaccaggacatcgtaattaataagaagcttaccaagcaaaaaagcagctcttccatttcagaccacaactcggaaggtacaggtaaggtcaaatacaagaaagaacagaccgatcacattaagatcgataaggcagaagtcgaagtgtgcaagaagcataaccaacagcaaaaccacccaaaatatagcggccaaaaaaacaccgaaaacgctaagcagtccgactggcccgtggaatctgagaccactttcaagtcagttctgctgaacaaaacaattgaagaaagccttatttatcggaagaaatatatactatctaaagatgtaaatacagccacatgtgacaagaacccttccgcatccaaaaacgtgcagagccaccgcaaggcagagaaggaactgacatctgagttgaatagttgggacagtaaacagaagaaaatgcgagaaaagtctaaaggcaaggagttcaccaacgtcgcggagtctttaatatctcaaatcaacaaaaggtataaaaccaaagacgacatcaaatccacccggaaacttaaagaatctctgatcaactcaggtttttctaacaagcccgttgttcagctcagtaaggaaaaggtccaaaaaaaatcctatagaaagctgaaaaccacgttcgtgaatgttacgtcagaatgtccagtgaacgatgtctataactttaacctcaacggggccgacgaccccatcattaagcttgggatacaagagttccaggccacggcaaaggaagcatgcgctgatcgttcaatcaggctcgtgggaccaaggaaccacgacgagttgaaaagctccgtgaagactaaggacaagaaaattatcaccaaccatcaaaaaaaaaatctgttctccgacacggagactgagtaccgttgcgatgatagcaagacagatatttcttggctgagggagcccaagagcaagcctcaactcatagactactctaggaataagaacgtgaaaaaccacaaaagtggtaaatctcgttcatcactggaaaagggccagccaagttcaaagatgacaccctccaagaacattacaaagaagatggacaagaccatcccggagggcaggatccggctgcctagaaaggcaacaaagacgaagaaaaactacaaagacctcagcaacagtgagagcgagtgcgaacaagagttctcacacagcttcaaagaaaacatcccggtaaaggaagaaaatatacactcaaggatgaaaaccgtgaaacttcctaaaaagcaacagaaggtcttctgcgccgaaactgaaaaagagctgtcaaagcaatggaaaaatagctccctattaaaggacgctatccgggataattgcctggatttgagtccacgatcactctcaggctcacccagttcgattgaagttacaagatgtatagaaaaaatcacagagaaggattttacacaagactacgactgcatcactaaatctatatcaccgtatcccaagacaagcagcctggagtctctgaacagcaactccggggttggaggaaccatcaagtctcccaaaaacaatgaaaagaatttcctgtgtgcaagcgaatcatgcagccctatcccaagacccctcttccttcctaggcacacacccaccaagtccaatactattgtcaaccgaaagaaaatcagcagccttgtgctcacccaggaaactcagaacagcaacagctacagtgatgtttctagctactctagtgaggagcgattcatggaaatcgagagcccacatataaatgagaactatatccagagcaaacgtgaggaaagccatttggcatcctctctgtctaagtcgtccgaaggtcgtgagaaaacttggtttgatatgccctgtgatgccactcacgtttccggccccacacagcacctgtccagaaagagaatttacatagaggataatttgtctaattcaaatgaagtcgaaatggaggagaaaggcgagcgccgagctaaccttcttccaaagaagttgtgtaagatagaggacgcggaccatcacatccataaaatgagcgaatctgtgtcatctctgtcaaccaacgatttctcaatcccgtgggagacatggcaaaatgaattcgctggaatagagatgacttacgaaacttatgagcgcctgaattccgagttcaaaagacgcaataacatcagacacaaaatgctaagttactttaccacacaatcttggaaaaccgcccaacagcacctaagaaccatgaaccaccagtctcaggacagtcgcattaaaaagctggataaatttcaatttatcatcattgaggagctcgagaattttgaaaaggatagtcagtctttgaaggatcttgaaaaggagttcgtcgatttttgggagaagatattccagaaattctcagcataccaaaaatccgagcagcaacgattgcatttgctgaagactagtttggctaagtccgttttctgtaacacagacagcgaagagactgtatttactagtgagatgtgtctgatgaaagaggatatgaaggtgcttcaggatcgcttactgaaggatatgctggaggaagagcttctgaacgtgcggcgcgagctgatgagcgtgtttatgtcccatgaaaggaacgccaatgtctag

SEQ ID NO: 207644 - DNA, 4593 bp, synthetic construct
  misc_feature 1..4593: note = Description of Artificial Sequence: Synthetic coding sequence
  source 1..4593: mol_type = other DNA
atgcccatccggcccgacctgcagcagctggagaagtgcatcgacgacgccctgcggaagaacgacttcaagccactcaaaactctgctgcagattgatatttgcgaagatgtgaaaattaagtgtagtaagcagttttttcataaggttgacaacctgatttgtcgcgaactgaataaggaggacattcacaacgtgtccgctatccttgtatccgtgggtagatgcgggaagaacatctccgtgctgggtcaggccggactcctcactatgatcaaacaaggcctgatccaaaaaatggtggcttggtttgagaagtccaaagatattatacagagccaggggaacagtaaagacgaggctgtgctcaatatgattgaggatctcgtggacctgcttctcgttatacatgatgtttcagatgaaggtaagaaacaggtcgttgagagctttgtccctcgcatttgcagtcttgttatcgattcgcgtgtaaacatctgcatacagcaggagatcattaaaaaaatgaatgcaatgctagacaaaatgcctcaagatgctagaaagatactgtcaaaccaggaaatgctaatcctcatgtcaagcatgggagagcggattctcgacgcaggagattatgacttacaggtcggcattgttgaggccctgtgtcggatgaccaccgagaaacaacgtcaggaactcgcccaccagtggttctcgatggactttatcgcgaaggcctttaaacgaataaaagattccgaatttgagacagattgtaggatattcctaaaccttgtgaatgggatgctgggagacaagcgaagggttttcaccttcccctgtctgtctgcattcctggacaagtatgagcttcaaatcccgagcgatgagaagttagaggagttctggatagacttcaacctgggttcacaaacattgtctttctacattgccggtgataatgacgatcaccaatgggaagcagtcactgttccagaggagaaagttcagatttattccattgaggttagggagtccaaaaagctcctaactataatcttgaagaatactgtgaaaattagtaagcgggagggcaaagaacttcttctgtactttgacgcttcgctggagatcactaacgtgacacaaaagatctttggtgcgaccaagcaccgcgaaagtatccgaaaacagggcatcagcgtggcaaaaacatctctccacattctgtttgacgcatctgggagccaaatcctcgtgcctgagtcccagataagcccagtcggagaagagctggtgagtttgaaagaaaagagcaagtcccccaaggaatttgccaagccttccaagtatattaaaaactccgataagggcaatcggaacaatagccaactcgaaaaaacaaccccaagcaagaggaaaatgtcagaggcgtcaatgatcgtgtcaggggctgaccgatatactatgaggagcccagtgctattcagcaatacaagcatccccccccgccgacggcggataaagccaccgttgcagatgacctcttccgcagaaaagcctagtgtctctcagacatctgagaaccgcgtagataatgcggccagcctgaagtctaggagcagcgagggccggcacagaagagataacatagataaacatataaagaccgcaaaatgcgtagagaatacagaaaacaagaacgtggaattccccaaccagaacttttctgaactgcaggacgttatcccggactcccaagccgccgaaaaacgggatcataccattctcccgggggtcctggataatatatgtggaaacaaaatccacagtaaatgggcttgctggacgccagttacgaacatagagctgtgcaataatcaacgcgcgtccacgagttccggcgacaccttaaaccaggatatcgtgattaacaaaaaactcacgaaacagaaatcatcttcttcaatatccgatcataattccgaaggtacaggtaaagtaaaatataaaaaagagcagactgaccatattaaaatcgataaggcggaggtggaagtgtgtaagaagcataaccagcagcagaatcacccaaagtacagtggacagaagaatacagagaacgcaaaacagagtgattggcctgtggagtccgagactacttttaagagcgtactgctgaataaaacaattgaagaatcactgatttaccgtaaaaagtatatactctctaaagatgtaaacactgccacatgtgataaaaatccctccgcgagcaagaatgtgcagtcgcacagaaaagcggaaaaagaattaaccagcgagctgaattcctgggactctaaacagaaaaagatgcgcgagaagtcaaaggggaaagagttcaccaacgttgcagagagcctgatctctcagatcaacaaaagatacaaaaccaaggacgatattaaatctacacgtaagctgaaggaatcactgataaacagcggattttccaacaaaccagtggtgcagctctccaaggagaaggtccagaagaaatcctaccgaaagctgaagaccacctttgttaatgtaacctcagagtgccctgttaatgatgtgtacaacttcaaccttaacggcgctgatgaccccatcattaaactgggtattcaggaatttcaggccaccgccaaagaggcttgcgcggaccgtagcataagattggtgggtccccgaaatcacgatgagcttaaatcgtctgtgaaaacgaaggacaaaaagatcattacaaaccatcagaagaagaatctgttttcggacaccgaaacagaatatcgctgcgacgactcaaagacagacatcagctggttgagagagcccaagtccaagccccagcttatcgactattccaggaacaaaaacgtgaaaaatcacaaatcggggaaatcgcgttcttcactggagaagggtcagccatcctctaagatgaccccctctaaaaacatcacaaagaagatggataaaacaattcccgaaggtcgtattaggctgcctcggaaggcaactaaaacaaaaaagaattacaaagacctgtcaaactccgaaagcgagtgtgaacaggagttttcacattcattcaaggaaaatatcccggtcaaagaagagaatattcactcaaggatgaagaccgtcaaattgcctaagaagcagcaaaaagtgttctgcgccgaaaccgagaaagagctctccaaacagtggaagaactcctccctgctgaaggacgccattagggacaattgtctggatttatcaccgcgaagcctgtctggcagcccctcatcaattgaggtaactaggtgtatagaaaaaatcacggagaaagattttactcaggactacgactgcataactaaatcaatctccccatatcccaagacaagtagtctggaatcactgaatagtaactctggtgttggtggaactataaaatctcccaagaacaatgaaaagaatttcctctgcgccagcgaatcttgctcgccaattcctcgcccgctgtttctcccgcgacacaccccgactaagtccaacaccattgtgaatcgaaagaaaatcagtagtttagtgctgactcaagagacacaaaattcgaatagctatagcgacgtgtcctcctacagctcagaggagaggttcatggaaattgaatcccctcacattaatgagaactatattcaatccaagagagaagagagtcacctggcctcttctctctccaaaagctcggaggggcgagagaagacttggttcgacatgccgtgcgatgccacacatgtgagcgggccaacccagcacctgtcaagaaaaagaatatatattgaggataatttatccaacagcaacgaggtcgagatggaggagaaaggtgaaaggagggctaatctcttaccgaagaaactgtgcaaaatcgaggacgctgaccatcatattcataagatgtcagaaagtgtctccagcctgagcaccaacgatttttccattccatgggagacctggcagaatgaattcgccggcatcgagatgacatatgagacctacgaaagattgaactccgagtttaaaaggagaaacaatatcagacataaaatgttgagttactttactacacagagttggaagaccgctcagcagcaccttcgtactatgaaccaccagtcccaagactcaagaatcaagaagctcgacaagtttcaattcattatcatcgaagagcttgaaaacttcgagaaagatagccaatcactcaaggacctggagaaggagtttgtggacttttgggagaagattttccagaagttcagcgcctaccaaaaatcagagcagcagcggttacacctcctgaagaccagcctggctaagagtgttttttgcaatacagattccgaagagaccgtatttacctccgagatgtgcctaatgaaagaggatatgaaggtattgcaagaccggctgctgaaggatatgctagaagaagagcttctgaacgtgagaagggagttgatgtctgtgttcatgagtcacgaacgcaacgccaatgtctag

SEQ ID NO: 207645 - DNA, 3072 bp, synthetic construct
  misc_feature 1..3072: note = Description of Artificial Sequence: Synthetic coding sequence
  source 1..3072: mol_type = other DNA
atgcccatccggcccgacctgcagcagctggagaagtgcatcgacgacgctctgcgcaagaatgattttaagcctcttaaaactctgttgcaaatcgatatttgtgaggacgtaaagattaaatgtagcaagcagttcttccataaagttgataacctcatctgcagggagcttaacaaggaggatattcacaacgtgagcgccatccttgtgtccgtagggaggtgtggcaaaaatatttccgtgcttggccaggctggattactcaccatgattaagcaaggcctcatccaaaagatggtggcatggtttgagaagtctaaagatataatccagtcgcagggcaacagtaaggacgaagcagtacttaatatgatagaggacttggttgatctactcttagtgattcacgatgtctcggacgaagggaaaaagcaggttgtcgaaagtttcgtaccaagaatctgctcactggtgatcgactcccgggtcaatatctgcatccagcaggaaatcatcaaaaagatgaacgcaatgcttgacaaaatgccgcaggacgcaaggaaaatcttgagcaaccaagagatgttgatcttaatgagtagcatgggcgagagaattctggacgcgggggactatgatctccaggtgggtatcgttgaagcattgtgtcggatgactactgagaaacaacgacaggaattggctcaccagtggtttagtatggactttatcgctaaggccttcaaaagaatcaaagattctgaattcgaaactgactgtcgtattttcttgaatcttgtgaatgggatgctgggagacaagcgcagagtgttcaccttcccttgtctctcagctttcttagataagtatgaactgcagattcccagcgacgaaaaattagaggaattttggattgacttcaatctgggttcacaaaccctctctttttacatcgccggtgataacgatgatcatcaatgggaagctgttacagttcccgaggagaaggttcaaatctactcaatcgaagtgcgtgagagtaaaaagctgctaacgatcatcctcaaaaatacggtgaagatctcaaagcgagaaggcaaagaactgcttttatattttgatgccagcctcgagataacaaacgtgacacaaaaaatattcggagctaccaagcaccgggaatcaatccggaaacagggtatcagtgttgccaagacctccctgcatattctgttcgacgcctcaggctcgcagatccttgttccagaatcgcaaatctcacccgtaggcgaggagttagtttctctgaaggagaaaagtaagtcccctaaggagttcgccaagccaagcaagtacatcaagaactctgataagggcaatcgtaataattcccaactcgaaaaaactaccccttcgaagcggaagatgtccgaagcgtcaatgattgtcagtggagccgatcgctatacaatgagaagccctgttttgttcagcaacacttcaatcccccctaggaggcggcgtattaagccacctctacaaatgacatccagtgccgaaaaacccagtgtgtcacagacctctgagaacagagtggataatgcagcatctttaaaatcccgaagtagcgaagggcgacacagaagggacaacattgacaaacacatcaagactgccaaatgcgtagaaaataccgaaaataaaaatgtggagtttcccaatcaaaatttctcagagttacaggacgtaattcccgattctcaggctgcagagaagcgcgatcatacaatccttcctggagtcctcgacaatatctgcggtaacaagatccactccaagtgggcttgctggacccctgtgactaacattgagctttgtaacaaccaaagggcttcaacctcgagcggagatactctgaaccaggacatcgtcatcaataagaaattgacaaagcaaaagtcaagcagttccatcagtgaccataacagtgagggcaccggcaaggtgaagtacaagaaagaacagactgatcacatcaagattgacaaagccgaagtggaggtctgcaaaaagcacaatcagcagcagaaccacccaaaatactccggccagaagaataccgagaatgctaaacagtccgactggcccgtggagtccgaaaccacttttaaatccgtcctgctcaataagacaatcgaggagtctctaatctatcggaagaagtacatcttatccaaggacgtcaatactgccacctgcgataagaatcctagtgcatctaaaaatgtgcagtcgcaccggaaagctgagaaggagctgacaagtgaactcaactcttgggactccaaacagaaaaaaatgcgggaaaagtccaagggcaaagagttcactaatgttgctgagtctttaatcagccagataaataagagatataagactaaggacgacatcaagagtacacggaagctaaaggagtccttaatcaacagcggtttcagtaataagccggtcgtgcaactttcaaaagaaaaagttcaaaagaaaagctacaggaaactcaagacaaccttcgttaatgttacgagcgagtgtcccgtaaatgatgtctataacttcaatctaaacggcgccgacgaccccataattaaactcggaattcaggaatttcaagcgaccgcaaaggaagcatgcgcagacagatcgatacgactcgtgggccctcgaaaccacgacgagctgaagagctctgtgaagacaaaggacaagaagatcattactaatcaccagaaaaagaatttattctcagacacagaaactgagtataggtgcgatgattcgaagaccgatatctcatggctcagagagcctaagtccaagccacagctgattgactacagcaggaataaaaatgtcaagaaccacaagagtgggaaatcacggtctagcctggaaaagggacaaccgtctagcaaaatgacccctagtaaaaatatcacaaagaagatggacaaaacaatccccgagggcagaatacgcctgcctcgcaaggctaccaagaccaagaaatag

SEQ ID NO: 207646 - DNA, 711 bp, synthetic construct
  misc_feature 1..711: note = Description of Artificial Sequence: Synthetic coding sequence
  source 1..711: mol_type = other DNA
atggtgagcagcggcaagaagtacagccggaagagcggcaagccctcagttgaggaccagttcacaagggcttacgatttcgagaccgaggacaagaaggacctgagcgggtccgaggaagacgtcattgagggtaaaacggcagtgatagaaaagcgtagaaaaaaacggagctccgccggggtggtggaagatatgggaggcgaagtacagaacatgctcgagggggtcggtgtggatatcaacaaggccctccttgcaaaacgcaaacgactggagatgtacacaaaggctagcctcaagacatcaaatcagaaaatcgagcatgtctggaaaacacagcaggatcagcgacagaagctgaaccaggagtacagccagcagtttctgacactgtttcagcagtgggacctggatatgcagaaagcggaggaacaggaggagaaaatcctgaacatgttccgccagcagcagaagattttacagcagagccgtattgttcagtcccaacgactcaaaaccataaagcagctgtacgaacagttcattaaatctatggaagagctcgaaaagaatcatgacaacctcttaaccggggcacaaaatgaattcaagaaggagatggcaatgcttcagaaaaagattatgatggagacccagcagcaagagattgccagcgtcagaaagagtttgcagagcatgctcttttag

SEQ ID NO: 207647 - DNA, 711 bp, synthetic construct
  misc_feature 1..711: note = Description of Artificial Sequence: Synthetic coding sequence
  source 1..711: mol_type = other DNA
atggtgagcagcggcaagaagtacagccggaagagcggcaagccctccgtcgaagatcagttcacacgcgcgtacgacttcgaaacggaggacaagaaagacctgagcggcagcgaagaagatgtgattgaggggaaaaccgcagtgattgagaaacgccgaaagaagcgttccagtgcgggagtcgtggaggatatgggcggtgaggtgcaaaatatgcttgaaggcgtgggtgtcgatatcaacaaggcccttttagccaagaggaagcggctcgagatgtacacaaaggctagcctgaagacttctaaccagaaaatcgagcatgtctggaaaacccagcaggaccagcgccaaaaacttaaccaagagtattcacagcagtttctgaccttatttcagcaatgggacctcgatatgcagaaggctgaggaacaggaggagaaaatcctcaatatgtttaggcaacagcagaagatcttacagcagtctcgcatcgtgcagagccaacgcctcaaaacgatcaaacagctgtacgagcaatttatcaagtcaatggaggagcttgaaaagaatcacgataaccttctgacgggagcccagaatgagtttaagaaagagatggctatgttacagaaaaaaatcatgatggagactcagcagcaagaaatcgcatcagtgagaaagtcgctacagtctatgttgttctag

SEQ ID NO: 207648 - DNA, 711 bp, synthetic construct
  misc_feature 1..711: note = Description of Artificial Sequence: Synthetic coding sequence
  source 1..711: mol_type = other DNA
atggtgagcagcggcaagaagtacagccggaagagcggcaagccctccgtggaggatcaattcactcgtgcttatgactttgaaaccgaggataaaaaagacctgtcagggagcgaggaggatgtgattgagggtaaaacagccgtaatcgaaaaacgcagaaaaaagagaagctccgcaggggtggtggaagatatgggcggcgaggtacaaaatatgttggagggggtgggagttgatatcaataaagctttactcgccaaaaggaagcgacttgaaatgtacacaaaggccagtttgaaaactagcaaccagaagatcgagcacgtctggaagacacaacaggaccaacgccagaagctaaaccaggaatactcacagcagtttctgactttgtttcagcagtgggatttagatatgcaaaaagccgaggagcaggaggaaaaaattttaaacatgtttaggcagcaacaaaaaatcctacagcagtctcgcatcgtgcagtcccagcgacttaagaccataaagcaactgtacgagcagttcattaaaagcatggaggagcttgaaaaaaaccacgataaccttttaaccggggcccagaatgagtttaaaaaggaaatggccatgttgcagaaaaaaataatgatggaaacgcaacagcaagagattgcgagcgtgaggaagtccctgcagtctatgcttttctag

SEQ ID NO: 207649 - DNA, 942 bp, synthetic construct
  misc_feature 1..942: note = Description of Artificial Sequence: Synthetic coding sequence
  source 1..942: mol_type = other DNA
atgctgctgctggccgacatggacgtggtgaaccagctggtggccgggggacagttccgtgtggtgaaggaacccctggggtttgtgaaagttttacagtgggtgtttgccatctttgcctttgccacatgtggcagctactctggcgagctccagctgtctgttgattgcgcaaacaagaccgagtctgacctcagcatcgaggtagagttcgaatatccattcagactgcaccaggtctatttcgacgcaccgacatgccgggggggaaccactaaagtttttctggtgggcgactactcaagtagcgctgagttcttcgttacggtggcggtcttcgccttcctctattccatgggcgccctggctacctatatcttcttgcagaacaaatatagggagaacaacaagggcccaatgctcgactttctagcaaccgctgtgttcgctttcatgtggctggtatcaagctctgcgtgggcaaaaggcctctctgatgtgaagatggccacagatcctgagaatatcatcaaggaaatgcctgtctgccggcagacgggaaacacttgtaaagagctccgggatcctgtgacaagcggactgaataccagcgtcgtctttggatttcttaacttagtgttatgggtggggaacctgtggttcgtgttcaaggagactggatgggccgccccatttttaagggcccctccgggagctccggagaaacaaccagccccaggggatgcttacggagacgcagggtacggacaaggcccaggagggtacgggccccaggatagctacggtcctcagggagggtatcagcctgattacggccagccggccgggtccggtggatccggatatggcccacagggagattacggacaacaggggtatgggccacaaggggccccaacttcttttagtaatcagatgtag

SEQ ID NO: 207650 - DNA, 942 bp, synthetic construct
  misc_feature 1..942: note = Description of Artificial Sequence: Synthetic coding sequence
  source 1..942: mol_type = other DNA
atgctgctgctggccgacatggacgtggtgaaccagctggtggccggcggccaattccgagtcgtgaaagaacccttgggctttgtgaaggtactgcaatgggtgtttgctatttttgctttcgcaacttgcgggtcttattccggtgagttgcagctctctgtagactgcgcgaacaaaactgaaagcgacctcagtatagaggtggagtttgagtacccgttccggttgcatcaggtctacttcgacgcgcctacttgccgcggcgggacgacgaaagtattcctggtcggcgactattctagtagcgcggaatttttcgtgactgtagccgttttcgcattcctgtacagcatgggtgccttagcaacttacatttttctacagaataagtaccgcgaaaacaataaaggtcctatgctggactttctggcaacggccgtgtttgccttcatgtggctggtttccagcagcgcttgggctaaaggcttgagcgatgtgaaaatggcgaccgaccctgagaatattatcaaggaaatgccagtttgtcggcaaaccggtaatacttgcaaggagctgcgtgatccagtgaccagtgggttgaacacatccgtcgttttcggctttttaaatctggtactgtgggtcggaaatctgtggtttgttttcaaagaaaccggctgggcagctcccttcctgcgcgccccccctggcgcccccgaaaaacaacccgcaccgggcgacgcatacggggacgcaggctacggtcaagggcccgggggctatgggccccaggatagttacggccctcaaggggggtatcagcccgactatggccagccagcaggatccggcgggtccggctacgggccccagggagactatggacagcagggatacggtccccagggcgccccgacctccttttccaaccaaatgtag

SEQ ID NO: 207651 - DNA, 588 bp, synthetic construct
  misc_feature 1..588: note = Description of Artificial Sequence: Synthetic coding sequence
  source 1..588: mol_type = other DNA
atgggcgccctggccacctacatcttcctgcagaacaagtaccgggagaataataaaggccctatgctggattttctggccaccgccgtgttcgcctttatgtggctggtgtccagcagcgcgtgggcaaaggggttaagcgacgttaagatggccaccgaccccgaaaacatcattaaggaaatgcccgtatgtagacagaccggcaatacctgcaaggagctgagagaccctgtcacctccgggctgaatacttcggtcgtcttcggattcctaaacctcgtgctttgggtaggtaatctctggttcgtatttaaggagactggatgggcagcccccttcctgagggctccaccaggcgcgcccgagaaacagcccgccccaggagatgcctacggtgatgccggctatggtcaggggcccggtggctatggcccccaggacagttacggcccacagggtggctatcagcctgactatggacagccagctggctctggcggctctggatacggcccacaaggcgactacggacagcagggctacggaccccagggagcaccaacatcttttagtaatcagatgtag

SEQ ID NO: 207652 - DNA, 2712 bp, synthetic construct
  misc_feature 1..2712: note = Description of Artificial Sequence: Synthetic coding sequence
  source 1..2712: mol_type = other DNA
atggagggctacagcgaggaggccagcctgctgcggcacctggagaaagttgcctcggaggaagaagaagtgccgttagttgtgtatttgaaagaaaacgcggcccttctcacagccaatggccttcacttgagccagaaccgagaggctcagcaatctagccctgccccccccccagccgaagttcactcacctgccgctgacgtcaaccagaatctggcatctccgagcgctacattaacgacacctacaagcaactcctcccacaaccctcccgcaacagatgtgaatcagaacccacctgccaccgtggtgccgcaaagtttgccactcagtagcatccagcagaactcttccgaggcccagcttccatcaaacgggacagggcccgctagtaagccgtcaactctttgtgcggatggccagccgcaggcgcccgctgaagaggtccggtgcagtaccctgttgatagacaaagtgtccactcctgctaccacaacttctactttttctcgcgaagcgacccttataccctcttcacggccccctgcttcagattttatgagttcctctctgctgattgacatacaaccaaacacgttagtggtgtccgccgatcaagagatgtcagggagagccgcggccaccactcccacaaaggtgtatagcgaggttcactttaccctggcgaaaccgccgtcagtagtgaatcgaaccgctagacccttcggaattcaggcacccgggggcacgtcccaaatggaaaggtctcccatgctggaacggagacacttcggggagaaagctccagccccccagccaccttccctgcctgaccggagcccgcggccccagcggcatatcatgtcaaggtcgccaatggtcgaacgtcgcatgatggggcagcggagcccagctagtgaacgtaggccactgggcaattttactgcacccccaacatacacagagaccttgtccactgctcccctagccagctgggtgcggtccccaccgtcttatagcgtgttgtatcctagctccgatccaaagtcatcccatctcaaaggccaggccgtgcctgcgtctaaaaccggtattttagaagagtcaatggcccgccgcggaagcaggaagtccatgtttacgtttgtagaaaaacctaaagttactcccaacccggatctgctagatctggtacagaccgctgacgaaaagcggaggcaaagggaccagggcgaagtcggggtcgaagaggagccgtttgccctgggtgccgaggcatccaactttcagcaggagccggcaccccgcgaccgagctagtcctgctgcagcggaggaggtggtccccgagtgggcgagttgtctgaaatctccccggatccaggctaaacccaaaccaaagcctaaccagaatttatccgaagcaagtggcaagggagctgagctgtacgctcgacgccagagcagaatggagaaatacgtaatagagagttcttctcatacgcctgagttggcccgctgcccttcccctaccatgagcctgcctagtagctggaaataccctacgaatgcccccggcgcctttcgagtggcatccaggagtcccgcccgtacgcctccagcctccctgtatcatggctacctgcccgaaaacggcgtgctgcgaccagagccaacaaagcaaccaccataccagctccggccctctcttttcgtgctgagcccgattaaagagcctgccaaagtgagcccacgggccgcatctccagctaaacccagcagtctcgacctagtgcccaacctgcccaagggcgccctccccccgagtcccgccctcccgcggccgagcaggagcagccccggactgtacacatcccccggccaggattcactccaacctacagcagtgtccccaccctacgggggtgacatttctcctgtgagcccttcaagggcctggtccccacgggccaagcaagccccccgcccatctttttcaactagaaacgccggtatagaggcacaggacagacgggaatcccttcctacttcaccaccttggactccaggcgctagtaggccaccctcaagtctggatggctgggtaagtcctggaccctgggagccaggccgcggttcgtctatgtcttctcctcctccattgcccccacctcctccaatgagtccctcttggtccgagcggagcgtgagtccgctcaggccagagaccgaggcacggccaccctcacgccagctgcaggccctgctcgctaggaatattataaatgccgcccggaggaaaagcgcatctccgcgtagcgcgggcgctgaaaatcctcggcccttcagtcctcctagagcaccaccacccccacccccccctccacccccacccccacgcatgcgaagcccccaaccggcgcgccctgggtccgctgccgtccctggggcagctttcgccccaattcccaggtcacccctccctgcaggtcccagctcatgcacatcaccgcgatctcctttgcctgctccccctcggcctttcctgtaccgacgttccccaacggacagtgatgtgtctttggattccgaagattctggggctaagagccctggaattttagggtacaatatctgccctagggggtggaacgggagcctccggctgaaaagaggctcactcccagccgaagcatcttgtaccacttag

SEQ ID NO: 207653 - DNA, 2790 bp, synthetic construct
  misc_feature 1..2790: note = Description of Artificial Sequence: Synthetic coding sequence
  source 1..2790: mol_type = other DNA
atgctgggcccccacctgccccccccccccctggcccccagcgagggtcgccccaccccgtgtgcctttcagataccggatggctcctatcgttgtttggctcttgaggctgaagaatctagcggagaggagggcctgcagggtgaggtgggcccgacggatctggaggaggatgagggtgttagtagatcaggagacgattctgcctgcagggtgacccaaggcacgcctcagctgcctaaggcactcggcattcaaccccccagttgttcccgggaggaacagggcgcatcacagcatgacgaccgggcatcacaggactgggatgtggtcaaagcgggccaaatgatgacagcttctcctagcccaggaccagggcccagggtggcccagaaacccgccctcggccggagcacaagcctgaccgaaaaggacctgaaagaggccaaagccaggtcacagcaaattgccgcccagctcacaacaccaccatcgtcaaattccagaggggtgcagctgtttaaccgcagacggcagagagtgaacgagtttaccctcgagtcccatgggcagcgtggccagaaaccaagccaggagagcctgcgggtgctaccttctagcctgcctgggcacgcgcccggcctgtccctgtcaagcaccagcctgccagaaccgggcccaccccgacatccatcaccacaaagtccggacaggggtgtcccaggccactcgatggagggatactccgaggaagctagtttactccgccatttagaaaaagttgcaagcgaagaggaggaggtcccactggtagtctacctgaaagagaacgccgccctgcttactgccaacggcttgcacttaagccaaaacagagaagcacagcagagcagtccagcccctcccccagctgaggttcacagtcctgctgcggacgtgaatcagaacctggcctcgccgtccgcaacactgacaacccccacctctaattcttctcacaatccacccgctactgacgttaatcagaacccgcctgctactgtggtgccacaatcgctcccgctttcttccatccaacagaattcttccgaggcccagttaccgtccaatggcactggaccagccagcaagcccagtaccttatgcgccgacggccagccccaagcccctgccgaggaagtcagatgttccacgctgttaattgataaagtcagcactccagcgacaaccacatcaacattcagtagggaggccacattgatcccctcttccaggccaccggcttccgattttatgtcctcttcgctgctgattgatatccagccgaataccctggttgtgtcagctgatcaggagatgtcgggccgggccgccgcaactacaccaactaaggtgtactccgaggtccacttcaccctggccaaacccccctctgtggtgaatcggaccgcccgcccctttggcatacaagcacctgggggaacgtctcaaatggagaggtcaccaatgctggagcgcaggcactttggtgagaaggctcccgccccgcaaccacccagtctgcctgaccgcagcccacggcctcagcggcatatcatgtcacgaagtccaatggttgaaaggaggatgatgggccagaggagtccagcgtccgagcgcagaccactgggaaacttcaccgctccaccaacctacaccgagacactgtccactgccccccttgcctcatgggttcgaagcccaccctcttactccgtgctctacccctcctcggaccccaagagttcccacctgaaagggcaagctgtgcccgccagtaaaaccggcatcctggaggaaagcatggctaggagaggcagtcgaaagtcaatgttcacattcgtcgagaagcccaaagtgacccccaatcccgacctactggacctggtccagacagccgacgagaaacggcgacagcgggatcagggggaggtaggtgtggaagaggagccattcgccttaggcgctgaagcttctaatttccagcaagaacctgcacctcgagacagggcttcccccgccgctgcagaggaggtggtcccagagtgggcatcatgcctgaagagtcccaggattcaagcgaagcctaagcctaaacccaatcagaatctgtctgaagcaagtggtaaaggagcggaattgtacgcacgaaggcaaagccgcatggaaaagtatgttatagagtctagtagccacacccctgagctggctcggtgtccctcccccaccatgtccttgccgagtagctggaagtatcctacaaacgcccccggggcatttcgtgtggcaagccgttcaccagcccgcactccacctgcctccctgtatcacggatatttgcccgagaacggggtactgagacccgaacccacaaagcagccaccataccagctgcggccttccctgtttgtgttgtctcctatcaaagaaccggctaaggtgtctccaagagctgcctccccagcaaaacccagcagcctggacctggtgcctaatctgccaaaaggcgccctgcccccgagccccgctctgcccagaccttcccggtcctcccccggtctctacacatctcccggacaggattccctccagccaaccgcggtatccccgccttacggcggcgacatatcccccgtttccccctcccgagcctggtcaccacgcgcaaagcaggctcccagacccagcttctcaacaaggaacgcagggatcgaagctcaggtctggaagccatccttttgtttcaagtag

SEQ ID NO: 207654 - DNA, 2058 bp, synthetic construct
  misc_feature 1..2058: note = Description of Artificial Sequence: Synthetic coding sequence
  source 1..2058: mol_type = other DNA
atggagggctacagcgaggaggccagcctgctgcggcacctggagaaagtggcttcagaggaggaggaggtgcctctggtagtctatctaaaagaaaacgctgccctcctgaccgccaatggcttgcatctttcgcaaaatcgtgaggcccagcaatcatccccagcacccccacccgccgaagtccatagccctgccgccgacgtgaaccagaacctcgctagccctagcgctactttgaccactcctaccagtaatagctctcacaatccaccagctacagatgtgaaccagaatcctccagctacagtcgtcccacagtcacttcctcttagttcgatccaacaaaattcttctgaagcacaactgccgtctaacggtaccgggcctgcttccaaaccctccacgttatgcgcagacgggcaaccccaggcccccgctgaagaggtacgctgtagtacgttgttgattgataaagtcagtaccccggctactaccactagcacgttcagccgtgaagcaacactgataccatcaagtaggccccccgcaagtgactttatgtccagttcactgctcattgacatccagcctaatacgctggtcgtcagcgcagatcaggagatgagtggaagagccgcagccaccacaccgacaaaagtgtattccgaggtccacttcaccctggccaaacccccaagcgtggtgaaccgcaccgcgaggccatttggaattcaggctcccggggggaccagccagatggagcgcagcccgatgctggagagacgacacttcggcgaaaaagccccggcaccacagcctcccagcttgcccgataggtctccaaggccgcaaagacacataatgtcgaggagccccatggtcgagaggcgtatgatgggtcagagaagccccgcctctgagcggcgcccccttggaaattttacggcgccaccgacctataccgaaaccctcagcaccgcgcccctggcttcctgggtcagaagtcccccctcgtactctgtattatatccttcatcagatccaaagtcatcacacttaaagggtcaggccgtccctgcaagtaaaaccggcattctggaggaaagtatggcacggaggggcagccggaagagtatgtttacctttgtagagaaacccaaggtgaccccgaaccccgacctgttggacctggtgcagacggctgacgaaaagcggaggcagagagaccagggcgaggtcggcgtggaagaagaaccatttgccctcggcgccgaggctagcaatttccagcaggaacccgccccccgcgacagagcttctccggccgccgccgaagaagttgtgccagagtgggccagctgcctcaagagcccccgcattcaggctaaacccaagcccaaaccaaatcaaaacctgagcgaggcctccggcaagggggctgaactctatgcccgtaggcagtcacggatggagaaatatgtgatagaatcgagctcccacacaccggagcttgcccgctgcccttctcctaccatgtcactcccttcttcgtggaaatacccaacaaacgcccccggtgcatttcgggtcgcttcgcgatcccccgctcggactcccccggccagtctctaccatgggtatctcccggagaacggcgtccttaggccggagccgaccaagcaacccccctaccaactgagaccttctcttttcgtactttctcctattaaagaaccggctaaggtctctccacgggcggcttcgccggccaaaccttcatcgctggatctggtccctaatctccctaagggggcgcttcctcccagccccgccttgcctcggcccagcaggagtagtccaggtttgtacacctctcctgggcaagattctctgcagcccacagccgtgtctcccccttacggcggagatatttctcccgtttctccctctagagcctggagccctcgcgccaagcaagctccaaggccttccttctcaacaaggaatgccggcatagaggcacaggtctggaaaccttccttttgttttaagtag

SEQ ID NO: 207655 - DNA, 2790 bp, synthetic construct
  misc_feature 1..2790: note = Description of Artificial Sequence: Synthetic coding sequence
  source 1..2790: mol_type = other DNA
atgctgggcccccacctgccccccccccccctggcccccagcgagggaagaccaacgccttgtgcattccagatcccagacggcagctacaggtgcttggccctggaggccgaagaatcgtccggggaggagggtctgcagggcgaagtcggccctaccgacctggaagaggatgagggcgtttctcggtcaggcgatgactccgcatgtcgtgttactcagggaaccccccagctgcccaaggctctcgggattcagcccccttcttgctcaagagaagagcaaggtgcttctcagcacgatgaccgggcctcccaggactgggatgttgtgaaggcaggtcagatgatgaccgcttctccctcaccagggcccgggcctagggtcgcacagaagcccgcgctgggccgctccacatccctgactgaaaaggatcttaaagaagcgaaggcaaggtcccagcaaattgccgctcagttgacaactccaccgagctcgaattctagaggcgtccagttatttaatcgtcgacggcagcgggtcaacgagtttaccctcgaatcccacggtcagcgtggacagaaaccttctcaggagagcctgcgcgtgctgccaagctcccttcctggccacgctcccggtctgagcctctcaagcaccagcctaccagagccagggccaccccgccacccatccccacaatccccagacaggggcgttccaggccacagcatggagggctattctgaggaagccagtctcctgagacacctcgaaaaggtggcttctgaagaggaggaagtgccactggttgtgtacttgaaggagaatgctgcccttctgacagccaacggactgcacctttcccagaatagggaggcacagcagtcctctccagcccctccaccagcagaagtgcattcccctgcagcagacgtgaatcagaatttggcatctccatccgcgacattgactactcctacttcaaattcttcccacaatccccctgccaccgatgtaaatcaaaacccacccgctacagttgtcccccagtccctgcctctcagtagtatccagcagaactcatcagaggcccagctccccagcaacgggacagggcccgccagcaagccctcaacgctttgcgccgatgggcaaccacaggccccggccgaagaggtgaggtgttcgacacttttgatcgacaaagtgtccacccccgccacaaccacttccaccttcagccgagaggctaccctcatcccatcatctagaccgccagcgagcgacttcatgtcctcctcactgttgatcgacattcagcccaacactctggtcgtatcagccgaccaagaaatgagtggacgagccgccgccaccacacctacaaaggtgtacagcgaagttcattttacgctggctaagcccccgagtgtcgtcaaccgaacggccagaccttttgggatccaggcccccggggggacatcacagatggaacgcagtcccatgctggagagaagacactttggggagaaggcgcctgctcctcagccaccatcgctgccggaccgctctccacgcccacagcgacacattatgtcgagaagtccaatggttgaacgccgcatgatggggcagagatcccccgcgagtgagcgacgacctcttggcaattttaccgccccgccgacgtatacggaaacactgagcacagccccgctcgccagctgggtccgatcccccccttcatactcagtgttgtatccgtcctctgatccgaaatcaagccacctgaaggggcaggccgttcccgcttccaagacaggaatcctcgaagagtccatggcgaggaggggctcacgcaagtcaatgtttacatttgtagagaagcccaaggtgacccctaaccctgatctccttgatctcgtacagacagcagatgaaaagagacgccaacgggaccaaggggaggttggagtagaggaagaaccatttgcactcggggccgaggcatcaaactttcagcaggagcctgccccaagggatagagccagtcctgcagccgcagaagaggtggtgcccgaatgggcctcgtgcctcaaaagtccgaggatacaggccaagcctaaacctaagcccaaccagaatctgtccgaagcaagcggcaaaggcgccgaattgtacgcccggcggcaatccaggatggaaaagtatgtgatcgaatcttcctcacatacccccgagctcgcccgatgcccatccccaacgatgtcgctcccctcgtcgtggaaatacccaaccaatgcccctggcgcctttcgagtcgcctcccgtagccctgcccggactcctccggcgtcactctaccacggctatctcccagagaatggtgtactcagaccagaacccactaagcaacctccctaccagcttcgaccctctctgtttgtgttgtcaccaattaaggagcctgcaaaggtgagcccccgcgccgcatcacccgcaaagccttctagtctagacttggtgcctaatctacctaagggtgcccttcctcccagccctgcactaccacggccctcccggtcatcccccgggctgtatacttctcccggacaggattcactacagcctaccgccgtctcaccaccttacggcggagacatctcccctgtgtcaccctcccgcgcttggtctcctcgtgccaagcaagcgccccggccctccttctccacccgtaacgcgggaattgaggctcaagtgtggaaacctagcttctgcttcaagtag

SEQ ID NO: 207656 - DNA, 636 bp, synthetic construct
  misc_feature 1..636: note = Description of Artificial Sequence: Synthetic coding sequence
  source 1..636: mol_type = other DNA
atggacaacctgagcagcgaggagatccagcagcgggcccaccagattaccgacgagagcttagagtcgacgagacggattctgggactcgctatcgagtcccaagacgccggcatcaagaccatcaccatgttggacgagcagaaggaacagttaaaccgaatagaggaaggactggaccagatcaacaaggacatgagagagacagaaaagaccctgacagagcttaataaatgctgtggtttgtgcgtgtgcccctgtaaccggaccaagaactttgagtcaggcaaggcctacaagacgacatggggcgacggcggcgagaacagcccctgtaacgtcgtgtcaaaacagcccgggccagtgactaacggccagctacagcaacccactacaggagcagctagcggcggttatatcaagcggatcaccaacgatgccagagaggacgagatggaagaaaacctcactcaggtaggctctattctcggcaacctgaaagacatggcccttaacatcggaaatgagatcgatgcacagaatccccagatcaagcgcattaccgacaaggccgacaccaacagagatagaatcgatatcgccaacgctcgggctaagaagctgattgactcctag

SEQ ID NO: 207657 - DNA, 477 bp, synthetic construct
  misc_feature 1..477: note = Description of Artificial Sequence: Synthetic coding sequence
  source 1..477: mol_type = other DNA
atggacaacctgagcagcgaggagatccagcagcgggcccaccagatcactgacgagagtctggagtctaccagaagaatattaggcctggctattgagagccaggatgcagggatcaaaacaattactatgttagacgagcagaaggagcagctcaacaggatagaggaggggttagaccagattaataaagatatgcgtgaaactgaaaaaaccctgacagagctgaataagtgctgcggcctctgcgtgtgcccatgtaacagcattactaatgatgcacgagaggacgaaatggaagaaaatctaactcaagtggggtcaatcctgggaaatcttaaagacatggcgctcaacatcggtaatgagatcgatgcccagaatccacagattaaacggattactgataaggctgacacaaatagggacaggattgacattgctaatgcccgggccaaaaagcttattgactcctag

SEQ ID NO: 207658 - DNA, 477 bp, synthetic construct
  misc_feature 1..477: note = Description of Artificial Sequence: Synthetic coding sequence
  source 1..477: mol_type = other DNA
atggacaacctgagcagcgaggagatccagcagcgggcccaccagataactgacgagtctctcgagagcacaagacggatcctgggcctcgccatcgagtctcaggacgccggaattaaaacaattaccatgctagacgagcagaaagagcaactcaacagaattgaagaggggctggatcagatcaacaaggatatgcgggaaaccgaaaaaacccttactgagctcaacaaatgttgcggactttgtgtgtgtccatgtaactcaatcaccaatgatgctcgggaggacgaaatggaggaaaatctaacacaggtcggttcgatcctcggcaacctgaaggatatggctcttaatataggcaacgaaatcgacgctcagaacccccaaatcaagagaattactgacaaggctgacaccaatcgcgatcggattgacattgcgaacgctagggctaagaaactgattgacagctag

SEQ ID NO: 207659 - DNA, 621 bp, synthetic construct
  misc_feature 1..621: note = Description of Artificial Sequence: Synthetic coding sequence
  source 1..621: mol_type = other DNA
atggccgaggacgccgacatgcggaacgagctggaggagatgcagcgccgggccgatcagctcgctgacgagtccctcgagtctacccgtagaatgctgcaactcgtagaagaaagtaaagacgctggcatcaggaccctggtgatgttagatgagcagggtgagcaactcgaacgcattgaggaaggcatggatcaaatcaataaggacatgaaggaagcagaaaaaaatctgaccgaccttgggaagttctgcgggctttgtgtctgtccttgcaacaagttaaaatcctccgacgcatataaaaaggcatggggaaacaatcaggatggagtggtcgcatctcagcccgctcgcgtcgtagacgaaagagaacagatggcaatctctggtggctttattcggcgagtgacaaatgatgccagggaaaacgaaatggatgaaaatctggaacaagtttctggtattattgggaatttgcggcacatggctctagatatgggtaacgagattgacacccagaacagacagattgatcgtataatggagaaggccgattctaacaaaacacggatagatgaggctaaccagagggccactaaaatgcttggctcgggatag

SEQ ID NO: 207660 - DNA, 621 bp, synthetic construct
  misc_feature 1..621: note = Description of Artificial Sequence: Synthetic coding sequence
  source 1..621: mol_type = other DNA
atggccgaggacgccgacatgcggaacgagctggaggagatgcagaggagagctgaccagctggccgatgagagtctcgaaagcactaggcggatgctgcagctagtggaggagtctaaggacgccggaatacgtaccctggtgatgctggacgaacaaggagaacagctggatcgggtagaggaaggtatgaaccacatcaatcaggacatgaaggaagccgagaagaacctgaaagatctcggaaagtgctgcggtttatttatctgcccttgcaataagctgaaaagttccgacgcctacaagaaggcgtgggggaacaatcaagatggtgtggtggcatcacagccagcccgggttgtagacgaacgggaacagatggccatttcgggcggttttatacgcagggtcaccaatgatgcaagggagaacgagatggatgaaaatcttgaacaggtgagcgggattatagggaaccttagacacatggccctggacatggggaacgaaatagatacccaaaacagacagattgataggatcatggagaaagctgactcaaataagacccggatcgacgaagcaaaccaaagagccaccaagatgctcgggtctggctag

SEQ ID NO: 207661 - DNA, 282 bp, synthetic construct
  misc_feature 1..282: note = Description of Artificial Sequence: Synthetic coding sequence
  source 1..282: mol_type = other DNA
atggccgaggacgccgacatgcggaacgagctggaggagatgcagcgccgggctgatcagctcgccgacgagtcgttggaaagcacacgccggatgctgcagttggtggaggagtctaaggatgcaggaatacgaactcttgtaatgctggatgaacagggggagcaactcgagcggatcgaagagggaatggaccagatcaacaaggacatgaaagaagcggaaaaaaacctcacagatctcggtaaattctgtggcctatgtgtgtgcccttgtaactag

SEQ ID NO: 207662 - DNA, 1500 bp, synthetic construct
  misc_feature 1..1500: note = Description of Artificial Sequence: Synthetic coding sequence
  source 1..1500: mol_type = other DNA
atgaagcacagcctgaacgccctgctgatcttcctgatcatcaccagtgcctggggaggaagtaagggtccactggaccagttagagaaggggggagagacagctcagagcgctgaccctcagtgggagcagttaaacaacaagaacctgtcaatgcctctcctccctgccgattttcacaaagaaaatacagtcactaacgactggatccctgagggcgaagaagacgatgactatcttgacttggaaaagatcttctctgaggacgatgattacatcgacattgttgactccctgtctgtttctccaaccgactctgatgtctcggccggaaatattttgcagctctttcatggaaagagtcggattcaaagattaaatatcctcaacgcaaagttcgcattcaatctgtaccgggtgctgaaggatcaggtgaatacatttgataacatttttatcgctccagtcgggatttcgaccgccatgggaatgattagtctgggcctaaagggggagacacacgagcaagtgcactcgatcctgcattttaaggacttcgtcaatgctagtagtaaatacgaaatcacaactattcataatttgttccggaaactgacgcataggctgttccgcagaaactttggatacacactgagatccgttaacgacctttacatccaaaaacagttccctatcctcttggattttaaaactaaggtgcgcgagtattattttgccgaagcacaaattgccgacttcagcgacccagcgttcatcagtaaaacaaataaccacatcatgaaacttaccaaggggctgattaaagatgccctggaaaatatcgaccccgccacccagatgatgatattgaactgcatctacttcaagggttcttgggtgaacaaatttcctgttgaaatgacccacaaccacaattttagactgaatgagcgagaagtggttaaagtgtctatgatgcagactaagggtaactttctcgcggctaatgatcaggaactggactgtgacatcctgcagttggaatacgtaggtggcatcagcatgttgattgtagtgccccacaagatgagcgggatgaagactcttgaagcccagcttaccccacgggtggtggaaaggtggcagaagtctatgacaaatcggacgcgagaagtgttattaccaaaatttaagctggaaaagaactataacctggtcgaatctcttaagttgatgggtataaggatgctgtttgataagaatgggaatatggccgggatctccgaccagcggatcgccatagaccttttcaaacaccaagggaccattactgtgaatgaggaagggacccaggcgacaaccgtcactacagtgggattcatgccactaagtacccaggtgcgattcactgtcgatcgccctttcctgttcctaatctacgagcacagaaccagttgtcttctgttcatgggccgggtcgccaacccctcccggtcgtag

SEQ ID NO: 207663 - DNA, 1269 bp, synthetic construct
  misc_feature 1..1269: note = Description of Artificial Sequence: Synthetic coding sequence
  source 1..1269: mol_type = other DNA
atggtgagcgagagccaccacgaggccctggccgccccccccgtgaccacagtggccacagttttaccgtccaatgctactgagccggcgagccccggtgagggtaaggaggacgccttcagcaaactgaaggaaaagttcatgaatgagcttcacaagatcccacttcccccttgggccttgatcgccattgctatcgtggccgttctcttagtactgacctgttgcttctgcatctgcaaaaagtgtctgtttaagaaaaaaaacaaaaagaagggtaaggagaagggagggaaaaacgctataaacatgaaagacgtgaaagatctgggaaaaactatgaaagaccaagcgctaaaggatgatgatgcagagacagggctcaccgacggggaagagaaagaagagcctaaggaggaggagaagctcggcaagttgcagtattccctggactacgactttcagaacaaccaacttctggtagggattatccaagccgctgagctgcccgcactcgacatgggcggcactagcgatccttatgttaaggtgttcttactcccggacaaaaaaaagaaatttgagactaaggttcaccggaagacactgaatccagtttttaatgaacagtttacctttaaggtgccttacagtgagttgggaggcaagaccctggtgatggctgtttatgatttcgataggttttcaaagcatgatatcatcggcgaattcaaggtgcccatgaacaccgtggattttggacatgtaacagaagagtggcgtgaccttcagtccgctgagaaggaagagcaagagaaactgggtgacatatgcttttctctgaggtacgttcccaccgccggtaagctgaccgtggtaattctagaggcaaaaaatctgaagaaaatggatgtgggtggtctatctgatccatatgtgaaaatccaccttatgcagaatggcaagaggctgaagaagaagaagacaaccattaagaaaaatacgcttaacccttactataacgagtccttctcatttgaggttcccttcgagcagatccaaaaagtacaggtggtggtaacagtgttggattatgacaaaatcgggaagaacgacgcaatcggaaaggtttttgtcggatataacagcactggggccgaactgagacattggagcgacatgctggctaacccacgccggcccatcgctcagtggcacactctccaggttgaagaggaggtagatgccatgctagcggtcaagaagtag

SEQ ID NO: 207664 - DNA, 1269 bp, synthetic construct
  misc_feature 1..1269: note = Description of Artificial Sequence: Synthetic coding sequence
  source 1..1269: mol_type = other DNA
atggtgagcgagagccaccacgaggccctggccgccccccccgtgaccactgtggctaccgttctgcctagtaacgcgacagaaccggctagccctggcgaaggcaaggaagatgccttcagtaaactgaaagagaaattcatgaatgaactccataagattccactgcctccttgggccctcatagctatcgccatcgtggccgtcttgctggtgctcacttgctgcttctgtatttgcaagaagtgtctcttcaaaaaaaagaacaaaaagaaagggaaggagaaaggagggaagaatgctataaatatgaaggacgttaaagacctgggcaagaccatgaaagatcaggctcttaaggatgatgatgcagaaaccgggctgaccgacggggaagagaaggaagaaccaaaagaggaagaaaaactgggaaaactccagtacagcctagactacgattttcagaacaatcaactgttagtaggaattatacaagcagctgagcttcctgctctcgacatgggcggcacttccgatccctacgtcaaggtgttcctgctgcctgacaagaaaaaaaagtttgaaacaaaggtgcataggaagactcttaaccccgtgtttaacgaacagttcacttttaaggttccatactcagagctgggcgggaagaccctggtgatggcagtctacgattttgacaggttttccaagcacgacatcatcggcgaattcaaggtgcctatgaatacagttgacttcgggcacgttactgaagaatggcgcgacctgcagtccgcggagaaggaggagcaggagaagctgggggacatctgcttttcactaaggtacgtccccacagccggaaagcttacagtcgtcatattggaggcaaaaaatctgaaaaagatggacgtaggcggactgagtgatccttatgtcaagattcacctgatgcaaaacggcaagagactgaagaagaaaaaaacaaccatcaaaaagaatacgctcaacccctattacaatgaatccttcagctttgaagtaccgttcgaacagattcaaaaggtccaggtggtggtgacagtgcttgattacgacaaaatcggtaagaacgatgctatcggcaaggtgtttgttgggtacaattccaccggtgccgagctccgacactggagtgatatgttggcaaatcctagacgtccaatagcccagtggcacactctccaagtggaagaggaagtggacgctatgttagccgtgaaaaagtag

SEQ ID NO: 207665 - DNA, 549 bp, synthetic construct
  misc_feature 1..549: note = Description of Artificial Sequence: Synthetic coding sequence
  source 1..549: mol_type = other DNA
atggtgagcgagagccaccacgaggccctggccgccccccccgtgacaaccgtggccactgtccttccctctaacgctacagaacccgcaagtcccggcgaggggaaggaggatgcctttagtaagttgaaggagaagtttatgaacgagctgcataagattcctctcccaccttgggccctgattgccatcgcgatcgtggcagtgttactggttctgacatgttgtttctgtatatgcaagaaatgcctgttcaagaagaagaataagaagaagggtaaggagaaagggggcaaaaatgcgatcaatatgaaagacgtgaaagatctgggcaaaacgatgaaggatcaagctctcaaagacgacgacgctgaaaccggcctgactgacggggaggagaaggaggagcctaaagaagaggagaagctaggaaaactgcagtactctcttgactacgattttcaaaataaccagctcctggtgggcatcatccaggccgctgagctgccggcgttggacatggggggcacttccgacccgtacgtttag

SEQ ID NO: 207666 - DNA, 177 bp, synthetic construct
  misc_feature 1..177: note = Description of Artificial Sequence: Synthetic coding sequence
  source 1..177: mol_type = other DNA
atggtgagcgagagccaccacgaggccctggccgccccccccgtgaccactgtggcaacggtcctgcctagcaatgccaccgaacccgcatcacccggtgagggaaaggaagacgccttttctaagctcaaagagaaattcatgaacgagttgcataagatccctttgcccccctag

SEQ ID NO: 207667 - DNA, 219 bp, synthetic construct
  misc_feature 1..219: note = Description of Artificial Sequence: Synthetic coding sequence
  source 1..219: mol_type = other DNA
atggtgagcgagagccaccacgaggccctggccgccccccccgtgacaaccgttgctactgtgctgccgtccaatgcaactgagcctgcctcgcccggagagggcaaagaggacgcattctccaagctgaaggagaagttcatgaatgaactgcacaagatccctctgccaccctgggccctcattgctatagcaattgtcgctgtgctcctggtgtag

SEQ ID NO: 207668 - DNA, 222 bp, synthetic construct
  misc_feature 1..222: note = Description of Artificial Sequence: Synthetic coding sequence
  source 1..222: mol_type = other DNA
atggtgagcgagagccaccacgaggccctggccgccccccccgtgaccacggttgctacagtgcttccttccaatgctaccgaacccgcttcaccaggggagggcaaagaggacgctttctctaaacttaaagaaaaattcatgaatgagctacacaagattcctctgccaccgtgggctctgatcgctatcgcaatcgtcgcggtactgctggttctctag

SEQ ID NO: 207669 - DNA, 285 bp, synthetic construct
  misc_feature 1..285: note = Description of Artificial Sequence: Synthetic coding sequence
  source 1..285: mol_type = other DNA
atggtgagcgagagccaccacgaggccctggccgccccccccgtgaccactgtggccacagttctaccgtctaatgcaactgaaccggcaagcccgggggaaggaaaggaggatgccttcagcaagctgaaagagaagttcatgaacgaactgcacaaaatccccctgcccccctgggcactcattgctattgctatcgtagctgtgctgttggtcctcacttgttgtttttgcatttgcaagaagtgcctgttcaaaaaaaaaaacaagaagaaaggaaagtag

SEQ ID NO: 207670 - DNA, 1269 bp, synthetic construct
  misc_feature 1..1269: note = Description of Artificial Sequence: Synthetic coding sequence
  source 1..1269: mol_type = other DNA
atggtgagcgagagccaccacgaggccctggccgccccccccgtgaccacagtcgccaccgtactgccctctaacgcgacagagccagcaagcccgggcgaaggtaaagaagatgccttctcaaagctgaaggagaagtttatgaatgagctccataagattccgcttcctccctgggcgttaatagcaatagcgattgtggccgtcctcttggttctgacatgctgtttttgcatttgtaagaaatgcctatttaagaaaaaaaacaaaaaaaaaggaaaggagaagggtggcaaaaacgccattaacatgaaggacgtgaaggacctcggcaagacgatgaaggaccaagccctgaaagacgatgatgccgagaccgggcttaccgatggcgaggagaaggaagaaccaaaggaggaggaaaagctaggaaaattgcaatattcgctcgactacgacttccagaataaccagctactggttgggatcattcaggctgcagagctgccagctctggatatgggcggcacctccgatccttatgtcaaagtttttctcttacccgacaagaaaaaaaagttcgaaaccaaggtacatagaaagaccctgaatccagtgttcaacgaacagttcacatttaaggttccctactccgaactcggcggaaagactctggtgatggcagtttacgatttcgatcgatttagcaagcacgatattattggtgagttcaaagttcctatgaatacagttgattttggtcacgtcacggaggagtggagagacctacagtcagctgaaaaggaggaacaagagaaattgggcgacatctgcttcagtctgaggtacgtccccaccgccgggaagctaaccgtcgtgattctggaggcaaaaaacttgaaaaagatggacgttgggggcttgagcgatccatatgtgaaaatccatctcatgcaaaacggtaaaaggctgaaaaaaaagaagacgaccattaagaaaaatacactaaacccctactacaacgaaagcttttcttttgaggtgcctttcgaacagattcagaaggtgcaagtggtggtgaccgtgttagactacgataagataggcaaaaatgatgcaatcggcaaggtctttgttggctataacagtactggggccgaactgcgtcactggtcggacatgctggctaatccaagaagaccgattgcccagtggcacacattgcaggtcgaagaggaggttgacgccatgcttgctgtgaagaagtag

SEQ ID NO: 207671 - DNA, 1773 bp, synthetic construct
  misc_feature 1..1773: note = Description of Artificial Sequence: Synthetic coding sequence
  source 1..1773: mol_type = other DNA
atgagcggcgactacgaggacgacctgtgccggcgggccctgatcctcgtgtccgacctctgcgctagggttagagacgccgacacaaacgatcgctgccaggaatttaatgatcgcatcagggggtatcccaggggccctgacgccgatatttctgtctcactgctcagtgtgattgtgaccttctgtggaatcgttctactgggtgtcagcctgtttgtcagttggaagctctgttgggtcccatggagagacaaggggggaagcgcagtcggaggaggcccactgagaaaggatttgggtcccggcgtcggacttgcagggttggtgggcgggggaggccaccacttggctgccgggctaggcgggcaccctctccttggaggaccacatcaccacgctcacgctgctcatcaccccccatttgctgaattactagagcctggtagtcttggagggagcgacacaccagaacctagttatctggacatggactcataccccgaagccgctgcagcggcagttgcggccggcgtgaaaccgagccagacatctccggaactgccctctgaaggaggcgccgggtctggcctgctgcttctgccaccctctggcggcggcctgccttctgctcagtctcaccaacaggtcacaagcttagctccaacaacaaggtatcccgctctcccccgtccactgacacagcagacacttaccagccaacccgacccaagcagtgaagagcgccctccagccctgcctctccctttaccagggggtgaggagaaagcaaagctgatcggacagattaagcccgaactatatcagggaacgggacctggaggtcgccgctccgggggaggcccggggagcggcgaagcgggaaccggagcaccatgtgggcggattagtttcgcactgcgatacctgtatggcagcgaccagttggtcgtcagaattctccaggcgctggacctccccgcaaaagatagcaatggattctccgatccctatgtgaagatatacctgcttccagaccgaaaaaagaaattccagaccaaggtccatcgtaagacacttaacccggtctttaatgagaccttccagtttagcgtaccactggctgagttggcccagcgcaagttgcacttcagtgtttatgatttcgatcgcttcagccgacacgacttgatcgggcaggtggtactcgacaacctcctcgagttggctgaacagcctcctgacaggcccttgtggagggatatcgtggaggggggttcggaaaaggccgaccttggggaactgaacttctctctgtgctacctgcccacagcaggaagacttacagttactatcatcaaagcctctaatttaaaagcaatggatctcaccgggttctccgacccctatgtgaaggcaagtctaatcagcgaaggtaggcgtctgaaaaagagaaaaaccagcattaagaagaataccctcaacccaacttacaacgaggcccttgtgtttgatgttgccccggagagtgtggaaaacgtggggctgtcaatcgcggtcgtggactatgactgtattggccataatgaagtgattggagtttgtcgtgttggacccgatgctgcagacccccatggtcgggaacactgggccgaaatgctggcaaatccacgcaaaccagtggaacattggcaccagctcgtggaagaaaaaactgtgacttcgttcactaagggctccaaaggcctttctgagaaggaaaattccgaatag

SEQ ID NO: 207672 - DNA, 1773 bp, synthetic construct
  misc_feature 1..1773: note = Description of Artificial Sequence: Synthetic coding sequence
  source 1..1773: mol_type = other DNA
atgagcggcgactacgaggacgacctgtgccggcgggccctgatcctggtcagtgatctgtgtgcccgcgtccgcgatgccgataccaatgatagatgccaagagttcaacgatagaattcgcggctacccaagaggcccagacgccgatatcagcgtctccttgctctcggtgatcgtgaccttctgtggcatagtgctccttggcgtctccctcttcgtatcctggaaattgtgttgggtgccatggagagacaagggtggttcagcagtgggggggggaccccttcggaaagatctcggacctggcgttggcctggccggattagttggcggggggggacaccaccttgctgcaggtctcggaggccacccactgctcggaggaccccaccaccacgcacacgccgctcatcaccctcccttcgcagagctcctggagccgggctccttagggggctccgacacgcctgaacccagctatcttgatatggactcatacccagaggcagccgcagcagccgtggctgcaggtgtgaaaccttcccagaccagtcctgagctcccttccgagggcggggcagggtctgggctgttgttactgccaccctcgggggggggcctacccagtgcacagagccaccagcaggttacgtctctggctcctactacaagatatcccgctctacctaggccactgacacagcagaccctgacctcacagcctgacccatccagtgaggaaaggccccccgccctgcctctgcccctgcctggcggagaggaaaaagccaaactgatcggccagatcaaaccagagctgtatcaaggaactgggcctgggggccgccggtcgggcgggggtcctggaagtggagaagccggtacaggagccccatgtggaagaattagttttgctttgcgctacctgtacgggtccgaccagctagtcgtccggatcctgcaggccctcgatctaccagctaaagactccaacggattttcagatccgtacgtgaaaatttatctactccccgacaggaagaaaaagtttcaaactaaggttcatcgtaagacactgaacccagtttttaatgagacgttccaatttagtgtgcccctggccgaactggctcaacgcaaattacatttctccgtgtacgattttgaccgcttcagtcggcacgacctcattggccaggtcgtcctggacaacctcctcgaactggccgagcagccgcctgaccgccccctctggcgggacatagtggaagggggatctgagaaagccgatctgggggaattgaacttcagtctttgctacctgccgacagcaggtagactcactgtaaccataataaaggcatccaatctcaaagcgatggacttgacgggcttctcggacccttacgtaaaggctagcctgatctcggaagggaggcggctcaagaagcgcaagacatctatcaaaaaaaataccctgaaccccacatataatgaagccctggtcttcgacgtggccccagaaagcgtggaaaatgtcgggctcagtatcgccgtggtggactatgactgtatcggtcataatgaagtgataggagtgtgtcgcgttggccccgacgctgcagacccgcacggcagagagcactgggccgagatgctggccaacccacgaaaacctgtcgagcattggcaccagttggttgaggagaaaacagtgacctcttttacaaaaggaagtaagggcctttctgaaaaggaaaattccgaatag

SEQ ID NO: 207673 - DNA, 1773 bp, synthetic construct
  misc_feature 1..1773: note = Description of Artificial Sequence: Synthetic coding sequence
  source 1..1773: mol_type = other DNA
atgagcggcgactacgaggacgacctgtgccggcgggccctgatcctggtgagtgacctttgcgcacgcgtccgagacgctgacacaaacgaccggtgccaggaattcaacgatcgcatcagagggtacccacgtgggcctgacgccgacatatctgtttcactactgtccgtgatcgtgacattttgcggtatcgtcctgcttggagtcagcctgttcgtctcatggaagttgtgctgggtcccctggagagacaaggggggaagcgcggtcggtggtggtccactgagaaaggatctgggccctggcgtcggtctcgctgggttggtgggaggcgggggtcaccacttggccgcagggctgggaggccaccccctgctggggggaccccatcatcatgctcacgctgcccaccaccctccgtttgccgaactattagaacctggcagtctgggaggatccgacactcctgaaccttcctatctggacatggattcttatccagaagctgctgctgccgccgttgccgcaggtgtaaaaccctcgcagacttcaccagagcttccaagtgaaggcggcgccggcagtggactactgctactgccgccatccggtggcggccttccttcagcgcagagtcaccagcaagtgacttcgcttgcgcctaccacacgctacccggccctgcctaggccccttactcagcagaccctgacttcacaacctgatcccagtagtgaagaacgtcccccagcacttccactgcctctgcccgggggcgaggagaaagccaagcttataggacaaattaagcctgaactgtatcaggggaccggacctgggggtcgacgatcaggtggcggccctgggtcaggcgaggccggaaccggggccccctgtggacgaatttcatttgcactcaggtatctctatggatcagaccagcttgtagtgcgcatcttgcaggccctggacttacctgccaaagattctaacggattttccgatccttacgttaaaatatatttgctcccggatagaaaaaagaaattccaaactaaggtgcataggaagactctgaacccggtgtttaatgagacctttcaattttctgtacctttggctgaactcgcgcagcggaaacttcacttttctgtgtacgatttcgaccgtttctctagacacgacctgataggacaggtggtcctggataacctgctggaacttgccgaacagccacctgacagaccactgtggcgtgatattgtagaggggggtagcgagaaagccgacctgggcgaactgaatttttcattgtgttacctgccaactgccggccggttaacagttacaattataaaggcctctaacttaaaagcaatggacctgacaggcttttccgatccgtatgtgaaagcctccctgatctcggagggaagacgcctaaaaaaacgaaagacatcaattaaaaagaacacgctgaaccccacttacaacgaggctttagtctttgacgtcgcccccgagtcagtggagaatgtcggactgagtattgccgtcgtcgactatgactgcatcgggcacaacgaagtcatcggcgtgtgccgcgttggccccgatgctgcagacccccacggacgggagcactgggcagagatgctggcgaacccccgtaaacctgttgaacactggcatcagttggtggaagagaaaacagtaacatccttcactaagggtagcaagggcctctctgaaaaggagaatagcgagtag

SEQ ID NO: 207674 - DNA, 1773 bp, synthetic construct
  misc_feature 1..1773: note = Description of Artificial Sequence: Synthetic coding sequence
  source 1..1773: mol_type = other DNA
atgagcggcgactacgaggacgacctgtgccggcgggccctgatcctcgtgtccgacctgtgcgccagagtccgggacgctgatactaatgataggtgccaggagtttaacgatagaatacggggctatcctcgtggccctgatgccgatatttctgtaagcctcctgtcagtgattgtcaccttttgcgggattgtactgctgggagtgagtctcttcgtgagctggaaactctgctgggtcccatggagggataagggtgggagtgccgtcggtggtggcccactgcggaaagacctggggccaggcgtgggtctcgccgggttggtcggggggggcggtcatcacctggctgctgggcttggaggacaccccctgcttggggggccccaccaccacgctcatgctgcccaccatcccccattcgctgaactgctagagccggggtcgctcggcggctctgatacccccgaaccttcatacctcgatatggactcctatccagaagcagcggcggccgcagtggcggccggggtgaaaccctcccagacgtcgcctgaactcccctccgagggcggggcaggatctggccttctgttgctgccccccagcgggggcgggttacctagtgctcagtcacaccagcaggttacatcactggcccccactacgcggtacccagcccttccccgccctctgacccaacagaccttgaccagtcagccagatccctcctctgaggagagaccccccgctctgcccttacctttgcccggaggggaggagaaagccaaactgataggccagataaagcccgagctgtaccagggcacaggtcctgggggcaggagatctggaggtggcccaggatccggcgaggccggaactggtgcaccttgtggaaggatcagctttgccctccggtacttatatggttccgatcaactggtcgtgagaatccttcaggctctggacttacccgcgaaggactccaacggcttcagtgacccttacgtgaagatctacctgttacctgaccggaaaaagaaatttcagacgaaagttcaccgcaagaccctgaacccagtttttaacgagacctttcaatttagtgtgccactggctgagctcgcacaacggaaactgcatttcagtgtgtacgactttgatcggttctcccggcacgaccttatcggtcaagtggttctggataacctgctggagctcgcggagcagcccccagaccggcctctctggcgggacatcgtggagggtggttcagagaaggccgaccttggcgagctgaacttcagcctgtgctatctgcctaccgcgggcagattaacagtgactatcatcaaggcctctaatctaaaagccatggaccttaccggtttctctgacccctacgtgaaggcttcacttatttccgaggggagacgcttgaagaaaaggaaaacatccattaaaaagaacaccctgaatcccacttataacgaagcattggtgttcgatgtggcaccagagtcagtcgaaaacgtggggctcagcatcgccgtggtagactacgattgtataggccacaatgaggtgatcggtgtgtgtcgagtgggacctgacgcggctgacccccacggacgcgagcattgggcagaaatgctggctaatccccggaaaccagtcgagcactggcaccaactggtagaagagaaaaccgtaacctcattcactaaagggtccaaaggtctctccgaaaaggaaaactctgaatag

SEQ ID NO: 207675 - DNA, 1278 bp, synthetic construct
  misc_feature 1..1278: note = Description of Artificial Sequence: Synthetic coding sequence
  source 1..1278: mol_type = other DNA
atggcccccatcaccaccagccgggaggagttcgacgagatccccacggtggttggcatcttcagtgcctttggcctggtgttcactgtgtctttatttgcttggatctgttgtcagagaaaatcctccaaatcgaacaagacccccccatataaattcgtgcatgtcctcaagggcgttgacatttatccggaaaacctcaatagcaagaagaagtttggggcagacgataaaaatgaagtgaaaaacaaacctgcagtgccaaaaaatagtctacatttagatctggagaaacgcgatctgaacgggaatttccccaagaccaacctgaagccagggtcgccctctgatttagagaatgcaacgcccaaattgttcctcgaaggagaaaaggagtctgtgtcccctgagtctttgaagtcctctacaagcctcacgtctgaagagaaacaggaaaagttggggactttgttctttagccttgagtacaactttgaaagaaaggcattcgtcgtcaacattaaagaggcacggggccttcctgccatggacgagcagagtatgacaagcgatccctacattaagatgacaattctacccgagaaaaagcacaaagtgaagaccagggtcctgaggaaaacgcttgatcctgctttcgatgaaacattcactttttatggtatcccttatactcagattcaagagctcgccttgcatttcaccatcctgtcctttgaccgtttctccagagatgatatcattggcgaggtattgatacctctgagcggtattgagctcagtgagggtaagatgttaatgaaccgcgagataatcaaacgaaacgtccggaagagttctggccggggagaactcctcataagcctgtgctatcagtccaccaccaataccctgaccgtcgtggtgctaaaagcccggcatctgcccaaatctgacgttagtggccttagcgacccgtacgtgaaggttaacctttaccatgccaaaaagcgcatctcaaagaaaaaaacgcacgtgaaaaagtgcactccaaacgccgtgtttaacgaactgttcgttttcgatattccgtgcgaaggactggaagacatcagtgtggagttcctggtactcgattcggagcgtggttcacgcaatgaagttatcggacagctggttctaggagccgctgccgaaggaacagggggcgaacattggaaagagatttgcgactacccgcggcggcagatcgccaaatggcatgtcttatgtgacggttag

SEQ ID NO: 207676 - DNA, 693 bp, synthetic construct
  misc_feature 1..693: note = Description of Artificial Sequence: Synthetic coding sequence
  source 1..693: mol_type = other DNA
atggacctgctgagcgagaagaagcacaaggtgaagacccgggtgctgagaaaaaccttggaccctgcatttgacgagacctttaccttctatggcattccctatacccagatacaagaactcgccctccactttactatcctttcgttcgatcgattttccagggatgatattatcggtgaggtcctgattcctctctcaggtattgagctgtcagagggcaagatgcttatgaatagggaaattataaagcgcaacgtcaggaagtcctccgggcgcggcgaattgttgatttcgctgtgctatcagagcacaacaaacacgttgactgttgttgttttgaaggcgaggcacctgccaaagtccgatgttagcggattgtccgacccatacgtcaaagttaacttgtatcacgcgaaaaagagaatttcaaagaaaaaaacccatgtgaagaagtgtactccgaacgccgtgttcaacgagctgttcgtattcgacattccttgcgaaggcctggaagacatcagtgtggagtttttggtgctggacagcgaacgcggcagtcggaatgaggtgattggtcaattagtactgggagccgcagccgaaggtactggaggagagcattggaaggagatctgcgactatcctcggcgccagattgctaaatggcacgtgttatgcgacggatag

SEQ ID NO: 207677 - DNA, 1476 bp, synthetic construct
  misc_feature 1..1476: note = Description of Artificial Sequence: Synthetic coding sequence
  source 1..1476: mol_type = other DNA
atgcccggcgcccgggacgccctgtgccaccaggccctgcagctgcttgcagagctctgtgccagaggtgcgctcgaacatgactcctgtcaggactttatctatcacctccgcgacagagcgaggcctcgactgagagaccccgacatctcggtgtccctgctgactctcgtggtgaccgcttgcggactggccttatttggcgtgagtttatttgtgtcatggaagttgtgttgggtcccatggagagaacgtggcctgccttctggctccaaggacaacaaccaggaaccactcaattatatggatactgagaccaatgaacaggagaattccgaggattttctggacccgccaactccctgccctgatagttcaatgaaaatctcccatacaagtcctgatatccctctgtctacccaaacagggatacaggagaattgcgctcatggcgtgcgcgtacagcgacaggtaactgagccaaccagctctgctagacataactctatacgccggcagctcaacctctcaaatcccgattttaatatccaacagctgcaaaaacaggaacaattaacagggatcgggcgcatcaagcccgaactgtataaacaacgtagtttggataacgacgatggaagacgttctaactccaaagcttgcggcaagctgaatttcattctcaagtacgactgtgatctggagcaactaatcgtgaagatacataaggccgttaacttgcctgctaaggatttctctgggacaagtgatccttatgtcaagatttatctcctcccagatagaaagaccaagcatcagacaaaagtccacaggaagaccctgaaccccgtttttgacgaagtgttcctttttccagtgccttataacgatctggaggcgagaaagctgcacttcagtgtctacgatttcgatcggttctcccgtcacgacttgatcggccaagtggtggtagatcatttccttgatcttgctgattttccacgcgaatgcatcctttggaaggacattgagtatgtaaccaacgacaatgtcgacttgggtgagttgatgtttagtctgtgctacctcccaaccgccgggaggctgaccatcactataattaaggctcgcaaccttaaggctatggatattaccggggcatcagacccttatgttaaagtctcattgatgtgcgacggcagacggctgaaaaaacgcaagacgagcacaaagaggaataccctgaatccggtgtacaacgaggcaatagtctttgatgtcccccctgaaaatatcgatcagatccacctttctattgcagtcatggactatgatagggtaggccacaatgaaattattggcgtttgtcaggtgggaaacgaggctgagagattaggaagagaccactggtccgaaatgctgtcgtatccacgcaaaccgattgctcattggcatagcctcgtagaaaagaggtag

SEQ ID NO: 207678 - DNA, 960 bp, synthetic construct
  misc_feature 1..960: note = Description of Artificial Sequence: Synthetic coding sequence
  source 1..960: mol_type = other DNA
atgctggccaaggtggtggagggcgacctggccttcaagggcggccgggatatcagcgtctcactgttgaccctggttgtgacggcctgtgggctcgcgctgtttggcgtttctcttttcgtgagctggaaactttgctgggtcccttggcgggaacgaggcctccctagcggatctaaagataataaccaagagcctctaaattatatggatactgagacgaatgagcaggagaactctgaagatttcctggacccgcccacaccctgtcctgatagtagcatgaaaatctcacacaccagtcccgatattccactatcaacccagaccggtattcaagaaaattgcgctcacggcgtacgggttcagcgccaggtcactgagcctaccagctcagcaaggcataattccattcgcagacagttaaatctcagcaacccggattttaatattcagcagttacagaaacaggagcaactgacgggcattgggcgcatcaaacccgagttgtacaaacaaaggtctcttgacaacgacgatggcagaaggagtaactctaaggcctgtggcaagctcaatttcattcttaagtatgactgcgacctggaacagctgattgttaagatccacaaggccgtcaacctgcccgcaaaggattttagcggcacctccgacccgtatgttaaaatctacctgctccccgacaggaagaccaaacaccagaccaaagttcatcgaaagaccctcaacccagtattcgatgaggtgtttctattcccagtcccctataacgatcttgaagccaggaagcttcacttctcagtgtacgatttcgatagattttcacgacatgacctgataggtcaggtggtcgtggaccactttttggatctcgcagatttcccgagagagtgcatcttgtggaaggatatagaatacgttaccaacattctatcctag

SEQ ID NO: 207679 - DNA, 1161 bp, synthetic construct
  misc_feature 1..1161: note = Description of Artificial Sequence: Synthetic coding sequence
  source 1..1161: mol_type = other DNA
atgttccccgagccccccacccccggcccccccagccccgacaccccgccagatagttcgaggatctcacacgggcccgtgccgccatgggccctggcaacaatcgtgctggtatctgggctcctcatttttagctgctgcttttgcctgtatcgcaaatcctgccggaggagaaccggaaagaagtcacaggcccaagcccaggtccatttgcaggaggtgaagggacttgggcagtcatacatcgataaagttcaacccgaggtcgaagagttggagcctgccccatccggccccggccagcaggttgccgataagcacgagctgggaagacttcagtactcgctcgactatgattttcagtcaggccagttactcgtgggcatcctgcaagccatgggcttggccgccctggatctgggaggtagcagcgatccttacgtccgcgtgtatctgctcccggataaaagaaggcgatatgagaccaaggtacacagacagacattaaatcctcattttggagaaacttttgccttcaaggtcccgtatgtcgagctgggagggcgcgtgctcgtcatggccgtgtatgacttcgatcggttcagccggaatgacgctattggcgaagtgcgcgtcccaatgagttcagtggaccttgggcgccctgtacaagcttggcgagagctccaagccgctccgagggaagagcaagaaaagttaggcgacatctgcttctccctgaggtatgtgcctaccgctgggaagctgactgtcattgttctggaggcgaagaacttgaaaaagatggacgttggcgggctatccgatccctatgttaaggttcatctcctccagggcggaaagaaggttaggaaaaagaagactaccatcaaaaagaacaccctcaatccctattacaacgaggccttctcctttgaagttccttgtgaccaggttcaaaaagtccaagtggagctcaccgttctagattacgataaactcgggaagaacgaagcaatagggagagtcgccgtgggcgccgccgctggtggcgccgggcttcgccactgggctgacatgctggccaaccccagacgccccatcgcccagtggcatagtctgagacctcccgaccgggtccggctgctacctgcaccttag

SEQ ID NO: 207680 - DNA, 1161 bp, synthetic construct
  misc_feature 1..1161: note = Description of Artificial Sequence: Synthetic coding sequence
  source 1..1161: mol_type = other DNA
atgttccccgagccccccacccccggcccccccagccccgacaccccacctgactcctctcgcatcagccatgggcccgtcccaccatgggctctggctaccatcgtccttgtatctggactcctgatattcagctgttgtttctgcctgtaccgtaagagttgcagacgccgaaccggcaagaaatcacaagcacaggcccaggtgcatttgcaggaggtgaaaggactgggtcagtcctacattgacaaggtccagcccgaggtcgaagaactggagcctgccccttctggacctgggcaacaggtcgcagataaacacgagcttgggagattacagtatagtttggattatgatttccagtcaggacagttgctggtaggtatccttcaagcgatgggcctcgctgccctggatctgggcggaagctcagacccatacgtcagagtgtacttgcttcccgacaagcggcgacgctatgagaccaaggtgcaccggcaaactctgaacccacattttggcgaaacgtttgctttcaaggtcccttatgtggagttgggcggcagagtgctggtaatggcagtctacgacttcgaccgctttagccgcaacgatgctatcggggaggtgagggtgcccatgtctagcgtggatctgggtaggccggtccaggcttggagagaacttcaggccgcccctcgggaggaacaagagaaacttggagacatttgcttctctctgagatacgtgcccaccgccggaaagctcacggtcattgtactcgaagccaagaatctcaaaaagatggacgtgggggggctgagtgatccatatgtgaaggtgcacctcctgcagggagggaagaaggtgcgaaaaaaaaagacaacaatcaaaaagaacaccctgaacccttattataacgaggcatttagctttgaggttccgtgcgatcaggtgcagaaagtgcaagttgaactgactgtcctggattatgataagctcgggaagaacgaagccattggtcgtgtagcggtcggcgccgcagctggcggcgcaggcttgcgacactgggccgatatgctggccaacccccgtcgccccatcgcacaatggcacagtctaaggcctcccgatcgagttcgcctcctgcctgctccctag

SEQ ID NO: 207681 - DNA, 1149 bp, synthetic construct
  misc_feature 1..1149: note = Description of Artificial Sequence: Synthetic coding sequence
  source 1..1149: mol_type = other DNA
atgacccggggcggctgccccgtgagcgcccggctgttcgcccagcgcccacatggatcttggtcaagcctgctgtgtgtcgggctcaaaggtcgactcggctgggagtgggggacacgtgtcctcgaatgcctttgccgcaaagacagccgaactccccctccctgttctcgcagcccacagcccagaggcttacatcggcccaccaggctgcctactccagtcgcttctgcaactgcacaagtacagcccgaggtagaagaattagagccagcaccgtccggcccaggccaacaggtcgcagataaacacgagttgggccggctccagtacagcctggattacgacttccagtccgggcagcttctggtgggcatcttgcaagcaatgggcctagctgcactcgacttaggcggctcctccgacccatacgttcgcgtgtatctgctccccgataagaggcggaggtatgaaaccaaagtgcaccgccagacactcaatccgcattttggtgaaacatttgccttcaaggtcccatacgtcgagctggggggccgggtgctggttatggcggtgtacgactttgatcgcttcagccgcaatgacgccataggagaggtgagagtcccaatgagctccgtggacctgggccgccctgttcaggcttggcgtgagctgcaggctgcccctcgggaagaggaaaaacttggggatatctgtttctcactgcgctatgtgcctacggctggaaaactgacggtgattgttctcgaggccaagaatctcaagaaaatggatgtaggcggactgtccgacccttacgtgaaagtccacctgctccagggcggaaaaaaagtacgcaagaagaagaccactatcaagaagaatacactgaacccatactataacgaagcgttttccttcgaagtgccctgtgatcaggtgcaaaaggtccaggtggagctgaccgtcctcgattacgataaactggggaagaatgaagcgatcggccgggtggccgtgggtgcagctgcagggggtgccggtctacgtcactgggcagacatgttagccaatcctaggcgaccaattgcccagtggcattcattgcgaccaccagatcgtgtgagactactgccggctccgtag

SEQ ID NO: 207682 - DNA, 1533 bp, synthetic construct
  misc_feature 1..1533: note = Description of Artificial Sequence: Synthetic coding sequence
  source 1..1533: mol_type = other DNA
atgagcggcgtgtggggcgccggcggcccccggtgccaggaggccttagccgtgttggcaagcctatgccgggcaagaccaccaccccttggccttgacgtggaaacctgtcgatcttttgaattgcagcccccagagagatctccctctgcagccggtgccggaactagcgtatcactcctagccgtcgtcgttatcgtgtgcggcgtcgcactggtggcagtattccttttccttttctggaagctgtgttggatgccgtggcgaaataaagaggcatcatcaccttcttcagccaaccctccactcgaggctctgcaatcaccctcattccgcggtaatatggctgacaagctaaaagacccgagcaccctgggcttcctagaggcagcagtaaaaatatcacataccagtccagacatccccgccgaagtgcagatgtccgtaaaggagcacatcatgagacacacacggctgcagcggcaaacgacagagcccgcctcttcaactcggcatacatcatttaagaggcacctgccacgtcagatgcatgtgagtagcgtcgactatgggaacgagctgccccccgccgccgaacagcctacatccattgggaggattaagcctgaattgtacaaacaaaagtctgttgatggagaggacgctaaatctgaggctaccaagagttgcggtaaaataaacttctcactaagatatgattacgagacggagacgttgatcgtacgtatcctgaaggcatttgatctgcctgcaaaggatttctgtggaagcagtgacccctacgtgaagatctatttgcttcccgataggaaatgcaagctgcagacccgggtccacagaaaaacactgaaccccacctttgacgaaaacttccacttcccagtaccatacgaagagctcgctgacagaaagctccatctgagcgtgtttgatttcgatcgcttttctcggcacgatatgatcggtgaggttatcctggataacctgtttgaagccagcgacctgagccgcgaaaccagcatttggaaggacatccagtatgcgaccagtgaatccgtcgacctgggagagatcatgttcagcttatgctacctgccaactgccggcaggctcactttgactgttattaagtgtcgaaacctgaaggcaatggacattactgggtatagtgatccttatgtcaaagtttcccttctgtgtgacggtaggcggctcaaaaagaagaagaccactattaaaaaaaacacgctgaaccctgtgtacaatgaggcaatcattttcgacatcccgccagagaatatggaccaagtgtcacttctcatttctgtgatggattatgatcgcgttgggcacaacgagattatcggcgtatgcagggtggggatcacggccgaagggttaggccgggaccactggaacgagatgctggcttacccacggaagcccatcgcacactggcatagcctggttgaggtgaaaaagtcttttaaggagggaaacccacgactgtag

SEQ ID NO: 207683 - DNA, 1278 bp, synthetic construct
  misc_feature 1..1278: note = Description of Artificial Sequence: Synthetic coding sequence
  source 1..1278: mol_type = other DNA
atgccctggcggaacaaggaggccagcagccccagcagcgccaacccaccgttggaggcccttcagagtccctccttccggggcaatatggcagacaagctcaaggacccaagcaccctaggtttcctggaggccgcggtgaaaatctcacacacaagtccagatattcccgcggaggtgcagatgtccgtaaaagaacacatcatgcggcacacgcgcctacagcgacagacgacagagcctgctagctccaccagacacacctccttcaagcggcacctgccccggcagatgcatgtgagctcagtggattacggcaatgagctgccccctgctgctgaacagcccacttccataggccggattaaacccgaactttacaaacagaagagtgtcgatggagaggatgctaaatccgaagctaccaaaagctgtggtaaaatcaacttttctctcaggtatgattatgaaacagaaacccttatcgttcgcattctcaaagcattcgacttgcccgcgaaagatttctgtggaagttccgacccatacgtgaaaatttatttgcttcccgatcggaagtgtaagttacagaccagagtgcaccggaaaactttgaaccccacatttgatgaaaatttccattttcccgtcccctacgaagaactcgctgatcggaaactgcatctgtctgtgttcgacttcgaccgtttttctaggcatgacatgatcggagaggtgatcttggataatctgtttgaggcctccgacttatcaagagagacatctatttggaaggacattcaatacgctacatcggagtccgtggacctgggagaaatcatgttttccttgtgctatctccctacagcaggccgcctgacgctgacggtgatcaaatgccgaaacctgaaagccatggacatcaccggctactctgacccatatgtgaaagtgtctctgctgtgcgatggaaggcggctaaagaaaaagaagacgactatcaagaaaaatacattgaaccccgtgtataatgaagcaatcatttttgatattccccctgagaatatggaccaggtttccttgctgattagtgttatggattatgaccgcgtgggacacaatgagataattggcgtgtgtcgtgtcggtatcaccgcggaggggctgggacgtgaccactggaatgagatgttagcttaccctagaaagcctatagcgcactggcacagcctggttgaggtgaagaagagtttcaaggagggcaaccctaggctgtag

SEQ ID NO: 207684 - DNA, 1278 bp, synthetic construct
  misc_feature 1..1278: note = Description of Artificial Sequence: Synthetic coding sequence
  source 1..1278: mol_type = other DNA
atgccctggcggaacaaggaggccagcagccccagcagcgccaaccctccattggaggcactgcagagtccctcattcagaggaaacatggcagacaagctgaaagatccttccacattgggctttctggaggcggccgttaagatctcacatacatcaccagatataccggctgaggtgcagatgagcgttaaagaacacataatgagacacaccagactccagcgccaaacaactgaaccggcttcatcaacgcggcatacctctttcaagaggcacttgcctaggcagatgcacgtgtcttcagtggactacggtaacgaactgccaccagccgccgagcagcctactagtatcgggaggatcaaacccgagctctacaagcagaagagcgttgatggggaagatgccaagtctgaggcgaccaaatcttgcgggaaaatcaattttagtttgcggtatgactatgagaccgagacgcttatcgtcagaattctcaaagctttcgatcttccagcaaaagatttttgtgggtcatctgacccatacgtgaaaatttatttgttgcctgaccggaaatgcaagctccaaacccgagtgcacaggaaaacactgaatcctacattcgatgaaaatttccattttcccgtgccatacgaggagctcgctgatagaaaactgcacttgtccgtgtttgattttgacagattttcacgacacgacatgattggagaggtgatactcgataacctatttgaggcatctgatttgtcacgggaaacttccatatggaaggatatacagtacgcgacctctgaatctgtcgatctcggggagatcatgttttctctgtgctatcttcccactgcaggtaggctcactctgacagtgattaaatgcaggaacctgaaagccatggacattaccggatattcagatccctacgttaaggtgagcttgttgtgtgacgggcgcaggctgaagaaaaaaaagactaccatcaagaagaatactttaaacccagtgtataacgaagcaatcatctttgatataccaccggagaacatggaccaggtgtctttattaatttcagttatggactatgacagggtgggacataatgagatcattggtgtgtgccgtgtgggaatcacagctgagggtctgggccgggatcattggaatgaaatgttagcatacccccgcaagcccatagcccattggcattctctcgtggaggtcaagaagagctttaaggagggtaacccacgactgtag

SEQ ID NO: 207685 - DNA, 1533 bp, synthetic construct
  misc_feature 1..1533: note = Description of Artificial Sequence: Synthetic coding sequence
  source 1..1533: mol_type = other DNA
atgagcggcgtgtggggcgccggcggcccccggtgccaggaggccttggccgtcctggctagcctctgtagggcacggccaccaccactggggctggatgtcgagacgtgtcggtcatttgaattgcagccaccagagagatctccttcagcagccggggccggtacgtcagtgtcactcctcgccgtggtggttattgtgtgtggggttgctctggtggctgtattcttgttcctgttctggaagttatgctggatgccctggaggaataaagaggctagtagccctagcagtgccaatcctccacttgaagcactacaaagcccttccttcaggggtaatatggctgacaaactgaaagatccaagcaccctaggctttctcgaggcggctgtgaaaatcagccatacttctcccgacattccagctgaagtgcaaatgtctgtaaaggagcacattatgcggcacacccgactgcaaagacagactactgagccagcttccagcacgcggcatacatcatttaagaggcatctgccccggcagatgcatgtttcaagcgtggactatggaaatgagctacccccagctgccgaacagccgacttctataggccggattaagccagaactatataagcagaagtctgtggacggggaggatgctaagtctgaggcaaccaaatcatgcggcaaaatcaacttctcactccgttacgactatgaaacagaaacactgattgttaggatcctaaaggcgttcgacttgcctgccaaggacttttgtggcagctccgacccttatgttaaaatatacctcctcccggaccggaagtgcaaacttcaaaccagggtacatagaaagacgctcaaccccaccttcgacgagaacttccacttccctgtgccctatgaagaactcgccgatagaaaactgcacctctctgtttttgattttgataggttctcacgacacgacatgattggggaggtaattctagacaacctattcgaggcctctgacctctcccgtgagactagtatatggaaggatatacagtacgccacatccgaatctgtcgatctgggagaaattatgttttccctctgttatcttcctaccgccggacggctcactcttaccgtgattaagtgcaggaacttgaaggccatggatattaccggctacagcgatccttatgtgaaagtctctttactgtgcgacggcagacggctcaagaagaagaagaccaccatcaaaaaaaatacccttaatcccgtctacaacgaagccatcatttttgatattcccccggaaaacatggatcaagtgagtctgttgatcagtgtcatggattatgatagagtaggacataacgaaatcatcggagtgtgcagggtgggcattaccgccgaaggattagggcgggatcattggaacgaaatgctcgcatacccacggaaaccaatcgctcactggcattctctagtggaggtgaagaaaagcttcaaggagggaaatcctagactgtag

SEQ ID NO: 207686 - DNA, 288 bp, synthetic construct
  misc_feature 1..288: note = Description of Artificial Sequence: Synthetic coding sequence
  source 1..288: mol_type = other DNA
atgccctggcggaacaaggaggccagcagccccagcagcgccaaccctccgctggaagcccttcagtctccttcattcaggggcaacatggctgacaagcttaaagatccatcaaccttgggttttctcgaggctgctgtgaaaatcagtcacacatcccccgacattcccgccgaagtgcagatgtctgtcaaagagcatataatgaggcatacaaggcttcagaggcagacaacggaacctgcaagcagtacacgtcacacttcattcaaaagacacttgccctag

SEQ ID NO: 207687 - DNA, 261 bp, synthetic construct
  misc_feature 1..261: note = Description of Artificial Sequence: Synthetic coding sequence
  source 1..261: mol_type = other DNA
atgccctggcggaacaaggaggccagcagccccagcagcgccaacccacccctggaagcgctgcagtcccccagcttccgaggcaatatggccgacaaacttaaggacccgtctacccttggctttttggaagccgcggtaaagatatctcacacgagtcctgacatcccagccgaagtgcagatgagtgttaaggagcacatcatgagacatacacggctacagcgccagacgaccgagcccgcgtcttcaactcgctag

SEQ ID NO: 207688 - DNA, 1212 bp, synthetic construct
  misc_feature 1..1212: note = Description of Artificial Sequence: Synthetic coding sequence
  source 1..1212: mol_type = other DNA
atgtaccgggaccccgaggccgccagccccggcgcccccagccgggacgtgctcttagttagcgctattattaccgtctcactgtccgtgacagttgtgctgtgcggactgtgccattggtgtcagcgcaagctaggcaagcgctataagaatagcctcgaaaccgtgggcactccagactccggcaggggcaggtctgagaagaaagccatcaaacttcccgctggaggtaaagcagtcaatactgcccctgtgccaggccagaccccacacgatgaatctgataggagaactgaaccccgcagcagcgtatcagatctggtaaactccttaactagcgaaatgctcatgttaagccccggatcagaggaagacgaggcccatgagggctgctctcgggaaaatctcggtaggatccagttctccgtgggctataacttccaggagagcactctgaccgtgaaaattatgaaggctcaggagctcccagcaaaagatttctccggtacctctgaccctttcgtgaaaatatacttactgcctgacaagaaacacaaactggaaacaaaggtgaaacgcaaaaatctgaatccccactggaacgagacctttctcttcgagggatttccatacgaaaaggtagtgcagcggattctgtacctccaggtactcgactatgataggttttcacggaacgatccaataggagaagtgtctattcctctgaataaggttgacctgacgcagatgcagacattctggaaggatctgaagccatgcagtgacggatccggttccaggggagaacttctcctgagtttgtgctataatccctctgcaaactccatcattgtgaacataattaaggctcgcaatctgaaggccatggacatcggcgggacttctgacccttacgtcaaagtttggttgatgtacaaagacaaaagagtcgagaagaagaaaacggtgaccatgaaaagaaacctgaaccctatatttaacgagtcttttgctttcgatataccgacggagaagcttagggaaaccacgattatcataaccgtgatggataaagacaaattgtcacggaatgacgtgataggcaagatctatctttcgtggaagtccggcccaggtgaagtgaaacactggaaagatatgatcgctagacccaggcaacccgtggcacagtggcaccaactcaaggcgtag

SEQ ID NO: 207689 - DNA, 1266 bp, synthetic construct
  misc_feature 1..1266: note = Description of Artificial Sequence: Synthetic coding sequence
  source 1..1266: mol_type = other DNA
atggccgtggacgtggccgagtaccacctgagcgtgatcaagagccccccgggatgggaagtaggcgtctacgccgcaggggcgttggccctgctgggtatcgcagccgtttccctgtggaagctctggaccagcggctcgttcccaagtccatcccccttcccaaattacgattatagatatctgcagcagaaatacggcgagagctgtgctgaagccagagagaagcgcgtgcctgcctggaacgcccaacgcgcaagcaccagggggcccccaagtcgtaaggggagcctgtctattgaagatacatttgagagcatcagcgaattgggcccattagagctgatggggagagaactcgacctggccccgtatggaactttaaggaaatctcaatcggctgattcacttaactccatctccagtgtgtctaatacattcggacaggattttaccctgggacaggtagaggtgagcatggaatacgacacagcctcgcatactctcaacgtcgctgtgatgcagggcaaggacctgcttgaaagggaggaggcttcttttgaatcttgcttcatgagggtctcactcctgcctgatgagcagattgtggggatatcccgcatacagaggaacgcttacagcatcttcttcgatgaaaaatttagcatccctctcgatccaactgccctggaagaaaaaagcctgaggtttagcgtgtttggtatcgacgaggacgaacggaacgtctccacaggggtcgtcgagcttaagttaagtgttcttgacctacctttgcaacctttcagcggctggttatatcttcaagaccagaataaggccgccgacgccgtcggcgaaatcctcctctccctgtcgtacctaccaacggctgaacggctgaccgtggtggtcgtcaaagcgaaaaacctcatctggaccaacgacaagacaaccgccgacccctttgtcaaggtgtacctactgcaagatggtcgaaagatgtcaaagaaaaagacagccgtgaaacgagacgacccaaaccctgtattcaatgaggcgatgatcttctcagtgccggcaatagttctgcaagacctctcacttagggtcacagttgccgaatccagttcagacggaaggggtgataacgtgggtcatgtgattattgggcccagcgcaagcggcatgggcactactcattggaaccagatgctggcgactttaagaagacccgtctctatgtggcatgctgtccgcagaaactag

SEQ ID NO: 207690 - DNA, 1266 bp, synthetic construct
  misc_feature 1..1266: note = Description of Artificial Sequence: Synthetic coding sequence
  source 1..1266: mol_type = other DNA
atggccgtggacgtggccgagtaccacctgagcgtgatcaagagccctcccggctgggaagtaggggtatacgcggctggggccctcgcgctgctcggcatagccgctgtctccttgtggaagctttggactagcggatctttcccctcccccagcccattccccaactacgactacaggtacctacaacagaagtatggcgaaagctgcgcagaagcaagagagaaaagggtgccagcatggaacgctcagcgcgcgtcgacccggggcccccccagcagaaaaggctccctgagcatagaggacactttcgagagcatctcagaactcgggccactagagttaatgggccgggaattagacctggcaccttatggcactctgcgaaagtcccagtctgctgactcactcaattctatctcgtcggtgtctaatacttttgggcaggacttcacactcggtcaggtggaagtgtccatggaatacgacaccgcgtctcacaccttgaacgtggccgtcatgcaaggaaaagatttacttgaacgcgaggaggccagcttcgagagttgcttcatgagggtgtcactgttacctgacgagcagatcgttgggattagccgcatccagagaaatgcttactctattttttttgacgagaaattttccattcccctggaccctacggccttggaggagaaatcactcagattcagtgttttcgggattgacgaggacgagcggaacgtcagcacgggcgtcgttgagctgaaactttccgtcctggatctcccactccaacccttctctggatggttgtacctacaggatcagaacaaagccgcagatgctgtcggcgagattttgctgtcactgtcttatctcccaacagcggaaagactgaccgtcgtggttgtgaaggccaagaacctgatatggacgaacgacaagacgaccgctgaccccttcgtaaaagtgtatctgctccaagatggccgtaagatgagcaagaagaagaccgcggtgaaaagagatgatccaaatcctgtgttcaacgaggcaatgattttctccgtgccagcaatagtgttgcaggatctgtccctcagagttaccgtagccgagtcaagtagtgatggccggggagacaatgtgggtcatgttataatcgggccttcagcctccggaatgggcactacacactggaatcagatgctggccactcttaggcgccccgtgtcaatgtggcatgccgttagaagaaactag

SEQ ID NO: 207691 - DNA, 1266 bp, synthetic construct
  misc_feature 1..1266: note = Description of Artificial Sequence: Synthetic coding sequence
  source 1..1266: mol_type = other DNA
atggccgtggacgtggccgagtaccacctgagcgtgatcaagagcccacccggctgggaagtcggtgtctatgccgcaggggccctggccctgctgggcattgcagctgtctccttatggaaactgtggactagtgggtccttcccgagcccttcaccttttccgaactacgattaccgctatctccaacagaagtatggtgaatcctgcgctgaggcccgggagaaacgcgtcccagcatggaatgcccaaagagcatctacaaggggtccaccttcgagaaaagggtcattatccatcgaggacacctttgagagcatctcagagctcggccccttggagctgatgggccgggagcttgatctggccccctatggcacacttaggaagtcccagagcgcggacagcctgaactctatctcaagtgtgagtaatactttcggacaggatttcactctcggccaggtggaagtctcaatggaatacgacacggcaagccacacactgaatgtcgccgtgatgcaaggaaaggatctgctggagcgcgaggaggcttcatttgagtcatgttttatgcgggtatcgctgttaccggacgaacagatcgtgggcatctccagaatccagcgcaatgcctattccatattctttgacgagaagttcagtattcccctggatcccactgctcttgaagagaagtctttacgtttttcagtatttgggattgacgaggacgagcgaaacgtgtccactggcgttgtcgagttgaagctgagcgtcttagatttgccactgcagccctttagcggatggctgtacctgcaggatcagaacaaagcagcggacgccgtgggggaaattctcttaagcctaagctatctgcccacagcggagagactgacagtggtcgttgtaaaggccaaaaatctaatctggacaaatgataagactaccgcagacccgttcgtgaaggtgtatctgttgcaagacggtcgcaaaatgtctaagaaaaagactgccgtcaagcgcgacgatccaaatcctgtgttcaatgaagcgatgattttctcagttcccgctatcgtgctacaggacctatccctgcgggtgacagtagccgagagtagctcagacggcagaggagataatgtgggtcacgtgatcataggcccttccgcctctggaatgggcacaactcactggaaccaaatgctggctacactgagacggcctgttagtatgtggcatgccgtgagacggaactag

SEQ ID NO: 207692 - DNA, 1281 bp, synthetic construct
  misc_feature 1..1281: note = Description of Artificial Sequence: Synthetic coding sequence
  source 1..1281: mol_type = other DNA
atggtgctgagcgtgcccgtgatcgccctgggcgccaccctgggcaccgctacttccatactggccctgtgcggcgttacttgcctttgccgacatatgcacccaaagaaaggtttactgcccagagaccaggaccctgacctcgagaaagctaagccctccttgctggggtcggcccagcaattcaacgttaaaaaaagcactgagccagtccagcctagggctctactgaaatttcccgacatttatggaccccgccccgctgttacagcgcccgaggttattaattacgccgactatagcctccgctccacagaggagccaacagcacccgcatccccacagccgccgaatgattcaagacttaagcggcaggtcacagaggaactgttcatcctgcctcagaatggggtggtcgaggacgtgtgtgtcatggagacttggaatcccgagaaggccgcctcctggaatcaagctccgaagctgcattactgccttgactatgactgccagaaggccgagcttttcgtaacgaggctagaggcagtcacatccaatcacgatgggggctgtgattgctacgtgcagggcagtgtggccaatagaaccggctcagtcgaggcccagacagcccttaagaaacggcaattgcatactacttgggaagaagggctcgttcttcccttggccgaggaggagttgccaacagccacactcacgcttacactccgaacatgcgacagattcagtcgtcactccgtggctggagaattgagactgggactagacgggacatccgtgccgctgggcgccgcccagtggggagaattaaaaacgagcgctaaagaaccaagtgccggcgctggcgaggtgcttcttagtatcagctatctccccgctgcaaatcgcctattagtcgtcttgataaaagcaaaaaacctgcattccaatcagtctaaggagctcctgggtaaagatgtgagtgtcaaggtgactctgaaacaccaggctcgaaagttgaagaaaaagcagaccaaaagagccaagcacaagattaatccggtatggaatgaaatgatcatgttcgaattgccagatgatctgctgcaggcgtcctcagtggagcttgaagtgttaggacaggacgacagtggccagtcctgtgccctgggacattgctctctgggactgcatacctccgggtccgagcgcagtcattgggaggaaatgttaaagaatcccagacgccagatcgctatgtggcaccagcttcatttatag

SEQ ID NO: 207693 - DNA, 1554 bp, synthetic construct
  misc_feature 1..1554: note = Description of Artificial Sequence: Synthetic coding sequence
  source 1..1554: mol_type = other DNA
atgctgctgctgttcctgtacatcaacaagaagttctgcttcgagaatgtgggtggctttcccgacctcggctctgaatatagcacccgcaagaatagtcaggacaaaatttataattcctacatggacaaggatgagcacggcagtagctctgagtccgaggatgaagctctggggaaatatcacgaagccttatcaaggacgcataacagtagattgccactggccgactctagacagcgtaactacgcctgggagacccggcagaaatatagcccactgtccgccgagtacgacggatactcctctgaagctagcatagacgaggggaattgcatacagagaatgagacgcacccctcccctcgatgagcttcagcctcccccataccaagacgattccggatctccacacctgtcatgcaccccttccgagatcggcgattccaagtgtgagttctcccactgctcaaattcaccccgctgtagctacaacaagtgccctagcgagggctcaaccggacacgagatcgagtccttccataataaagggtacgaagaagacgtgccttctgattcaaccgcggtcctatccccagaggatatgtcggctcagggatcttcaagccaactgccaaagcctttcgacccggaaccagaagcaaaatacggtaccctggacgtgacctttgattacgacagccaggaacagaaattgctcgtaacggtgacagccgttaccgacattcccacctacaatcgtaccggagggaattcttggcaggttcatttggtgctgttgcccataaagaagcagagagccaagactagtattcagaggggcccttgcccagtattcactgagacattcaagtttaaccacgtcgagtccgagatgatcgggaactacgcggtccggtttcggctgtacggtgtgcatagaatgaaaaaagagaagatcgttggcgaaaaaatcttctatctgaccaaactcaacctgcagggaaagatgtcactccccgtgatcctcgagccaagttataaccactctggttgtgactcccaaatgtctgtgtctgagatgtcttgctcagagagcacaagctcttgtcagtcccttgagcacgggagcgtgccagaaatcctcatcgggcttctgtataacgcaacaacgggaagactcagcgccgaggtgattaaaggatcacactttaaaaacctggctgccaatcggcccccgaatacgtatgtaaaactgacgctcctcaatagcatgggtcaggaaatgagcaagtgtaagactagtattagacgcggccagcccaatccagtgtataaagaaacctttgtgttccaagtagccttattccagctttcagatgtgactcttatcctatctgtgtacaacaaaaggagtatgaagcgtaaagaaatgattggatggatctcgctgggacttaattctagtggcgaggaggagctgaaccattggacagaaatgaaggagtccaaggggcagcaggtctgccggtggcatgcactgttggaatcatag

SEQ ID NO: 207694 - DNA, 1725 bp, synthetic construct
  misc_feature 1..1725: note = Description of Artificial Sequence: Synthetic coding sequence
  source 1..1725: mol_type = other DNA
atggccatcgagggcggcgagcggacctgcggcgtgcacgagctgatctgcatacgcaaggtgagcccagaggccgtcgggtttctgtctgccgtgggcgtctttattatcttgatgctattactgttcctctatatcaataaaaagttctgctttgaaaatgtgggtggcttcccggacctaggtagtgagtatagtacaagaaaaaacagccaggacaaaatctataatagttacatggataaggacgagcacggatccagcagcgagtccgaagacgaggctctggggaagtatcacgaagctctctccaggacacacaattcccggctgcctctggctgactcacgccagcgaaattacgcttgggaaacccgccagaaatattcaccattaagcgccgaatacgatggctactcctctgaggcttctatcgatgaagggaattgtatccagcgcatgcggaggacccccccactggacgaattgcagccacccccctaccaggacgattctggatctccccatctgagctgcaccccctcggagatcggcgatagtaagtgtgagttttctcactgcagcaattctccaagatgctcctacaataagtgcccaagcgagggctcaacggggcatgaaatagaaagcttccacaataaaggctatgaggaggacgttccttccgacagtacagctgtactgtcaccggaagacatgtctgcacagggttcatcttcccagctccccaagccttttgacccagagcccgaagccaaatatggcactctggatgttacatttgactacgattcgcaggagcagaagctcctggtgaccgtgaccgcggtaaccgatatcccaacttacaataggacagggggcaattcatggcaggttcatttggtcctgctgcccattaagaaacagcgtgcaaagacatcgatccagagaggcccatgtcctgtttttaccgaaacgttcaagtttaaccatgtcgagagcgaaatgatcggcaattatgccgtgaggttccgcctctacggagtgcacaggatgaagaaggagaagatagtaggggagaagattttttacctgactaaattgaatcttcagggaaagatgtctttaccggtgatcctcgagccctcctacaaccactctggatgtgatagtcagatgtccgtgagcgagatgtcatgctccgagtcaacttcaagctgccagtctcttgagcacggatcagtaccagaaattctgatcggactgctgtacaatgcgacgactggaagactgtcggctgaagtgataaaaggttcccatttcaaaaacctggccgccaaccgccccccaaacggactgttttgctgcctcaagcatctgattggcgggcaggtctacataattcgcgatacgtacgtgaagctgacactcttaaacagcatgggacaggagatgtccaaatgtaaaacgtccattaggaggggtcaacctaaccccgtttacaaggaaacttttgtgtttcaagtggcactgttccaactgtctgatgtcacattgatattgagtgtatataataagcgaagtatgaagcgtaaggagatgattggctggatcagcctcggcctcaattcttcaggcgaagaggaacttaaccactggacagagatgaaggagtctaaaggccagcaggtgtgtcggtggcatgctctgcttgaatcctag

SEQ ID NO: 207695 - DNA, 1377 bp, synthetic construct
  misc_feature 1..1377: note = Description of Artificial Sequence: Synthetic coding sequence
  source 1..1377: mol_type = other DNA
atggccatcgagggcggcgagcggacctgcggcgtgcacgagctgatctgcattagaaaggtttccccagaagctgtcgggtttctgtccgccgttggagtgtttatcattctgatgctgctgctttttctctatatcaacaaaaagttttgctttgaaaacgtcggtggcttccctgacttggggtcagaatactcaacgaggaagaatagccaggataagatttacaatagctacatggacaaggacgagcacggttcatcgtccgaatcagaggatgaggcccttgggaagtatcatgaagccctctcgaggactcataactctcgcctaccactggctgattctaggcagcggaactacgcttgggaaaccaggcagaaatattcaccactctcagctgagtatgacgggtactcctccgaagcttccattgatgagggcaactgtatccagcgtatgaggcggacgcccccgctagacgaattgcaaccaccaccttatcaggacgacagcggtagccctcatctttcgtgcacaccatctgagatcggagactcgaaatgtgagttctcccattgcagtaacagcccacgctgttcatataacaagtgtcccagtgagggatccacgggccatgagatcgagtctttccacaacaagggttacgaagaggatgttccatccgatagtaccgcggttctgtcaccagaagacatgagcgcccaaggctctagctcccaacttcccaaaccattcgatcctgaaccggaggccaagtacggcacattggatgttactttcgactacgattctcaggaacagaagcttctcgttaccgtcacagctgttacagatatacctacttataatcggaccggcgggaatagttggcaggtgcacctggtgctcctgccaataaaaaaacagcgggctaagacatccattcagagaggcccgtgtccagtattcaccgaaacatttaagtttaaccacgtggagagcgagatgatcggcaactacgcagtccggttccgattgtacggagtccaccggatgaagaaggagaagatagtgggtgagaagatattttatttaactaaactgaatttacaagggaagatgtctctgcccgttatcctcgagccatcctacaatcactcaggttgcgactcccagatgagcgtctcagagatgtcttgcagtgagagcacctcatcctgccaatcactggagcatggcagtgtacccgagatcctcatcggactgctgtacaacgccactacagggaggttgagcgcggaggtgatcaaggggtcccattttaagaacttggctgcgaatagacctcccaagatggattgctcggtggtgtag

SEQ ID NO: 207696 - DNA, 1860 bp, synthetic construct
  misc_feature 1..1860: note = Description of Artificial Sequence: Synthetic coding sequence
  source 1..1860: mol_type = other DNA
atggccagcgccagctggcggctgaaggtggagcgggagcccgtggaatacatgaaccttagtgtgctcgaaaaaatcggatacttctcagtggcacggctggaatatagcggtacaattctcgctcactgcaattttaggttgctcgggtccaatgatagctctgctagtgcctcacaggttacaggcaccactgtatcccccgaagcagtgggattcctgagcgcggttggggttttcatcattttgatgctgctgttgtttttgtatatcaataagaagttctgtttcgagaatgtgggcggattccccgacctggggagtgagtattccacccggaaaaacagccaagataaaatttataatagttatatggataaagacgagcatggttcctccagcgagtccgaggatgaagcccttgggaagtatcacgaggctctgagccgcactcacaatagccggttgcctctggctgactcaagacaaagaaactatgcgtgggaaacccggcagaagtattccccactttccgcggagtacgatggttactccagcgaggcaagcattgacgagggaaactgtatccagcgcatgagacgcactcctcccctggacgagctacaacctccaccctatcaggatgattccggcagccctcacctgagctgcacgcccagcgagatcggagattccaagtgcgaattctcccattgtagtaattccccaagatgcagctacaataagtgccctagtgaggggagtaccggccacgaaatcgagtcatttcataacaagggatacgaagaggacgtgccaagtgacagcacggccgtgttatcgccagaggacatgtccgcccagggctctagtagtcagctccccaaaccgttcgatcctgagcccgaagccaagtatggcactctggatgtcacctttgactacgacagccaggagcagaaacttttggtaacagtcacagccgtaaccgacatccccacctataacagaacaggtgggaactcgtggcaagtccacttggtgcttttgcctattaaaaagcaaagggctaaaacttccatccagagaggtccatgccccgttttcaccgagacattcaaattcaatcacgtggaaagcgagatgatcgggaattatgctgtacgcttccgcctttacggtgtccaccggatgaagaaagagaaaattgtaggtgaaaaaatcttctatttgaccaaactcaaccttcagggcaagatgtccctgcccgtcattctcgagccaagctacaaccactccggatgcgactcccaaatgagtgtgtcagaaatgagctgctcagagagcactagcagttgccagtcacttgaacacggaagtgtcccagaaattttgatcggactgctgtacaacgccactaccggacgtttgagcgccgaggtgatcaaagggagtcatttcaagaatttggccgcaaataggccccccaacgggctcttttgttgcctcaaacacctgattggaggacaggtttacatcatccgggacacttacgtgaaattgacgttgcttaatagcatgggacaggagatgtcgaaatgcaaaacttctatcaggagaggacagccgaatccggtctacaaggaaacctttgtcttccaggtcgccttattccagctgagtgacgtaacactcatactgtccgtttataacaagcgttctatgaagcggaaagagatgattgggtggataagcctcggattaaacagcagcggggaggaggagttaaatcattggacagaaatgaaggaatccaaaggacagcaggtctgtcgctggcacgctttgttagaatcctag

SEQ ID NO: 207697 - DNA, 1668 bp, synthetic construct
  misc_feature 1..1668: note = Description of Artificial Sequence: Synthetic coding sequence
  source 1..1668: mol_type = other DNA
atggccatcgagggcggcgagcggacctgcggcgtgcacgagctgatatgtatacgcaaggtgtccccggaggcagtgggattcctgtccgccgttggcgtttttatcatattgatgctgttactgttcctttatatcaataaaaagttttgtttcgaaaacgtaggcgggtttccggacttgggatctgagtactctacacggaagaacagccaagataaaatctacaactcgtatatggacaaagacgaacacgggtcatcttcagagtccgaagatgaggccctcggaaagtatcacgaggctctgtctcgcactcataacagtaggctacctctcgccgattctcggcagagaaattatgcttgggagacgcggcagaaatatagcccactgtcagcagagtatgacggttactcaagtgaggcatctatagacgagggaaattgcattcagaggatgcgtcgcaccccacctctcgatgagctgcagccacccccatatcaggatgacagcggttctccccacctctcttgcactccctctgaaatcggtgactcaaaatgcgaatttagccactgttcaaactcaccacggtgtagttataacaagtgccccagcgaaggttccacaggacacgagatagagagcttccacaacaagggatacgaggaggacgtacctagcgatagcacagcagtgttatctcctgaggacatgagtgcccaaggatcatcctcccagctcccgaaacctttcgaccctgaacctgaggccaaatatggcaccctggacgtcaccttcgactacgattcgcaggagcaaaaactgttagtgacagtgaccgcagtgacagatatacccacctacaaccggactggcggaaactcctggcaggtgcatctcgttctgctgcccatcaagaagcaaagagcaaaaacaagcatccagcggggaccatgcccagtgtttaccgagactttcaaattcaaccatgtggagtccgagatgatcggcaactatgcagtcagattcaggctgtatggtgtacaccgaatgaagaaggaaaagatcgtgggtgaaaagatcttctacctaactaagctcaatctgcaaggcaaaatgtccctgcctgtaatcttggagccgagctacaaccactctggttgtgacagtcagatgtccgttagcgagatgagctgctccgaaagtacctcctcctgccagagtctggaacacgggagcgtccctgaaattttaatcggcttactttataacgccactacaggaagactgagcgctgaggtgattaaaggttcgcactttaagaatcttgccgccaaccggcctcccaacacctacgttaagcttaccttattgaacagcatgggccaagagatgtcaaaatgtaagacctctattcgaaggggccagcctaacccggtatataaggagacttttgtgtttcaggtggctttgttccagctctctgacgtgaccctgatcctcagtgtatataataaacgatccatgaagcgaaaggagatgataggctggatatcattgggcttaaactcgagcggtgaggaggagttgaatcactggaccgagatgaaggaatctaaaggccaacaggtgtgccggtggcacgcactgcttgaatcctag

SEQ ID NO: 207698 - DNA, 1746 bp, synthetic construct
  misc_feature 1..1746: note = Description of Artificial Sequence: Synthetic coding sequence
  source 1..1746: mol_type = other DNA
atggccatcgagggcggcgagcggacctgcggcgtgcacgagctgatatgtattagaaaggtgtcccccgaagccgtcggcttcctgtccgcagttggtgtttttataatcctaatgctgctgctctttctgtacatcaataagaagttctgttttgaaaatgtgggcggatttccggaccttggatctgaatacagtactcgcaaaaactcccaggataaaatctataactcttacatggacaaggacgaacacggcagctccagtgaaagcgaagatgaggcgttggggaagtatcatgaagccctgtcccgaacacacaacagtaggctgcctcttgccgattctagacagcgaaactacgcctgggagacccggcagaagtactcgcccctcagtgctgagtatgatggctactccagcgaagcgagcattgatgaaggcaattgcatccagcggatgcgcagaaccccacctctggatgagctacaaccgccgccttatcaggatgacagcggtagtccgcacctgagctgtactccctcagaaattggagatagcaaatgtgaattttcacactgtagcaacagtcctcgttgttcgtataataagtgtccgagcgagggcagtaccgggcacgagatcgagtccttccacaataaggggtatgaggaagatgtgcctagcgatagcactgccgtactgagtccagaggacatgtcagctcaggggtcttcctcacaactgcccaaaccgttcgaccctgaaccggaggccaagtacggcactctcgatgtgacatttgattacgattctcaagagcaaaaactgctggtgacagttactgctgtgactgacattcctacgtacaaccgcactggggggaactcttggcaggttcacttggtgctcctgcctattaaaaaacagagggccaaaactagtatccagagggggccttgcccagtctttactgagacattcaagttcaaccacgtggagagtgagatgatcgggaactacgctgtcagatttcgactgtacggagttcatcgtatgaaaaaggaaaaaatagtgggtgaaaagatcttttacctgacgaagcttaatctgcaaggcaagatgagtctcccagtgattctggaaccaagctacaaccattcaggctgcgacagccaaatgtctgtctccgaaatgtcctgttcagagtctacctcttcttgccagtccctcgaacatgggtctgtacccgaaattctgatagggctgctctacaacgctacaaccgggagactctctgcagaagtcataaagggctcccacttcaaaaaccttgccgccaaccgccccccgactttccaccccctactaagcgacggcctgttttgttgcctgaaacacctgataggtggccaggtctatatcattcgggatacatacgtaaagctgactctgttaaattccatgggccaagagatgtccaaatgtaaaacctctatcaggcggggacagcctaaccctgtgtataaggaaacctttgtgtttcaagtcgccctgtttcagctctcggatgtcaccttgatcctgagtgtctacaataaaagatccatgaaacgtaaggaaatgatcggatggatctctctaggtctcaatagtagcggcgaggaagagcttaatcattggactgaaatgaaagagtctaaaggccagcaggtttgccggtggcacgctttgcttgagagttag

SEQ ID NO: 207699 - DNA, 1554 bp, synthetic construct
  misc_feature 1..1554: note = Description of Artificial Sequence: Synthetic coding sequence
  source 1..1554: mol_type = other DNA
atgctgctgctgttcctgtacatcaacaagaagttctgcttcgagaacgtcggcggattccctgacctagggtctgagtactccaccagaaaaaactctcaggacaagatttataacagctacatggacaaggatgagcatggctccagcagtgagtccgaagatgaagcactcggtaagtaccatgaagcgctttctcgcacacacaacagccgtctacccctagctgattcccggcagagaaattacgcctgggaaactagacagaagtacagtcctctctccgcagaatacgatggatatagcagcgaggctagtatcgacgaggggaactgcattcagcggatgcggcgtactccccctctcgatgaactccaacctccgccctaccaggacgactcaggctcaccccacctctcgtgtacgccctcagagataggggacagcaagtgcgagttcagccactgtagcaactcacctcgttgttcctacaacaagtgtccaagcgagggatcaactggacatgagatcgagtcttttcacaacaaaggttacgaggaagacgtaccctctgattcgaccgccgtcctgagtcccgaggatatgtctgcacaagggtcttccagccagctgcccaagccctttgaccccgagccagaagccaagtacgggaccctggacgtgacattcgattatgactcccaagaacagaagctgttagtgaccgtaaccgccgtcacagacattcctacctacaatcgtaccgggggaaattcttggcaagtgcacctggtgctcctccctatcaagaagcagcgagccaaaacctccatacaacgtggaccttgccctgtattcactgagacatttaaattcaaccatgtggaatccgaaatgattggcaactacgccgtgcgcttcaggctgtacggagtacatcgcatgaagaaggagaaaatagttggagagaagattttttacctcactaaactgaacctgcagggaaagatgtctctccctgtgattctggaacctagctacaaccactccggctgcgacagccagatgagcgtgagcgaaatgtcatgcagcgagagcactagctcttgccagagcttagagcacggttctgtgcctgagatcctgataggtctcctctacaacgcaaccaccggacgtctctctgcagaggtgattaagggatctcattttaaaaacctcgccgcgaacagacccccaaacacgtatgtcaaactgactttgctgaacagcatgggccaagagatgtccaaatgcaagacaagtattaggcggggccaacccaatcctgtatacaaagaaacgtttgtcttccaggtagctctgtttcagctaagcgacgttaccttaatcctaagtgtctataataagcgttcaatgaagcgcaaggagatgataggctggatcagtctcggcctaaattcatctggggaagaggaactcaaccactggaccgaaatgaaggagtctaagggacagcaagtgtgccgctggcatgctcttctggagagttag

SEQ ID NO: 207700 - DNA, 1266 bp, synthetic construct
  misc_feature 1..1266: note = Description of Artificial Sequence: Synthetic coding sequence
  source 1..1266: mol_type = other DNA
atggccgagcagctggccctggtgatcggcggcaccatcggcggcctcctgctcttgctgctgatcggagcttcatgctgtttgtggcgccgattctgcgccactctgacctatgaagagcttccaggcacacccgcaatggctacaactgcggccagttcagggcaacgtgatcggccgtgtcagcctcatgcccggacacagcttagtagaccgcctgccgtaccattcgttgttccccctaccctgcaaggtcgtgactgggtaccactgcatagcggagaatgggctgacgccccatgggacccttgcccagcatctgaactcttgccgcacacctcctccggggggctcggtgacgcatgcatggtgggagccataaacccagaactatacaagttccctgaagacaagagcgagaccgacttcccggacggttgtctcggccggctttggttctctgtggaatacgagcaggaagctgagagattgttggtgggactgatcaaagcccagcacttacaggcgccatccgaaacatgtagccccctggtgaagttatacctcctgccggatgagagaaggtttcttcagtctaagactaagagaaaaacatctaacccacagtttgatgagcactttatcttccaggtgtcgtctaagacaatcactcagagggtgctaaaattctcagtgtaccatgtcgacagacagcgcaagcaccagctgctcggccaggtgctctttccgttgaagaacgaaacattagtgggcgattgtcgccgggtgatatggagagatttggaggccgaaagcctggagcctcctagcgagttcggagaccttcagttctgcctgtcgtataatgattacctcagtcggcttacagtagtggtgcttagagcaaagggccttcgcctgcaggaagaccgcggtattgtgagcgtttttgtgaaagtatcactcatgaaccataataagttcgttaagtgtaagaaaacaagcgcagtactgggaagtattaacccggtgtataacgagacattctcattcaaggccgatgccaccgaattggatacagcttcacttagcctgacagttgtgcagaatatggagggcgataagagccaacagctcgggcgggttgtggttggtccctacatgtatactaggggcagggaactcgaacactgggatgaaatgctgagtaagcctaaagaactggttaaacggtggcacgccctgtgccggaccactgaaccctag

SEQ ID NO: 207701 - DNA, 1425 bp, synthetic construct
  misc_feature 1..1425: note = Description of Artificial Sequence: Synthetic coding sequence
  source 1..1425: mol_type = other DNA
atgggcgtggtgctgagcccccaccccgcccccagccggcgggagccccttgcacccctggctcctggcacacggccaggatggtctcctgccgtcagcgggtccagccgctcagccttaaggccttccactgccggccctggccctggaccgggaaccggatggggaggtaccgctgcaagcggccggtgggtgcctgccccagcagtacattgcgcggctcctagggccgcagctgggcatcaacagcaccatggcccacctttgtgttcaccagacggagcacctcgccggtttaagaggcggccaggcagccccgcccctgccgcccagacaggtgagacatcccttcgcgaacagcctcacggagggcctcctgccgtgccatttgttgtccccccaaccctgcaaggtcgtgattgggttccactgcactccggggagtgggcggacgccccttgggacccttgcccggccagcgagctactgccacataccagcagtggtggcctcggtgatgcctgcatggttggagccatcaatccagagttatacaagttcccagaggataagagcgaaaccgattttcccgacggatgcctgggacgcctctggttctcggtagagtacgagcaggaagctgaacggctgctggtggggctaattaaggcccaacatttacaggccccttctgaaacttgctctcccctcgtgaagctgtacctgctgcccgatgaacggaggtttttacagtccaaaacgaagcgcaagacctccaatcctcaattcgatgaacactttatctttcaagtgagctctaaaaccattacccaaagagtgctgaagttcagtgtgtaccatgtggatcggcaaagaaaacaccagctcctggggcaagtgttgttccccctgaagaacgaaacactggtaggcgattgccgacgcgtgatatggagagatcttgaggccgagtctctggagccgccatccgagttcggcgatctacagttctgcctgtcatacaatgactacttgtcaagactgaccgttgtcgtgttgagagctaaggggctgcgcctgcaggaagacaggggcatcgtgtcggttttcgtaaaggtttctctaatgaatcacaataaatttgtgaaatgcaaaaagacctctgcagttctgggctccatcaaccccgtgtacaacgagacattttcctttaaagccgacgccacagagttggacaccgcaagcctttctcttacagttgttcagaatatggagggggataagtctcagcagctcggccgggtcgtggtgggtccgtacatgtatacccggggccgcgagcttgagcattgggacgaaatgctcagtaagccaaaggagctcgtgaagaggtggcacgccctatgtcgcactaccgagccgtag

SEQ ID NO: 207702 - DNA, 1173 bp, synthetic construct
  misc_feature 1..1173: note = Description of Artificial Sequence: Synthetic coding sequence
  source 1..1173: mol_type = other DNA
atggccgagcagctggccctggtgatcggcggcaccatcggcggcctactgcttctgctcttgatcggcgcgtcatgctgtctctggaggagattctgcgccactttgacatatgaggaactccccggaaccccggcaatggccaccactgctgcctcaagtgggcagcgcgatcgtccttgtcagccacacgctcggacccagctctccagacctccagccgtgcccttcgtcgtccctcccaccctgcaggggcgagattgggtcccacttcattcgggcgaatgggcagatgccccatgggatccttgcccagcatccgaactcctaccacacacttcctccggcggcctcggtgacgcctgtatggtcggagcgataaaccctgagttgtataaattccccgaagacaagtccgaaacagattttccagacggttgtcttggtcgactgtggtttagtgtcgagtacgagcaagaagcagaacgccttctggtaggccttattaaggcgcagcacctccaggcaccgtccgagacgtgctctccactggtaaaactatacctcttgcctgatgaacgacgatttttgcagtctaagacaaaaaggaagacctctaatccacagttcgatgaacatttcatttttcaagtttcatctaaaactattactcaaagggtgctgaaattctcagtgtaccacgttgaccgccagcgcaagcatcagctgctgggacaagtactctttccgctgaagaatgaaactcttgttggcgattgccgccgggtgatttggagagatctggaagccgagtccttagaacccccctccgagttcggggatttacaattttgcttgagctataatgattacctgtccagactcacagtcgtggtcctccgcgccaaaggactgcggctgcaggaagaccggggtattgtatcggtcttcgtgaaggtgtctttaatgaatcacaacaagtttgtgaaatgcaaaaagacatccgctgtcctcggatccatcaatccagtgtataacgagactttcagctttaaagcagatgcgacagaattggacacagctagcctgtccttgacagttgtgcaaaatatggagggggataagcaggccaccacggtggagctgtttctcttccacctcacatctggatag

SEQ ID NO: 207703 - DNA, 543 bp, synthetic construct
  misc_feature 1..543: note = Description of Artificial Sequence: Synthetic coding sequence
  source 1..543: mol_type = other DNA
gacgagcacttcatcttccaggtgagcagcaagaccatcacccagagagtactgaagttcagcgtttaccacgtcgatagacaacggaagcatcagctcctcggacaagttttgttcccactgaagaacgagacactggtgggagactgccggagggtcatctggcgggacttggaggccgaatctctcgaaccaccctctgagttcggtgatctccagttctgtctttcctataatgattacctcagccgcctgacagtcgtcgtgctgcgggcaaagggtttaagactgcaagaggaccggggaatcgtgagtgtgttcgtcaaggtgagcctcatgaaccacaacaaattcgtaaagtgcaagaagacgtctgccgtgctcggctcgatcaaccctgtctacaacgaaactttcagttttaaggctgatgctactgaactagacactgcgtcactgtccctgactgtagtgcaaaatatggagggagacaaacaggctacaacggtggaactcttcctttttcatctgacatccggttag

SEQ ID NO: 207704 - DNA, 783 bp, synthetic construct
  misc_feature 1..783: note = Description of Artificial Sequence: Synthetic coding sequence
  source 1..783: mol_type = other DNA
atggtgggcgccatcaaccccgagctgtacaagttccccgaggacaagtctgagacttgctctcccctggtgaagttgtatttgcttccagatgaaaggcgatttctccagagcaagaccaagcgcaagacaagtaatccccagttcgatgaacacttcatatttcaggtgagttcaaaaaccataacccagcgcgttctgaaattctccgtgtatcacgtcgatcgccagcggaagcatcagctgttaggtcaggtgcttttccccctgaaaaacgagactctcgtgggcgactgtcgccgggtcatttggagagacctggaagccgaatccctggagcctccgagtgagttcggtgacttacaattttgcctgtcatacaatgactacctgagtcggctaacagtcgtcgtgcttcgcgcaaagggtcttcggctccaggaagacagggggatagtgagtgtgttcgtaaaggtgtccctcatgaaccacaataagttcgtgaagtgcaaaaaaacgtccgctgtgctgggttccatcaaccccgtgtacaacgagacgttctcattcaaagccgacgcaacagagctggataccgcgtcattgtcgctgacggtcgtccagaatatggagggtgacaaatcacaacagctgggcagagtggtggtaggtccctacatgtacacccgggggagggaattagagcactgggatgagatgctgtctaagcccaaggaactggttaaaaggtggcatgccttatgtagaaccaccgaaccttag

SEQ ID NO: 207705 - DNA, 1047 bp, synthetic construct
  misc_feature 1..1047: note = Description of Artificial Sequence: Synthetic coding sequence
  source 1..1047: mol_type = other DNA
atggccgagcagctggccctggtgatcggcggcaccatcggcggcctgctgctgcttcttctcataggagctagctgctgtctatggaggagattctgcgccactctgacatacgaggagctgcccgggacgcccgctatggccaccactgccgcgtcctcgggccagagggatcgtccttgccagcctcacgctaggacccagctcagtagaccgcccgcggtccccttcgttgtccccccgacgctgcagggtagagactgggtcccactgcactccggggaatgggcagacgctccatgggatccttgtcccgcttccgagctgttaccccacacaagctcaggtggcttgggggatgcttgcatggtcggcgccataaaccctgaactttacaagttcccagaggataaaagcgagactgattttccagatggatgtctgggtaggctctggttcagcgtggagtacgagcaggaggctgagcgcctgttagtgggacttataaaagcccagcacctgcaagcaccttcagagacctgttcccctttggtaaagttgtatctactgcccgacgaaaggcggttcctccagagtaaaacaaagcgcaagaccagcaatccacagtttgatgagcactttatcttccaggtgtcgtcaaagacgattacacaacgagtgttaaaattttccgtctaccacgtggaccgccagcgtaaacaccagctcctgggccaggtgctcttccctctgaagaacgaaactctggtcggcgactgcaggcgggtgatttggcgcgatctcgaggccgaatcgctggagccaccatctgagttcggggatctccagttctgtttaagttacaatgactacttgagccgacttactgtggttgttctccgggccaagggactgcgcctgcaggaggaccgggggatcgtcagtgtattcgttaaagtctctcttatgaaccacaataaattcgcaaagtgtaaacccgggcccgatttaggcgaggagagcagagggtcgctgaacttaaaatag

SEQ ID NO: 207706 - DNA, 1173 bp, synthetic construct
  misc_feature 1..1173: note = Description of Artificial Sequence: Synthetic coding sequence
  source 1..1173: mol_type = other DNA
atggccgagcagctggccctggtgatcggcggcaccatcggcggcctattgctgctgcttttgataggcgcatcgtgttgtctgtggaggagattctgcgccaccctgacctatgaagagctcccgggaacccctgctatggctactacggccgcatcttccggccaacgcgatcgcccctgccagccacatgcgcgcacacagttgtctcgcccgccagcggtgccattcgtcgttccccctactctgcagggccgagattgggtgcctctacacagtggggagtgggccgacgctccatgggacccttgtccagcaagcgaactcctgccacacacttcatcggggggtctgggggatgcatgtatggtgggggcgataaaccctgaactttacaaatttcctgaggataaaagcgaaacggacttccccgatggttgtttaggcaggctgtggttttccgtggaatacgaacaggaggccgaacgcctcctggtgggcctaattaaagcacagcatctgcaggccccctctgaaacttgtagcccattagtgaagctatacctccttccagatgagcgcagattcctgcagtccaagactaagaggaagaccagcaacccacagtttgacgagcacttcatcttccaggtgagcagcaaaaccataactcagcgggttctcaagttctccgtctatcatgtggatagacagaggaaacaccagttattgggccaggtattgtttccactgaaaaacgaaacgctagtgggagactgtcgacgcgttatctggagggatctggaggccgagagtctggaaccaccttcggagtttggcgacctgcagttctgcctctcctacaacgactacctttcccggctcacagtcgtagttttgagagcaaaggggctgcgcttgcaggaagacaggggtatcgtgtccgtgttcgttaaggtgagtttgatgaaccataacaaattcgtgaagtgtaagaaaacgtctgccgtcctcgggtctattaacccagtgtacaacgagacatttagttttaaggcagacgccaccgagctcgataccgcaagtctgagtctcacagttgttcagaatatggaaggagacaagcaggccaccacggtggaactctttctgtttcacctcactagcggttag

SEQ ID NO: 207707 - DNA, 1152 bp, synthetic construct
  misc_feature 1..1152: note = Description of Artificial Sequence: Synthetic coding sequence
  source 1..1152: mol_type = other DNA
atggtgctggccatggccagccaggacgtgcagaacttcttccagcctttttcttcatggatttcccgtgtgtatgaggccctgcaacaggctggggacatgctcagtgcttccctagtcaatattagcaagcaagattcaaagctgagcgataaattggaccaggatctggataacatccagatccaggagacctacttcgaggacgaggagcaggataacgattggtcacaggaggatgcgaatagcctgttccttgaagtagaccactttagttgttgcaatagcgacctccaggactccgcccagaattcaagtccatccctgtcccaacacgccaaagactcttgcagtaccatgagtcagtggcctaactgggctagtgacgataggaagttgccccacgtgttgtctagtattgctgaagaggaacaccacctcgaaaagcaacgcagcggtctacaacatggctttgactcgcagctgcctggtacgctggagaccgtcaacggaaagaaacaggttaattcttttggcgatgatgaagagctatcgacaagttctgacagcgatgaagaggtcatcaagcaattcgaaatttccgtcagcaggtcgcagtctttcaggtctgtaacatccgagaaagggaaacagactggactggagcagaagcccaagttcagcaggtcgctactcacccatggcgaagatggaacggaggtgtccgcgtgtgaagatcttgacggtgccagccagcggaggtactcagagaatctctcctacggggaggatgaccatattcctgcccacagccagagcccatgcgagagaggagatgccaagcatcacggaacctcacaccaagagagctcagtggtgcagagcttaagaaggcaaagtaccgagggttcactggagatggaaacagccttcaattccaggggtttcgaggactcttatgcgacagactcctcaagcatgtggtctccagaagctaacctgaatcttaaacgcaagggctacttgctggacgtgtattgcctttcaagccctctcttattcaccacatctttgcaccggcggaaccggactggccctatttgcagatgccacccaggtagtcagagcccctcgcagtctgtcgtgacgtag

SEQ ID NO: 207708 - DNA, 1938 bp, synthetic construct
  misc_feature 1..1938: note = Description of Artificial Sequence: Synthetic coding sequence
  source 1..1938: mol_type = other DNA
atggtgctggccatggccagccaggacgtgcagaacttcttccagcccttctccagctggattagtcgggtctacgaggccctccaacaggctggagacatgctttccgcatccttagtaaacatctccaagcaagactctaagctgagtgacaagctggatcaggacctggacaacatacaaattcaagaaacatattttgaggacgaggaacaggataacgactggtcacaagaagacgccaattccctgttcctggaagtggaccatttctcctgctgtaacagcgatctgcaggactccgcccagaatagctctccctcactttctcagcacgctaaagatagttgctctaccatgagccagtggcccaattgggcctccgatgaccgaaagctgccgcatgtcctttcatccatcgccgaggaagaacatcacctggagaaacagagaagtggccttcagcatggcttcgactcgcagttaccagggacgctggagaccgtgaacggtaagaagcaagtgaattcctttggagatgacgaagagctgagtaccagctcagactctgacgaagaagtgatcaagcagttcgagatcagcgtctccagatcgcagagctttagaagcgtgaccagcgaaaagggtaaacagacaggattggagcaaaagccaaagttctcaagaagtctgctgacccacggagaagatgggactgaggtgagcgcctgcgaagacctggacggcgccagccaacggcggtacagcgaaaacctttcttatggagaggacgatcatattccagcacactcccaatctccgtgtgagcggggggacgctaaacatcatggaacttctcatcaggagtcctcagtagtccagagcctgaggaggcagagtacagaaggcagcctggagatggaaaccgctttcaatagccggggcttcgaggacagttatgccaccgactcttccagcatgtggagtccagaggaacaggaccgcaccaacctgcaagtcccaagtggcgtttcagaaccgattagcaagtgtggcgatcttgacgtaatttttgagtatagagctgcaagccagaagctgacagtgaccatcgttcgagcccagggcctccccgacaaagacagatctggagtgaatagctggcaagtccatgtggtgctgctccccggaaagaaacatagaggccgcacaaacattcagcgggggcccaatcccgtgttccgcgagaaagtgacttttgccaaactcgagccaagagacgttgccgcatgtgccgttagatttcgcttgtatgctgcccgtaagatgacaagggaaaggatgatgggcgagaagcttttttacctttcccacctgcacccggagggcgaaatgaaggtcaccctggtgttggaaccccgctcgaacatcagttccggcggttctccgctgagcccaagcgctgtgagccactcagattcaacaagtagcacccagtccttgagtcatggcggcgctccagaactccttgtcggcttgagctacaatgccactacaggcaggttaagtgtggagatgattaagggcagccacttccgcaacctggccgtgaaccgcgcgcccgatacttacgggaagctgtttctgctgaattccgtgggtcaggagatgtcccgctgtaaaacctcaatccgcaggggacagccaaatcctgtgtataaggaaacttttgttttccaggtggctttgttccagctctctgatgtgactctcatgatttcagtgtacaaccggcggacgatgaaaagaaaggagatgataggatggatcgcattgggtcagaattcctccggggaggaggaacaggatcactgggaggagatgaaagagactaaaggtcagcagatttgccgttggcacactttgcttgagagctag

SEQ ID NO: 207709 - DNA, 1653 bp, synthetic construct
  misc_feature 1..1653: note = Description of Artificial Sequence: Synthetic coding sequence
  source 1..1653: mol_type = other DNA
atgccccagcggggccaccccagccaggagggcctgtgggccctgccttccctgcctatggcacatggaccaaagcccgaaactgaggggctgctggatctgtccttcctgaccgaagaagaacaggaggcgattgctggggtgctgcagcgtgacgctaggctcaggcaactggaagaaggccgagtatccaagctgagggctagcgttgccgatcccggtcagctgaagatcctcacaggagattggttccaggaggcaagatcgcagcgccaccacaacgcccacttcggctcagacttggtgcgcgcttcaatgagaagaaagaagtctacccgaggagatcaggctcctggtcatgatagggaagccgaagccgcggtgaaggagaaggaagagggtcccgagccccggttgaccatcgatgaggcccctcaggagaggctgagggagaccgaggcctccgatcccgaggaggcctctcaggcccaggaggatccaggccagggcgatcagcaagtgtgcgcggaggaggcagacccagagctggagcccgcttccggcggtgagcaggagccacggccccagcaagcacaaacaaaggcggctagccagattctggaaaatggcgaagaggcccccggcccagatccatcccttgataggatgttgtcaagttcctcttccgtaagctctctgaactcttctaccctgtccggtagccagatgtctctttccggggatgccgaggctgtacaggtccgagggtcggttcactttgccctgcattacgagccgggggctgcggagctgagagtgcatgtcatacagtgccaggggctggccgccgcacgccgaagacggagcgacccatatgttaagagctacctccttcctgataaacagagtaagcgaaagaccgcagtgaagaaaagaaacctgaatccggtgtttaacgagactcttaggtatagtgtgccacaggccgaactgcagggcagggtgctctcccttagcgtgtggcaccgagagagcctcgggcgaaatatctttctgggcgaggttgaagtgcccctcgatacatgggactgggggagtgagccgacatggctgcctcttcagccccgtgtgcccccaagtccagatgacttaccatctcgaggcttgctggctctgtcactgaaatatgtgcccgctgggtcagaaggagctggcctccctcctagcggcgagttacacttctgggttaaggaagcgagggacctcctgcctctccgggccggaagtctggacacatatgtccagtgtttcgtgttaccagacgactcgcaggcctctaggcagagaacacgtgtggtaaggcgctcactcagcccagtgtttaaccatacaatggtctacgatggttttggccctgctgacctgcgtcaagcttgcgctgaactaagcctttgggaccatggcgcattggccaatcggcagctgggcgggaccaggctgagccttgggaccggctctagctatgggttacaggtcccttggatggactccacccctgaggagaaacagctttggcaagccctgttggagcagccctgcgagtgggtggatgggcttctgccattgaggaccaatttagcacccaggacctag

SEQ ID NO: 207710 - DNA, 231 bp, synthetic construct
  misc_feature 1..231: note = Description of Artificial Sequence: Synthetic coding sequence
  source 1..231: mol_type = other DNA
atgccccagcggggccaccccagccaggagggcctgtgggccctgccttcccttcccatggcccacggacccaagcccgaaaccgagggcctgctggacctgagcttcttgaccgaggaggagcaagaggcgatagcgggcgtgttgcagcgcgacgctcgcttaaggcagctggaggagggacgagtgtcgaaacttcgggcctccgttgccgacccaggccagctgtag

SEQ ID NO: 207711 - DNA, 1065 bp, synthetic construct
  misc_feature 1..1065: note = Description of Artificial Sequence: Synthetic coding sequence
  source 1..1065: mol_type = other DNA
atgccccagcggggccaccccagccaggagggcctgtgggccctgccatcgctgccgatggctcatgggccaaaacctgaaaccgaagggctgctggacctgagcttcctcacagaagaggagcaggaagccattgctggggttctgcagcgggacgctcgactccgccagctagaagaaggcagggtttcgaaattgcgagcctctgtagctgacccgggccagcttaagatcctaactggcgattggttccaggaagctaggtctcaacgccaccataacgctcactttggaagtgacttggttagggcctccatgcggcgtaagaagagcacaaggggtgatcaggcccccgggcacgatcgtgaggccgaagcggccgtgaaggaaaaagaagaggggcccgaacccaggctgaccatcgacgaagccccccaggaaaggctcagggagaccgagggccctgacttcccctcgccttccgttccattaaaggcatcagatcccgaggaagccagccaggcacaggaagaccctggacagggggatcagcaagtctgtgccgaggaagccgatccggagttagagcccgccagtgggggcgagcaggaaccgcggccacagcaggcgcaggtgggcggctcaggcccatggctgttatcaacaagcggcgccgactccgggcgcggggctcttcttccaagggcagctagtcgcccacgaccgagagctttgggtgccggggtgggcaaagaaggcgcccccaggcaccttccaccattgcagaccaaggcagcctcacagatactcgaaaatggcgaggaagcccccggcccagatcctagcttggatcgaatgctcagttcaagttcctccgtaagcagcctcaatagctccacattgagcgggtcgcagatgtccctgagtggcgatgccgaagcggtacaggtgagaggctccgtacatttcgcgctgcattatgaacctggtgccgcagaactgagagtgcacgtgatccagtgtcagggacttgccgcggcaagacgacgtaggagcgacccatag

SEQ ID NO: 207712 - DNA, 606 bp, synthetic construct
  misc_feature 1..606: note = Description of Artificial Sequence: Synthetic coding sequence
  source 1..606: mol_type = other DNA
atgggcaccaccgccctgctgggcggcgtgcggctgagcgagaccattccggttaagagactggcgcgcggcctggccagagtcagggacggagggtggggctccccccaggctggcgagaaggctctcggaggcccgttgttaactagtgggagtcacctcccctcatacgtgaaaagttacctgctcccagacaaacagtctaaacggaaaacggccgtcaaaaagaggaaccttaacccagtgtttaatgagactctgcgatactcggtcccccaagcagagttgcagggacgggtgctctcactctctgtgtggcatagagaatcactgggccggaacatatttctgggagaggtggaagtccccctggacacctgggattggggctccgaaccaacatggcttcctttgcaaccaagagtgccaccctcaccagatgatctgccctccagaggtctcttggccttatcgctgaagtatgtaccagcaggctccgaaggcgccggactgcccccctccggcgaactccatttctgggtgaaggaggcacgcgacctgctacccctcagggccgggtccctggacacatatgtccagtggtag

SEQ ID NO: 207713 - DNA, 1083 bp, synthetic construct
  misc_feature 1..1083: note = Description of Artificial Sequence: Synthetic coding sequence
  source 1..1083: mol_type = other DNA
atgccccagcggggccaccccagccaggagggcctgtgggccctgccgagtctcccaatggcccacggacctaagccggagacagaggggctgctagacttgagctttctgactgaagaggagcaggaggcgatcgccggcgtcttgcagagagacgcccgactcagacaactcgaggaggggcgggtttcaaagctccgggctagtgtggcagacccagggcagctaaaaatactcacgggggattggttccaagaagccagatctcagaggcaccataatgcacacttcgggtcagacctggtgcgtgcttccatgagaaggaaaaaatccactcggggggatcaggctcccgggcacgaccgggaagcagaagccgccgtgaaggagaaagaagagggccctgagcctaggctaactatagacgaggccccgcaggaaaggctccgagaaactgaaggcccggatttcccttcacctagtgtgcccctgaaagcttcagaccctgaagaagcctctcaggcccaagaagatccaggccagggagatcaacaggtttgtgctgaggaggcagatcccgagctagaaccggcttctggtggggagcaggaaccaagaccacagcaggctcaggtgggtgggagtggaccatggttacttagtacttctggagcagattctgggagaggggcacttctcccacgcgccgcgtcaaggccccgcccacgagcacttggcgcaggggtgggaaaagaaggcgccccacggcacctcccccccctccagaccaaagccgcatcacagattctcgagaacggagaagaggcgcctgggcctgatccaagccttgaccggatgttgtctagctcttcctcagtgagcagtctcaatagttccaccgtacgccgagagggcggcgatccagggggccgcggggttgatccttttcggtgcgttgcccctgcatgcccatcactagctgcaggtcctacagcagcagcaccacaacccgccacatatgatccaggactgaagcctccacgctgtcccagacctcgcagggagccctgtgagagaccatag

SEQ ID NO: 207714 - DNA, 879 bp, synthetic construct
  misc_feature 1..879: note = Description of Artificial Sequence: Synthetic coding sequence
  source 1..879: mol_type = other DNA
tgaccccggccccagcaggcccaggtgggcggcagcggcccctggttgctgagcacaagcggcgcagattcaggtcgtggagcgttactgcccagggccgcctctcgcccgcggccgcgcgcactgggggccggcgttggcaaagaaggcgctccaaggcacctcccccccctccagaccaaggctgcctctcagatactggagaacggcgaggaagcgcccggccctgacccgtctctggatagaatgcttagtagtagttcttctgtgtcttctctcaatagttcaacattatccggctcacagatgtctttgagcggagatgcagaagccgtccaggtgcgggggtctgtgcacttcgccctccactatgagcctggggccgctgagctgagagtgcacgtaatccaatgtcagggcctcgccgccgcccgcaggcgacgtagtgatccctacgttaagtcctatctgctgccagacaaacagtcgaagcgaaagaccgctgtgaaaaagagaaacttgaatccagtatttaacgaaacccttcgctactcggtcccccaagcagaactacaagggcgcgtcttgagcctgtctgtctggcatagggagagtcttgggagaaacattttccttggcgaagtcgaggtgccattggacacctgggactgggggagcgaacccacctggttgcccctgcagcccagggtacctccatcccctgatgacctcccaagccgcggtttgctcgcactgtcactgaaatacgtaccagccggcagcgagggtgcaggtctccctccgtcaggggaattgcacttctgggttaaggaagcccgggatctgctcccattgcgcgccgggtctctggacacctag

SEQ ID NO: 207715 - DNA, 1689 bp, synthetic construct
  misc_feature 1..1689: note = Description of Artificial Sequence: Synthetic coding sequence
  source 1..1689: mol_type = other DNA
atgccccagcggggccaccccagccaggagggcctgtgggccctgccaagtctgcccatggctcatgggccaaagccggagacggagggtttgctcgatctcagttttcttaccgaggaggagcaagaggcgatcgccggcgtgctccaaagggacgcaaggcttcgacagctcgaggaaggtagagtatcgaagctgcgtgcttctgtggccgatcccgggcagctgaaaattttaacaggcgattggtttcaggaagcaagatctcagcgccatcacaacgcccactttggaagcgacctggtgagagcctcaatgcgccgaaagaaaagcacgaggggggaccaggctcctggtcacgaccgtgaagccgaggccgcagtgaaggaaaaagaggagggacctgaaccccgactaactattgacgaggccccccaggagcgcttgagagaaaccgaggggccagatttcccctctccaagcgtgcccctgaaggcatccgaccctgaagaagctagtcaagcacaggaggatcccggacagggagaccagcaggtgtgcgcagaggaggccgacccggagctcgagccagccagcggcggagagcaggaaccccgcccgcagcaggcccagaccaaagcagcgagccaaatcctcgaaaacggggaagaagctcctggcccagaccccagtctggatcgaatgttgagttcatcctcatctgtgtcctcactgaactcctccacactatccggctcccagatgtcgctgtcaggagacgctgaggctgttcaggtgcgtggctctgtacacttcgcgttgcattatgaacctggcgccgcggaacttagggtccacgtcattcaatgccagggtttagccgcggcccggaggcgaaggtccgacccatatgtgaagtcctacctcctgcctgataagcagtctaagaggaaaacagctgtaaaaaaacggaatctcaatcctgtgttcaacgagacactccggtactctgtccctcaagccgaattacaagggcgggtgctctctctatcagtctggcatcgggagtccctgggtcgaaatatattcctcggagaggttgaagttcccctggatacatgggattggggaagcgagcctacatggcttccactgcagccccgcgtgccaccatcccccgacgaccttccctccaggggattgcttgccctatccctcaagtacgttcctgcagggtctgagggcgccggtctaccaccgtccggagagcttcacttttgggtgaaggaagcccgggacctgctgcccttgcgggccggctccctggacacttacgtccagtgttttgtcttgccagacgattcacaggcttcacgccaacgcactcgcgttgtcaggcggagcctaagccctgttttcaaccatacgatggtttacgatgggtttggacctgctgatctccggcaggcttgtgctgagctctctctttgggaccacggcgccttagctaaccgtcagcttgggggcactaggcttagccttggaactggatccagctacggactgcaggtcccgtggatggacagtactccggaagaaaagcagctgtggcaggcactgcttgagcagccctgcgaatgggtcgacggactgttgcctctgaggactaatctcgctccacgcacgtag

SEQ ID NO: 207716 - DNA, 2808 bp, synthetic construct
  misc_feature 1..2808: note = Description of Artificial Sequence: Synthetic coding sequence
  source 1..2808: mol_type = other DNA
atgatcgacctgagcttcctgaccgaggaggagcaggaggccatcatgaaggtactgcagcgtgacgcggccctcaagagggccgaggaggagagggttcgccacctgcctgagaagatcaaggacgatcagcagctcaaaaacatgtcaggtcagtggttctacgaggccaaagcgaagaggcacagagacaaaattcacggggctgatatcatccgcgccagcatgcggaagaaaagaccacaaattgctgccgaacaaagtaaggatcgcgagaatggtgcgaaggagagctgggtgaataacgtgaataaggacgcgttcctgccccctgagttggctggcgtggtggaggagccggaggaagatgccgcccctgcgagcccaagttccagtgtggtgaaccccgccagcagcgttattgatatgagccaggagaatacacgaaaacccaacgttagtcctgaaaagcagagaaaaaacccctttaacagcagcaagctacccgagggacattcttcgcagcagactaagaacgagcagagcaagaatggcagaactggattgtttcaaacgtcgaaagaggatgaactctccgagtccaaggagaagtcaaccgtggcagataccagtattcagaaactggagaaatctaaacaaacactgcctggtcttagtaatggcagtcagatcaaagcccccatcccaaaggctcgcaagatgatttacaagagtacggatctcaataaagacgacaaccagagctttccacgacaacgcactgactctctgaaagcacgaggcgcaccccggggaatccttaaaaggaattcaagctcctcatctacggactcagagaccctaagatataatcacaattttgaaccgaaatctaaaatcgtgtccccgggcctgaccattcatgaaaggatcagtgagaaagagcactccctggaggacaattcaagtccaaatagcttggaaccactgaaacacgtgcgattttctgctgtgaaggacgaactcccgcagtctcccggactgatccacggcagagaggtgggggaattctccgtgttagaaagtgacaggcttaaaaacgggatggaggacgcgggagacaccgaggagtttcaatccgacccaaagccatcccagtatcggaagcccagcctgtttcatcagtcaacctctagcccatacgtgtcaaaatctgagacgcaccagcctatgaccagcggctccttccctatcaacggactgcattcccatagcgaggtactaaccgctcgaccgcagtccatggaaaattctcccacgattaatgagccgaaagataagtcatccgaactgacacgcttggagtcagtgttacctcgttcccctgcggatgagctcagtcattgcgtggaaccagaaccctcccaggtaccaggcgggtccagcagagataggcagcagggttcggaggaagagccctcgcccgtcctaaagacccttgagaggtccgcagccagaaagatgcctagtaaatcactagaagatatatcatcggattctagcaaccaggccaaagtggataaccaacctgaggaactggttagaagcgccgaggatgtttctacagtccccacacaacccgataatccattttcacatcccgataagttgaagaggatgtcaaaatccgtccccgctttccttcaagacgagtccgatgaccgggaaacggacacagccagcgagtcttcctaccagctgtcacgccataagaagtccccctcgagcctgacgaatctgtcttcaagctctgggatgacttcgctgagctcagtctccggtagcgtcatgagtgtgtattctggggatttcggaaatctagaggttaagggaaacattcaattcgcgatcgaatatgtcgaaagcctgaaagaactgcatgtgtttgtagcccagtgtaaggacctcgcagcagcagacgtgaagaaacagcgttccgacccgtacgtaaaagcctacctgctacctgataagggcaagatgggaaaaaagaagaccctagtggtcaagaagacactcaaccctgtgtacaacgagatcctgcgatacaagatcgagaagcagattctcaaaacgcagaaactgaacctgagtatctggcacagggatacctttaagcgaaattctttcctaggagaggtggaattggacttggagacttgggattgggacaataaacagaacaaacaacttcgttggtacccgctaaagcgaaaaacagcccccgttgccttggaagccgaaaacaggggcgagatgaaattggctttgcagtacgttcctgagccagtgcctggtaaaaaactgccgactaccggcgaggtgcacatctgggtgaaagagtgtttggacttgcccctgctgcggggctctcacttgaatagctttgttaagtgcactatacttccagacaccagtagaaaatccaggcagaaaactagggcagttggaaagaccaccaatcctatctttaaccacaccatggtatatgatgggttccgccctgaagatttaatggaggcctgtgtcgaactgaccgtctgggatcactacaagttgacaaatcagttcctgggtgggttgcgtatcggttttgggacaggaaagagctacgggaccgaggtagattggatggatagtacaagcgaggaggttgctctctgggaaaagatggtcaacagtccaaatacttggatcgaggccaccttgcctctcagaatgctgctcatcgccaaaatcagcaagtag

SEQ ID NO: 207717 - DNA, 3819 bp, synthetic construct
  misc_feature 1..3819: note = Description of Artificial Sequence: Synthetic coding sequence
  source 1..3819: mol_type = other DNA
atggacgagcccaacgccgagcaggtgtacaaccccagccagttcgaaaatctgcgcaagttctgggaccttgaggctaatagcaacagtaaggacaacgacaagaacatcacaacaacttcacagaagaactccgcaccctttaataggcagaaacacaaggagttcagcgatattaaactaagcggcaagaacacacatgaggcggaagtcctcctatccccgaagaaggtcatggcccgagaagagatggagaaactgaattctaagggtatcctccaggtcctgcccgacgaaataaccttccctctgtcaccgctgcgcaaatacacatatcagcttcctggcaatgagtcttctaaagaaaatgttgagaaaaatacagagggcattgtcacccccgtgtttaaggaagagaaggattattcagaacaggaaattcaggaatcaatcatcaagaccaatgtgctgagtaaggattgcaaggacacttttaatgacagtctccagaagctcctatccgagaccagcactccagcaattcagccaagtggtgggaaagtccacggaaagcaggtgctggagccgtcagtttcagagaataggacctggccccagaaaaccgattttgccgacacggaggaagaggtgaagggcccagaaaagataatcaacgagcatgttgataaaacggtggtgcaccccaaggtcaaaagaaacagcctgactgcctctttagataagctgctcaaggaagccaccgggacgtcccccagtcccctccaagcgaaactggccccagtgattaccggaactaactccaagctggaagaagggagattcttcggcaagggcatcgagcaaagccataacacatccgcggataagagggagattttggccccctttccggtacgtgatgagacgtttggtaatacagccctgctgaagaaagctgaatctggcgagtgtcagctctcgacacagaatctgatccagatggcggcagaggacagtcaccctctggaccccactagccaactttcacgcaagggctcattcggcgacgttgccagtcctccacaggacatgctgtttccacaagatgctcacttggtcccccaggcccgggtgcatcccagccaaacagagattagtgaaaccgtagaaaaagtcatactcccaccccggcctgtcctgaatgatgtttcagccgctctgcagaaattgtgtggcgaggtatggctgagttacccagccggacgggaagtgggtcctggagaggtgaatccggagtttccagaagccgtgcaacccgtttgttcacccctcaaccccccgggtgttatcagtccatgggcgaccatggatacgatcgttcctgacagaaaggacttctattccagcaacgtcgtgcccgataagacacacgaagtggggtcatatttagctgcccagatgtcccccagtgaccagactttgtcttcgttcgcaagcatcgtagcgcagtacggaaaaggactgccccaggaggtggaagagatcgtgcgtgagaccattgtacaaccgaaaagtgagtttctcgaattctctgcaggccttgagaagctgctcaaagaggagaccgagacttttccctccaagtatgagtccgatacaggcaacctgtctccaagcaaacttattgggagcaccgaggagccccgaagagctacatccgaatgtcacccagaagaacttaaggaaactgtcgaaaaggctgaagcccctttgatcactgagtcggcctttgacgccggattcgagaaattactgaaggaaatcaccgaggctcccccctatcaaccccaggtgtctgtccgagaggagacccacgagaaagagagctcccagagtgagcaaaccaggttcctcggaaccgtcccgcatttctaccgggccgccagtcagacctctgagatgaaagataagagcaatggtctggaaagccaggtgaatcagtgcgacaagatgctgggaggggacgccctggtgacagaccttctggtggacttttgcgggtctagatctggggtggagattcccagaacgccccagctgtatgtggcacatgagattggaacaatcaaaaccgtcacacccccagaagacagggactctgaatccggcgtcgcgggcggtcaagggacccttcaggaaccaggcttcggcgaggccagtgaggccatttcagtctctcggaataggcagcccatcccgttgcttatgaacaaggaaaattcaaccaagacaagcaaagtcgagttaactttggcttcaccttacatgaagcaggagaaggaggaggaaaaagagggcttttccgaaagcgacttttctgatggaaatacatcctcaaatgcagagtcctggcgtaatccatcctcatcggaggaggaacctagcccagtactgaagacattggagaggtccgccgccagaaagatgccaagcaagtctctggaagacatctcctccgattccagtaatcaggcaaaggtggacaaccaacccgaggagctggtgagaagcgcagaagacgacgagaagcccgaccagaagccagtgacgaatgaatgcgtgccgagaatctctactgtccccacccagcctgataatcccttttcccaccccgataaactgaagagaatgagtaaatcagtgcccgcgtttctgcaggatgagtcggacgaccgggaaaccgatacggcttccgagagctcttatcaactgtcccgtcataagaaaagcccatcctccctgacaaacttatcttcctcctctggtatgacctccctttcctccgttagtgggtcagtgatgagcgtgtactctggtgacttcggtaacctggaggtgaagggaaatattcaatttgcgattgaatatgtggagtctctgaaggagcttcacgtatttgtggcccagtgcaaggacctggctgctgctgacgtgaaaaaacaacgatctgacccctatgtgaaagcctatttacttccagataaaggcaagatgggaaaaaaaaagaccctggtggtgaaaaaaacacttaatccagtttataatgagatactaaggtataagatcgaaaaacagattctgaaaacccagaagttgaatctgagtatttggcacagggatacatttaagaggaattcctttctgggtgaagtcgaacttgatctcgagacatgggattgggacaataaacaaaacaaacagctcaggtggtatccgctgaaacgaaagaccgcaccagtcgccttggaggctgaaaacagaggtgagatgaagctggcactgcaatatgtacctgagcctgtccccggaaagaaacttcccacaactggtgaggtgcacatctgggttaaagagtgcctggacctgccactgctgcgtggatcacatctgaattctttcgtaaagtgcacaatactcccggacactagccgcaagagtcggcagaaaactcgggcggtgggcaagacaactaaccctatcttcaatcatactatggtgtatgacggctttagacctgaggacctgatggaagcctgtgtggaactgacggtgtgggaccactataaactcactaatcagttccttggaggtctgagaattggattcggcaccggtaaatcctacgggaccgaagtcgattggatggactccacttctgaggaagttgctctgtgggagaagatggtgaactcccctaacacatggatcgaagctactcttcccttaagaatgctactaatcgcaaagatctcaaaatag

SEQ ID NO: 207718 - DNA, 5343 bp, synthetic construct
  misc_feature 1..5343: note = Description of Artificial Sequence: Synthetic coding sequence
  source 1..5343: mol_type = other DNA
atgatcaacagcagcctgagcatgctgttcagctacctggagaagtacttttacgttgccgatgagctgagccactgcgtggaacctgagccctctcaggtgccaggtggatcctccagggaccgacagcaggggaaaccccccccattgcctgccctcaaagctaagacaagctcaagaagtgggccttacgctacagagattaagaagtcgacagatgacagcatctttaaagttttggactggtttaatcgttcatcgtacagcgatgacaacaaaagcttcctgcagcatccccgcgggattgagagcaaagaaaaaaccgactcaaagagtcaggtggcagttgacctcgtgacagatgacacaaccctgagagaaaacgggagcaaaactctcagcccctctaagattgagctgaagcctgtccgaagcgattccccttttcaggcagagggcgacatgctcgtgtcagaatcatgtcaggataacaatgtcaacatcaaaagcaaattcatgaacctctcacagaaaggcacacccaaggaggggcctggtatactacaaccttttgagtcatacggaacgccatcacagggttcaaaaaatatggattatagtcaagacagtaaaagtccaggaaagggtaacggcgcaagcccctctaatagcaattatagttatagtgtgctcaaagagagcgacgctgaaaaccaggtcccatgtaacactaacaatataggcaatctgggagaggaagaaccgaagttccacgcccacgaggaaaaccgtggacatagtgaggtgaatttcgatagctctacggtggtgaaggaacctggcctgaaggacaacatgaatgcagaacgtaaatccaaagtcggcaatacctatatcttgaaggcttctctggaaccggagaatatcaaatctactcccggcgtagccaacaatggctctccttggaagaagcctgaagtgcaatttcaacaggaagccggcgaagtgccgaaaaatcaggtgcagagggagaagtataaacgcgtcagtgacagaatcagtttctgggagggcgaaaaagcaggggcgaaaataacccatgagaaacctacctcgagctgtagccaagagcagcctagcgccaaggcttatcagcctgtcaaaaaaagccagggcgtgagttctatggatagccttagcactgaccagtctgagtataatcaggctattcccaagcgcgttgtgcttgacgaagacgaccaagccagtcaactcagcaactcctattcatctaataaatcgaaggaaacaaagccccaaatcgctggcccttcaagatattatctgtctgccgaacagtcagataaggtctcactgttccagaataaaaagaacgagcctattaaaaggagccaggttgctgactccctgccctcaagaagaaacataacgttacctgcgctgcaacccccttctaatgtcggatccgagcgacacgcacctttggagaaggatcggcccctggttagggagtccaacgcaaacttcaaggtgatgtccctgaaggaacgaatggacgaacccaatgccgaacaagtgtacaatcctagccaattcgaaaatctccgtaaattttgggatctggaagccaattccaattcaaaggataacgacaagaatattactacgacctcacagaagaattccgctcctttcaacaggcagaagcataaggaattttctgatatcaaactgtcaggaaaaaatactcatgaagcagaagtgctccttagccctaaaaaggtgatggctcgagaagaaatggagaagttaaacagtaaggggattctccaggtgctgcccgatgaaataacgtttcccctcagccccctgaggaaatacacatatcagctccctggaaacgagagctctaaggagaatgttgaaaagaatacagagggcatcgtcacacctgtctttaaagaggagaaagattactccgagcaagaaattcaggagagcattattaagactaatgtcctgtcaaaagactgtaaagacaccttcaacgactctctgcagaagcttctgtcggagacttccacgcccgcaattcagcccagcggcggtaaagtccacggcaagcaagttctggagccttccgtgagtgagaacagaacttggccccagaagacggacttcgcagacaccgaggaagaggttaaaggccccgaaaagatcatcaatgagcacgtggacaagacggtcgtgcatccaaaagtgaagcggaacagtctgactgccagcctggacaagctgctgaaggaggccacaggaacatccccttctccactgcaggccaagcttgctccggttatcaccgggactaatagcaagctcgaagagggcagattttttggcaaaggcatagaacaatcccacaatacgagcgcggataagcgggagatcctggccccattccctgttcgcgatgagacgtttggaaataccgccttactcaagaaagctgaatccggggagtgccaactgtctacacagaatctcatccagatggccgctgaagacagccatccccttgaccctacctcccagctcagtaggaagggctcgtttggagacgtggcgtcgcccccccaagatatgctcttcccccaggacgcgcacctcgtgccccaggcccgggtgcatcccagccagacggagatctccgaaaccgtcgaaaaagtgatcctgccccctcgtcctgtgctgaatgacgttagcgctgccctccagaaattatgtggagaagtctggctttcataccctgctggtagggaggttgggccaggggaagtgaacccggaatttcccgaggctgtgcaaccagtctgtagccccctgaatcccccaggggttatctctccctgggctactatggatacaatcgttcccgatcgaaaagatttctattcctctaatgtggtccctgataaaacgcatgaggtgggaagctacttggccgctcagatgtcgccaagcgaccaaaccctatcaagcttcgcatccatcgtagcacagtatgggaaggggttgcctcaagaggtggaggaaatcgtgagggagacaatcgtccagccaaaatcagaattcttggagttctcagcaggcctcgagaagctccttaaggaggagaccgagaccttcccatctaagtatgagagcgacactggaaacctgtcgccaagtaagctcattggatcaactgaggagcccagaagagcaacaagtgagtgccatcctgaagagcttaaggagactgtggaaaaagcggaggccccactgattacagagtcagcgttcgatgctggatttgagaagctgctgaaagagattacggaggcccctccctaccaacctcaggtgtctgtgcgcgaagagacccacgagaaagaaagctcccagtccgaacagacacgtttcctgggtactgtacctcatttttatagggccgcatcccaaacgtctgaaatgaaggataagtccaacgggctggagagccaggtgaaccagtgcgataaaatgctgggaggtgatgcattagtgactgacttgctggttgacttttgcggctcgcggtccggcgtggaaatccctcgcacacctcagctctacgtggcgcatgagatcggcaccatcaaaactgtaacgccgcctgaggatagagactccgagtctggcgtggccggcggccagggtactttgcaggagcccggcttcggggaggcaagcgaagcaatctccgtgagtcgaaatagacagcctatccccttgctgatgaataaagagaactctaccaagacctccaaagtcgaacttactctggcgtcgccatacatgaaacaggaaaaggaagaggaaaaagaagggttcagcgagtcagatttctcagatgggaatacatcttcaaatgccgaaagctggagaaacccatcttccagtgaggaggagccctcacctgttttgaaaactttggaacgatccgcagcccgcaaaatgccatccaagagcctggaagacatcagctctgactcaagtaaccaggcaaaagtcgataatcaacctgaagaattggtacggagcgccgaggacgtcagcacggtgcccactcagcccgacaacccgttcagtcatcctgataagttaaaacgcatgtcgaaatctgtgcctgcgtttttgcaggatgagtccgacgaccgcgaaacagacacggcaagcgagagtagttaccagttgtctcggcataagaagtcacctagttcactgacgaacctgtcctcatcatctggcatgacaagtttatcttcggtgtccggatctgtgatgagtgtctattccggtgattttggtaacctggaagtgaaaggaaacattcagttcgcaattgagtacgtggaatccctgaaagaattacacgtatttgtggcccagtgtaaggacctcgccgctgccgacgttaaaaaacagcggtccgatccgtacgtaaaggcttacctgctgcccgacaaaggaaagatgggcaagaaaaagactctcgtggttaagaaaacactcaatcccgtgtacaacgaaattcttcgttacaaaatagaaaagcaaatactgaagacccagaagctcaacctctctatctggcacagggatactttcaaacggaactccttcctgggcgaagtagaacttgatttagagacctgggactgggataacaagcagaacaagcagctccggtggtacccactcaagaggaagactgcaccagttgcactggaagccgagaatcgaggggaaatgaagttggcattacagtatgtccctgaaccggtccccggtaagaagctcccgacaactggggaggtacacatatgggtcaaggaatgtctggacctgcctttgctcaggggatcgcacctgaatagctttgttaaatgtaccatactgcctgacacctctaggaagtccaggcaaaaaacccgagcagtcggaaagacaacaaaccctatattcaatcatacgatggtttacgatgggtttagaccggaagacctgatggaggcctgcgttgagctgacagtgtgggatcactacaaattaacaaaccagtttctgggaggccttcggatagggtttggaactgggaaatcatatggtacagaagtggattggatggattccacctctgaagaggttgccctgtgggaaaaaatggttaatagcccaaatacttggattgaagctactctgcctctgagaatgctattgatcgctaagatctctaaatag

SEQ ID NO: 207719 - DNA, 1098 bp, synthetic construct
  misc_feature 1..1098: note = Description of Artificial Sequence: Synthetic coding sequence
  source 1..1098: mol_type = other DNA
atgagcgacgaccgggagaccgacaccgccagcgagagcagctaccagctatctagacacaaaaagagtccctctagcctgaccaacctctctagcagttccgggatgaccagcctgtcaagcgtaagtggatctgtgatgtctgtctacagcggcgatttcggcaatttggaagtcaaagggaacatacagttcgcaattgagtacgtcgagtctctcaaagagctccatgtctttgtcgcccagtgcaaggatctggcagccgctgacgtgaagaagcagcggtctgatccttacgtgaaagcctatcttctgcctgacaaaggtaaaatgggtaaaaagaaaaccctggtggttaaaaaaactctgaatcctgtgtataatgaaatcctgcgttacaagattgagaagcagatccttaagactcagaagctgaacctttccatatggcaccgagacacttttaaacggaattccttcctcggcgaggtggagcttgacctggagacatgggactgggataataagcagaacaagcagctgcggtggtatcctctcaaacgcaagaccgcacctgtagccctggaggcagagaacaggggcgagatgaagctcgctttgcagtacgttcctgagcccgttccgggcaagaagctccccacaacgggggaggtgcacatctgggtaaaggagtgtttggacctgccactgctgagggggtctcacctcaacagtttcgtgaagtgtactattctcccagatacctctaggaaatcaaggcagaagaccagagccgtcgggaaaaccaccaatcccatttttaaccacacgatggtgtacgatggttttcggcccgaagatcttatggaagcgtgcgtcgaactaacagtatgggatcattacaaactgaccaatcaatttttaggcggcttaaggattggattcgggacgggtaaaagttatggaactgaggtggattggatggattctacttctgaagaggtcgctttgtgggagaaaatggttaacagtccaaatacttggatcgaggcaactctccccctgcgcatgctcctcatcgctaagatatcaaagtag

SEQ ID NO: 207720 - DNA, 2733 bp, synthetic construct
  misc_feature 1..2733: note = Description of Artificial Sequence: Synthetic coding sequence
  source 1..2733: mol_type = other DNA
atgatcgacctgagcttcctgaccgaggaggagcaggaggccatcatgaaggttttgcagagagatgcagccctgaagcgagccgaggaggaaagggtgcgacacctgccggagaagatcaaggatgaccagcagttgaagaacatgagtggccaatggttctacgaagctaaggctaaacgccatagagacaaaatccacggagccgacattatcagagcctcaatgagaaagaaacgcccgcaaattgccgctgagcaatcgaaagatagggagaacggtgctaaggagagctgggtcaataacgtaaataaagacgcgtttctgcctcccgagctcgcaggggtggtcgaggagcctgaagaagacgcagcccccgcctcgcccagcagcagtgtcgtcaacccggcctccagcgtgattgacatgagccaagaaaacacgcgcaagcccaacgtttccccagaaaagaggaagaatcccttcaactcctcaaaactcccagaaggacactcgtcacagcaaaccaaaaatgagcagtctaaaaatggaagaactgggctgttccagacttctaaagaggacgaactttctgaaagcaaagaaaagtcaacagtggcagacacctctattcaaaaactcgaaaagagtaaacaaacgctgcctggactaagcaacggatcccagattaaagcaccaatcccaaaggcccgaaaaatgatttacaagtccaccgacctcaataaagatgataaccagagttttccccgccagcgtactgatagcctgaaagctcgaggtgcacctcggggaatcttgaaaaggaattcctcttctagctctacagatagtgagactctgcgctacaaccataatttcgaacccaagagtaaaatagtgagtcctggactgaccatccacgaaaggatctcagaaaaagagcacagccttgaagataattcctcaccaaattcattggaaccactcaagcacgttcggttctccgcagtaaaggacgagcttcctcagtcaccgggccttattcatgggcgggaggttggcgagttttcggtgctcgagtctgaccggttgaagaacggaatggaggatgccggagataccgaggaatttcaaagtgatccaaaaccttcacagtacagaaagccaagtctcttccatcaaagtacatcgtccccatacgtcagcaaaagtgaaacccaccagcccatgacttctgggagttttcctataaatggcctgcacagccactcagaggtgctgaccgcaagacctcagtccatggagaacagccccaccatcaatgaacctaaagacaaatctagcgagctaacgcggttggaatctgtactgcccagatcccctgcagacgagctgtcccactgtgtggagccggaaccttctcaggtgccaggtggatcctccagagaccggcagcaggggtccgaagaggaaccatcgccagttctaaagacgctggaaaggtccgccgctaggaaaatgccatccaaatccctcgaggacatctcctctgattcctccaatcaggccaaggtggataatcagccagaggaactagttaggagtgcagaagacgatgagaaaccagaccagaagcccgtgacaaacgagtgcgtgcccagaattagtacagtgcccacccagcctgataatccatttagccatccagacaagttaaaacgcatgtccaaaagtgtgcctgcatttttacaggacgaagtgtctggctccgtgatgagcgtctactcaggagacttcggaaacttggaagtgaagggcaacatccaattcgctatcgagtacgtcgagtcattgaaggagcttcacgtattcgtggcccagtgcaaagacctggcagccgccgacgtgaagaagcagcgcagcgacccttacgtgaaagcctacctactgccagataaggggaagatgggaaagaagaaaacacttgtcgttaagaaaacactcaatccggtgtataatgaaatactgcggtacaagattgaaaaacagatcctcaaaacgcagaaactgaacctgagtatctggcatagagacacatttaagaggaactcttttctgggcgaggtcgagctggaccttgagacctgggattgggacaacaagcagaataaacagctgagatggtacccactgaagagaaaaaccgctccagtggcattagaggctgagaacagaggagaaatgaagctggcattgcaatacgtgcctgaacctgtcccaggcaagaaattacccactaccggcgaagtgcacatttgggtgaaggagtgtctggacctgccccttctgagaggcagtcaccttaattcctttgttaaatgcactattcttcccgatacttcccggaagtcaagacaaaagacgcgtgctgtcggaaagaccacgaaccccatcttcaatcacacaatggtgtacgatggctttcggcctgaggacttaatggaggcttgcgttgagcttacagtgtgggaccactataagctgacaaatcagttcctggggggcctgcgcatcggattcgggacaggtaagtcctacgggacagaggtcgactggatggattcaacctctgaagaggtggcactgtgggagaaaatggtgaactcccccaacacctggattgaggcaacattgccattgcgtatgcttctcatagcgaagatctctaagtag

SEQ ID NO: 207721 - DNA, 2733 bp, synthetic construct
  misc_feature 1..2733: note = Description of Artificial Sequence: Synthetic coding sequence
  source 1..2733: mol_type = other DNA
atgatcgacctgagcttcctgaccgaggaggagcaggaggccatcatgaaggtccttcagcgcgatgccgcactaaagagggcagaggaagagagggtgcggcaccttcccgaaaagattaaggatgatcagcagttgaagaacatgtctggccagtggttttacgaggctaaagctaaacgtcatagagataaaattcacggcgcggacattattagagcaagcatgagaaagaaacgcccccagatagccgccgagcagagcaaagaccgagagaatggtgccaaggaatcctgggtcaacaatgtcaataaggacgccttcctgccccccgaactggccggtgtggtggaggagcctgaagaagacgctgctcccgcatcccccagctcttccgttgtgaatcccgcttcatctgtcatcgacatgagccaggaaaatacaagaaagcccaatgtgagccctgaaaagaggaagaacccattcaacagttctaaactgccagagggccactcctcgcagcaaacgaagaatgagcagtcaaaaaacggtagaaccggcctgttccagacctccaaggaagatgagttgtcagaatccaaagaaaaatccaccgtcgctgatacctcaatccaaaagctcgaaaagtccaaacagaccttgcctggattgtctaatggctcccagatcaaagcgccaatcccaaaggcccggaagatgatatacaagtcaactgatctgaacaaagacgataatcaatccttcccccgtcagcgcactgattcgctcaaagcacgcggagccccgcgggggatactcaagcggaattcaagcagctctagtacagacagcgagaccttaagatataaccataacttcgaaccaaagagcaagattgtgtctcctggactcaccatccacgagcggatctccgagaaggaacactccttggaggacaacagctcaccgaacagtcttgagcctcttaaacacgtgcgcttctcagctgtgaaagacgaattaccccagtcaccaggtttgatccacggccgagaggtcggcgagttctccgtcctggagtcggatcgccttaagaatggaatggaggatgctggagacactgaggaatttcagtcagatccgaagccatcccagtacagaaaacctagcctgttccaccaaagcacgtcaagcccctacgtcagtaaatcggagacccatcagcccatgacatccggaagcttcccaataaacggcctgcatagtcattcggaggttctgactgcgcgcccgcagagcatggagaattcacccacaatcaatgaaccaaaggacaagtcaagcgagctgacccgactggagagcgtgctgccacgctcaccagccgacgaactgagccactgcgttgagccggagccaagccaggtgcctgggggttcgtcccgtgaccggcagcagggctcagaggaggagccaagccccgttttgaagacactggagcggagcgcggcccggaaaatgccaagtaagtccctggaggatataagtagcgatagctcgaatcaggccaaagttgacaatcaacccgaggaactcgtgcgatctgcagaagatgacgagaagccagaccaaaaacccgttaccaatgaatgtgtgcctcgcatcagcacagttcctacacagcccgataatccgtttagccacccagataagctgaagcgaatgagtaaaagcgtccctgcttttttgcaagatgaggtctctggctctgtgatgagcgtgtactcgggagattttggcaacctcgaggtgaaaggcaatattcagtttgccattgagtacgtcgagtccttaaaggagctccatgttttcgtcgcacagtgtaaggacttggcagccgcagacgtgaagaaacaaaggtccgacccctacgtgaaagcctacctgttgccggacaaaggaaaaatgggaaagaagaaaaccttagttgtcaagaaaaccttgaatccggtttataatgaaattctgcgctataaaatcgagaaacagattctcaagactcagaaacttaatttgagtatctggcatagagataccttcaagaggaactccttcctgggggaggttgaactggatcttgaaacttgggattgggacaacaaacagaacaagcagttgcgatggtatcctctcaaaaggaaaaccgcccctgtggctttggaggccgaaaaccggggcgagatgaaacttgctctccaatatgtccccgagcccgtgcccggcaagaagctgccaacgactggcgaggtccacatctgggtgaaagaatgcctggatcttcctttactaagaggctcgcacttaaatagcttcgtgaagtgcacaatcctgcctgacacgagccggaagtctcgccagaagacccgggctgtcggaaagaccacaaatccgatctttaatcatacaatggtatacgacggatttagacccgaagatctaatggaggcgtgcgtcgaactcaccgtttgggaccactacaaacttaccaatcagtttttaggggggctgcgtattggcttcggcaccggcaaaagctatggtaccgaggtggactggatggactccacaagcgaggaggtggcactttgggaaaagatggtgaacagtccaaacacgtggatcgaggcgacccttccactgaggatgctcctcatcgcaaagatcagtaagtag

SEQ ID NO: 207722 - DNA, 192 bp, synthetic construct
  misc_feature 1..192: note = Description of Artificial Sequence: Synthetic coding sequence
  source 1..192: mol_type = other DNA
atgagcaagagcgtgcccgccttcctgcaggacgagagcgacgaccgtgagactgacactgcctctgaatcttcataccaactcagccggcataagaagagcccttcatctttaactaacctaagttcgagctcagggatgacctccttgagcagcgtcagcgggtctgtcatgagcgtttatagcggatag

SEQ ID NO: 207723 - DNA, 3771 bp, synthetic construct
  misc_feature 1..3771: note = Description of Artificial Sequence: Synthetic coding sequence
  source 1..3771: mol_type = other DNA
atggacgagcccaacgccgagcaggtgtacaaccccagccagttcgagaatttacggaagttctgggacctggaggcaaactctaactccaaagacaacgataagaacatcaccactacatcgcagaaaaattccgcaccattcaacagacagaaacacaaggagttctctgacataaagttgtctggtaaaaatactcatgaggccgaagttttgctgagtcctaaaaaggtcatggcccgcgaggagatggaaaagttgaatagtaaaggaatcctgcaggttctaccagatgagatcacgttcccattgagccctctgcggaagtacacctaccagctcccaggcaatgagagttctaaagagaatgtggagaagaataccgaaggtattgtgacccctgtgttcaaagaagaaaaggattactcagagcaagaaattcaggaaagtattatcaagacaaatgtcctgagtaaggactgcaaagacacattcaacgactccctgcagaagctgctgagcgaaacttccactcctgctatacagccatcaggaggaaaagttcacggaaagcaggttctggagccctccgtgtccgagaaccgtacttggcctcaaaaaacggattttgccgacaccgaggaagaagtgaaagggccggaaaaaattattaatgagcacgtggacaagacggtagttcatccaaaagtgaagaggaatagtctgaccgcttcgctggataaactacttaaggaagctaccggcactagcccttccccccttcaggccaagctggctccagtgattacagggaccaatagtaagcttgaagagggtcggttttttggcaaaggcatcgagcagtcacacaacactagcgctgataaaagggaaatactggcacctttccccgtgagggacgagaccttcggtaatacagcgctcctaaagaaggccgagtccggagagtgccagttaagcacccagaaccttatccagatggccgccgaagatagtcatccgctagatccgacctctcagttgtccagaaagggctcttttggcgacgtggcttcaccgcctcaggacatgctgtttccccaggacgcccacctcgttccacaggcaagagttcatccctcgcagactgaaatttccgaaacagttgagaaggtcatcctccctccgagacctgtgctgaatgacgtgtctgccgcacttcaaaagctgtgcggcgaggtgtggctgtcctatcccgctggccgagaggtggggccaggcgaggtgaaccccgaatttcctgaagctgtccagccagtatgttcaccgctcaatccacctggagtgatcagtccctgggctaccatggatacaatcgtgcctgacagaaaggatttctacagctcaaatgttgttccagacaagacacatgaggtcggctcatacctcgcggcccagatgagtccttccgatcagacacttagtagttttgcctcaatagtagctcaatacggcaaagggctgcctcaggaagttgaggagatcgtcagggagaccattgtccagcccaaatcagagttcctcgagttttcggccggcttggaaaagctgctgaaggaagaaaccgaaactttcccatcaaaatatgagtccgacaccggtaatctttctcccagcaagttaatcggaagcaccgaagaaccaagacgtgctacgtcagagtgccaccccgaggagcttaaggagaccgtggagaaggccgaagctcctctgatcaccgagtccgccttcgatgcagggtttgagaaactcttgaaagagataactgaggcccccccgtatcagccgcaggtgagcgttcgcgaagaaacacacgaaaaagaatcatctcagtccgaacagacccggttcctgggaaccgtccctcatttctatcgggcagccagccagacatccgagatgaaagataagtccaatggcctagaaagtcaggtgaaccagtgtgacaagatgttgggcggagatgccttggtgaccgatctcttggttgatttctgcggatctaggtccggggtggagatccctcgcactccacagctctacgtggcgcacgaaatcggcaccatcaagacagtaacccctcccgaagatagagactctgagagcggcgtggcaggggggcaaggtactttacaggagccgggttttggagaagcttcagaggctatttccgtgagtagaaatcgtcaacccattcctctgcttatgaacaaggagaactccaccaaaactagtaaggtggaattaacactggctagcccttatatgaaacaggaaaaggaggaggaaaaagagggcttttcagagtctgattttagcgatggcaatacctctagcaatgctgaatcctggcgcaatccatccagctccgaagaggagcccagccccgttcttaagactctggaacgctccgccgcccgaaaaatgccttctaaatctttggaggacatttcttctgacagttctaaccaggctaaggtggacaaccagcccgaggaactggtgcgaagcgcagaggatgtttcaacagtgcccacacaaccagataatcctttttctcacccagataagctaaagcgaatgagcaagagcgtccccgcgtttctgcaggacgagtctgatgatagggaaaccgatactgcttcagaatcatcttaccaattgtcccgccataaaaagtccccctcatcgctgacaaatctttcatcaagctctgggatgacatctctgagctcagtgagcgggtctgtgatgagcgtttattccggagacttcggcaatctcgaggttaaggggaatatccaatttgccatcgagtatgtggaatcactgaaggagcttcacgtctttgtcgcgcagtgcaaagacctggctgcagctgatgtgaagaagcagcgatccgacccttatgtgaaggcgtatttgctcccagacaaggggaagatgggaaagaaaaagacgcttgtggtgaaaaaaactctgaatcccgtgtataacgaaatcttgaggtataaaatcgagaagcagattcttaagacgcagaagttaaatctctcgatttggcacagagacacattcaagcgcaattctttcctcggggaggtggagttagacctcgaaacgtgggactgggacaataagcagaataaacaattgaggtggtatcctctcaagcgcaaaacggctcctgtcgcgcttgaagctgaaaatcggggggaaatgaaactggccctgcagtatgtcccagagcccgtgcccggcaagaaacttccaaccactggagaggtgcatatttgggtgaaagagtgcttagacttacccttgctgcggggtagccatctcaatagctttgtcaaatgcacaatcttgccggacacatctcgaaaaagtcgccaaaaaacacgagctgtggggaagaccacaaaccctatcttcaatcataccatggtttacgacggattccgacccgaagatctgatggaagcttgtgttgagctcacagtttgggatcattataaactgaccaaccagtttctgggagggcttcgcatcggcttcggcaccggcaagtcttacggaactgaagtggattggatggatagtacatcagaagaagtggccctgtgggaaaaaatggttaacagccctaatacatggatagaagccacacttccactgcgtatgcttctgattgcaaaaatctctaagtag

SEQ ID NO: 207724 - DNA, 1131 bp, synthetic construct
  misc_feature 1..1131: note = Description of Artificial Sequence: Synthetic coding sequence
  source 1..1131: mol_type = other DNA
atgagcaagagcgtgcccgccttcctgcaggacgagagcgacgacagggaaaccgatacagccagtgaaagctcttatcaactctcacgtcataagaagtccccatcttcgctaacaaacctctcctctagttcggggatgacctcactttcttccgttagcggttccgtgatgtccgtatacagcggggacttcggaaacctcgaggtaaagggcaatatacagttcgcaatagaatacgtggagtccctaaaagagctccacgtttttgtagcccagtgtaaggatttggctgctgcagacgtcaagaagcagaggtcagacccttacgttaaagcgtacctgctgcctgacaaaggtaaaatgggtaaaaagaagaccctcgttgttaagaagaccttaaacccggtatataacgaaattttaagatacaaaatcgagaagcagattttgaaaactcagaagttaaatctatccatctggcatagggacacttttaagagaaatagtttcctcggggaggttgaactggatctggaaacctgggactgggacaataagcagaataagcagctgaggtggtacccactgaagcggaagactgctccagttgcgctggaggcagaaaacagaggagaaatgaagctggccttgcagtacgtgccagaacccgtaccagggaagaagttgccaaccactggggaggtgcacatatgggtcaaagagtgtctcgacttacctctgttgcgcggaagccacctcaattccttcgtgaagtgtactatcctacccgacacatcccgaaagagtcgtcaaaaaactcgagcagtggggaaaaccaccaaccccatctttaaccataccatggtgtacgatggcttcagaccagaggatctcatggaagcatgcgtggaactgaccgtgtgggaccattataagctgacaaatcaattccttggcgggcttcgcattggatttggaaccggcaagtcctacggcacggaagtagattggatggattccactagcgaagaggttgcgttatgggagaagatggtcaatagtcccaacacatggatcgaggccactctgcccttgagaatgcttctgatagctaaaatcagcaagtag

SEQ ID NO: 207725 - DNA, 312 bp, synthetic construct
  misc_feature 1..312: note = Description of Artificial Sequence: Synthetic coding sequence
  source 1..312: mol_type = other DNA
atgagcaagagcgtgcccgccttcctgcaggacgagagcgacgacagagaaaccgacaccgcgagcgaaagtagttaccaactgagccgccacaaaaagagcccctccagtctgacaaatctcagttcttctagtggcatgaccagcctgagttctgtgtctggaagcgtcatgtcagtctactccggtgactttggaaacctggaagtgaaaggaaacatccagttcgccattgagtacgtggaaagcctgaaagaactgcacgtgttcgtggcccagtgtaaagatctcgcagccgcagacgttaaatag

SEQ ID NO: 207726 - DNA, 2709 bp, synthetic construct
  misc_feature 1..2709: note = Description of Artificial Sequence: Synthetic coding sequence
  source 1..2709: mol_type = other DNA
atgagcggccagtggttctacgaggccaaggccaagcggcaccgggataaaattcacggcgccgacataattagagcctccatgaggaaaaagaggccccagattgctgccgagcagagcaaggacagggagaacggggccaaagagtcctgggtgaataatgtcaataaggatgctttcttgccaccagagctggctggagtggtggaagaaccggaagaggatgccgcccccgccagtccctcatcgtccgtggtcaatcccgcctccagcgtcatcgatatgagccaggagaatacaagaaaacccaacgtgagcccagagaaacgcaaaaatcccttcaactcctctaaactacccgaaggacacagctctcagcagacgaaaaatgaacagtccaagaacggaaggaccgggttgttccaaacatctaaagaggacgaattgtcggagtccaaggaaaagagtacagtagccgacacaagcatccagaagttggaaaagtccaaacagactctgcccgggttaagcaatggatctcagatcaaagccccgatccccaaggctcgcaagatgatctacaaatccacagatctgaataaagatgataatcagtccttccccagacagcgaaccgacagtctgaaagcacggggcgcacctcgtggtatattgaaacgcaacagcagtagctcttcaaccgattctgagaccctccgttacaaccacaattttgaaccgaagtccaagatcgtaagtccaggcctgaccatccacgagcgaatctctgagaaagagcattcactggaagataacagctcccctaatagcttagagcctcttaagcacgtccgcttctccgctgtgaaggatgaactaccacagagccccggcctcattcacggccgcgaagtgggcgaattctcagtgctcgagagtgaccgcctgaagaacggtatggaggatgcaggggatacagaggagttccagtccgaccctaagccttctcaataccgaaagccctcgctgttccaccagagcacaagttcaccatacgtcagtaagagtgaaacccaccagccaatgaccagcgggagttttcctattaatggcctgcacagccactctgaggtcctcaccgcgagaccacagtcaatggaaaacagccccacgatcaacgagcccaaagacaaatcctcggaacttacacggcttgagagcgtgctccctagatcacctgcagacgagttatcacactgcgtggagccagagccctctcaggtgccaggcgggtcctcccgggaccgacagcaaggtagcgaagaggagccttctccagtcctgaaaaccctagagcgctcagcggcccggaaaatgccctccaaatcacttgaagacataagtagcgattcctctaaccaggctaaggtggataatcaacccgaggaactggtccgctcggccgaggacgacgagaaacctgaccagaagccagtgaccaacgagtgcgttccgagaatttcaactgtgccaactcagccagacaaccccttctctcaccccgacaaactgaaacgaatgagcaaatctgtccctgcatttctgcaggacgagtccgatgatcgagagaccgacaccgccagcgagtcttcctatcaattaagtcgtcacaagaaatccccctccagcctgacaaatctgagctcttcctctggcatgacttccctcagttccgtcagcggcagcgtgatgtccgtctattcaggcgacttcggcaacctggaagtgaaaggaaacatccagttcgccattgagtatgtcgaatccctgaaagagctgcacgtgttcgtggctcagtgtaaagatttagctgcggccgatgttaagaagcagaggtcagacccctacgtaaaggcgtatttgctgcctgacaagggcaagatgggtaagaagaaaaccctcgtagtcaaaaaaacgcttaatcctgtctacaacgaaatcctgcgttataagatcgaaaagcagattctgaaaacacagaaactgaacttaagtatctggcacagagatacctttaaacgcaatagttttctgggcgaagtggagctggacttggagacttgggattgggataacaaacagaacaaacaacttcgctggtacccgctgaaacgtaagaccgccccagtcgccctcgaggcagaaaacagaggagagatgaagctggctctacaatacgtgcccgagcccgtacctgggaaaaagctgcccactaccggagaggtccatatttgggttaaggaatgtctggacctgccgctcctgcggggttcccatctgaactcatttgttaaatgcacaatcctgcccgacacatcccgaaagagccgtcagaaaacacgagctgtgggcaaaaccacaaaccccatattcaatcatacaatggtttacgacgggtttcggcctgaagacctgatggaagcctgtgtggaactgacggtctgggatcattacaagttgaccaatcagttcctgggcggtcttcgcatagggtttggaacagggaagagctacggcactgaagtggattggatggattcgacctccgaagaggtggcactttgggaaaagatggtaaactctcctaatacatggatcgaagctacacttcctctccgcatgctcctgattgccaaaattagcaaatag

SEQ ID NO: 207727 - DNA, 483 bp, synthetic construct
  misc_feature 1..483: note = Description of Artificial Sequence: Synthetic coding sequence
  source 1..483: mol_type = other DNA
atgagcaagagcgtgcccgccttcctgcaggacgaggtgagcggcagcgtcatgtctgtgtactctggtgactttggcaacctagaagtgaagggtaacattcaatttgccatagagtacgtagagtcacttaaggagttacacgtcttcgtagcccagtgtaaagacctcgccgctgccgacgtaaaaaaacaaagatccgacccttacgtaaaagcatacctcttacctgataagggaaaaatggggaaaaaaaaaaccctcgtcgttaaaaagactttaaaccccgtgtataacgaaattttgaggtacaagatcgagaagcagatcctcaagacccagaagttgaatctgagtatttggcatagagacacatttaagagaaattcattcctcggagaagttgaactggacctggagacgtgggactgggacaataaacagaacaaacagcttaggtggtacccactgaagcggaaatag

SEQ ID NO: 207728 - DNA, 2805 bp, synthetic construct
  misc_feature 1..2805: note = Description of Artificial Sequence: Synthetic coding sequence
  source 1..2805: mol_type = other DNA
atgatcgacctgagcttcctgaccgaggaggagcaggaggccatcatgaaagtcctccaacgcgacgcggcacttaaaagggccgaagaagagcgcgtccggcacttgcccgagaagattaaggacgaccagcagttgaagaatatgagtggccagtggttttacgaggcgaaggccaagcggcaccgtgacaagatacacggggctgacattattcgcgcctccatgcgcaagaaacggccacagattgccgcggagcagtcgaaagaccgggagaatggcgccaaagagagctgggtgaataacgtcaataaagatgccttcctgccacctgagctcgccggggtcgtcgaggaacccgaggaggacgccgctcctgcctcccctagttcatcagtcgtgaatcctgcatcaagcgtgattgatatgtctcaagagaacactaggaaacctaacgtgtcaccagagaagaggaaaaatcctttcaattccagtaagcttcccgaaggccacagttcgcagcaaaccaaaaacgagcaaagtaagaacggaaggacagggcttttccagacctccaaagaagatgaacttagcgaatcaaaggaaaaatctaccgtggctgatacaagcatacaaaaactcgagaagagcaagcagacactacctggcttaagtaatgggagccaaatcaaagctccaataccaaaggctcgcaaaatgatatataaatccacagatctgaataaggacgataatcagtcttttccaaggcagcgcacagattcccttaaagcccgaggggcacctagaggaattctgaaacggaacagctcaagttcaagcacagactccgagaccctgcggtacaaccataacttcgaacccaagtctaaaatcgtgtctcctgggcttaccattcacgagcgcattagcgaaaaagagcattccctggaagataacagcagtcccaatagcttggagcctctgaagcacgtcaggttttccgccgtcaaagatgagctgccacagtcccctgggctgatccacggtcgggaagtcggtgagttctctgtactggagtcggatcgcctgaaaaatggtatggaagacgccggcgacacagaagaatttcagagcgaccctaagccttcacagtatcgcaagcctagcctgtttcaccaaagtaccagcagcccttatgtctccaaaagcgagactcatcaacctatgacctcaggatcattcccgatcaatgggttgcactcacactcggaagtgctcacagcccgaccccagagcatggagaattctcctaccataaatgagcccaaagataagtcctcagaactcacaagattagagagcgtgctgcctcgttccccggcagatgagcttagccattgtgtggagcccgagccctcacaggttcccggcggaagctctcgcgaccggcagcaaggttcagaagaagaaccatctccggtactgaagacactggagaggtctgccgcaagaaagatgccctcaaagtcactggaggatatttcctcggacagctcaaaccaggctaaagtcgacaatcagcccgaagaattggtgaggtctgcggaggacgtgagcaccgtgcccacacagcccgataatccattcagccacccagataaactgaagcgcatgagcaagagcgtgccagccttcctccaggatgagtcagacgacagggagaccgatacggcatccgagagctcctatcagttatcccgccacaagaagtcaccttcctcactcaccaatctcagctctagcagcgggatgacttctctgagtagcgtatctggaagtgtgatgtctgtctattccggtgactttggcaacctcgaggttaaaggcaacatacagttcgcgattgagtacgttgagtcgctgaaggagctccacgtgtttgtggcccaatgcaaggacttggcggccgcagacgtaaagaagcaaagatctgatccctacgtaaaggcttacctgctcccggataaggggaagatggggaaaaagaaaactttggtcgttaagaaaactctgaatccggtttacaacgagatcctacggtacaaaatcgagaagcagatcttaaaaacccaaaagctaaacctgtcgatctggcatcgggacacattcaagagaaatagcttcttaggtgaggtggagctggatctggagacatgggattgggacaacaagcaaaacaaacaactgagatggtacccgctaaaaagaaagactgcaccagtggctctggaggccgagaacagaggtgaaatgaaacttgctctccagtatgtcccggaacccgtccccggaaaaaagctgcctactacaggagaggtccatatttgggttaaggagtgccttgatttaccccttttgcgtggttctcaccttaattccttcgtcaaatgtacgatcctgccggacaccagccgcaagtcgagacagaaaacccgagccgtgggtaagacgaccaaccctatctttaatcatactatggtgtatgatggttttcgccccgaggacctgatggaagcctgcgtcgaattgacagtgtgggaccactataaactgactaatcagtttctgggagggctgaggattgggttcggtacaggcaaatcttacggtaccgaagtcgactggatggattctacctccgaagaggtggccctgtgggagaagatggtcaatagcccaaatacatggatcgaggcgaccttgcctctgaggatgttactgatcgcgaaaatctccaaatag

SEQ ID NO: 207729 - DNA, 468 bp, synthetic construct
  misc_feature 1..468: note = Description of Artificial Sequence: Synthetic coding sequence
  source 1..468: mol_type = other DNA
atgagcaagagcgtgcccgccttcctgcaggacgagagcgacgaccgcgaaacggacaccgcatccgagtcatcgtatcagctcagtagacacaaaaagtcaccttcatctctgacaaatctctcatcttctagtggaatgacaagcctgtcttccgtcagcgggagtgtgatgagcgtttattccggcgactttggcaacctggaagtgaagggcaatatacagtttgccattgaatacgtggaaagcctgaaagaactccacgtgtttgttgctcagtgtaaggatttagctgccgcagacgtcaagaaacagagatcagacccctatgtaaaagcctatctgctcccagataaaggcaagatgggcaaaaaaaagactctggtggtgaagaaaaccttgaatcccgtatataatgaaatcctgcgctataagattgagaagcagattttaaagactcagaagtag

SEQ ID NO: 207730 - DNA, 1131 bp, synthetic construct
  misc_feature 1..1131: note = Description of Artificial Sequence: Synthetic coding sequence
  source 1..1131: mol_type = other DNA
atgagcaagagcgtgcccgccttcctgcaggacgagagcgacgacagggaaactgacacggcgtctgaatcttcctatcagctctctcggcacaagaagtccccctcgtctctcactaacctgtcctcttccagtgggatgacctcgctgtcctcagtgtctggttccgtgatgtctgtctattcaggcgattttgggaatctggaggtgaaaggaaatattcaatttgctatagaatatgtggaatcgttgaaagaattacacgtgttcgtggctcagtgtaaggacttggctgcagccgacgtgaagaaacaaagatcagatccctatgtcaaggcttatctcctgcccgacaaaggcaagatgggaaagaaaaagacacttgtggtaaaaaagaccctcaacccagtttataatgagattctccggtataagatcgagaagcagatcctgaagacccaaaagctgaacttatccatttggcaccgcgatacattcaagaggaattcattcctcggcgaggtagagctagacctcgagacctgggactgggacaataagcagaacaagcagttgaggtggtatccgctgaagcgaaaaaccgcccctgtggcactcgaagctgagaacaggggcgaaatgaaactcgcattgcaatacgtgcctgagcccgttcctgggaaaaaattacccacgactggcgaggtgcatatatgggtcaaggaatgtcttgatctgcctttgttgcgcgggagtcatctcaattcatttgtgaagtgtaccattctgcccgacacatcacgcaaaagcaggcagaaaacacgggccgtgggcaaaaccaccaaccccatttttaatcacacaatggtgtacgacggcttccgcccggaagacctgatggaggcttgtgtcgaattgactgtctgggatcactataagctcactaaccagttcctgggaggccttcggattggattcggcactggcaagtcgtatggaactgaggttgactggatggactcaacgtcagaggaagtggccctctgggaaaaaatggtcaattcgccaaacacatggattgaagccacacttcctctgcggatgctgttaatagcgaagatttctaagtag

SEQ ID NO: 207731 - DNA, 1956 bp, synthetic construct
  misc_feature 1..1956: note = Description of Artificial Sequence: Synthetic coding sequence
  source 1..1956: mol_type = other DNA
gagaccgtggagaaggccgaggcccccctgatcaccgagagcgcctttgacgctggcttcgaaaaactgcttaaagagataacagaggcgccaccttaccagccgcaggtctcagttcgagaggagacacacgaaaaggaaagctctcagtccgaacagacgaggttcttgggaacagtaccacacttttatcgcgcagcctcccagacttcagaaatgaaggataagtccaacggccttgagtcccaggttaatcaatgtgacaagatgctcggcggggacgcccttgtcacggatttactggtagacttttgtggtagtcgctcgggggtggaaatccccagaacaccacaattatacgtggcccacgagattggaacaattaagaccgtcacaccccccgaagacagggactccgaatccggggtggccggagggcagggcactctgcaggagcctggctttggggaagcatccgaggcaatcagcgtcagccgcaatagacagccgatcccgttgctgatgaacaaggaaaattctacgaagacgtccaaggtcgaactgacactggcgtccccctatatgaagcaggagaaagaggaggaaaaagaaggctttagtgaatccgatttctcagatggaaatacctctagcaacgctgaaagttggcgaaatccttcctcaagcgaagaggaaccttccccagtcctaaagaccttagagcgaagcgcggctcgaaaaatgcccagcaaaagtctcgaggacatttccagcgatagcagcaatcaggccaaagtagacaaccagcccgaggagcttgttcgttccgctgaagacgacgaaaagccggaccaaaagcctgtcaccaacgagtgcgtccccaggatctctactgttccgacccaacctgataatccgttctcacatcccgacaagttaaagcggatgagtaagagcgtgcccgcattcttgcaagatgaggtgtctggttctgtgatgagtgtgtattccggtgacttcggcaacctcgaggttaagggcaatattcagtttgccattgagtatgtggagtctctaaaggaactccacgtgtttgtggctcaatgtaaggatttggctgccgctgacgtgaaaaagcagaggtcagacccctacgtaaaagcttatctgctgcccgataaaggcaaaatgggtaaaaagaagacgctagtagtgaagaaaacactgaaccccgtatacaacgagattctgcggtacaagatcgaaaaacagattcttaaaacgcagaagttgaatctgtccatatggcatcgggacacatttaaaagaaactctttcctaggggaggtggaactcgatttggagacttgggactgggacaataagcaaaataaacaactgagatggtaccccctgaagcgaaagaccgcccccgtcgctcttgaggctgagaataggggggagatgaagttagccctgcagtacgtgccagaacccgtgccaggcaagaagctaccaacaaccggggaagtacatatctgggtgaaggaatgtcttgatttgccattactgagagggtcccaccttaacagctttgttaagtgtacaatcttgccagacaccagtcgcaagtcccgtcagaaaaccagagccgtaggcaagaccacaaatccaatctttaaccatacaatggtctatgacgggtttcggccggaggatctaatggaagcgtgcgtggagctcaccgtgtgggatcattacaaactcaccaaccagtttctggggggtctgcgaattgggtttggcacgggaaagtcttacgggaccgaagtggactggatggactccacttctgaagaagttgccttatgggaaaagatggtcaatagtccaaatacatggatcgaagctacactgcccttacgcatgctgctgatagccaaaatttccaaatag

SEQ ID NO: 207732 - DNA, 213 bp, synthetic construct
  misc_feature 1..213: note = Description of Artificial Sequence: Synthetic coding sequence
  source 1..213: mol_type = other DNA
atgagcaagagcgtgcccgccttcctgcaggacgagagcgacgacagagaaacagataccgcttccgaatccagttaccagttgtcaagacacaaaaaaagcccgtcatccttgacaaacctatcttctagtagcggtatgaccagtctgagctctgtaagtgggtccgtgatgtcggtgtacagtggcgactttggcaacttggaggtctag

SEQ ID NO: 207733 - DNA, 1011 bp, synthetic construct
  misc_feature 1..1011: note = Description of Artificial Sequence: Synthetic coding sequence
  source 1..1011: mol_type = other DNA
atgagcaagagcgtgcccgccttcctgcaggacgaggtgagcggcagtgttatgtcagtttactccggtgactttggcaacctggaggtgaagggtaatatccagttcgctatcgaatacgtggagtcactgaaggaactccatgtgttcgtggcgcaatgcaaggatctcgccgccgcagacgtcaaaaaacagagatcagacccttacgtcaaagcatacctgctccccgataagggtaagatggggaaaaagaaaaccctcgtggtgaagaaaactctaaacccagtgtacaacgaaattctacggtacaaaatcgagaagcagatactcaagacgcagaaattgaatctatctatttggcaccgcgatacattcaagcggaattccttcttaggcgaggtggaattagatttggagacctgggattgggacaacaagcaaaacaagcagttgcgctggtatccgcttaagcggaaaacagcccctgtggcgttggaggctgaaaacagaggcgagatgaagcttgccctccagtacgtgcccgaacccgtgcccggcaagaaattacccaccacaggggaggtgcacatctgggttaaggaatgcctggacctgccgctgttaagggggtcacacctgaactcattcgtcaaatgtacaattctgcccgacacgagtcgcaagagccggcaaaagacccgcgcagtagggaagacaacaaatcctatctttaaccataccatggtgtatgatggctttcgccctgaagatctcatggaggcatgcgtcgagctaactgtctgggaccactacaagttgacgaaccaatttctggggggtctgagaatcggttttggaacaggaaaaagctacgggacagaagtggactggatggattcgacttctgaagaggtggccctgtgggaaaaaatggtcaattcacccaacacgtggatcgaggcaacactgcctctcagaatgctactgattgcaaaaatcagcaaatag

SEQ ID NO: 207734 - DNA, 2016 bp, synthetic construct
  misc_feature 1..2016: note = Description of Artificial Sequence: Synthetic coding sequence
  source 1..2016: mol_type = other DNA
atgagcgagctgctggacctgagcttcctgagcgaggaggagaaggacctgatcctatccgtgttgcaacgggacgaggaggtgcgtaaagccgacgagaagagaatccgccggctgaaaaatgagctacttgagattaagcgaaaaggtgctaagcgcgggtctcagcattactctgataggacatgtgcccgctgtcaggaaagcctgggaagactgtccccaaagacaaatacatgcaggggctgcaatcacctggtgtgtcgggactgtcgtattcaggaatcaaacggtacatggaggtgtaaagtatgcgccaaggagatcgagctgaagaaggccacaggtgattggttctacgaccagaaagtcaatagattcgcataccggacagggtctgaaatcattcgcatgagtctgagacacaagcctgctgtctctaagagggaaactgtaggccagtcactgctgcaccagacacagatgggtgacatttggccaggccggaagataatccaggagcggcagaaggagccatccgtcctgtttgaggtgcctaagttgaaaagcggaaaatctgccctggaagctgaatcagaatctttggactctttcaccgccgacagcgactctacttcccggcgtgacagcctggacaaatccggactgttcccggaatggaagaaaatgagtgctccaaaatcacaggttgagaaggaaactcagccggggggccagaacgtggttttcgtggacgaaggcgagatgattttcaaaaagaacacccgtaaaatactcaggccctcagagtataccaagtccgttattgatcttcgacctgaggacgtggttcacgagtctgggtcactcggggatcggagtaagtccgttcccgggctaaatgtggacatggaagaggaggaagaggaggaagacatcgaccacttagttaaactccacagacaaaagcttgcaagatcaagcatgcagtccggctcaagtatgtctaccatagggagtatgatgtccatctactcggaagcgggggattttggcaatatttttgtaactggcagaatagcattttcactcaaatacgagcagcagacacagtcattagtcgttcatgtgaaggagtgtcatcagctcgcctacgccgatgaagcaaaaaagcgctccaatccctacgtaaagacatatctgcttcctgacaaaagtcgtcaaggcaagcgcaagacaagcatcaagagggatactattaaccccctgtatgatgagacccttcggtatgagatacctgagagtttactggctcagcggactctccagtttagcgtctggcaccatggtcggttcgggaggaatacgttcctgggcgaagctgagattcagatggatagctggaagttggataagaagttggatcattgtcttcctctccacggcaaaatatctgcagagagtcccaccgggcttccctcacacaaaggcgagctcgtcgtgagcctcaaatatattcctgcaagtaaaactcctgtcggaggcgatcgtaagaagagcaaaggcggtgaggggggggaactgcaggtgtggattaaggaggctaaaaatctgacagctgctaaagctggtggcacttcggactcctttgttaaaggttacctgctgccaatgagaaacaaggcctcaaaaagaaagactcccgtgatgaaaaaaaccctgaatccacattacaaccacacttttgtgtataatggtgttcgcctcgaggatttgcagcacatgtgtcttgagttgaccgtctgggatcgcgagccgctggcaagtaatgacttcctcgggggagttcggctgggtgtaggtacaggaatatcgaacggcgaggtggtcgattggatggactccacaggtgaggaagtgtccctttggcagaaaatgcgacagtaccctggcagctgggccgaaggcacactgcagttgcggtcttcaatggctaaacagaagctcggcttatag

SEQ ID NO: 207735 - DNA, 2016 bp, synthetic construct
  misc_feature 1..2016: note = Description of Artificial Sequence: Synthetic coding sequence
  source 1..2016: mol_type = other DNA
atgagcgagctgctggacctgagcttcctgagcgaggaggagaaggacctgatcctgtctgtcttacagcgcgacgaagaagttaggaaggccgacgaaaaaagaatccggcgccttaaaaatgaactgctggagataaaacgcaaaggagccaaaagaggcagccagcattatagcgaccggacatgtgctcggtgccaagagagcctcgggagactatctcctaaaactaatacatgccgcggctgtaatcatctcgtgtgtagagactgtcggatccaagagtcaaatggtacatggcgctgtaaggtctgtgcaaaagaaattgaacttaagaaggctacgggggattggttctacgaccaaaaggttaacagattcgcttatagaacaggctctgaaattattagaatgtccttgcgacacaagccagcagtctccaagcgagaaacagttggtcagagtttgctgcaccagacgcagatgggagacatatggccaggaagaaagatcatccaggagcggcagaaggagcccagcgtcttgttcgaggtacccaagttgaaatcaggcaagagcgcactggaagccgagagcgagagcttggacagtttcactgcggattccgactcgacctctagacgcgattcacttgacaagtccggtctctttccagaatggaaaaagatgtccgcacctaaatctcaggtcgaaaaagaaacgcaacccggtgggcagaacgtcgtgttcgtggacgaaggagagatgattttcaagaaaaatactcggaagattcttaggcctagcgagtatacaaaaagtgtgattgatttgaggcctgaagacgtggtgcacgagagcggttcattgggtgaccggtccaagagtgtcccaggcctgaacgtcgatatggaagaggaggaggaggaggaagacatagaccaccttgtgaaactccatcgccaaaagcttgctcgaagttcaatgcagagtggctcctccatgtctaccattggatccatgatgtccatctattcggaggctggcgacttcggaaatattttcgtaacagggaggatagctttttctctgaagtacgagcaacagacccagagtctggtggttcacgtcaaggagtgccaccaacttgcatacgcagacgaggcaaaaaaaaggagcaacccgtatgtgaaaacatacctcctacctgacaaaagccgccagggtaagagaaagacatcaattaaaagagacacgatcaaccctttatatgacgaaaccctgcgctatgaaattcctgagagccttctggcccaaaggactctgcagttttcagtatggcaccatggtaggttcggacgtaatacgttcctcggcgaagccgaaattcagatggacagttggaaattagacaagaagctagatcactgtctgccacttcacggaaaaatttcagctgagtcccccacggggctgccgagtcataagggagaactggtcgtgtccttgaaatatatccctgcatcaaagacaccagtcggcggggatcggaagaagagcaagggcggtgagggaggggaacttcaggtctggatcaaggaggcaaagaacctcacagcagccaaggctggtggcacctcagattcttttgttaagggctacctcttgcccatgcgcaataaagcatcgaaacgcaagacacctgtcatgaagaagaccctcaatccccactataaccacacatttgtgtataatggcgtgagactggaagaccttcagcacatgtgcctcgagcttaccgtatgggatcgcgagcccctcgctagtaacgattttctcggaggtgtcaggctgggcgtgggaacgggaatatctaacggggaggtcgtggactggatggactccaccggggaagaggttagcctatggcagaagatgaggcagtaccccggaagttgggccgaggggactttgcagctgaggagctctatggctaaacagaagctgggactttag

SEQ ID NO: 207736 - DNA, 1050 bp, synthetic construct
  misc_feature 1..1050: note = Description of Artificial Sequence: Synthetic coding sequence
  source 1..1050: mol_type = other DNA
atgagcgagctgctggacctgagcttcctgagcgaggaggagaaggacctgattctttctgtattacagagggatgaagaggtgagaaaggctgacgagaagagaatccgaaggttaaagaatgaacttcttgagatcaaaagaaagggagctaagaggggtagccagcattacagcgataggacatgtgcccggtgtcaggaatctctaggacgactgagcccaaaaactaacacctgtagaggctgcaatcatctggtgtgtagagattgccggattcaggagtctaacggcacctggaggtgcaaggtgtgcgcaaaagaaatagagcttaagaaggctacaggggactggttctatgatcagaaggtaaataggttcgcttaccggacagggagtgaaatcattcgcatgtcacttcgccacaagcctgccgtctcaaagcgggaaacagtcggtcagtccctactccaccagacccagatgggcgacatctggcccggccgtaaaatcatccaggaacggcagaaggagccctctgtcctgtttgaggtgcccaagctgaaaagcggtaagtctgcgctcgaagcagagagcgaatctctggactcattcacagccgatagcgactccacgagtcggcgagactccctggataagagcgggctattcccggaatggaagaaaatgagcgccccgaaatcccaggtggaaaaggagactcagcccggcggacagaacgttgtcttcgtcgacgagggtgagatgatttttaagaagaatacacgtaaaattctgaggccatccgaatatacaaaaagcgtgatcgaccttaggccagaggacgttgtgcatgagtcagggagtctcggcgacagaagcaagtccgtgcccggtcttaatgtggacatggaggaggaagaagaggaggaagatatcgatcacctggttaaattgcatcgccagaagctggctagatccagcatgcaaagtggaagttcgatggtatcctcaattcggtcggtggtaaccggaatgctgggctattag

SEQ ID NO: 207737 - DNA, 2016 bp, synthetic construct
  misc_feature 1..2016: note = Description of Artificial Sequence: Synthetic coding sequence
  source 1..2016: mol_type = other DNA
atgagcgagctgctggacctgagcttcctgagcgaggaggagaaggatttgatcctttcagtgctgcagcgggacgaggaggtaaggaaagccgacgagaagagaattaggcggctgaagaatgaactgttagagattaaaaggaagggtgcaaaacggggttctcagcattactccgacagaacgtgcgcccggtgtcaggaatcactggggcggctgtccccgaaaacaaacacttgtaggggttgcaaccacctcgtatgtcgcgactgccgcatccaggagtcaaacggcacttggcggtgtaaagtctgtgcgaaagaaatcgagctgaaaaaggcgaccggagactggttttacgaccagaaagttaaccggttcgcataccgaaccggatcagagatcatacgcatgagcctgcgacacaagccggcggtgtccaagagggaaaccgtaggtcagagtcttctgcatcagacccagatgggtgatatttggcccggcagaaaaattatccaggaaaggcaaaaggagccatctgtgctgttcgaggtgcccaagttgaaaagtggaaagtctgcactcgaggccgaaagcgagtctctggattcctttactgcggacagcgactctacaagccgccgagacagcctggacaaatctggactgtttcctgagtggaagaagatgtctgcacctaaatctcaagtggagaaggagacccaacccggcggccagaatgtggtgtttgtggacgaaggagaaatgatttttaagaagaatacacgcaagatcctgaggcctagcgaatatactaagtccgtgattgacctcaggcccgaagatgttgtgcatgagagtgggtctctcggcgatcgatcgaagagtgtgcccgggcttaacgtcgacatggaggaggaagaggaggaagaggatattgaccacttggttaagctccacagacagaagctagctcggtctagcatgcagagtggctcaagcatgtcaaccattgggtctatgatgtcaatctactccgaagcaggagatttcggcaatattttcgtcacaggtagaattgcatttagcctgaagtatgagcagcagacacagtctctggtggtacacgtgaaagagtgccatcaactggcgtacgcagacgaggccaaaaaacgatccaatccctatgtgaaaacttatctgttgccagataagtccagacaagggaagagaaagacttcaattaagcgcgataccattaaccccctctacgacgagaccctgagatatgagattcccgagtccctgctcgctcaacgaacactccaattttctgtgtggcaccatggcaggttcggaaggaacacatttctaggtgaagcagaaattcagatggactcgtggaaacttgacaagaagctagatcactgcctgccactgcacggcaagatttcagccgaatcgcccaccgggctcccctcccataaaggggaattagtggtgagcctgaagtatattccagccagcaagacccctgtcggtggagatcgcaaaaaaagcaagggaggagagggaggcgagctccaggtgtggataaaggaagctaaaaatctcaccgcggcgaaggccggcggcacctcagattcatttgtgaaaggatacttgcttcccatgcgcaataaagcgagcaaacggaaaacacctgtcatgaagaaaacactcaaccctcattataaccacacatttgtgtataacggcgtcaggctcgaggatctgcagcacatgtgcctggaattgaccgtgtgggaccgggagccgttagcttccaatgacttcttggggggagtgagactgggggtgggaactggcatcagtaatggggaggtcgttgactggatggattccacaggggaagaggtgagtctctggcagaagatgcggcagtatcccggctcatgggctgagggcactttacagctgcggtcatcaatggctaagcagaagttggggctgtag

SEQ ID NO: 207738 - DNA, 2022 bp, synthetic construct
  misc_feature 1..2022: note = Description of Artificial Sequence: Synthetic coding sequence
  source 1..2022: mol_type = other DNA
atgagcgagctgctggacctgagcttcctgagcgaggaggagaaggacctgattctttccgttctgcaacgggatgaagaggtccgcaaagccgatgagaaaaggattaggagactgaaaaacgaactgcttgagataaagcgtaaaggggctaaaagggggtctcagcactatagtgaccgaacctgtgcccggtgccaggagtcactcggacgactgtcacctaaaactaatacgtgcaggggttgcaaccacctggtgtgcagagactgtcggattcaagagagcaatggcacttggcggtgcaaagtttgcgccaaggagatagagctgaagaaggccacaggcgattggttttacgatcagaaggttaaccgtttcgcttaccgaaccggtagtgaaattattaggatgtcgctccggcacaagcccgctgtgtccaaacgggagactgtcgggcagagtttacttcaccaaacccagatgggggacatctggcctggacgaaagatcatccaggaacggcagaaggagcctagttctgtgttgtttgaggtgcctaaactgaaaagcggtaaatctgctttggaagccgaaagtgaaagcctcgattcctttacggcagatagcgacagcacatcccgcagggactctctggataagtcaggcctgttccctgagtggaagaaaatgtcggcgccaaagtcccaggtggaaaaagagacacagcctggaggtcagaatgtggtcttcgtggatgaaggcgagatgatttttaaaaagaacacccggaagattttgagaccatcagaatataccaagagcgtcatcgacctccggcctgaggacgtagtacacgaatcggggagccttggagacaggagtaagtccgtccctggccttaatgtggacatggtagaggaagaagaggaagaggaggatattgaccatctggtgaaactccacagacagaagctggcgagatctagtatgcagtctggctcatctatgagcacaattggctcaatgatgagtatctactccgaagcaggcgacttcggaaacatttttgttaccggccgcatagccttttccctgaagtacgagcagcagacacaatcacttgtggtgcatgtgaaggagtgtcaccagctcgcgtacgcggacgaggctaaaaagagatccaacccatacgtgaagacctatcttcttccagataagtcccgacagggtaaacggaaaacgagtatcaagcgtgacacaattaacccactgtacgacgagaccctccgctacgagataccagagagcctgcttgcacaaagaacactccaattcagcgtgtggcatcacggccgcttcggcagaaacactttcttaggggaggccgaaattcagatggattcatggaagttggacaagaagcttgatcactgtctcccacttcacggcaagatctctgccgagagtccaaccggtttgcctagtcataagggcgaactagtggtatcgctcaaatacattcccgcttccaagaccccagtagggggagacagaaaaaagtcaaagggaggtgaaggcggcgagcttcaggtctggataaaggaggccaagaacttaacagccgcgaaggctgggggaactagcgacagtttcgtgaaagggtacctgctgcccatgcggaacaaagcctcaaaacgaaaaacaccagttatgaagaagaccctgaaccctcactataatcacaccttcgtgtacaacggggtccggctggaagacctgcagcacatgtgtctcgagctgacagtatgggacagggaaccactcgcctctaatgacttcttgggtggggtgcggctcggggtgggtacaggcattagtaatggcgaagttgtcgattggatggactctaccggcgaagaagtaagcttgtggcagaagatgcggcaatacccagggagctgggcggaggggacactgcagctccgttctagcatggccaagcagaaactcggactctag

SEQ ID NO: 207739 - DNA, 2016 bp, synthetic construct
  misc_feature 1..2016: note = Description of Artificial Sequence: Synthetic coding sequence
  source 1..2016: mol_type = other DNA
atgagcgagctgctggacctgagcttcctgagcgaggaggagaaggatcttatactctccgttctgcaaagagacgaggaggtgagaaaggccgacgagaaaaggatcaggaggcttaagaatgaactgcttgaaattaagcgtaaaggggcgaaaagaggttcccaacattattccgatcggacttgcgcaagatgtcaagagagcctcggtcgactatcacccaaaactaatacctgtcgagggtgcaaccacctagtgtgccgcgactgtcgcattcaggagagtaatggcacgtggagatgtaaggtgtgcgctaaggagatagaacttaaaaaggctacaggcgattggttctacgaccagaaggtaaatcgatttgcctatcggaccggcagcgaaattattaggatgagtttacgacataagccagccgtgtccaagcgggagacagtgggacagagcttgctgcatcagacccagatgggcgacatctggcctggcagaaagatcatacaggagcgccagaaagaaccaagcgtgctgtttgaagtcccgaagttgaaatctgggaaaagtgcattagaggccgagtccgagagcctagactcattcacagcagacagtgactctacgtccagaagagactctcttgataagtccggtctgttccctgaatggaaaaagatgtctgcccccaagagccaggtggagaaagagacacagcctggcggccagaacgtcgtgtttgtggacgagggcgaaatgattttcaaaaagaatacccgcaaaattctgaggccaagcgaatataccaaaagcgtgattgacctgcgccccgaagacgtcgttcacgaatcaggcagcctaggtgatagatccaagagcgtgcccggactgaatgtggatatggaagaagaagaggaagaagaagatattgaccatctggtgaaactacacaggcagaaactggcacggagctcgatgcagtcaggatccagcatgtccacaattggttcaatgatgagtatctactccgaggccggcgacttcggcaacatctttgtgactggccgcatcgctttttccctgaaatacgagcaacagactcaatccctggttgtccatgtgaaggagtgtcaccaattggcctatgccgacgaggcgaagaagcgcagcaatccgtacgtgaaaacatatctgctgccagataagtcacgccaagggaagagaaagacatccattaaacgggacaccatcaatccactgtacgacgagaccttgcgctacgaaataccagaaagtttacttgcacagcgaactctacagttttctgtctggcaccatggcagattcggacgcaatacattcttaggcgaggctgagattcagatggacagttggaaattggacaaaaagcttgaccattgcctgcccctccatgggaaaataagcgccgagtctcccaccggattgccatctcataaaggcgagttagtagtgagtctcaagtacattcccgcatccaaaacgccagtcggaggcgatcgaaagaagagtaaagggggggagggtggagagcttcaggtatggattaaagaagccaagaacctgacagctgctaaggctggcgggaccagcgacagttttgtgaagggctaccttctgcctatgcggaataaagcctccaaaagaaagactcctgtgatgaagaagactctgaaccctcattataaccacactttcgtttataacggcgtgcgcctggaagatctgcagcatatgtgcctcgagctgaccgtatgggacagagaaccattggcctccaacgacttcctgggtggggtgcggctaggagtgggcacaggaattagtaatggcgaggtggtggactggatggatagcactggcgaggaggtgtcactttggcagaagatgaggcagtaccccggatcctgggctgaaggcacgctccaactgcgaagctctatggcgaagcagaagctcggactctag

SEQ ID NO: 207740 - DNA, 933 bp, synthetic construct
  misc_feature 1..933: note = Description of Artificial Sequence: Synthetic coding sequence
  source 1..933: mol_type = other DNA
atgcggcgggccgccctgtggctgtggctgtgcgccctggccctgtccctccaacctgctcttcctcagatcgtggcgactaacctgccgcccgaagatcaggacggatccggcgacgactccgataatttctccggatccggcgctggagccctgcaggatatcactctttctcagcaaacgcccagtacttggaaggatacacaactcctaacagccatccctacttctccggagccaaccggcttagaggcaaccgcagcctcaacatctaccttgccagcaggcgagggcccaaaagagggggaggccgtggttttgccagaagtggaaccgggcttgaccgctagagagcaggaggcaaccccccgccctagggagacaacacagctcccgactactcacctcgcgtccactaccacagccacaaccgcccaagaacccgccacaagccacccgcaccgcgacatgcagcccggccaccatgagacttccacacccgctgggccctcacaagctgacctacacacccctcatacagaggatggcgggccctccgctacagaacgagctgctgaggacggcgcgtcatcacagttgcctgccgcagagggttccggtgagcaggattttaccttcgagacaagtggtgaaaacacagccgtggtagctgttgaacccgatagaagaaatcagtctcccgtggaccagggcgccacaggagcttcacagggtctgctggacagaaaggaagtcttgggcggtgtgattgccggcggactggtgggtctgatatttgctgtttgcctggtcggcttcatgctataccggatgaagaaaaaggatgaaggttcctactcactggaagaacctaagcaggctaatgggggggcctaccagaaacccaccaagcaagaggaattctatgcgtag

SEQ ID NO: 207741 - DNA, 933 bp, synthetic construct
  misc_feature 1..933: note = Description of Artificial Sequence: Synthetic coding sequence
  source 1..933: mol_type = other DNA
atgcggcgggccgccctgtggctgtggctgtgcgccctggccctgagcctccagcctgcccttccacagatcgtggccactaacctccctccagaggaccaggacgggtctggggatgattctgacaatttttcaggctctggcgcaggcgcactacaggatattaccctttcacagcagacaccgagcacctggaaagatacgcaactcctcactgccattccgacatctcccgagccaacaggcctggaagccaccgccgccagcacctcaacactgccggccggagaagggcctaaggaaggcgaggccgttgtactccccgaagttgaacccggcttaaccgctcgtgagcaggaagcaacaccacggccacgggagacaactcagctaccaactacacacctggcttcaacaacaactgccactaccgctcaggagccggccactagtcatccacatagggatatgcagcctgggcaccatgaaacctcaacccccgccggaccgtctcaggcagatctacacacccctcatacagaggatggtggcccctccgccaccgaaagagctgccgaggatggagcctcctcccagctcccagctgcagagggaagtggggagcaggacttcactttcgaaacctcaggcgagaataccgccgtcgtagcagtggagcctgacagacgcaaccagtctcctgttgaccagggcgcaacaggggctagtcagggactactcgacaggaaagaagtactcggcggcgtgattgctggtggactggtcgggttaatcttcgccgtgtgcctcgtaggcttcatgctgtaccggatgaagaagaaggatgagggttcttactctctggaggagccaaagcaggctaacggaggcgcttatcagaagccgaccaaacaagaagaattttatgcttag

SEQ ID NO: 207742 - DNA, 606 bp, synthetic construct
  misc_feature 1..606: note = Description of Artificial Sequence: Synthetic coding sequence
  source 1..606: mol_type = other DNA
atgcggcgggcctggatcctgctgaccctgggcctggtggcctgcgtcagcgccgagtcaagggcagaactaacaagtgacaaggatatgtacttagataatagtagcatagaagaagcctccggtgtgtatcccatagacgatgacgattacgctagtgctagtggctccggcgcagacgaggacgttgagtcacccgaactcacaaccagcaggcctttgcccaagatcctgctgacaagcgccgcccccaaggtcgagaccacgaccctaaacattcagaataagataccagcccagactaagagcccagaggagacagacaaggagaaagtgcacctgagtgactcagaacgcaaaatggatcccgccgaagaggatacaaacgtttacacagaaaagcatagtgactccctctttaaacggacagaagtgctggcagccgttattgccgggggggtgattgggtttctgtttgctatttttctcattttgctgctggtatacagaatgagaaaaaaggacgaagggtcctacgacctcggagagcgcaaaccatcctccgcagcttaccaaaaggcgccgacgaaagaattttacgcctag

SEQ ID NO: 207743 - DNA, 498 bp, synthetic construct
  misc_feature 1..498: note = Description of Artificial Sequence: Synthetic coding sequence
  source 1..498: mol_type = other DNA
atgcggcgggcctggatcctgctgaccctgggcctggtggcctgcgtgagcgccgaatctgtgcgggctgacgaagacgtagagtctcctgaactgacaactagccggccactgccaaaaattttgctgacctccgccgctcccaaggtggaaacaaccaccctgaatattcaaaataaaattccagcacaaacgaagagccctgaggaaactgacaaggaaaaggttcacttgagcgactctgagagaaaaatggaccctgccgaagaagacaccaatgtgtacacagaaaagcattcagactccctcttcaaacggacggaagtccttgcggctgtgattgccggtggcgtgataggatttctgtttgccatctttcttatactgcttctggtctatcgtatgcgcaaaaaggacgagggcagctatgatttaggcgagcggaagccatcttccgcagcttatcagaaagcccccactaaggaattttatgcctag

SEQ ID NO: 207744 - DNA, 519 bp, synthetic construct
  misc_feature 1..519: note = Description of Artificial Sequence: Synthetic coding sequence
  source 1..519: mol_type = other DNA
atgtacctggacaacagcagcatcgaggaggccagcggcgtgtaccctatcgatgacgacgactacgcctcagcatctggctcaggagcggacgaggacgttgagtcccccgaactcaccacgtccagaccactgcctaaaatcttgcttacaagcgccgcacctaaggtggagaccacgacactgaatattcagaataaaatcccagcacaaaccaagtccccggaggaaactgacaaggaaaaggtccacctctccgacagtgaacggaagatggatcccgcagaggaggacaccaacgtgtacacagagaagcatagtgactccctgtttaaaagaacagaggtgctcgcagcggtgatcgcaggtggagtaattggatttttatttgctatcttcctcatactcctattggtgtaccgtatgaggaagaaagatgaaggcagctacgacctcggggaaagaaagccttcatcggctgcatatcagaaggctcccaccaaggagttctatgcgtag

SEQ ID NO: 207745 - DNA, 519 bp, synthetic construct
  misc_feature 1..519: note = Description of Artificial Sequence: Synthetic coding sequence
  source 1..519: mol_type = other DNA
atgtacctggacaacagcagcatcgaggaggccagcggcgtgtaccctattgatgatgacgattacgcaagtgcctcaggtagtggggcggatgaagatgtggagagccccgagttgaccacctctcggcccttgccaaaaatcctcttgaccagcgcggctcccaaggtagaaaccacgacgttgaatattcaaaataagatccccgcccagactaaaagcccggaggagacagacaaggaaaaggtgcacctcagtgacagtgaacggaaaatggacccagcagaggaagatacaaatgtctacactgaaaaacattccgattccttgtttaaacggaccgaggtcttagccgccgtgatagcaggtggcgtcattggctttctgttcgcaatctttctcatcttgctgctggtgtatcgcatgaggaagaaggatgaaggatcttacgacttgggcgaacgcaagccctcctccgctgcctaccaaaaggcacctacaaaggaattctatgcctag

SEQ ID NO: 207746 - DNA, 606 bp, synthetic construct
  misc_feature 1..606: note = Description of Artificial Sequence: Synthetic coding sequence
  source 1..606: mol_type = other DNA
atgcggcgggcctggatcctgctgaccctgggcctggtggcctgcgtgtcagcagagtctcgcgcggaattgacttccgataaggacatgtatctggataattcgtcgatcgaagaggccagcggggtgtatccgatcgatgatgacgattatgctagcgctagcggatccggcgcggacgaggatgtcgaatccccagagctgactacatccagacccctgcccaagatcctcctaacctctgccgctccaaaggtcgagacaactacactaaacatccagaataagatacccgcccagaccaaatcccccgaggagaccgataaagagaaagtccacctctcagattcggaaagaaaaatggaccctgctgaagaagataccaacgtgtacacggagaagcactccgacagtctatttaagcgcacagaggtcctggctgccgtgattgctgggggagtgataggttttctatttgctatcttccttatcctgctgctggtatacaggatgcggaaaaaggacgagggcagttacgatctgggcgagcgcaaaccgtcctcggctgcatatcagaaggctccaaccaaagagttttatgcctag

SEQ ID NO: 207747 - DNA, 576 bp, synthetic construct
  misc_feature 1..576: note = Description of Artificial Sequence: Synthetic coding sequence
  source 1..576: mol_type = other DNA
atgcgggtggcctgcgtgagcgccgagagccgggccgagctgaccagcgataaagatatgtacttagacaattcttctatcgaggaagcttcgggtgtttatcctattgacgacgatgattatgcctccgcaagcggctctggtgccgacgaggacgttgaaagtccggagttaactacatcccgacctcttcctaagatcctgcttacctccgccgccccgaaagtggaaacaacgactctgaatatacagaataagatcccagcacagactaaatctcccgaggagacggacaaggaaaaggtgcacttaagcgactcagagcgcaagatggatcccgcagaagaagacacgaatgtatacaccgagaaacactccgactcgctgttcaagcggactgaagtactggccgccgtgattgcgggtggcgtgatcggatttctgttcgccattttcttgattctgcttcttgtgtaccgaatgcggaaaaaggacgaaggcagctatgacttaggagaacggaagcccagcagtgccgcatatcagaaagccccaactaaggaattttatgcgtag

SEQ ID NO: 207748 - DNA, 1155 bp, synthetic construct
  misc_feature 1..1155: note = Description of Artificial Sequence: Synthetic coding sequence
  source 1..1155: mol_type = other DNA
atggccatcgcctacctgggcagcagctgccccagccagccccccagctcgctagcactgtccctgagtcctacacctagcgatttcgagcaggaatcgggcattgagactgctatgcggttctccccagatgtggctttagcggtcagtacaactccagccgtgctgccgacaacaaacatccaacctgtcgggaccccatttgaggaactccctagtgagcgtcctactttggagcccgccacaagccctttagtcgtgacagaggtacccgaggagccttcacagcgggcgacaactgtgagcactactatggccaccaccgcagcaacctcaacgggagatcccacggtggcgactgtgcccgcaacagtcgctacggccaccccctccactcccgctgcccctccttttactgctacgaccgcggtgattagaacaacaggtgtgcgtcgcctgctacctctccccctaactacagtggcaactgccagagccacaactccagaggctccctcccccccaactacagcagccgtgctggatacagaggcacctacgcctcggctcgtgtctaccgctacctcccgaccaagggctttgccaagacctgcaactacccaggaaccagacatcccagagaggtctacactgcccttgggtacaactgctcccggtcccaccgaagtggcccagacacctactccagagacattcctgacgacgatcagagatgagcctgaagtcccagtgagtggaggtccatccggagacttcgaactccctgaagaggaaaccacacagcctgacacagcaaatgaggtggtcgctgtgggaggcgccgccgccaaagcctcctcacctcctgggaccctgccaaaaggcgctaggcctggtccaggcctcctggacaacgcaattgactcagggtcttccgccgcccagttgccccagaaatctatcctggagagaaaagaagtgctggtggccgtgatcgttggaggggtggtcggggcgctgtttgcagcatttctggtcaccctgttaatctacaggatgaagaaaaaggacgaaggttcatatacactcgaggaacccaagcaggcaagcgtgacctaccagaagccagataagcaagaggagttttacgcctag

SEQ ID NO: 207749 - DNA, 1329 bp, synthetic construct
  misc_feature 1..1329: note = Description of Artificial Sequence: Synthetic coding sequence
  source 1..1329: mol_type = other DNA
atgaagcccggccccccccaccgggccggcgccgcccacggcgccggtgcaggcgccggcgcagccgccggacccggagcaagaggcctacttttgccaccacttttacttctgctgctcgccggcagagctgccggggctcaacgctggcgaagcgagaacttcgaacgccccgttgatcttgaggggagtggtgacgacgattctttccctgatgacgaattggacgacttatattcagggtctgggagcggatattttgagcaggagtcaggaattgagaccgctatgcggttctctccggacgttgcattggcagtgtccacaaccccagccgtgctccctactacaaacatccagccggtagggacccccttcgaggagctgccaagcgagcggcccacacttgaacccgccaccagcccccttgtagtgactgaggtgcccgaagagccttctcaacgcgccactacagtgtccacgaccatggctaccactgcggcaacttccactggcgatcctaccgtcgctacggtgcccgccacagttgcaacagccaccccaagtactcctgctgccccaccatttaccgctactaccgcggtgattcgaacaaccggtgtgcgccgtctgttaccactccccctcacaaccgtggcaacggcaagagccaccactccagaagcaccatccccgcccacaaccgccgctgtgctggacacagaggcccccactcccaggttggtctccactgctacctcacggcccagagccctgcctcgtcccgcaactacacaggaacccgatatccctgagcgttctacgctgcctttgggtacgacagcccctggtccaactgaagtggcacagacaccaacaccagaaacatttctcaccaccattcgggacgagccagaggtacccgtctcaggcggcccaagcggtgactttgaactcccagaagaagagacaacccagcccgacaccgccaatgaagtggtcgccgtgggcggcgccgcagctaaggcctccagtccccctggaacactccccaagggcgccagaccagggcccggcctgttggacaacgccatcgactcaggctcaagcgcagctcaactgccacaaaaatccattttagaacggaaagaagtacttgtggcagttatcgtcggaggcgtggttggagcactgtttgcggcctttttagtcaccctgttgatttaccggatgaaaaaaaaggacgagggatcttacaccctcgaggagcccaagcaggccagtgtcacctatcaaaaacccgacaagcaggaggaattttacgcatag

SEQ ID NO: 207750 - DNA, 597 bp, synthetic construct
  misc_feature 1..597: note = Description of Artificial Sequence: Synthetic coding sequence
  source 1..597: mol_type = other DNA
atggcccccgcccggctgttcgccctgctgctgttcttcgtgggcggggtcgctgaatccatacgtgagaccgaagtgattgatccccaggacctacttgagggaaggtacttcagcggagctctgccagacgatgaagatgttgtgggacccggacaggaatcagatgacttcgaactcagcggcagtggtgatctagatgacctggaggacagcatgattggcccagaggtagttcaccctctagtgccactcgacaaccatataccagagcgcgcagggtctgggtcccaggtgccaaccgagcctaaaaaactcgaagaaaacgaggtcatcccaaagcgcatctcccccgtggaggagtcagaagatgtaagtaacaaggtgtccatgtcatctactgtccaaggctccaacattttcgagagaaccgaggtgttggcagccctgatagtgggtggaattgttgggatcttgtttgccgtcttcctgatcttgctgctcatgtacagaatgaaaaagaaggatgaaggaagttacgacttaggtaagaagcctatctacaaaaaagccccaacaaacgaattttatgcttag

SEQ ID NO: 207751 - DNA, 381 bp, synthetic construct
  misc_feature 1..381: note = Description of Artificial Sequence: Synthetic coding sequence
  source 1..381: mol_type = other DNA
atgatcggccccgaggtggtgcaccccctggtgcccctggacaaccatataccggaacgtgcaggcagcgggagccaggtccctacagagccgaagaaattagaagaaaatgaagtcatccccaaacgtattagcccagtggaggagtctgaggacgtttctaataaagtctcaatgagctcaactgtgcagggctcaaatatttttgaacggactgaggtgttggcagctctgattgtggggggtatagtgggtatcttgtttgcggttttcttaattctcctactgatgtaccggatgaaaaaaaaggacgaggggagctacgatctgggtaagaagcctatttataagaaggcccctaccaacgaattctatgcctag

SEQ ID NO: 207752 - DNA, 1851 bp, synthetic construct
  misc_feature 1..1851: note = Description of Artificial Sequence: Synthetic coding sequence
  source 1..1851: mol_type = other DNA
atgttccggaccgccgtgatgatggccgccagcctggccctgaccggagcagtggttgcccatgcctactacctgaaacatcagttttatcccacggtcgtctatctcactaaaagttctccgtccatggccgtgctctacattcaagcattcgttttggtgttcctgctaggcaaggtgatgggtaaggtgttttttggtcagctgagggcggctgagatggagcatttacttgaacgttcctggtatgccgttactgagacctgcctagcttttaccgtgttccgagacgactttagcccccggttcgttgctttgtttacacttctgctgtttctgaagtgcttccactggttggctgaagatcgtgttgatttcatggagcgatcccctaatatatcgtggttgttccattgccgcatcgtgtcgctgatgtttttgctgggcattctcgattttctctttgtttcacacgcctatcatagtatcctgacccggggagcgagcgtacagctggtgtttggcttcgagtacgccattctcatgaccatggtacttacaatcttcatcaagtatgtactccatagcgtcgatctccagagcgaaaacccatgggataacaaggctgtgtacatgctctatactgagttgtttactggcttcattaaagtgcttctgtatatggcatttatgacaatcatgataaaggtgcataccttccctctcttcgcaattcgacccatgtacctggccatgcgccagtttaagaaggctgtgactgacgcgatcatgtcacgccgagccatcagaaacatgaatactctttacccggacgctacccccgaagagctccaagcaatggataatgtctgtatcatttgtagggaggagatggtaacaggagcaaagcggctgccctgcaatcacatctttcacacaagttgcctcagaagttggttccagaggcaacagacctgcccgacatgtcggatggatgtgctgcgagcctctctgcccgcccagagtccccctccccccgaaccggcagatcaggggccgccccccgcaccacaccccccacctttgctgccccagccgcccaatttccctcagggactgctgccccctttcccccctggaatgttccctctttggccccctatgggacctttcccccctgtgccacctcccccctcctcgggcgaagcagttgctcccccgagcacaagtgccgccctgagcaggccgtcaggagctgcgactacaacagcagccggcaccagcgccaccgccgccagcgctaccgcttccggccccggatcagggtctgcccctgaggctggccccgcgcctggattccctttcccgcccccatggatgggtatgccattgccccccccattcgcctttccacccatgcccgttcctccagctgggtttgcggggctgactccagaagagctgcgggcgcttgaagggcatgaacgtcaacacctggaggccaggctgcagagccttcggaacatacacactttacttgacgcagctatgctgcagatcaatcagtatttgacagtgctggcctccctgggcccgccacgccccgccacaagcgtgaactccaccgaagagactgcgactactgttgtagcggctgccagcagcacctcgatcccctcctccgaggcgactactcccacacctggcgccagcccacctgctcccgagatggaacgccccccggctcccgaaagcgtgggcacagaggagatgcccgaggacggggaacccgatgcagctgaactcagacgccgacgcttgcagaagttagagtctccagtggcccattag

SEQ ID NO: 207753 - DNA, 1698 bp, synthetic construct
  misc_feature 1..1698: note = Description of Artificial Sequence: Synthetic coding sequence
  source 1..1698: mol_type = other DNA
atgttccggaccgccgtgatgatggccgccagcctggccctgaccggggccgtggtggcacacgcctactaccttaaacatcaattttacccaactgttgtgtacctgactaaaagttctccttcaatggcagtgctttatatccaagccttcgtgctcgtgttcctgttaggcaaggtcatgggcaaggtcttttttggccagctgagagctgcagaaatggaacatctcttggaacgctcctggtatgctgtgacagaaacttgcctcgcttttactgtcttccgcgatgatttcagtcctcgcttcgtcgcgctgtttacacttctattattcctaaaatgctttcactggctcgctgaggacagggtggacttttatgctatcctcatgacaatggtgctgaccatttttataaagtacgtcttgcacagtgtggacttgcagtctgagaacccttgggacaataaagccgtgtatatgctttacaccgaactgtttacaggcttcatcaaagtactgctttatatggctttcatgaccatcatgatcaaggtccacaccttccccttatttgcgatacgcccaatgtatcttgccatgcgacaatttaagaaggccgtcacggacgccatcatgtcccgtagagctataaggaacatgaacacactgtatcctgacgcgacaccagaggagctgcaagccatggacaatgtatgcattatctgtagggaagagatggtgactggcgccaaaaggctgccttgcaaccatatttttcacacatcatgcctcagatcctggttccaacgccagcagacgtgtccaacctgtagaatggacgtactgcgcgcatctttacctgcccagtctcccccccctcccgagccagccgatcagggtccacccccagcgccacacccccctcctctgctgcctcaaccgccaaattttccccaaggcttattacccccattccctcccggcatgtttcccctctggcctccaatgggaccgtttcctccagttcctcctccaccctcatcaggtgaggccgtagccccaccctcaacgagcgccgccctttcaagaccctcaggagctgccaccacaaccgccgccgggacctctgcaacggcagcatcagccaccgcgtctggaccaggaagcggatccgccccggaggccggtcccgccccaggcttcccttttccccccccttggatgggtatgcctctgcctcccccatttgcctttccaccgatgcctgtgcctcctgccggatttgcaggactgacccccgaagagctgcgtgcgctcgaagggcatgagcggcagcatctggaagcgcgcctgcagtcgctcaggaatattcacactctgctggacgccgctatgttacagattaaccagtacctgactgtgctggcttctttgggcccgccccgccccgctaccagcgtgaattccactgaggaaaccgcaacgacagtggtagcggccgcgtcctctacctctatccccagttctgaggcaacgacacccacgcccggggcctcccctcctgccccagagatggagaggccacccgctcctgagtctgtgggcacagaagagatgccggaagatggtgagcccgatgctgccgaactaaggaggagaaggttgcaaaagttggagtctccagtggcacactag

SEQ ID NO: 207754 - DNA, 1854 bp, synthetic construct
  misc_feature 1..1854: note = Description of Artificial Sequence: Synthetic coding sequence
  source 1..1854: mol_type = other DNA
atgttccggaccgccgtgatgatggccgccagcctggccctgaccggtgctgtggttgcacatgcctactacctaaagcaccagttctatcccactgtcgtctatctgactaaatcctctccgtctatggctgttctgtatatccaggctttcgttctggtcttcttgctaggcaaggtgatgggcaaggtcttcttcgggcagctacgggcggcagaaatggagcatctcctcgaacgttcttggtacgcagtgaccgagacttgcctggctttcactgtgttccgcgacgacttttctccccgttttgtcgccttgttcactctgctgcttttcttgaagtgctttcattggctggccgaggatcgcgtggacttcatggagcggtcgccaaatataagctggctattccattgccgcattgtctcccttatgttcctgttggggattctggactttctattcgtgagccatgcctaccactcgatcctgacgagaggagcttcagtgcagctagtctttggatttgaatatgccatcctcatgaccatggtgttaacaatcttcatcaaatatgtgctccatagcgtggacttgcagagcgaaaacccatgggataataaggccgtgtatatgctgtatactgagttgtttaccggcttcatcaaagtgctactctacatggcctttatgaccatcatgataaaggtccacacattcccactatttgcgatacggcctatgtatttggcgatgcgtcagttcaagaaggcggtgactgatgccatcatgagccgccgagcgatcagaaacatgaacactctgtaccctgacgccacccctgaggagctgcaggcgatggacaatgtgtgcatcatatgcagagaagaaatggtgactggggccaaacgcctcccgtgtaaccatatttttcacacaagctgtctgagaagctggttccagcgtcagcagacatgcccaacatgccgcatggatgtgttacgtgcttcactgcctgcccagagtccccctcccccagagcccgccgatcaggggcccccacccgcaccccacccacccccgctgctcccccaaccgcccaacttcccacaaggcctgctgccgcctttcccgccagggatgtttcctttgtggccccctatgggtccatttccacccgtccctccccctccatcctctggcgaggcggtcgcaccaccaagtacaagcgcagctgctctttcacgcccatccggtgcagcaacaactacagcggccgggactagcgccacggccgcttctgccacggcttcagggcccggaagcgggtccgcaccagaggcagggccagccccggggtttccctttcccccgccttggatgggcatgcctctaccaccacccttcgccttccctcccatgccggtacctcccgcaggcttcgccggactgacccctgaggagctgcgagccctcgaggggcacgagcgtcaacacctggaggctaggctgcagtctctgaggaatattcacacgctgctcgatgccgctatgctccagattaaccagtacctcacagtgctcgcatccctgggccctcccagaccggctaccagtgtgaacagtactgaggagacagctaccaccgtggtcgcggcagcttcttccacttcgatccccagttctgaagcaaccacgcccacgcccggcgccagcccaccagctccggagatggagcgaccgcctgctccagagagtgtgggtacagaagaaatgcctgaggatggtgagcccgatgcagccgagctccgaaggcgcaggcttcagaagctcgaatcccctgttgctcattag

SEQ ID NO: 207755 - DNA, 1890 bp, synthetic construct
  misc_feature 1..1890: note = Description of Artificial Sequence: Synthetic coding sequence
  source 1..1890: mol_type = other DNA
atgttccggaccgccgtgatgatggccgccagcctggccctgaccggggcagtcgtggcccatgcctactatttaaagcatcagttttaccctacagtggtttacctgactaaaagctcaccatcaatggcagtgctgtacatccaggctttcgtgcttgtcttcctgctcggcaaggtgatgggtaaggtgttttttggacagctccgcgccgccgagatggagcacctattagagaggtcctggtatgcagtaaccgaaacatgcctggcttttacagtttttcgcgacgacttctccccaaggttcgtggcactcttcacactgctattgtttctaaagtgcttccactggcttgcagaagatagggttgacttcatggagcgctcaccaaacatcagctggctgtttcattgcaggatagtgagtctcatgttcctactggggattctcgactttttattcgtcagtcacgcttaccacagtattctaacaaggggagcctccgtccagttggtgtttggatttgagtacgctattctgatgaccatggttctgactatattcatcaagtacgtactccacagtgtggacctgcaatctgagaatccctgggacaacaaggctgtgtatatgctctataccgagctcttcaccgggttcatcaaggtactgttgtatatggcttttatgacaattatgattaaggtccacacattccccctgttcgccatccgtcctatgtacctcgctatgaggcagtttaagaaggctgttaccgacgcaataatgtcacgtcgtgctatcaggaatatgaataccctttatcctgatgccacgccagaggagctccaggccatggataatgtttgcataatctgccgggaggagatggtgacaggagctaagcgtcttccatgcaaccatatctttcacacctcctgcctccgctcctggttccagcgacagcagacctgtcctacatgccgaatggacgttctccgggctagtttgccggcccagagtccgccccccccagaacctgccgatcagggaccacctccagctccacatccgccacctctcctcccccagccaccaaacttcccccagggcctactgccccccttccctccgggtatgttcccactatggcctcctatggggccctttccaccggttccacccccaccttcttctggagaggccgtcgcgcctccctcaacaagcgccgccgcactgtcacgcccaagcggggcagcaactactactgctgccggaacctccgccactgccgcgtcagccaccgcaagcggacctggctctgggtctgccccggaggcaggccctgccccaggttttccattccccccaccatggatggggatgccactgccacccccgttcgccttccctccaatgccagtgcccccggctgggttcgcagggctgacccccgaagagctcagggcccttgagggccatgagagacagcatttagaggctcgcctgcagtccctgcggaacattcacacgctgctcgatgccgcaatgctgcaaattaatcagtacctgactgtgctggctagcttgggtccacctggcctgccgctacagagcacccctttgaggaggctaccattgcagctgctattgctccctccacctcccgcttccctggcccaacggccgcgcccacagccacaagagcccccccatcaacccctgaaatggaagggcctgcagctgctgagtcagtgggctcagcggaggtgtctcagaatggagagcccaatgcagcaatcctcagccggggccgcttgcagaagctggtccttgttgttgccaacggataccgcccctgcccagccacaaccacttcttttttag

SEQ ID NO: 207756 - DNA, 1851 bp, synthetic construct
  misc_feature 1..1851: note = Description of Artificial Sequence: Synthetic coding sequence
  source 1..1851: mol_type = other DNA
atgttccggaccgccgtgatgatggccgccagcctggccctgaccggcgccgtggtagcccacgcttactatctaaagcatcagttttatccaacggttgtatatttgactaagagctcgcccagcatggccgtgctgtacatacaagcgttcgtcctggttttcctgctcggtaaggtaatgggcaaagtcttctttggacagttaagggctgcggagatggagcatcttcttgagagatcttggtacgctgtgactgaaacctgtctcgccttcaccgttttccgcgacgatttttctcctcgctttgtcgctctgttcacactgcttctgtttctcaaatgcttccactggttggcagaggaccgggtagactttatggaaagatccccaaacatctcgtggctgttccattgtaggattgtctccttgatgttcctcctgggcattcttgactttctctttgtgagtcatgcatatcacagtatcctgacgagaggggcctcagtgcagttggtgtttggtttcgaatatgcgatactcatgactatggtcctcacaattttcattaagtatgttctgcacagtgtggacctgcagtctgaaaatccctgggacaacaaggcagtttacatgctttacaccgaactatttaccggctttatcaaagtcttgctttacatggccttcatgaccatcatgatcaaagtgcacacatttccattatttgcaatcaggcctatgtatctcgctatgagacagtttaaaaaggcggtgaccgatgcaattatgtcaaggagggccatacggaacatgaacaccttgtaccccgatgccacaccagaagaattacaggctatggataatgtgtgtataatttgcagagaagagatggttaccggggccaaacgtctcccatgcaaccacatctttcatacgagctgtctgaggagctggtttcagcgccagcagacatgccccacctgcagaatggacgttctgagggcctccctccccgcacaatcgccgccacctccagagcccgctgaccagggaccccctccggcccctcacccaccacctctgctcccacaaccaccaaattttccccaaggcttgctccctcccttcccccctggaatgtttcccctatggcctccaatgggccctttcccacctgtgcccccaccaccttcctctggcgaggctgtggcaccacctagtaccagtgcggcactctctagacccagtggggctgccacaacaactgccgctggaactagtgcaaccgcagcaagtgccactgccagcggtcctggatccgggtcagctccggaggctgggcctgccccaggtttcccatttccccctccttggatgggaatgcccctgccaccgccgttcgcattcccccccatgcccgtccccccggccgggttcgccggtttaacgcctgaggagctgagggctttagaaggtcatgaaaggcagcacctggaggctaggttgcaatccctcagaaacattcacaccttactggacgcagcgatgctacagattaaccagtatctgaccgtcctggcttccctgggtccacctcgccctgcaacctccgtcaacagcaccgaagagaccgcgaccacagtagtggccgccgctagttccacgagcatcccatcaagcgaagcgacaacccccacccccggtgcttccccacctgcccctgagatggagaggcccccggccccagaatccgtgggcaccgaggaaatgcccgaagatggggagccagacgctgcagagctgcggaggcgaaggctgcagaaactggaatccccggtagcacactag

SEQ ID NO: 207757 - DNA, 1191 bp, synthetic construct
  misc_feature 1..1191: note = Description of Artificial Sequence: Synthetic coding sequence
  source 1..1191: mol_type = other DNA
atgagcgtggccttcgccagcgcccggccccggggcaagggcgaggttacccagcagacaatccaaaaaatgctcgatgaaaaccatcatctcattcaatgcatcctggagtaccagtcaaagggcaaaacggcagaatgtacccagtaccaacagattctgcaccgcaatctcgtatacctagccacaattgccgactcaaaccaaaatatgcaatccctgcttcccgccccccctacgcagaacatgaatctcggacccggcgctctgacacagagtggatcttcccagggtctgcacagccagggatctctgtccgatgccatatctacaggcctgccgccttcttccctgcttcaggggcagatcggcaatgggccttctcatgtcagtatgcagcagactgcgccaaacaccctgcctactacgtccatgagcatcagcggacccggatattctcacgctgggcccgcatcccagggggtccctatgcagggacagggcacgataggtaactatgtgagcaggacaaatatcaacatgcagagtaatcccgtatctatgatgcagcagcaggcagctacaagccattatagttctgcacagggggggtctcagcactaccagggacagagctccatcgcaatgatgggccaaggctcacaggggtcctctatgatgggccagcggcccatggcgccttataggccctctcagcagggctcttcccagcagtaccttggccaggaagagtattacggtgagcaatattcacatagccagggcgcagctgagcccatgggtcagcagtactacccagacggccatggagattacgcctatcaacaatcttcttacactgaacagtcctatgacagatcttttgaagaatcaacccagcattattacgaggggggaaactctcagtactcccagcaacaggccggttaccagcagggagctgctcaacagcaaacatattctcagcaacaataccccagccagcagtcttatcccggacagcaacaggggtacggaagcgctcagggggctccaagccaataccctggataccagcaggggcaggggcagcagtacgggagttatcgggcccctcaaacggctcccagcgcacagcagcagcggccatatggttacgaacagggacaatacggaaattaccaacagtag

SEQ ID NO: 207758 - DNA, 1200 bp, synthetic construct
  misc_feature 1..1200: note = Description of Artificial Sequence: Synthetic coding sequence
  source 1..1200: mol_type = other DNA
atgcagagcctgagcaccgaggcccggtacgtgccccgggtgccccagcatagggatcagattagtcccaggtctcctcaacacggaggacagatctgcccccgttcacctctgcacagaggccagatctgcccgcggtctcctcccgccagaaggtatcagcagattctgcataggaacctggtttacctggctaccatcgctgactccaatcagaatatgcagtctttgttgcccgcaccacccactcagaacatgaacctcggacctggcgcactcacccagagcggaagctcccagggcttgcactcccagggaagcttgtcagatgccatttcgactgggctcccccccagctcacttctccagggtcaaatcggcaatgggccctcacatgtatccatgcagcagaccgctcccaacacattgcctactactagtatgagtatttccggaccaggctatagtcacgccggcccagcctctcagggcgtcccgatgcaaggacaaggtaccattggtaactatgtcagcaggacaaatatcaatatgcagtcaaatccagtgtcaatgatgcagcagcaggcggcaacaagtcactacagttcagcacagggaggttctcagcattaccaggggcagagcagcatcgctatgatgggccagggctcccaaggaagctccatgatgggccagcggcccatggccccttaccgcccctcgcagcagggtagctctcaacagtaccttggtcaggaggagtactatggggagcaatactcacacagtcagggcgcagccgaaccaatgggacaacagtactacccagacgggcacggagattacgcgtaccagcaatcctcatatactgagcagtcctatgacaggtcatttgaggaaagcacccagcactactatgagggcgggaattcccagtactcacaacaacaggccggataccaacagggcgcagcccagcaacagacctactctcagcagcagtatccttcccagcagagctatccgggacagcaacaaggctacggctccgctcaaggggccccaagtcaatacccgggctaccagcaggggcagggacaacagtacggaagctaccgagcccctcagaccgcacccagtgcacagcagcaaagaccatacgggtacgagcagggacagtacgggaattatcagcagtag

SEQ ID NO: 207759 - DNA, 1191 bp, synthetic construct
  misc_feature 1..1191: note = Description of Artificial Sequence: Synthetic coding sequence
  source 1..1191: mol_type = other DNA
atgagcgtggccttcgccagcgcccggccccggggcaagggcgaggtgacacagcaaaccattcagaagatgctggatgaaaatcatcaccttatccaatgcatactggagtaccagtccaagggaaaaaccgcggaatgcacccagtatcagcagattctccaccggaacctggtttatctcgctactatcgctgacagcaaccagaacatgcaaagcctgctgcctgcaccacccactcaaaacatgaacctgggacccggagcgctgacacagagcggttcatcccagggacttcacagccagggctcactgtcagatgccatatcgactggcttgcccccgagcagcctgcttcagggacagatcggcaacggcccgtctcacgtttctatgcaacagactgcccctaatacactgccaaccaccagtatgagcataagtggacctggctacagccatgccggcccagcctcccaaggcgtgccaatgcagggccagggcacaatcggcaactatgtgagtagaactaacatcaatatgcaatctaaccccgtgagtatgatgcagcagcaggccgccacaagtcactacagctccgcccaaggtggatcccaacactaccagggtcagtcttcaattgccatgatggggcaggggtcgcaaggcagtagtatgatgggccagcgccctatggccccgtacaggccctctcagcaaggtagctctcaacaatacctcgggcaggaggagtactatggggaacagtactcccacagccagggagctgccgagcctatgggacagcagtactatccagacggccacggagactacgcctaccaacaaagttcttatactgagcagagctatgacaggagtttcgaggagtcaactcagcactactacgagggaggcaactcacagtattcacagcagcaggcaggatatcaacagggcgccgcccaacagcagacctattcacagcagcagtacccaagtcagcagagctatcccggccagcagcagggatacggttccgcgcagggtgccccgtctcaataccccgggtatcagcaggggcaaggacaacaatacgggtcctatagggcaccccagactgcacccagcgctcagcaacaacgtccatatggatacgaacaggggcagtacggcaactatcagcagtag

SEQ ID NO: 207760 - DNA, 387 bp, synthetic construct
  misc_feature 1..387: note = Description of Artificial Sequence: Synthetic coding sequence
  source 1..387: mol_type = other DNA
atgcagagcctgagcaccgaggcccggtacgtgccccgggtgccccagcatcgcgaccagatctctccccgtagtccacagcacggtggacagatttgccccagatcgcctctccatagaggccagatttgcccccgtagcccccctgctagaaggtatcagcagattcttcatagaaacctggtttacctggccacaatcgcagactccaatcagaacatgcagagccttctgcctgccccacccacacaaaacatgaatctggggcccggagcattgactcagtcgggcagttcccaaggcttacacagccaagggtccctttccgacgctatctctaccggacttccgcccagttccctgttgcagggacagataggcaactag

SEQ ID NO: 207761 - DNA, 234 bp, synthetic construct
  misc_feature 1..234: note = Description of Artificial Sequence: Synthetic coding sequence
  source 1..234: mol_type = other DNA
atgagcgtggccttcgtgcccgactggctgcggggcaaggccgaggtgaaccaggaaactatccaaaggctgcttgaagaaaacgatcagctgatcaggtgtattgttgagtatcagaacaagggaagagggaacgagtgtgtgcagtatcagcatgtattgcaccggaacttgatttatctcgccactatcgccgacgcctcaccaacatcaaccagtaaagccatggaatag

SEQ ID NO: 207762 - DNA, 234 bp, synthetic construct
  misc_feature 1..234: note = Description of Artificial Sequence: Synthetic coding sequence
  source 1..234: mol_type = other DNA
atgagcgtggccttcgtgcccgactggctgcggggcaaggccgaggttaatcaggaaactattcagcgtttgttggaggagaatgaccagttgattcgttgcattgttgagtaccagaataaagggaggggcaacgagtgcgtgcagtaccagcatgtgctccatagaaacctgatttacctagcaaccatcgcagacgctagtcctacatcaacatccaaggcaatggagtag

SEQ ID NO: 207763 - DNA, 1164 bp, synthetic construct
  misc_feature 1..1164: note = Description of Artificial Sequence: Synthetic coding sequence
  source 1..1164: mol_type = other DNA
atgagcgtggccttcgccgccccccggcagcggggcaagggcgagatcacccccgccgccatccagaagatgctggatgacaataatcatctgatccaatgcatcatggattcccagaacaagggcaaaacatctgaatgtagccagtaccagcaaatgctgcacacaaatctcgtctatttggctactattgcagattccaaccagaacatgcaatcccttcttccggccccccccactcaaaatatgcccatggggcctgggggcatgaatcagtccggccccccaccccctccaaggagccacaacatgccttccgatggaatggtgggaggtggaccccccgcaccacacatgcagaaccaaatgaatggtcagatgcccggacctaatcacatgcctatgcaggggccgggaccaaatcagctcaacatgaccaattcctcgatgaatatgccttctagctctcatgggagcatgggcggatacaaccatagcgtgcccagttcacaaagcatgccggtacagaatcagatgaccatgtctcagggccaacccatgggcaactacggaccacggcctaatatgtccatgcagcctaaccagggccctatgatgcaccagcagcctccttctcagcagtacaacatgcctcagggtggggggcagcactatcaggggcagcagcctccgatggggatgatggggcaagtgaaccaaggcaatcatatgatgggtcagagacagattcccccttatcgccctccccaacaagggccccctcagcagtactccgggcaggaagattattacggagatcaatactcccacggcgggcagggaccaccggaaggaatgaatcagcaatattaccccgatggcaattctcaatacggccagcagcaagatgcataccagggcccgcccccgcagcagggttaccctccccagcaacagcagtatccagggcagcagggatatccgggccaacagcaaggttacggcccgagccaggggggtccagggccccagtacccaaactacccgcagggtcaagggcagcagtatggcggataccgccccacacagcccggtcctcctcagccgccacagcagcgaccctacggctacgatcagggccaatacgggaactaccagcagtag

SEQ ID NO: 207764 - DNA, 1257 bp, synthetic construct
  misc_feature 1..1257: note = Description of Artificial Sequence: Synthetic coding sequence
  source 1..1257: mol_type = other DNA
atgagcgtggccttcgccgccccccggcagcggggcaagggcgagattacccccgcggcaatccaaaagatgctggatgataacaaccacctcattcaatgtatcatggacagtcagaacaagggcaagacgagcgagtgctcacagtaccagcaaatgctacacaccaatctcgtgtacctcgcgactattgctgactccaatcaaaatatgcaaagtctactgccagctcctcctacacagaacatgcccatggggcccggcggcatgaatcagtccggcccgcccccccctccccggtctcacaacatgcccagcgacggcatggtcggcggcggccctcccgctcctcatatgcagaatcagatgaatggccagatgccaggacccaatcacatgccaatgcaagggcccggcccaaatcagttgaacatgaccaactcttcgatgaatatgccatccagcagccacggtagtatggggggatacaaccattctgtgccttcgtcgcagtcgatgccggtgcagaaccaaatgacaatgagccaggggcagccaatgggaaattacgggcctcgtcctaacatgtccatgcagcccaatcaaggaccgatgatgcatcagcagcccccatcccagcagtataatatgcctcagggggggggtcaacactaccagggacaacagcctccaatgggaatgatggggcaggtgaatcaggggaaccacatgatgggccagagacagatcccgccctataggccaccccagcaaggaccccctcaacagtacagcggccaagaagattactacggagaccagtactcccacggcggacagggcccccctgaaggtatgaaccagcagtactaccccgatggtcataatgattacgggtaccagcaacctagctaccccgagcagggatatgatcggccgtacgaagactccagccagcactattacgaaggcggtaacagtcagtacggacaacagcaagatgcctaccagggcccccccccccagcagggatatcctccgcagcagcagcaataccctgggcagcagggatacccgggccagcagcaaggctatggaccctcacaaggcggccccggacctcagtatcccaattacccccagggccaaggacagcaatacggtggctacagaccaacgcagccaggaccacctcagccacctcagcagcggccatacggctacgaccagggccagtatggcaattaccagcagtag

SEQ ID NO: 207765 - DNA, 1266 bp, synthetic construct
  misc_feature 1..1266: note = Description of Artificial Sequence: Synthetic coding sequence
  source 1..1266: mol_type = other DNA
ggcggcaacatgagcgtggccttcgccgccccccggcagcggggcaaaggtgaaatcacaccggccgcaatccagaagatgctcgacgataacaaccacttaatacaatgcatcatggatagccagaataagggcaaaacatcggaatgcagccagtaccagcagatgctgcacaccaatttggtgtatttagccacgattgccgattcaaaccaaaacatgcagtcattattaccagcccctcctacccagaacatgcccatgggccccggggggatgaatcagagtgggccaccacctccacctagatctcacaatatgccctccgatgggatggtcggcggcgggcccccagcacctcacatgcagaaccagatgaacggacagatgcccgggccgaaccacatgccaatgcaagggccagggcccaaccaacttaacatgaccaacagctctatgaacatgcctagtagctctcatggaagtatggggggttacaatcactcagtgccatcgagtcagagcatgcctgttcaaaatcagatgactatgagccaaggccagcccatgggcaattacggtcccaggccgaatatgtccatgcaacctaaccaaggacctatgatgcaccagcagccaccatcgcaacaatataatatgccccagggcggcggccaacattaccagggccagcagcccccaatgggcatgatgggtcaagtcaatcagggaaaccacatgatggggcagaggcaaatacccccgtaccggcctccccaacagggacccccgcagcagtattctggtcaggaagattactacggggaccagtactcccacggtgggcaaggcccacccgaagggatgaatcagcagtactatccggatggtcataacgattacggatatcagcagcctagctaccccgagcaggggtacgataggccctacgaagacagttcacagcattattatgagggagggaattctcagtacgggcagcagcaagatgcgtatcagggccctccacctcagcagggctacccgccacagcagcagcagtacccaggtcaacagggctaccctggccaacaacaaggttacgggcccagtcaaggaggccccggcccccagtacccaaactaccctcagggccagggacagcagtacggaggatatagacccacccaacctggacctcctcagccgcctcagcaacggccttatgggtacgaccaggggcagtatggcaactatcagcagtag

SEQ ID NO: 207766 - DNA, 399 bp, synthetic construct
  misc_feature 1..399: note = Description of Artificial Sequence: Synthetic coding sequence
  source 1..399: mol_type = other DNA
atgaaccagcagtactaccccgacggccacaacgactacggctaccaacaaccatcctatcccgagcaggggtatgatcgaccgtatgaagatagctctcagcattactatgaaggggggaactcccaatacggtcagcagcaggacgcctaccagggaccgccaccccaacaggggtaccccccccaacagcagcaataccccgggcagcagggctaccctgggcagcagcagggatacggacctagccaaggcggaccaggcccccagtatccaaactaccctcagggccagggccagcagtacgggggctatcgtcccacccagcccggacccccccaacctcctcagcagcggccatacggatacgaccagaatagcaggtggactgtatgttag

SEQ ID NO: 207767 - DNA, 1011 bp, synthetic construct
  misc_feature 1..1011: note = Description of Artificial Sequence: Synthetic coding sequence
  source 1..1011: mol_type = other DNA
atgcccatgggccccggcggcatgaaccagagcggccccccccccccaccacgcagccataatatgccgagtgatggtatggtcggtggaggtcccccggcaccacatatgcagaaccagatgaacgggcagatgcccggacccaatcacatgccaatgcaaggccctggccctaaccagctcaatatgacaaattccagtatgaacatgccttcaagctctcacgggagcatgggaggctacaatcattcagtgccatcatcccagtcaatgccagtccagaaccagatgactatgtcacagggccaacctatgggcaattatggccccaggcccaatatgtctatgcagcccaatcagggacccatgatgcatcagcagcctccttcacagcagtataatatgcctcaggggggagggcagcactaccaaggacagcagcctcctatgggtatgatggggcaggttaatcagggaaaccacatgatggggcaacgccagattccaccctacaggccacctcagcaaggacctcctcagcagtactctggccaggaggattattacggcgatcagtacagccatggtggtcaagggccaccagaggggatgaatcaacaatattatcccgacggacataatgactacggataccagcagccgagttacccggaacaagggtacgatcgaccatatgaggattcctcccagcactactatgagggcggcaactcccagtatggtcagcagcaagatgcctaccaggggcctccaccacagcaggggtacccaccacagcagcaacaataccctgggcagcagggctacccaggccagcagcaaggctatggtccatctcaaggcgggcccggtcctcagtatcctaattacccccaggggcagggccagcagtatggaggctacagacccactcaacctggcccaccacagcccccacagcagcgaccgtatggatacgatcagggccagtacggcaactaccagcagtag

SEQ ID NO: 207768 - DNA, 1188 bp, synthetic construct
  misc_feature 1..1188: note = Description of Artificial Sequence: Synthetic coding sequence
  source 1..1188: mol_type = other DNA
atgctggacgacaacaaccacctgatccagtgcatcatggacagccagaacaagggcaaaacttctgaatgctctcaatatcagcagatgcttcatactaacttggtgtacctggctaccatcgccgactcgaatcagaacatgcaatccctcctgccggctccaccaactcaaaatatgccaatgggcccagggggcatgaaccagtctgggccaccccccccccccagaagccataatatgccatcagatggcatggtcggtggcggcccccccgctccacacatgcagaaccagatgaatgggcaaatgcccggaccaaatcacatgcccatgcagggtccagggccgaatcagctgaacatgactaacagttctatgaacatgccttcatcttcgcatggctccatgggcggttacaaccacagcgttccttcctctcaatcgatgcccgtgcagaaccagatgaccatgtcccaaggccaacccatggggaattatggacccaggccgaacatgagcatgcagcctaatcagggtcccatgatgcaccaacagcccccgtcacagcaatacaacatgccccagggcggcggccaacactaccagggacagcagccgccaatggggatgatgggacaggtgaaccagggcaaccatatgatggggcagcgccagatacctccataccggcccccacaacagggaccaccccagcagtacagcggacaggaagactattacggagaccaatactcacacggggggcagggcccccctgaagggatgaatcagcagtactaccccgacggacataatgattatgggtaccagcaaccaagctatcccgaacagggttacgacaggccctacgaagattcgagccagcattattatgagggaggaaacagccaatacgggcaacagcaagacgcatatcagggtccaccccctcagcagggatatcccccacagcagcaacagtaccccggccagcagggctacccaggtcaacagcaaggatatggtccgagtcagggaggtcccggccctcagtaccctaactacccccagggccagggacagcagtacggagggtacaggcctactcaacctggcccacctcagcctccacagcaaagaccatatgggtatgaccagggccagtatggaaactatcagcagtag

SEQ ID NO: 207769 - DNA, 1008 bp, synthetic construct
  misc_feature 1..1008: note = Description of Artificial Sequence: Synthetic coding sequence
  source 1..1008: mol_type = other DNA
atgctgcacaccaacctggtgtacctggccaccatcgccgacagcaaccaaaatatgcagtctctgctcccagccccacccacccagaatatgccgatggggccaggggggatgaatcagagcgggccacctcctcccccgagaagtcataacatgccatcagacgggatggtcggcgggggcccgcccgccccacacatgcagaaccagatgaacggccagatgccaggacctaaccacatgcccatgcagggtcccgggcccaatcaactcaacatgactaattccagcatgaatatgccctcaagctctcatgggtcgatggggggttacaatcacagcgtaccatcaagccagtccatgcctgtgcagaatcagatgaccatgtcccagggccagcccatgggcaactacggtcctcggccaaacatgagcatgcagcccaatcaagggcccatgatgcatcaacagcctccaagccagcagtataacatgccacaggggggcggccagcattatcagggccagcagccacccatgggcatgatgggccaggtgaaccagggcaatcatatgatgggacagagacaaatacctccttaccggcccccccaacagggcccgcctcagcagtattcaggacaggaggattattatggagatcagtactctcatggaggccagggacctcctgagggaatgaatcagcagtactaccccgatgggaacagtcagtacgggcagcagcaggatgcttaccagggacctcctccgcaacaggggtatcctccccagcaacagcagtaccctggccagcaaggatatcctggccagcagcaggggtatggaccctcacagggcggccccgggccacagtatcctaattacccacagggccaggggcaacagtacggcggttacaggcctacccagcccggaccaccacaacctcctcagcagcgcccatatggatacgatcagggacagtacggcaattatcagcaatag

SEQ ID NO: 207770 - DNA, 1008 bp, synthetic construct
  misc_feature 1..1008: note = Description of Artificial Sequence: Synthetic coding sequence
  source 1..1008: mol_type = other DNA
atgctgcacaccaacctggtgtacctggccaccatcgccgacagcaaccagaacatgcaatcactcctccccgcgccccccacgcagaacatgcctatgggcccaggcggcatgaaccagtcaggcccaccccctcctccacgaagtcacaacatgcctagtgacgggatggtgggcggaggccctcctgcccctcacatgcagaaccagatgaacgggcagatgccgggcccaaaccacatgcccatgcagggccctggcccgaaccagttgaatatgaccaacagtagcatgaatatgccttcgtctagccatggttcaatgggaggatataaccactctgtaccctcctcacagagtatgcccgtccagaaccaaatgactatgagtcaggggcagccaatgggaaattatggcccacgtccaaacatgtctatgcagccaaatcaggggcccatgatgcaccagcaacctccgtcacaacaatacaacatgcctcagggcggaggccagcactaccaggggcaacagccacccatggggatgatggggcaggttaaccaagggaaccatatgatgggccagcgccagatccctccctatcgtcctcctcagcagggacccccacaacagtactcaggccaggaggattactacggagatcagtactctcacggcggacaaggaccgcccgaagggatgaaccagcaatactaccccgacggcaattcacagtacggtcagcagcaagatgcctaccagggacctccaccacagcagggctatccgccccaacagcagcagtatcctggccaacaaggttaccccgggcagcagcagggttatggcccctcccagggcggtcccggtccgcaataccccaactatccccaaggccagggtcaacaatacggcggataccgtccaactcaacctgggccacctcaaccgcctcaacagcgaccatatggctacgaccagggtcagtatggaaattatcaacagtag

SEQ ID NO: 207771 - DNA, 567 bp, synthetic construct
  misc_feature 1..567: note = Description of Artificial Sequence: Synthetic coding sequence
  source 1..567: mol_type = other DNA
atgaacggcgacgacaccttcgccaagcggccccgggacgacgccaaagcttcggagaaacggagtaaggcattcgatgatattgccacgtacttctcaaagaaggaatggaagaaaatgaaatacagcgagaaaatatcctacgtgtatatgaagaggaattacaaggccatgacgaaactgggttttaaggtcacgctgccgccgtttatgtgtaataaacaggccactgactttcagggcaacgattttgataacgaccacaatagaaggatacaagtagagcacccgcagatgactttcgggcggttgcatcgaataattcctaagatcatgccaaagaagcctgccgaggatgagaacgactccaaaggcgtctctgaagcttctggccctcagaacgatgggaagcagctccacccgcctggaaaagccaacatttccgagaagataaataagcggtctgggccgaaacgtggcaaacacgcctggacccatcgccttcgagagcggaagcagctggtgatctacgaagagatttctgatccagaagaagacgacgagtag

SEQ ID NO: 207772 - DNA, 672 bp, synthetic construct
  misc_feature 1..672: note = Description of Artificial Sequence: Synthetic coding sequence
  source 1..672: mol_type = other DNA
atgaacggcgacgacgccttcgcccggcggcccaccgtgggcgcccagatacccgagaaaatccagaaagcgtttgatgacatcgcgaagtacttctccaaggaagagtgggagaagatgaaagcttccgagaaaatcttttatgtgtatatgaaacgtaaatacgaggcaatgactaaactcgggtttaaagcaaccctccctccttttatgtgcaataaaagggcagaggacttccagggaaacgacctggacaatgatcccaatcgcggtaaccaagtcgagcggcctcagatgacgttcgggaggctgcaaggcatctctccaaagattatgcccaagaagcctgctgaggaagggaatgattcagaagaagttccagaggccagcggcccacagaatgatggcaaggagctctgcccgcctggaaagcccacaacatccgaaaaaatccacgagcgatccggcaatagggaagctcaggagaaggaggaacggcgcggtactgcacaccgctggtccagccagaacacgcacaatataggaaggttcagcctgtccaccagtatgggcgctgtccacggaactcctaagacgattacacataaccgcgatcccaaaggtggaaatatgcccgggcctaccgactgtgtgcgggagaacagctggtag

SEQ ID NO: 207773 - DNA, 567 bp, synthetic construct
  misc_feature 1..567: note = Description of Artificial Sequence: Synthetic coding sequence
  source 1..567: mol_type = other DNA
atgaacggcgacgacgccttcgcccggcggcccaccgtgggcgcccagatacctgaaaagatacagaaggctttcgacgatatcgcaaaatactttagtaaggaggaatgggaaaaaatgaaggcatctgaaaaaatcttctacgtttacatgaagcgcaagtatgaggccatgaccaagctcggttttaaggccactcttcccccattcatgtgtaataagagggccgaagattttcaagggaacgacctcgacaacgatcctaatagaggcaaccaggtggagcgaccccaaatgacattcgggaggctacagggtatcagccctaaaattatgccaaaaaagcctgcagaggaaggcaatgacagcgaagaagtcccggaggcttccgggccacaaaatgatgggaaggagctatgtccaccaggaaaacctacaacgagcgagaagatccacgaaaggtccgggcccaaacggggagaacacgcctggacacatcggctccgcgagagaaagcaactggttatctacgaggagatcagcgatccggaggaggatgacgagtag

SEQ ID NO: 207774 - DNA, 567 bp, synthetic construct
  misc_feature 1..567: note = Description of Artificial Sequence: Synthetic coding sequence
  source 1..567: mol_type = other DNA
atgaacggcgacgacaccttcgcccggcggcccaccgtgggcgcccagattcctgagaagatccagaaggcttttgacgatattgccaaatacttctcgaaggaggagtgggaaaagatgaaggtgagtgaaaaaatcgtgtacgtgtatatgaagagaaagtacgaggccatgaccaagctgggttttaaagccatccttccgtcttttatgcgcaataaacgagtgaccgattttcagggaaacgactttgacaatgaccccaacagagggaaccaggtgcagcggccccagatgacttttggcaggctacaggggatatttccgaagataatgccaaagaagccggccgaggaaggtaacgtgtctaaggaggtgccagaagcaagcggcccgcagaacgacggaaagcaactatgccctcctggcaagcccacgacaagcgagaaaataaacatgatctcgggacccaagcgcggagaacacgcttggacacatcgcctacgtgaacgtaagcagttagtgatatatgaggagatctcggatcctgaggaagatgatgagtag

SEQ ID NO: 207775 - DNA, 513 bp, synthetic construct
  misc_feature 1..513: note = Description of Artificial Sequence: Synthetic coding sequence
  source 1..513: mol_type = other DNA
atgaacggcgacgacaccttcgcccggcggcccaccgtgggcgcccagatacctgagaagattcagaaagccttcgatgacattgctaaatatttctctaaggaagaatgggaaaagatgaaggtcagcgaaaagattgtctacgtgtatatgaaaagaaaatacgaggcgatgaccaagttagggtttaaggccattctgccttcttttatgcgcaacaagagagttacggacttccagggaaatgatttcgataacgacccgaacagagggaatcaggtgcaacgccctcaaatgacattcggccgcctgcagggaatttttcccaagatcatgcccaagaagccagccgaagagggtaacgtcagtaaggaggttcctgaggctagcggtccgcagaacgatggaaaacagctgtgcccaccggggaagcccaccacatccgaaaaaatcaatatgattagcggggtgcttcagaggtactgccggttcggcagccgtcctcttcagtag

SEQ ID NO: 207776 - DNA, 303 bp, synthetic construct
  misc_feature 1..303: note = Description of Artificial Sequence: Synthetic coding sequence
  source 1..303: mol_type = other DNA
atgtacagcctgagcgtgcagcggccccagatgaccttcggccggctgcagggaatttttcccaaaatcatgccaaaaaagccagccgaggagggaaacgtgagcaaggaagtgcccgaagctagtggccctcagaatgatgggaagcagctgtgcccacccggcaaacctacgacatccgagaaaattaacatgatctctggccccaagcgtggcgagcacgcctggacacaccggttaagggaacgaaagcagctcgtcatctacgaagagattagcgaccccgaagaggatgacgagtag

SEQ ID NO: 207777 - DNA, 462 bp, synthetic construct
  misc_feature 1..462: note = Description of Artificial Sequence: Synthetic coding sequence
  source 1..462: mol_type = other DNA
atgaacggcgacgacgccttcgcccggcggccccgggacgacgcccaaatcagcgagaagctccggaaggcctttgacgacatagccaaatacttttcgaagaaagagtgggagaagatgaagagtagcgagaagatcgtctacgtttatatgaaactgaattatgaagtcatgacgaaactgggatttaaggttaccttacccccatttatgaggtctaagagggctgcagatttccatggcaacgatttcggaaatgaccggaaccatagaaatcaggtagagaggccacagatgaccttcggctctctgcagagaatctttcccaaggaccccaagggcggcaacatgcccgggcccacggactgtgttcgtgagtcaagttggtggttcatgaagaggtcggcgacactccgcaaaatgacctctaacagcccaagaggctatgatacctgtccctag

SEQ ID NO: 207778 - DNA, 567 bp, synthetic construct
  misc_feature 1..567: note = Description of Artificial Sequence: Synthetic coding sequence
  source 1..567: mol_type = other DNA
atgaacggcgacgacgccttcgcccggcggccccgggacgacgcccagatctcagaaaaactgaggaaagcattcgatgacatcgcaaaatacttctctaagaaagagtgggaaaagatgaaatcctcagagaaaatagtgtacgtgtacatgaagctgaactacgaagttatgaccaagctgggatttaaggtcactctcccccctttcatgaggagcaaacgcgccgccgacttccacggaaatgattttggcaacgataggaatcataggaaccaagtggaacgcccacagatgacgttcgggtctctgcagaggatcttccccaagattatgccgaaaaagccagccgaagaggaaaacggccttaaggaagtgcctgaagcctcaggcccacagaatgacggcaaacagctctgccccccaggaaacccaagtacacttgagaaaataaataagacaagtggaccgaaaagaggaaagcacgcatggacccaccgcctgagggagagaaagcaactggtggtgtatgaggaaatctccgatccagaagaggatgatgaatag

SEQ ID NO: 207779 - DNA, 1992 bp, synthetic construct
  misc_feature 1..1992: note = Description of Artificial Sequence: Synthetic coding sequence
  source 1..1992: mol_type = other DNA
atgggccccctgcgggagagcaagaaggagcaccgggtgcagcaccacgacaaggagatatctaggtctcggatccctcggcttattctgcgacctcacatgccacagcagcagcacaaggtgagccctgctagcgagagcccgttcagcgaggaggagagtcgtgagttcaacccctcatcctccgggcgcagcgcacgtacagtgtcttcgaactccttttgcagcgacgataccgggtgtccttccagtcagagtgtgtcgccagtgaaaacccccagcgatgccggaaattctccaattggcttttgcccgggttccgatgaaggctttacccgtaagaagtgcacaatcgggatggtgggtgagggcagcattcagtcctctaggtacaaaaaggaatctaagtccgggttggtgaaacccggatcagaggccgacttctcgtcgtcatcctccactggcagcatcagtgcgcccgaagtgcatatgagcactgctggcagcaaaaggtctagctcaagccgaaaccggggcccacatgggcggtctaatggagctagttcccacaaacccgggtctagccccagctcacccagagagaaggatctgctgtccatgttgtgccgaaaccaattgtcacctgtgaacatccatccctcctatgctccctcctccccgagttcatccaacagcggctcgtataagggttccgactgcagcccgatcatgagacggtccggccgctatatgagttgtggtgagaatcacggggtcaggcctcccaacccagagcagtatctgacgccactgcagcaaaaagaagtcacagtccgacatctgaagacaaagctcaaagagtctgaacgcagactacatgagcgggaaagcgagattgtcgaactgaagtctcagcttgcgcgcatgcgcgaggactggattgaggaggagtgccacagggtggaagcgcaactggcgctcaaagaggcgaggaaggagatcaaacagcttaaacaggttattgagacaatgcggagctccttagctgataaagataagggcattcagaagtactttgtagacatcaacatccagaacaagaaattagagagcctcctccagtctatggagatggcacacagcgggtccttacgcgacgaactgtgtcttgacttcccatgtgatagccccgagaaaagcctgaccctgaacccgcccctcgacaccatggcggatggactatcacttgaagagcaggtgacaggggagggggcggacagggagctcctggtcggagacagtatagccaacagtacagatctctttgatgaaattgtcacagcgaccacgaccgaaagcggggatctggagctggtgcattccactccaggcgcaaacgtgcttgagctccttccaattgtcatgggtcaagaggaaggcagcgttgtggtcgagagagccgtgcaaaccgacgtggtgccatacagtccagctatcagcgagctgattcagtccgttcttcagaaactgcaagatccatgtccttcctctctggctagtcccgacgaatcagaaccagacagtatggagtcatttcctgagtccctctccgcgctcgtggtcgatcttacacccaggaatcccaactcagcgattctactgagcccagtcgagactccctacgcgaatgtggacgccgaggttcatgccaacagattgatgcgggaacttgacttcgccgcctgcgtggaagaacgcctcgacggcgttattccacttgccagggggggagtggtgcgacagtactggtcctcttcttttctggtcgatttgcttgcagtggctgcccccgtggtcccaacagtgctgtgggcatttagtacccaacgaggtggaacagatcctgtgtacaacattggagctctgctaaggggctgctgtgtcgttgccttgcactcattgagaaggaccgcatttcgaatcaaaacctag

SEQ ID NO: 207780 - DNA, 1983 bp, synthetic construct
  misc_feature 1..1983: note = Description of Artificial Sequence: Synthetic coding sequence
  source 1..1983: mol_type = other DNA
atgagcaacttcgagaaggagcaccgggtgcagcaccacgacaaggagattagccggtcccggatacccagactcatcctacgccctcacatgccccagcagcagcacaaagtatctccagcctcggagagccccttcagcgaggaagaatcaagggagttcaaccctagctcctctggacggagcgctaggacagtgtcatccaactcgttctgcagcgatgatacgggatgcccatcctcccagtcagtttctcctgtaaagacacccagcgacgctggaaactctcccataggtttttgcccgggctctgatgaggggtttactcgcaaaaagtgtacaataggcatggtgggagagggaagcatccagtcaagccgatacaagaaagagtcaaagagtgggctcgtaaaaccgggtagcgaggctgatttttcctcaagttcatctacaggctctatatcagcccctgaggttcatatgtctaccgccggctctaagcggagcagcagctcaagaaaccgcggtccccatggcagaagcaacggggcctcaagtcataaaccaggtagctctccttcatccccccgcgaaaaagatctgctgtcaatgctgtgccgcaatcagctgagtcccgtcaatatacacccttcatacgctccgagttcaccttccagttctaattctggttcatataaagggtcagactgtagtccaatcatgcgacgaagcggtcggtatatgagttgtggagagaaccacggggtgcggcctccaaaccccgagcaatacctcactcctctgcaacagaaggaggtgacggttcggcatctaaaaacgaaattgaaggagtcagaaagaaggctccatgaacgcgagtccgaaatcgtggagctgaaaagccagctcgccaggatgagagaagactggatcgaagaagagtgccacagagtagaagcccagctcgccctgaaggaagccagaaaggagataaaacagttaaagcaggtgattgagacaatgcgcagttcactagccgataaggacaagggcattcagaagtattttgtggacattaatattcaaaataaaaagcttgagagtcttctccagtccatggaaatggcccattctggttctctgagagacgagctgtgtttagattttccgtgcgattctccggaaaaatcactgactctgaacccccccctggataccatggctgatgggctcagcttggaagagcaggtaacaggagagggtgccgatcgtgagctcttagtgggcgacagtatcgctaatagcactgacctgttcgacgagattgtaactgccacaacaacagaatcaggagacctcgaattggtccactccactccgggcgcaaatgtcctggagctgctgcctatcgttatgggacaggaggagggatcagttgtggtggaacgggctgttcagactgatgttgtaccctactcacctgccatatctgagcttatccagagtgtgctgcagaagctccaagacccgtgtccatcttccctcgcatcccccgacgaatccgagcccgacagcatggagtcctttccagagtccctgtctgccctggtcgtagacctcactcctcgcaaccctaattctgctattctgctgtcccccgtggaaaccccttatgccaacgttgacgctgaggtgcacgcaaatcgcttgatgagggagctcgacttcgccgcctgtgtggaggaaaggttggatggagtaatacctctggcacgaggaggcgttgtgcgtcagtactggtccagttctttcctggtggacttgctggcagtggctgcacctgtagtaccaacagtgctatgggcttttagcacccagcggggcggaaccgacccagtgtataatattggtgccctgctaagaggatgttgtgttgtcgcacttcactctctccggcggactgctttccggatcaaaacgtag

SEQ ID NO: 207781 - DNA, 1635 bp, synthetic construct
  misc_feature 1..1635: note = Description of Artificial Sequence: Synthetic coding sequence
  source 1..1635: mol_type = other DNA
atggtgggcgagggcagcatccagagcagccggtacaagaaggagtcgaaatccggcttagtcaagcccggatccgaagcggacttctcatcctcttcaagcaccggttcaatttctgctccagaagtgcacatgtcgacggccggatctaaaagatcctccagctcacggaatagaggaccccacggccggtccaacggtgcctcatctcacaagcctggcagctcgccgtcatcacccagggagaaggacctgctcagcatgctgtgtcgcaaccagctgtcccccgtgaatattcacccttcctatgctcctagcagccctagtagcagtaattcgggttcatacaaggggagtgactgctcgcccattatgcgaaggtccggaaggtacatgtcttgcggcgaaaaccatggggtgcgcccgcccaaccccgagcagtatctgactcctctgcaacaaaaagaagttaccgttaggcacttgaagacgaaactcaaggagagtgaacggaggcttcatgagagagaatctgagattgtcgaattgaaatcgcagctggctagaatgagagaagattggatcgaagaggagtgtcaccgggtggaggcacagctcgcgcttaaggaggctcggaaagaaatcaagcaactgaagcaggttattgagacgatgcgcagtagcctcgctgacaaggacaaaggcattcaaaaatacttcgtagatattaatatacaaaataaaaagctcgagtctcttctgcaaagcatggagatggcacattcaggatctctccgcgatgaattatgtttggattttccttgcgattctcccgaaaagagtctgacactaaacccaccattagatactatggcagatggactgtccctggaagaacaagttacaggggagggcgcagatagagagctgctggttggagacagcattgccaactctactgacttgttcgacgaaatcgtaactgctactaccaccgagtcaggggacttggagctggttcattcgactcccggtgcaaatgtgttggagctcttacctatcgtcatgggccaggaggagggctcagttgtggtcgaacgcgcagttcagactgacgtggtgccctactctcccgcaatcagtgagcttattcagtccgtcttacagaagctgcaagatccctgcccgtcttcactggctagccctgatgagtcagagcccgattcaatggaaagcttccccgagtctctgagcgctctggtggtggatctcacgcctaggaaccccaacagcgcaatcctgctcagtcccgttgaaacgccgtacgctaatgtggatgctgaggtacacgccaatcggctgatgcgagagttggactttgccgcatgtgtagaagagagactggacggcgtgatcccgctggcccgaggcggggtagtacggcaatactggtcttctagcttcctcgtggacctactggccgttgccgctcccgtagtaccaacagtgttgtgggcgttcagcacccaaagaggtggcactgacccagtgtacaatattggggccctgttgagagggtgctgcgtagtagcccttcactcacttaggcgcactgccttcagaataaaaacctag

SEQ ID NO: 207782 - DNA, 1992 bp, synthetic construct
  misc_feature 1..1992: note = Description of Artificial Sequence: Synthetic coding sequence
  source 1..1992: mol_type = other DNA
atgggccccctgcgggagagcaagaaggagcaccgggtgcagcaccatgacaaggaaattagtcggagccggattcctcgcttgattctacgcccgcatatgccacagcaacagcacaaagtttcccctgcttctgaatctcccttctctgaggaggaaagtagagaatttaacccctcctcgagtggccggagtgccaggactgtatcatcgaacagcttttgctccgatgacaccggctgcccatcttcacagtccgtgtccccggtcaaaacaccaagtgatgcgggcaactcccccataggcttctgccccggctcagacgaaggattcactaggaagaagtgtaccattggtatggtcggagaaggatcaatccagtcatctcggtacaaaaaagagtcaaagagcggtctcgtgaagccggggagtgaggccgatttctcatcctcctcgtcgacgggcagcataagcgccccagaggtacatatgagcactgcgggcagcaagaggtctagttcttcccggaaccgcggccctcacggtaggagcaatggagcaagttctcacaaacccgggagcagcccgtcaagcccgcgagaaaaggatctcctgtcaatgctgtgtcgcaatcagctgtcacctgtcaacatccaccctagttacgccccatcctctccttcaagttccaactcaggaagttacaagggcagcgactgctctcccatcatgcggcgttctggcaggtacatgagttgtggggaaaatcacggagtccggcctccaaatcctgagcaatatctcacacccttgcagcagaaagaggtgaccgtgcgccacttgaagacaaagctgaaagagagcgaaagaaggttacatgagagggaatccgaaatcgtggaattaaaaagtcagctggctcggatgagagaggattggattgaagaggaatgtcacagggtcgaggctcagctggcactgaaggaggcgcgaaaagaaatcaagcaattgaaacaggtgatcgaaacgatgcggtctagcctggcagataaggataagggtattcaaaagtattttgtcgatataaatatacagaacaagaagctcgagtcactgctccagtccatggagatggcacatagcggcagcttgcgtgatgaactctgtcttgactttccatgtgattccccagagaaatccttgacactgaatccacccttagacacaatggcggatggactgtctctggaagagcaggttaccggagaaggggccgacagggaacttttagtgggggacagcattgccaacagcactgatttgtttgacgaaatagtgactgcaacaaccacggaatccggggacttggagctagttcacagcacaccaggggctaacgtgctggaacttctgcccatcgtgatgggtcaggaagaggggagtgtagtagtcgaaagggctgtgcaaacggatgtggttccctacagtcctgccatttcggagctgatacaatcagtgctacaaaaactccaggatccctgcccatcctctttagcttctccagacgaatctgaaccagactcgatggaaagttttccagagtctctgtccgccctggttgttgatcttacacctaggaaccccaatagtgccatattactcagtccagtggagacaccgtatgccaacgtcgatgctgaagttcacgctaaccgcttaatgagggaattggattttgctgcatgtgtggaagagcggctggatggcgtcattccactagctagaggaggagtcgtgcgtcaatattggtcgagttcatttttggtggacctgctcgcggtggccgctccggtcgtcccgactgtgctttgggcattttcaactcagcgcgggggcactgaccctgtctataatatcggcgcacttctcagaggctgttgtgtcgtagctctccatagcttacgtaggactgctttccgcattaagacatag

SEQ ID NO: 207783 - DNA, 1989 bp, synthetic construct
  misc_feature 1..1989: note = Description of Artificial Sequence: Synthetic coding sequence
  source 1..1989: mol_type = other DNA
atgggccccctgcgggagagcaaggagcaccgggtgcagcaccacgataaggaaatcagcaggtcaagaattcccaggcttattttaaggccgcacatgccacaacagcaacacaaagttagcccagcgtccgagtctccattctctgaagaagagagcagggagtttaaccctagctcgtccggacggagtgcccgaacagtctcgagcaactctttttgctccgatgacacgggctgtccctccagccagagtgtgtcccccgtcaaaaccccatccgacgctggcaatagcccgatcggtttctgtcctggatctgatgaaggcttcactcggaaaaaatgcactatcggcatggtgggtgagggcagcatacagtcatcacgttataagaaagagagcaaatccggtctggtaaagcctgggtctgaagcagatttctccagctcctcatccacagggtctataagcgctccagaagtgcatatgagcaccgccggcagtaagagaagcagctcaagccgaaaccgcggaccccatggcaggtctaacggtgcaagctcccataagccaggaagcagccccagttcccccagagaaaaagacctgctgtccatgctctgtcgcaaccaactgagcccagttaatatccacccgtcttatgccccctctagtccttcttcctctaacagcgggtcctataaaggatcagactgtagccccatcatgagacggtcagggcgctatatgagctgcggcgagaatcacggagttcgcccacccaaccctgagcagtatctcaccccacttcagcagaaggaggtgactgtccgacacctcaaaaccaagctcaaggagtctgaacggcgcctccacgagcgcgaatctgagatcgtagaactgaaatcgcagttggccagaatgcgagaggactggattgaggaggaatgtcaccgagttgaggcccaactggccctgaaagaggctcgcaaggaaatcaagcagttgaaacaagtcatcgaaaccatgcgcagctccttagccgataaagacaagggtattcagaagtatttcgttgatattaatattcagaataaaaagctggagtcactcctccagagcatggaaatggcccattctggctcactgagggatgagctctgtctggacttcccttgcgatagccccgaaaagtcgttgactctgaaccccccactggacaccatggctgatgggctcagtctagaagagcaggtgactggggagggggccgacagagaactactcgttggcgacagcatcgccaatagtacggatttgtttgatgaaatcgtgacggctacaaccacggaatccggggaccttgagctggtgcactctacgcctggtgccaatgtgctggaactcctgccaatcgtcatgggtcaggaagagggaagtgttgtggttgagcgtgcagtgcagaccgatgtcgtgccctactctcctgcgatctcagagctcattcagtccgtcctccagaaacttcaagatccatgcccgtctagtctggcatcccccgacgaaagcgaaccggactccatggagagctttccagagtctctgtccgccctcgtggtggacctcactccccggaatcccaactcagcaatccttctttcccccgtggagacaccctacgcgaacgtggatgccgaagtccacgccaatcggctcatgcgtgagttggactttgcagcgtgtgtggaagagaggctggatggcgtcatcccattggctcgcggaggcgtcgtccgtcagtactggagctccagctttctcgtcgacctcctcgccgttgccgctcccgtcgtgcccaccgttctctgggccttttcaacacagcgtggaggtacggatcccgtgtataatattggtgccctgctgcgaggatgctgcgtggtcgctttacattccctaagacgcacagcctttcgcattaagacctag

SEQ ID NO: 207784 - DNA, 1992 bp, synthetic construct
  misc_feature 1..1992: note = Description of Artificial Sequence: Synthetic coding sequence
  source 1..1992: mol_type = other DNA
atgggccccctgcgggagagcaagaaggagcaccgggtgcagcaccatgacaaggaaatctctcggagccgaattccaagattgattctgcgaccccatatgccccagcagcagcacaaagtttccccagcaagcgagagccctttcagcgaagaagagagccgtgagttcaatccctccagtagtggaaggagtgctcggacggtgtctagcaactctttttgttcggacgataccggctgcccatcgtcacagagtgtgtctccagtgaaaacaccatcggacgccggcaactcaccaattgggttttgtccaggtagcgacgaagggttcacaaggaagaagtgtacaatcggcatggtcggcgaaggaagcatacagagtagtagatacaaaaaggagagcaaaagcgggctcgtgaaacccggctcagaagccgacttttcaagctcaagcagtacagggagtataagtgcccctgaagtccatatgtcaaccgctgggtccaagcgctccagctctagcaggaataggggacctcacgggagaagtaacggtgcaagcagccacaaaccaggctcttctccatccagcccccgcgagaaagatcttttgagtatgctgtgcaggaaccagctgtcacctgtgaatatacatccgtcctacgccccctcaagtccctcatcatctaattcaggcagctataaggggagtgattgttctcctattatgaggcggtctgggcggtacatgtcctgcggtgagaatcatggggtcaggccgcctaacccagagcagtatctcaccccactgcagcagaaggaggtgaccgtgcggcacctcaagacgaagttgaaagagagcgagagaaggttgcacgaacgtgaaagtgagatcgtggaactcaaatcccagcttgcccggatgagggaggattggatcgaggaagagtgtcaccgcgttgaggcccaactggcactgaaagaagcccgtaaagaaataaaacagctgaaacaggtaatcgaaactatgagatcgagcttggcggataaggataagggaattcagaaatattttgtggacatcaatatccagaataaaaagcttgaaagcctgttgcagtcaatggaaatggcccatagcggctccctgagagatgagctatgcctggattttccttgcgactctcccgagaagtcccttactttgaatcctcccttggatacgatggctgacggtttgtcgctggaagagcaggttaccggggagggagcagatcgggagttactggtcggagatagcattgcgaacagtaccgacctgttcgatgaaatcgtaaccgcaaccacaaccgaatctggtgacctggaattagtccattctaccccaggtgccaatgtgttagagctcctgcctatcgtgatgggacaggaggaagggagcgtggtcgtggagagagcagtacagaccgatgtggtgccttacagcccggcgatttcagagcttatacagtcagtcctccagaagctccaggatccttgcccatcctccttggcgtcacccgatgagagcgagcctgattcgatggaaagcttccctgagtccttgtctgcattagtcgtggatctaacaccccgcaaccctaacagtgctatcttgctttctcccgtggagaccccttacgccaatgtggatgccgaggtacacgctaatcgcctgatgagggaactggacttcgcagcctgcgtggaagaacgcctggacggggtgatacctctggcacgggggggagtggtccgtcaatattggtccagttcattccttgttgaccttctggccgtggctgcccctgtggtccccaccgtactgtgggccttttctactcaaagaggcgggactgaccctgtttataacatcggtgccttgctccgtggctgttgcgtcgtggcactgcatagcctgaggcggactgccttcagaattaaaacttag

SEQ ID NO: 207785 - DNA, 1992 bp, synthetic construct
  misc_feature 1..1992: note = Description of Artificial Sequence: Synthetic coding sequence
  source 1..1992: mol_type = other DNA
atgggccccctgcgggagagcaagaaggagcaccgggtgcagcaccacgacaaggagatttcgaggagccgcattcctcgcctcattctgaggccacatatgccacaacagcagcacaaggtgagtcccgctagtgaatcaccattttccgaagaggaaagtcgcgagttcaatccaagcagctctgggagaagcgcacgtactgttagttctaattcattctgtagcgacgacaccgggtgtccttccagccagtccgtttccccagtgaaaacaccttccgacgctggcaacagccccattggcttttgtcccggaagcgatgaggggttcactcgtaagaagtgtacaattggaatggtcggggagggctccattcagagctcccgatacaagaaagagtccaagtctggcttggtgaagcctggcagcgaggcagatttttcttctagttcgagcaccggttccatctccgcgccagaagtacacatgtctacagcagggagcaaaagatcttcaagcagtcgcaaccggggcccccacgggcggtctaatggggcttcatcgcataagcctgggtctagtccatcctctccgcgggaaaaggaccttctctccatgctctgccggaatcagctatctccggtgaatatccacccgtcctacgccccctccagcccatcttcaagcaattcgggctcttacaaagggtcagattgttctccaatcatgagaagatcaggacggtatatgtcttgtggcgaaaaccacggggtaagaccccccaatcccgaacagtacctaacacctttgcagcagaaggaagtgaccgtgcgtcatctgaaaaccaagctgaaagaatccgaaaggcggctacacgaaagggaaagcgaaattgttgaactgaagagccaattagcccgcatgagggaggattggattgaagaagagtgtcatcgtgtcgaggctcagttagccctgaaagaggccagaaaagaaattaagcaactcaaacaggtaattgagacgatgaggagtagcctggccgacaaagacaagggcatccaaaagtattttgtggatattaatatccagaacaagaaactggaatccttgctgcagtctatggagatggcccactcaggcagcttgcgcgacgaattatgccttgatttcccctgcgactctcccgagaagtccctcacactcaacccaccactggacactatggcggatggtctgagcctcgaagaacaggtgaccggtgagggtgcagaccgggaactgttggttggcgatagcatagccaattccacagatctcttcgatgaaatcgtcactgctaccaccacagaatccggcgatcttgaactcgtgcattctactcctggcgccaacgtgctggaactgttgccaatcgtcatgggccaggaggagggtagcgtggtcgtggaacgagctgtgcagacagacgtcgtcccttacagcccagctatctcagaactcatccaatcagtgctgcagaagttgcaagacccttgtccgagttcgctggcaagcccagacgaatcagaacccgatagcatggaaagttttcctgaatccctgtcagctcttgtggtagacctgacaccgagaaaccccaactccgctattctcctgagtcctgtcgaaacgccttacgcaaatgtggacgctgaagtacacgcgaaccgactgatgcgagaacttgactttgccgcctgcgtcgaagagagactggacggtgttatccctctcgctcgggggggggtggtcaggcaatactggtcatccagcttcttggtggatctcctggcggtggctgcccctgtggtgccaacagtgctgtgggctttctctacacagaggggaggcaccgaccccgtctataacatcggtgccctgctgagaggttgctgcgtagttgctttgcatagtcttcgaaggactgcctttcgaattaagacctag

SEQ ID NO: 207786 - DNA, 1992 bp, synthetic construct
  misc_feature 1..1992: note = Description of Artificial Sequence: Synthetic coding sequence
  source 1..1992: mol_type = other DNA
atgggccccctgcgggagagcaagaaggagcaccgggtgcagcaccacgacaaggagatctcccggtcacggatcccacgactcatcctgcgcccccacatgccacagcaacaacacaaggttagccctgcatccgaaagccctttcagcgaagaggaaagtcgggagttcaacccctctagctctggcaggtctgctcggactgtgtctagcaatagtttctgcagcgacgacactgggtgtccatcatcacaatcagtgtcccctgtaaagacaccaagcgacgctggtaatagtcctatcggattctgccccggctcagacgaggggttcacacggaaaaaatgtacaatcgggatggtcggcgaaggatccatacagtcatcacggtataaaaaagaatcgaagagtggtttggtgaagccagggtctgaggcggatttctcaagtagtagctccacaggaagcatatccgctcctgaggtgcatatgtcgactgccgggtcgaagcggagtagttcttctcggaaccgcggacctcacggtcgcagtaatggcgctagcagtcataagccaggcagctcccctagctctcccagggaaaaggatctgctgtcaatgctctgtcggaaccagctttcacccgtcaacattcaccctagctatgcgccctcatccccaagctccagtaatagcgggtcctataaagggtctgattgcagtccaatcatgcggcgctccggccgatacatgagctgcggcgagaatcacggtgtgcggccgccaaaccccgagcagtaccttactccactccaacagaaggaggttaccgtgcggcatcttaaaactaaactcaaggagtctgaacgacgtctacacgagagggaatccgagattgtcgaactaaaatcgcaacttgcccgtatgagagaggactggattgaggaggagtgccatcgggtggaggcccagctggctttaaaggaagctcgtaaggaaatcaagcaactgaaacaggtcattgagaccatgagatccagcctggccgataaggacaagggaatccagaagtatttcgttgacataaatatacagaataaaaaactggagtccctgctccagtctatggagatggcccactccggctcactgagagatgagctttgtctcgacttcccgtgcgatagccccgaaaagagtctaacactaaaccctccactcgatacaatggccgatggtctttccctggaggaacaggtcacaggagagggagccgatagggaactccttgtgggagatagcatcgccaattccacagatctgtttgacgaaatcgtaactgccactactaccgagtccggagacctcgaactggtccactctacacctggggccaatgttctggagctcctgccgatcgtaatgggccaagaagagggatcagttgtggtggagcgcgctgtccaaaccgacgtcgtgccatactctccagccatcagcgagctgattcagtccgtgctgcaaaaattgcaagatccctgtccctcgagtttggcgtcacctgatgagtcagagcccgacagtatggagtctttcccggagtctcttagcgcgctggtggtggacttaacacctcgcaaccccaactcggccatcctactctctcctgttgagacgccatacgctaacgtcgatgcagaggttcacgctaacaggttgatgcgtgagctggatttcgcggcatgcgtagaggaaagactggatggtgtgatcccactggcgcggggcggggtggttcggcaatattggagcagctcatttttggtggatcttttggctgtggcagctcctgtggtgccaaccgtgttgtgggcgttttccacccaaagaggtggaacggaccccgtctacaatatcggcgccctcctgaggggatgctgcgtggttgccttgcactctctccggagaacagccttcagaatcaaaacctag

SEQ ID NO: 207787 - DNA, 1989 bp, synthetic construct
  misc_feature 1..1989: note = Description of Artificial Sequence: Synthetic coding sequence
  source 1..1989: mol_type = other DNA
atgggccccctgcgggagagcaaggagcaccgggtgcagcaccacgacaaggaaatctctaggtcccggattccaagattaatacttaggccacacatgccccagcaacagcacaaagtgtcacccgcaagcgaatctcctttttctgaagaggagagtcgcgagtttaacccctcttcatctggacgaagtgccaggactgtaagctcaaattcattttgtagtgatgataccggttgcccttcttcgcaatcagtatctcccgttaaaactcccagcgatgcagggaattcccctatcgggttctgtcctggcagcgacgagggcttcaccagaaaaaagtgcacaatcgggatggtgggggaagggtccatacagagttcacgctacaagaaagagagtaaaagcggtctggttaagcctgggtctgaagctgacttttcctctagtagctctacaggttctataagcgcccccgaggtgcacatgtccacagctggctccaagagatcgtcttcttctcggaatagggggccacacgggagatcaaacggagccagtagtcataaacccggtagctctcctagctccccccgggagaaagacctgctctcaatgctgtgccggaaccagctgagccccgtgaatatccatccctcgtacgccccttcttctcccagcagcagcaacagtggcagttacaaaggaagcgattgctctcccatcatgaggcggtcaggacggtatatgtcctgcggcgaaaaccacggagtgagaccccctaatccagagcagtacctgacaccacttcagcaaaaagaagtaaccgtgcgccacctgaaaacaaagttgaaagaatccgaacggcgtttgcacgagagagagagcgagatcgtggaactgaagagccaactggccaggatgcgcgaggattggattgaggaagaatgtcaccgggtagaggcacagcttgcactgaaagaggcacgcaaagaaattaaacagctgaagcaggtcattgaaaccatgagaagctcacttgctgataaagacaaagggatccagaaatatttcgttgatattaacatacagaataaaaagttagaatcacttctgcagtcaatggagatggcacatagtggctccctgcgcgatgagctgtgtttagacttcccttgcgattcaccagaaaagagtttgaccctaaatccgccattagatacgatggccgacggattatctttagaggagcaagtcacaggtgagggcgctgacagggaattacttgtcggggatagtatcgccaactctacggatctgtttgacgaaatcgttaccgctacaaccacagagagtggggacctggaactggtacatagcacacctggagctaatgttctggaattactgcccattgtgatgggccaggaagaaggaagcgtggtcgttgaacgagccgtccagacagacgtggtcccatactcaccggctatctccgaattgatccaaagtgtcttacagaaactgcaggatccctgcccgtctagccttgcctctccagatgaaagcgagcctgatagtatggaaagctttccggagagtctgtccgcgctggtggtggaccttacaccaagaaaccctaatagcgctatcctccttagccccgtggaaaccccctatgctaacgtggacgctgaggtgcacgccaacagactgatgagagaactagattttgcagcctgcgtggaggagcgcctggatggggtgatccctctggcacgcggcggggtggtgagacaatattggagctcctcgtttctggtagacctcctagcagtcgctgctcccgtcgttcccacagtgctttgggcattttcaacacagagaggaggaaccgatcctgtctataacatcggcgccttgctaagaggctgttgtgtggttgccctgcactcactgcgccggacagcctttcggatcaagacgtag

SEQ ID NO: 207788 - DNA, 414 bp, synthetic construct
  misc_feature 1..414: note = Description of Artificial Sequence: Synthetic coding sequence
  source 1..414: mol_type = other DNA
atgggccccctgcgggagagcaagaaggagcaccgggtgcagcaccatgacaaggagatatcacggagccggatcccacggctcatcctgaggccacacatgcctcagcaacagcacaaagtttcacctgctagtgagtctcccttttctgaggaagagtccagggagttcaacccctcgtcatccggaagatcagcgcggaccgttagtagtaactctttttgttcagacgacaccggctgcccttccagccaatctgtgagccctgtaaagaccccttccgatgctgggaatagccccatcggattttgtccaggctcggacgagggttttactaggaagaagtgcactatcggcatggtgggcgaggggagcatccaatctagccggtataagaaggagtctaagagctag

SEQ ID NO: 207789 - DNA, 231 bp, synthetic construct
  misc_feature 1..231: note = Description of Artificial Sequence: Synthetic coding sequence
  source 1..231: mol_type = other DNA
atgggccccctgcgggagagcaagaaggagcaccgggtgcagcaccacgacaaagagatctcccgctcccggataccaagactgattctaagaccccacatgccccagcagcagcacaaggtgtccccggcttcagaatccccgttctcagaggaggagtcgagggaatttaacccttcatcatcaggcagaagcgcacgaactgtgtcctccaattctttttgtagttag

SEQ ID NO: 207790 - DNA, 222 bp, synthetic construct
  misc_feature 1..222: note = Description of Artificial Sequence: Synthetic coding sequence
  source 1..222: mol_type = other DNA
atgggccccctgcgggagagcaagaaggagcaccgggtgcagcaccacgataaagagatttctcggtcccgcatcccccgactcatactaaggccacacatgcctcagcagcaacacaaggtgagtccggctagtgaatcgcccttcagcgaggaggagtctcgagaattcaaccccagtagctccggccgatccgctcgaaccgtcagctccaactcctag

SEQ ID NO: 207791 - DNA, 378 bp, synthetic construct
  misc_feature 1..378: note = Description of Artificial Sequence: Synthetic coding sequence
  source 1..378: mol_type = other DNA
atggtgggcgagggcagcatccagagcagccggtacaagaaggagtctaagtctggcctggttaagcctgggagcgaggcagacttctcaagcagctcctctaccggcagtatctctgcacccgaggtacatatgtccactgccggctcgaaacgctcttcctcaagcaggaataggggaccacacggccgcagcaacggcgctagttctcacaaacctggctcctccccatcatcccctcgcgagaaggacctgctatcaatgctgtgccggaaccaactcagcccagtaaacatacatccgagttacgcccccagctcgccttcttcctcgaactctgggtcctacaaagggagcgattgttcccccatcatgtag

SEQ ID NO: 207792 - DNA, 1635 bp, synthetic construct
  misc_feature 1..1635: note = Description of Artificial Sequence: Synthetic coding sequence
  source 1..1635: mol_type = other DNA
atggtgggcgagggcagcatccagagcagccggtacaagaaggagagcaaatcaggcttagtcaaacccgggtcagaagcggatttctccagttcttccagcacgggctccattagcgcccctgaagttcacatgagcaccgccggcagtaaacgaagctcttcgagtaggaacaggggcccacatgggcgctccaacggcgcatcctctcacaagcctgggtcttctccaagcagtcctcgagaaaaggacctactgtctatgctgtgtcgcaaccaattgtccccagtgaacatacatccaagctatgccccatcatcacctagtagctctaacagcgggtcctataagggaagcgactgcagccccatcatgagacgcagcggaaggtacatgagttgcggcgaaaatcacggagtaagacctccgaatcccgaacagtatttaacgccccttcaacagaaggaggtgactgtgagacatttaaagaccaagctaaaggagtccgagcgtagattgcatgaaagagagagcgagatcgtcgaactgaagtctcaactggcacgaatgagagaggattggattgaagaagagtgccacagggtggaggcccaactcgccctgaaagaggcccgcaaagagattaagcagctgaaacaagtcatagagactatgcggagctcactggccgacaaagacaaagggatccagaagtacttcgtggacattaatatacagaataagaagctcgagtccttactgcagagtatggaaatggctcatagcggcagtttgagagatgaactgtgcctggacttcccctgcgatagccccgagaagtctctgaccctgaacccccccttggataccatggccgacggcctgtccctagaggaacaagtgacaggggagggagctgatagggaattgcttgttggggattcaatcgcaaactcaaccgacctgtttgacgaaatcgtcaccgccaccaccactgagagtggagacttggaattggtacatagcacccccggcgctaacgtcctcgaactcctgccaattgtgatgggacaggaagagggatcagttgtcgttgagagagcggtacagaccgacgtcgtcccttattcacccgcaatctctgagctgatccagagcgtgttgcagaaactacaggatccctgtcccagtagtctcgcctcgcccgacgaaagtgaacccgatagtatggaatccttcccagaatccttaagcgccctggttgtggacttgaccccaagaaaccctaattctgcgatccttctgtccccggttgaaacaccttacgccaatgtagacgctgaggtccacgcaaataggcttatgcgggagttggatttcgctgcctgtgtagaagagcgtctggatggggtcattcccctcgcccgaggcggagtggtgcgtcagtactggtcgtcaagctttctggtagacctgctggcggtggctgcaccagttgtacctaccgtactgtgggcatttagcacacaaagaggcggcacagatcccgtgtacaatataggtgctctgctgcgcggatgttgtgtggttgccctgcacagtctgagaaggactgccttcagaattaagacatag

SEQ ID NO: 207793 - DNA, 243 bp, synthetic construct
  misc_feature 1..243: note = Description of Artificial Sequence: Synthetic coding sequence
  source 1..243: mol_type = other DNA
atggtgggcgagggcagcatccagagcagccggtacaagaaggagtccaaaagcggattggtaaagcctggaagcgaggctgacttcagtagcagcagctctaccggaagcatctccgctccagaagtacatatgagtacagcgggttctaagcgctcgagtagctccaggaacaggggtcctcacggacggagcaacggggcatcctctcacaaaccgggtagttcgccgtcgtccccttag

SEQ ID NO: 207794 - DNA, 1989 bp, synthetic construct
  misc_feature 1..1989: note = Description of Artificial Sequence: Synthetic coding sequence
  source 1..1989: mol_type = other DNA
atgggccccctgcgggagagcaaggagcaccgggtgcagcaccacgacaaggagattagcagatcccgcatacccagactgatattacggccccatatgccccagcagcagcacaaagtgtccccggcctcagagtcccctttctccgaagaagaatctcgcgaatttaaccccagttcctccggccgatcagcaaggacagtctcaagtaattctttctgcagcgacgataccggttgtccaagctcgcagtcggtaagtcctgtgaaaacgccgtctgacgctggcaattctcctatcggtttctgccctgggtctgacgagggcttcactcggaagaagtgcacaattggcatggtgggcgagggctcgattcagtcctcccgatacaagaaggagtcaaagtccggcctggtgaagcctggcagcgaggccgatttctctagcagcagctctaccggctccataagtgctccggaagtgcacatgagtacggctggaagcaaacgatcttctagttcgcgcaacagagggccacacggccggtcaaatggtgcgtcgagccataaacccgggagttcacctagctcccctcgggaaaaagatttgctttcaatgctctgccgaaaccagctgagtcccgtgaacattcatcccagctatgccccatcctccccttctagctcaaactccggctcttataaaggaagcgactgctcacctattatgaggcggtcagggcggtacatgtcatgcggagagaatcatggcgtacgcccaccgaatccagagcaataccttactcctctgcagcaaaaagaggttaccgtccgacaccttaaaaccaaactcaaagagtctgagcgcagactccacgagcgggagagcgaaattgtcgagctcaagagccagctcgcacgcatgcgagaggactggatcgaggaagagtgccaccgcgtggaagcacagctcgccctgaaagaagcccgcaaggagatcaaacagctgaagcaggtgatagaaacgatgaggtcctccctggccgataaggataaaggaatccaaaagtatttcgtggacattaatatacagaacaaaaagctcgaaagcctgctacagagcatggaaatggctcattcagggagccttagagatgaattgtgtctcgacttcccctgcgatagcccagaaaagtccttaacactgaacccccctctggacacaatggccgatgggctgtccctggaggaacaggtgactggggaaggcgctgacagagagctgctcgtcggcgacagcatcgccaattccacagatttgtttgacgaaatcgtcactgctacgacaacggagtcgggggacttggagttagtgcattctacccccggcgcaaacgtcctagaactgcttcccattgtaatggggcaagaagagggatcagtagtggtcgaaagagctgtgcagactgatgtggtgccttactctccagctatctccgagctgatccagtctgtgctgcagaaactgcaagacccatgtccctcttcactggcgagtcctgatgaatccgaaccagactctatggagtcctttccagagagcttgagtgctctggtggtcgatctgactccaaggaaccctaactctgctattctcctttctccagtggagacaccttatgctaacgtggatgctgaggttcacgccaatagactgatgagagagctcgatttcgccgcttgcgtagaagagcggctcgatggcgtaattcccttggcacgaggaggtgtcgtcaggcagtattggagttcctccttcctggtggacttattggcagtggcagcacctgtagtcccaacagtactgtgggccttttcaactcagaggggaggtacggacccagtctacaacatcggcgccctgctgcgtggatgctgcgtggtcgccctccactccttacgacgcactgcttttcggattaagacatag

SEQ ID NO: 207795 - DNA, 288 bp, synthetic construct
  misc_feature 1..288: note = Description of Artificial Sequence: Synthetic coding sequence
  source 1..288: mol_type = other DNA
atgggccccctgcgggagagcaagaaggagcaccgggtgcagcaccacgataaagagatttcacgtagcagaattcccagactaatattgaggccccatatgccccagcaacagcacaaggtgtcacccgcatctgagtctccgttctccgaggaggagtcacgagaatttaaccctagtagttccggaaggtcagcccggaccgtaagctcgaacagtttttgcagcgatgacacaggctgccctagttcacagtctgtgtctccagtcaaaacgccgtccgactag

SEQ ID NO: 207796 - DNA, 615 bp, synthetic construct
  misc_feature 1..615: note = Description of Artificial Sequence: Synthetic coding sequence
  source 1..615: mol_type = other DNA
atgggccccctgcgggagagcaaggagcaccgggtgcagcaccacgataaggagatctcccgaagtaggatcccacggcttatattacggcctcacatgcctcaacagcagcacaaagtgagcccagcctcggaaagccccttctctgaagaagagagccgggagttcaacccgtcttcctcaggtagatccgcccggactgtttcctccaattccttttgtagcgatgacaccggatgccctagcagccaatcagtaagtcccgtcaaaacaccgtcagacgccggaaattcccccataggtttttgtccaggcagcgatgagggatttaccagaaaaaagtgcacgatcggaatggtgggggagggtagtatacaatccagtcgctacaagaaagagtctaagtcaggacttgtgaaacccggcagcgaagccgacttctcgagttcctccagcactggcagcattagcgcaccggaggtgcatatgtctactgccggctctaaaagatcaagcagttcgcggaatcgggggccccatggtagatcaaatggggcctcttcgcacaagccaggctcctccccgagttcacctcgtgagaaggaccttttgtag

SEQ ID NO: 207797 - DNA, 108 bp, synthetic construct
  misc_feature 1..108: note = Description of Artificial Sequence: Synthetic coding sequence
  source 1..108: mol_type = other DNA
atggtgggcgagggcagcatccagagcagccggtacaagaaggagtccaaatccggcctcgtgaagccaggatctgaagctgactttagtagctcctcttcaacatag

SEQ ID NO: 207798 - DNA, 105 bp, synthetic construct
  misc_feature 1..105: note = Description of Artificial Sequence: Synthetic coding sequence
  source 1..105: mol_type = other DNA
atggtgggcgagggcagcatccagagcagccggtacaagaaggagtcgaaaagcggccttgtcaaaccaggctccgaagccgactttagctcttcatcgtcttag

SEQ ID NO: 207799 - DNA, 243 bp, synthetic construct
  misc_feature 1..243: note = Description of Artificial Sequence: Synthetic coding sequence
  source 1..243: mol_type = other DNA
atggtgggcgagggcagcatccagagcagccggtacaagaaggagtccaagagtgggctggtcaagcctggttccgaggccgacttttcatctagcagctctacaggatccatttcagcccctgaggttcacatgagtaccgcgggctccaagagaagttcatcaagtcgcaatagagggccccatggcagaagcaatggcgcttcttcacacaagccaggatctagcccgagcagtccatag

SEQ ID NO: 207800 - DNA, 1788 bp, synthetic construct
  misc_feature 1..1788: note = Description of Artificial Sequence: Synthetic coding sequence
  source 1..1788: mol_type = other DNA
atgggccccttctgggcccggaaggacgacaccggctgccccagcagtcagtctgtgtctcctgtgaagaccccttcagacgccgggaattctcccatcgggttctgccccgggagcgacgagggatttaccaggaaaaagtgtaccatcggcatggtgggcgaggggtctatacaatcaagcagatacaaaaaagagtccaagagcggtctagtgaaaccaggctcagaggccgacttctctagtagtagttctacaggcagtatcagcgcacccgaagtgcacatgtctaccgccggaagtaagcgtagcagctcctcaagaaatcggggcccacacgggagatccaacggtgctagctcacataaacccggaagctctcccagttccccgagagaaaaagatcttctgtcaatgttatgcaggaatcagctgagccctgtgaatattcatccctcctacgcaccaagctcacccagctcctctaattcagggtcttacaagggaagtgactgcagcccaatcatgcgtcgatctggccgctacatgtcctgcggggagaaccacggtgtgagaccaccaaatcctgagcaatatttaacccccctgcagcaaaaggaagtgaccgtccgtcacctaaagacgaagctaaaggaatccgagaggcgcctgcatgaacgggagagtgagatcgtggagctaaagagtcagttggcgaggatgcgcgaggattggatcgaggaagagtgtcatcgggttgaagcgcaactcgcactgaaggaagctcgtaaggaaattaaacagctcaaacaggtgattgagactatgagaagttctctggccgataaggataagggtatacagaagtacttcgtggacattaacattcagaataagaaactcgagtcccttctccagagtatggagatggcccactccggatcactacgcgatgagctttgcctagactttccctgcgactcaccagagaagagtctcacactgaaccccccactggataccatggctgacggtttatcccttgaggagcaagtgacaggggagggggctgatagggagctgcttgtgggcgactccatcgccaacagcactgatctgttcgacgaaatcgtgaccgctacaaccacagagtctggagatttggaactggtgcacagtactcctggtgccaatgtgctcgagttgcttcccatagtgatgggtcaggaagaaggctccgtcgtcgtcgaaagagctgttcagacggacgtggtgccgtatagtcccgccatttctgagctgatccagtccgtgctgcaaaagctgcaagatccgtgccctagctccctcgctagcccagacgaatcagagcctgacagtatggagtctttccccgaaagtctcagcgcactggtggtcgatctgacaccacgcaaccccaactctgccattttgctaagtcctgtggaaaccccctacgccaacgttgatgcagaggtacacgccaatcgactgatgcgggagctcgactttgcggcttgcgtagaagagagactggacggtgttatacctctggcaagggggggtgtcgtacggcaatattggtcgagctccttccttgtggatctgctggctgttgctgccccagttgtcccaaccgttttgtgggcttttagtactcagcgcggcggcaccgatccagtgtacaacataggcgcgctactgcgcggatgttgtgtggtcgctctccactctttgcgtcgcacagcctttcgcattaagacctag

SEQ ID NO: 207801 - DNA, 1635 bp, synthetic construct
  misc_feature 1..1635: note = Description of Artificial Sequence: Synthetic coding sequence
  source 1..1635: mol_type = other DNA
atggtgggcgagggcagcatccagagcagccggtacaagaaggagtccaagagtgggttagtaaagccagggtccgaagctgacttctcaagctccagcagtacagggagtatctctgcccccgaggtgcacatgtccactgcaggctctaagcggtcctctagttctcgcaaccgaggcccacacggtcggtccaacggcgcatcatcacataagccaggcagcagtccgtctagccccagggagaaggatctcctcagcatgttatgtaggaatcagctgagcccagtgaatattcatccgtcctacgcaccatcaagccctagctcaagcaattcaggcagctataaaggatctgactgctcgcccatcatgagacgctctggccggtacatgtcctgtggtgaaaaccatggcgttcggccccctaaccctgagcagtacctgacccctctccaacagaaagaggtgaccgttcgtcacctgaagaccaagctgaaggagtctgaacgaagattacatgagagggaaagtgaaatcgttgagctaaagtcccaactcgcaaggatgcgcgaagactggattgaagaagaatgtcaccgagtggaggctcagctggctctgaaggaggcgcgaaaagagatcaaacagctgaaacaagtcatagaaaccatgcgtagctctctggctgataaggataagggtatccagaaatattttgtggacattaacatccagaacaagaaattagagtctttgctgcagagcatggaaatggctcactctggcagccttcgggacgagctgtgcttagacttcccatgcgactctccggaaaagtcgttgacgctgaatcctccactagatacaatggccgatgggcttagtttggaggagcaggtcaccggggaaggagctgaccgcgagttgctcgtgggagactcaattgcaaatagcactgatttgttcgacgagatcgtgactgctactacgacagaaagcggagatctagaactcgtgcattccactccaggagcaaacgtgctcgagctgctgcccatagtgatgggccaggaggaaggcagcgttgtggtggagagagcagtccagaccgatgttgtgccgtactctcctgcaatatccgaactcattcagtctgtgcttcagaagctgcaagatccctgtcctagcagtctcgccagtcccgacgagtctgagccagactcgatggaatccttccccgagagtctgtctgccctggtagtggacctgacgccgagaaaccctaactcagcgatactcctgtctccagtcgagaccccttacgccaatgtggacgccgaggtacatgccaaccgcctgatgcgagagttggattttgccgcttgtgttgaagaaaggctggatggtgtgatcccacttgcccgaggcggagtggtccggcagtactggagttctagttttctcgtcgacctactggccgttgcagcgcccgtagtccctacggtgctgtgggccttttccacacaacgcggcggaactgacccagtttataacataggtgcccttttacggggatgctgcgtggtcgcgcttcactccctgcgccgaactgccttccgcattaaaacttag

SEQ ID NO: 207802 - DNA, 1992 bp, synthetic construct
  misc_feature 1..1992: note = Description of Artificial Sequence: Synthetic coding sequence
  source 1..1992: mol_type = other DNA
atgggccccctgcgggagagcaagaaggagcaccgggtgcagcaccatgacaaagagatttcgcgaagcaggatccctcgcctcatccttcgcccacatatgccacagcaacaacacaaagtttcgcccgccagcgagtctcctttctccgaggaagaaagccgggagttcaacccaagttcctctgggcgttctgcgcgcacagtcagcagcaacagtttttgctccgacgacacaggctgcccctcaagtcagtcggtcagccctgtgaagacaccctctgacgcggggaactcaccaattggcttctgtcccggcagcgacgagggctttaccaggaagaagtgcaccattggaatggtcggggaaggaagcatacagtcaagcaggtataaaaaggaatcaaaatccgggcttgttaaacccgggtccgaagctgatttttcctcaagcagcagcacaggttctatctccgctccagaagtccacatgtccactgccggcagcaaaagatcgtcctcaagtagaaaccgcgggcctcatggccggtcaaatggcgccagctcacacaaacccggatcttcaccttcatcgccacgcgagaaggatctgcttagtatgctgtgtcggaatcaactttcacccgtgaacatccatccttcctatgctccgagctctccctctagctctaatagcgggtcttacaaaggtagcgattgttcccctatcatgagaaggtccgggcggtatatgagctgtggggagaaccacggtgtgagacctcctaaccccgagcagtacttgactcctctccagcaaaaagaggtgacagtgcgtcatttgaagactaagctgaaagagagcgaacgccggttacacgaaagggagagtgagatcgttgagctgaaatcccagctcgccaggatgcgggaggactggatcgaggaggagtgccacagggtagaagcccagctggcactgaaggaggctcgcaaggagatcaagcagctgaagcaggtgattgagaccatgaggtcttctctagccgacaaagacaaagggatacaaaagtacttcgtagatataaatattcagaacaagaaactagaatccctcctacaaagtatggagatggcccattctggatctctgagggatgagttgtgcctggattttccttgtgatagccccgagaaatccctgacattaaacccacctttagacacaatggccgacggactgtccttggaagaacaagtgaccggtgagggagctgatcgggaactgttagtgggagactctatcgccaatagtacagacctgtttgatgaaatcgtgacagctacaactactgagagcggagatcttgagttagtacatagcacgccgggtgcaaacgtgctggaactactgccaatcgtgatgggccaggaggaaggaagtgtagtggtcgagagggcggtacagaccgatgtcgtcccctattccccagcaattagcgagctaattcagagcgtgctgcagaagcttcaagacccttgtccctccagcttggcaagtcccgacgagagtgagcctgattctatggagtccttccccgagagcctttctgctctcgttgttgacctcaccccccgaaaccccaactctgcaatcctcctttcacctgtcgagacaccttacgcaaacgttgacgcagaggttcacgccaaccgcctgatgcgagagctggatttcgcagcctgcgttgaggagcgcttggatggagtgatcccgctcgcacgcggcggcgtggttcgtcagtattggtcatccagttttctggtagatctgttggctgtggcagctcctgtggtgccaactgtgctttgggcattctcaacccagcgaggcgggaccgaccctgtgtataacatcggagccctgcttcgcggctgttgtgtggtggccctccatagtctccggcgcacagcttttcgaataaagacatag

SEQ ID NO: 207803 - DNA, 489 bp, synthetic construct
  misc_feature 1..489: note = Description of Artificial Sequence: Synthetic coding sequence
  source 1..489: mol_type = other DNA
atgggccccctgcgggagagcaaggagcaccgggtgcagcaccacgacaaggaaatcagcagaagcaggattccccgcctgattctccggccccacatgcctcaacaacaacacaaagtgagccccgcatctgagtcaccattcagcgaagaggaatcccgagagtttaatcccagttccagcggccggagcgccagaacagtttccagtaattcgttctgttcagacgacactggctgcccatctagccaatctgtaagccctgtcaagacaccgtctgatgctggtaattccccaatagggttttgccccggctccgacgagggatttacgagaaagaagtgcacaattggaatggtgggagagggcagcatacaatctagtcggtacaaaaaagaaagcaagtctggccttgtgaaaccaggctctgaagcggacttcagttcctcttctagtactgggagcatctccgcccccgaggttcactag

SEQ ID NO: 207804 - DNA, 1989 bp, synthetic construct
  misc_feature 1..1989: note = Description of Artificial Sequence: Synthetic coding sequence
  source 1..1989: mol_type = other DNA
atgggccccctgcgggagagcaaggagcaccgggtgcagcaccacgataaagagatttcccgcagtagaataccacgcttaattttgcgacctcatatgccccagcagcagcacaaggtgagtccagcttctgagagcccatttagtgaagaggagtcacgcgagtttaatccgagctctagcggccggtccgccagaacagtgtctagcaacagcttctgctcagacgacaccggctgtcccagtagccaatctgtgagtcccgtgaaaaccccaagtgatgccggaaattcaccaattggattctgcccagggtccgacgaaggatttactagaaagaaatgtacgataggaatggtgggggaaggtagtattcagagttcccggtataagaaggaatccaagagcggcctggttaaaccaggctcagaggctgatttctcctctagttcctcaactggctccatctctgctcctgaagtgcacatgtccaccgccggatcgaaaaggtcctcctcctctcggaatagaggcccacacggccgtagcaacggggctagttcccataaaccaggtagtagtccttccagtccccgggagaaggatctgttgagcatgttatgcagaaaccaactctcccccgtcaacattcatccttcctatgctccctcttctccatcatcttcgaactcgggatcctacaaggggagcgattgctcccctataatgagaaggagtggaagatatatgagttgtggagaaaatcacggggtccgccccccaaacccagagcagtacctcacccccctccagcaaaaggaggtcactgtaaggcatttgaagactaagctgaaggagtcagaacggaggctgcacgaaagagaaagcgagattgtcgagctgaagagccagttggcaagaatgcgggaggattggatagaggaggaatgtcaccgcgtagaggcccagcttgccttaaaggaggctcgaaaagagatcaagcagcttaagcaggtcatcgaaacaatgcggtcatcattggctgataaagataagggtatccagaaatactttgtagacattaatattcaaaacaagaagctcgagtctttactccagtctatggaaatggcccacagcggtagcctgcgcgacgagctgtgtctggatttcccctgcgactcccccgagaagtcccttactctgaacccgcccctggatacgatggcggacgggctctccctagaagaacaggtgacaggggaaggagcagatcgtgaattgcttgtcggtgattcaattgccaactctacggacctcttcgacgagatagtaaccgcgactacaaccgagtcgggggatctggagctggtacacagcacccccggtgccaatgtcttggagctactgcccatcgtgatggggcaggaagagggttccgtagtggtcgaacgggctgttcagacagatgtcgttccctattcgccggctatcagtgaactgatccagtcagtgcttcagaaactgcaagacccttgcccctcctctcttgcaagccctgacgagtctgaaccggacagcatggagagttttcctgaaagcctgtctgcgttagtcgtcgatttgactccacgtaacccaaacagtgctattttactcagtcctgttgaaaccccgtacgcaaatgttgatgccgaggtgcacgccaacagactcatgagggagctggactttgcggcttgcgtcgaggagaggctcgatggcgtcatccctctcgctagaggaggggtagtccggcagtactggagttcatcttttctcgttgacttattagcagtcgctgcaccagtagtacccaccgtcttgtgggcctttagtacccagcgcggtggcaccgaccccgtctacaatattggcgcgttactgagaggctgctgcgttgttgccctgcactctctaagacggactgccttcaggatcaaaacttag

SEQ ID NO: 207805 - DNA, 315 bp, synthetic construct
  misc_feature 1..315: note = Description of Artificial Sequence: Synthetic coding sequence
  source 1..315: mol_type = other DNA
atgggccccctgcgggagagcaaggagcaccgggtgcagcaccacgacaaggaaattagtaggagtcgtatacctcgactgatcttacggccgcacatgcctcagcagcagcataaggtttccccggcctccgaaagccctttcagcgaggaagagtctagggagtttaatccatcttcctccgggcgaagtgcccgcacggtatctagcaatagtttctgcagcgatgacacaggctgcccttctagccagagcgtgagcccggtgaaaaccccctccgatgccggcaatagccccattggtttctgtccctag

SEQ ID NO: 207806 - DNA, 456 bp, synthetic construct
  misc_feature 1..456: note = Description of Artificial Sequence: Synthetic coding sequence
  source 1..456: mol_type = other DNA
atgggccccctgcgggagagcaagaaggagcaccgggtgcagcaccacgacaaagaaattagtcgcagtagaattccacggctaatcctgcgacctcatatgccccagcagcaacacaaggtctctcctgccagtgaatccccgtttagcgaagaggagtccagagagttcaacccttcttcgtctggacgctccgctcgaaccgtttctagcaactccttctgtagcgatgacaccggctgtcccagttcccagagcgtctctccagtgaagaccccctccgacgccggcaacagtcctatcggattttgtccaggcagcgatgaaggcttcacgcggaaaaagtgcaccatcggcatggtaggagaaggttcgattcagtcctctcgttataaaaaggagtccaagtcaggtctagtgaagcccggctccgaagcagatttctccagctcttag

SEQ ID NO: 207807 - DNA, 231 bp, synthetic construct
  misc_feature 1..231: note = Description of Artificial Sequence: Synthetic coding sequence
  source 1..231: mol_type = other DNA
atgggccccctgcgggagagcaagaaggagcaccgggtgcagcaccacgataaggagatatcccgatctaggatcccaaggctaatactgcgacctcatatgccacagcagcagcataaggtgtcccccgcctccgagtcgcctttttccgaggaggagtcacgggaattcaacccctctagttccgggcggtccgcccgaacggttagcagtaacagcttctgttcctag

SEQ ID NO: 207808 - DNA, 1617 bp, synthetic construct
  misc_feature 1..1617: note = Description of Artificial Sequence: Synthetic coding sequence
  source 1..1617: mol_type = other DNA
atgcccggcagcggccccagcgagcggatgacctggcccggccccgctctgtcggccggaccccccacccgccctctctcttccgcaccaggcatcccaccgataccacctctgactagaacccattctctgatggctatgtccctgcctggcagcaggaggacatcggcagggagcagaagaaggacgtcaccccccgtgtcagttagagacgcttacggcacctcatccctgtcctccagctccaatagtgggagctacaagggatctgattcctcgccaacccctcgccggtcaatgaagtacaccctctgctctgacaatcatggcataaaacctcccacaccagagcagtatttgacgccactccagcagaaggaagtgtgtatcaggcatttaaaggcccgcctgaaggacacccaggatcgactgcaagatagggataccgagattgacgatttaaagacgcagctgagcagaatgcaagaagactggattgaggaggagtgccatagagtggaggcgcagctagccctgaaggaggctcgaaaggagatcaagcaacttaagcaggtgattgacactgttaaaaataacctgattgataaggacaagggcctccagaaatactttgtcgacattaacatccaaaataaaaagctggagaccctgctgcactccatggaggttgcccagaacggaatggcgaaggaggatggaacaggggaatccgcaggaggctctcccgcacgcagccttacccgctccagcacatacacaaagctgagtgatccagccgtgtgtggtgaccgtcagcccggggacccaagctccggcagcgccgaggatggggcagattcagggttcgctgcagccgacgataccttaagcaggactgatgccctcgaagccagcagtctgttatccagcggagtggattgcggcaccgaggagaccagccttcatagctctttcggcctggggcccagattccccgcatcaaacacctatgaaaagctgttatgcggcatggaagcgggagtgcaggcatcctgtatgcaggagagggccatacagaccgactttgtgcagtatcagcccgatctggataccattctggagaaggtgacacaggctcaggtttgcggtaccgatcccgaaagtggggacaggtgcccggaattggatgcacacccgtccggtcctcgggaccctaactcagccgtagtggtcacagtgggggatgaattggaagctccagagcctattactagaggtccaacccctcagaggcctggtgctaaccccaaccctggccagagtgtctccgtggtatgtcctatggaagaggaggaggaagccgctgtggccgagaaggagcccaaatcatattggagccgacactacatcgtcgaccttttggccgtagttgtcccagccgtgccaactgtggcttggctgtgtagatcacaaagacggcagggccagccaatctacaacatctcatctcttctgcgcggctgttgtactgttgcacttcacagcatcagaaggattagttgccgatcactgtctcagccatccccaagcccggcaggtggaggctctcaactttag

SEQ ID NO: 207809 - DNA, 1485 bp, synthetic construct
  misc_feature 1..1485: note = Description of Artificial Sequence: Synthetic coding sequence
  source 1..1485: mol_type = other DNA
atggccatgagcctgcccggcagccggcggaccagcgccggcagccgcaggaggacatccccccctgtgagcgttcgagacgcctacggcacctcgtccctatcaagctctagtaactcaggatcctacaagggatctgactcttcacctacccccagaaggagcatgaagtacaccctgtgttctgacaaccatgggattaagccgccgacccctgaacagtacctcactccactccagcaaaaggaggtatgtatcagacatttaaaggctaggctgaaggatactcaggatagactccaagatcgcgatacagagattgacgaccttaaaacccagctgtcgcgtatgcaggaggactggatcgaggaggagtgccaccgggtcgaggcccagcttgcactgaaagaagcaaggaaggagatcaagcagctgaagcaggtgatcgatactgtgaagaataaccttattgataaggacaagggcctccagaagtatttcgtcgacatcaatatacaaaacaaaaaactcgaaaccctgcttcattcaatggaggtggctcagaacggcatggccaaagaggacggcaccggggagtctgctggaggctcacctgcccggtcccttactagatcttctacctacactaaactttccgacccggcagtctgcggagacaggcaacctggtgacccatctagcgggagcgcagaagacggcgctgattctggatttgcggccgcagacgatacactgtccaggaccgatgccctggaggcttcatcgttgctgagcagtggtgtagactgcggcaccgaggaaacatccctgcactcttctttcggcctgggcccgcgcttcccagcgtcaaacacctacgagaaactcctgtgtgggatggaagccggcgtgcaggcaagctgcatgcaggagagagccattcaaaccgacttcgtgcagtatcagcccgacctggatacaatcctcgagaaggtcacccaggcccaagtatgcggaactgatccagagtctggcgatcgatgtccggaactcgacgcccacccatcagggcccagggatcccaacagcgctgtagtggtgacagtaggcgatgaactggaggcccccgagcctatcacccgtgggcccacgccacagcgccccggtgctaatcctaacccgggccagtctgtctccgtcgtatgcccaatggaagaagaggaggaagccgccgtcgccgagaaagaaccaaaatcatattggagccgccattatatagtggatctgcttgccgttgtggtgcccgccgttcccaccgtggcatggctctgtcggtcacagaggcgccagggacagccgatatataacatttcaagcttgctcaggggctgctgtaccgtggccctacactccattcggagaatctcttgtcggtccctttcacagccgagtccctcaccagcaggcggcggctctcagctttag

SEQ ID NO: 207810 - DNA, 864 bp, synthetic construct
  misc_feature 1..864: note = Description of Artificial Sequence: Synthetic coding sequence
  source 1..864: mol_type = other DNA
atgaaggaccggctggccgagctgctggacctgagcaagcagtacgaccagcagttccctgacggggacgatgagttcgactcaccccacgaggatatcgtctttgagacagaccacatcctcgagtctctgtatcgcgacattcgggatatacaggatgagaaccagctcctggtggcagatgtcaagcgtcttgggaagcaaaacgctcgctttttgacctccatgcgacggctttcgagtattaagcgggataccaatagcatagcgaaagccatcaaagcacggggcgaagttatccactgcaagcttcgggccatgaaagagctgagcgaggcggccgaagctcagcacggcccccacagtgccgttgccaggatatcgagggcccagtataacgctcttacactgacctttcagagagccatgcatgactataatcaagcagaaatgaagcaaagggataattgtaagatccgcattcagagacagctcgagatcatgggaaaggaagtcagtggggaccaaatcgaggacatgtttgagcaaggtaagtgggacgttttctcagagaatctgttagcagacgtcaaaggggcccgggcggctttgaacgagatcgaatcacgtcaccgggaactactgcggctggagtccagaataagggacgtgcacgaacttttcttgcagatggcagtgcttgtagaaaaacaagctgacaccctcaacgtaattgaacttaacgtgcagaagaccgttgactacaccggacaggccaaggcacaggtccggaaagcagtgcaatacgaagagaaaaacccctgcaggacactatgttgtttctgctgtccatgcctcaagtag

SEQ ID NO: 207811 - DNA, 615 bp, synthetic construct
  misc_feature 1..615: note = Description of Artificial Sequence: Synthetic coding sequence
  source 1..615: mol_type = other DNA
atggccctggtgagcggcatcagcctggaccccgaggccgccatcggggtcactaagagaccacccccaaagtgggtggatggtgttgacgagatccaatatgatgtcggacggataaaacagaagatgaaagagctcgccagtcttcatgacaagcacctcaatcgcccaacgctggatgactcctctgaagaagaacatgcgatagagattacgacacaggagatcacccagctcttccaccggtgccagagagctgttcaagccctcccctcaagagctcgcgcttgcagcgagcaagaagggagactcctgggcaacgtggttgcaagcttggctcaagcactccaggagctgtctacttcgttccgtcacgcacagtctggctacctgaaacgtatgaagaacagggaagagcgaagccaacattttttcgatacttcagttccgttgatggatgatggcgatgataatacactctaccatcggggcttcaccgaggaccagctcgtgctggtggaacagaataccttgatggtcgaagaacgtgaacgggagatccgccaaatagtgcagtcaatcagtgatctgaacgagattttcagagacctgtag

SEQ ID NO: 207812 - DNA, 927 bp, synthetic construct
  misc_feature 1..927: note = Description of Artificial Sequence: Synthetic coding sequence
  source 1..927: mol_type = other DNA
atggccacccggcggctgaccgacgccttcctgctgctgcggaacaatagcatacagaacagacagctcctcgcagaacaagagctcgatgagttggctgatgacaggatggctctcgtaagcggaatttccctggatcccgaggctgccatcggcgtcactaagcgccctccgcctaagtgggtcgatggcgtagatgagatccagtatgatgtcggtcgaattaagcagaagatgaaggagctcgcatccctgcatgacaaacacctgaaccgcccaaccctagatgatagcagtgaggaggaacatgcaattgagatcactacccaagagattacccagctctttcaccgctgccaaagggcagtccaggcattaccgtcgcgggcacgcgcttgctcggaacaggagggcagattactcgggaacgtagtcgcctcactagctcaggccttacaggagctgtctacgagcttcaggcacgcccagagtggatacttgaaaagaatgaagaacagagaagagcgcagtcagcacttcttcgatacatcagtgccactcatggatgatggagacgataacaccctgtaccatcgaggatttaccgaagaccagctggtgctggttgagcagaatacgcttatggtggaggaaagagagagggagattcggcaaattgtacaaagtatatccgacttgaacgaaatctttagagatctcggtgcaatgatagtagaacagggcacagttctcgaccgcatcgactacaacgtggagcaatcgtgtatcaaaacagaggatggtctcaagcagttgcataaggcagagcagtatcagaagaagaatcggaaaatgttggtaatcctgatactgtttgtaattatcatcgtgcttatcgtcgtgctggtaggcgtcaagtcacgctag

SEQ ID NO: 207813 - DNA, 966 bp, synthetic construct
  misc_feature 1..966: note = Description of Artificial Sequence: Synthetic coding sequence
  source 1..966: mol_type = other DNA
atggccacccggcggctgaccgacgccttcctgctgctgcggaacaacagtatccagaacagacagctgttggccgaacaagtcagctctcacatcacctcttccccactgcattcccggagtatcgcagcattggccgacgacaggatggcactagtatccggaatctcacttgatcccgaggccgctataggtgtaacaaaaagaccacccccgaagtgggtggatggcgtcgacgagattcagtacgacgtgggaaggatcaaacagaagatgaaggaactggcatctctgcacgacaagcacttaaatcgaccaaccctggacgactcgtccgaggaggaacatgctattgaaatcactactcaggaaataacccagctattccaccggtgccaaagagcagttcaggctctaccctctagggctcgagcttgttctgaacaggaaggcaggttgctcggcaacgtcgtagcttcacttgcccaggcgctccaggagttaagcaccagtttccgacatgctcagtcaggttatctcaaaaggatgaaaaaccgagaagaacgttcgcagcactttttcgacaccagtgtgcccctgatggacgacggggatgacaataccctgtaccatcgaggattcactgaggaccagttggtactggtcgagcagaacaccctcatggtcgaagaacgcgagcgggaaataagacaaatagtacagtcgattagtgacctaaacgagattttcagggacctcggtgcaatgattgttgagcagggaaccgtcctcgacaggatcgattacaatgtggagcagagttgcattaagaccgaagatggccttaaacaactgcacaaagccgaacagtatcagaaaaaaaacagaaaaatgctggtaatccttattttgttcgttattattatcgtgctcattgtggtgctcgtcggcgtgaaaagtcggtag

SEQ ID NO: 207814 - DNA, 756 bp, synthetic construct
  misc_feature 1..756: note = Description of Artificial Sequence: Synthetic coding sequence
  source 1..756: mol_type = other DNA
atggccctggtgagcggcatcagcctggaccccgaggccgccatcggtgtgacaaaacgacctcctcccaagtgggtggatggcgtggatgaaatccagtatgatgtggggcggatcaaacagaaaatgaaagagctggctagcctccatgataagcacttgaacaggcctacgctggacgactccagcgaggaagaacatgcaatcgaaatcacgacccaggagatcacacagctgtttcacaggtgccagcgggccgtgcaggctctgccttccagagcaagagcatgtagcgagcaggagggacgtctgttagggaacgtggtggcttctttggcccaagcgttgcaggaactaagcactagcttccgccatgcccagtcgggatacctgaagcggatgaaaaacagagaggaacgcagtcagcatttcttcgatacttccgtccctctcatggacgatggggacgataacacattgtatcacaggggatttaccgaggaccagctggttctcgtcgaacaaaacactctgatggttgaagaacgggaaagagagatcaggcagattgtccagagcatctccgaccttaacgaaatttttcgcgatttaggagccatgattgtggaacaggggaccgttctggaccgcatcgattataacgttgagcaatcctgtatcaagaccgaagacgggttgaagcaactccataaagcggaacagtaccagaagaaaaatcgcaagatgctggtttag

SEQ ID NO: 207815 - DNA, 927 bp, synthetic construct
  misc_feature 1..927: note = Description of Artificial Sequence: Synthetic coding sequence
  source 1..927: mol_type = other DNA
atggccacccggcggctgaccgacgccttcctgctgctgcggaacaactctattcaaaaccggcagttactggcagaacagcaattgtcaaagctggctgacgataggatggccctggtttctggcatcagtctggaccctgaagccgccatcggagttactaagaggcccccacctaagtgggttgacggcgtcgacgagatacagtacgacgtaggccgcattaaacagaaaatgaaggaactggcctccctgcacgataagcacctaaacaggccaacattggacgacagctcagaagaagagcacgccatagagattaccactcaggagatcactcagttatttcaccgctgtcagagagcagttcaggcactcccaagccgagccagggcctgttccgagcaggaggggcgccttctgggcaatgtggttgcctcgttggctcaggcactgcaggaactgagtacgagcttccgccacgcccagagcgggtaccttaagagaatgaagaaccgggaagagcggtctcagcatttctttgacacatctgtcccacttatggacgacggggacgacaataccctctaccataggggctttacggaagaccagttggttctggtggaacagaatactcttatggttgaagagagagagagggaaattagacagattgttcagtccattagtgacctcaacgagatttttcgcgacttaggtgcaatgatagtcgagcagggcactgttctcgatcgtatcgactacaatgtagagcagtcctgcattaagacagaagacggcctgaagcagctgcacaaagccgaacagtatcagaagaaaaatcgaaagatgcttgtcattttgatactattcgtaatcatcattgtcttgatcgtggtccttgtgggtgtcaaatcccgttag

SEQ ID NO: 207816 - DNA, 978 bp, synthetic construct
  misc_feature 1..978: note = Description of Artificial Sequence: Synthetic coding sequence
  source 1..978: mol_type = other DNA
atggccacccggcggctgaccgacgccttcctgctgctgcggaacaactctatccaaaatcggcagctattagcagaacaggtgagctcgcacatcacttcctccccacttcactctagatccatcgcagcagctctggacgaactggcagacgatcggatggcgctcgtgtctggcataagcttggaccccgaagccgctattggggtgacaaagcggccgccaccaaagtgggtcgacggggtggacgagatacagtatgacgttgggcgtattaaacagaaaatgaaggagttagccagcctgcacgataaacacctgaatagaccaaccctggatgatagcagcgaggaggaacatgctatagagattacaacacaggagattacacagctgttccacagatgccagcgcgccgttcaggctcttccgagtcgtgcccgagcctgctcagaacaggagggaaggcttctgggaaacgtagtggctagcttggcacaagcgttgcaggagcttagcacgtctttccgccatgctcagtccggctacctgaagcgaatgaagaatagggaggagagaagtcagcatttctttgatacaagcgttcctctcatggatgacggcgacgataatacgctgtaccaccgaggatttaccgaagatcagctcgtgctggtcgaacaaaacactctcatggtcgaagaaagggaacgcgagattcggcagattgtccagtctattagtgacctcaacgagattttcagggacctcggagccatgatcgtggagcaggggacagtgctggatcgcatagactacaacgtggaacagtcatgtatcaagacggaagacgggctgaaacagttgcacaaggctgagcagtaccaaaagaagaacagaaaaatgctcgtaattctcattctgttcgtcattattatagtcttgattgttgtgctggtgggggtgaaaagcagatag

SEQ ID NO: 207817 - DNA, 915 bp, synthetic construct
  misc_feature 1..915: note = Description of Artificial Sequence: Synthetic coding sequence
  source 1..915: mol_type = other DNA
atggccacccggcggctgaccgacgccttcctgctgctgcggaacaattccattcagaatagacagctgctggctgagcagctggccgatgacaggatggcattggtgtctggcatcagcctcgatccagaggcagccattggagtcactaaacgcccccctcccaagtgggtggacggagtggatgagattcagtatgatgtgggaagaattaagcagaaaatgaaggaattagcaagcctccatgacaagcatctgaaccggccaaccttggatgattcctcggaagaggaacatgctatagagatcactacgcaggaaataacgcagctgttccaccgatgtcagcgggctgttcaggcgctaccgagccgtgctcgggcatgcagtgagcaggagggacgccttttaggtaatgttgtagccagtctcgctcaggcactgcaggaactcagtacaagcttccggcacgcacaaagcgggtaccttaagagaatgaaaaaccgggaagagcgtagccagcacttctttgacacaagcgttcctctgatggatgatggagacgacaatactctctatcatcgagggttcaccgaggaccaacttgtgcttgtggagcagaatacattgatggtcgaggaacgtgaacgcgagattcgacaaattgtccagtctatttctgacctaaatgaaatctttcgcgaccttggagccatgatagtggaacaaggcaccgtgctggaccggatcgattataacgtggagcagtcctgcattaagaccgaggacgggctgaaacagctccacaaggcagagcagtaccagaagaaaaataggaaaatgctggtcatccttatccttttcgtgattatcattgtcctgattgtcgtgctcgtgggagtaaagtcaaggtag

SEQ ID NO: 207818 - DNA, 819 bp, synthetic construct
  misc_feature 1..819: note = Description of Artificial Sequence: Synthetic coding sequence
  source 1..819: mol_type = other DNA
atggccctggtgagcggcatcagcctggaccccgaggccgccatcggagtcactaagaggcccccgccgaagtgggttgacggcgtggatgagatccaatacgatgtaggcaggattaaacagaagatgaaagagctcgcctccctgcacgacaaacacctaaatcggccgacactcgacgactcctcggaggaggaacatgcaattgaaatcacgactcaggagatcacacagttgtttcatcgctgtcagcgggccgtgcaggcattgccatcaagagcccgcgcctgctccgaacaggagggccgcttgttggggaacgtggtcgcgagcctggcgcaagccctgcaggagctctctaccagttttaggcacgcacagtctggctatctgaagcggatgaagaatcgcgaagaaagatctcagcatttttttgacactagcgtgcccctcatggacgacggagacgacaataccctgtatcaccgcggctttaccgaggatcagcttgttctggttgaacaaaatacattgatggtcgaagagcgcgagcgcgagataagacaaattgttcagtccatctccgacctcaacgagatcttccgggacttaggcgcaatgattgtggaacagggaacagtgctcgatcgaatcgattacaacgtagagcagtcgtgcattaaaacagaagatggtcttaagcagctccacaaggccgagcagtatcagaagaagaatcgcaagatgctggtaattctcattctgtttgtcattatcatcgtgttaatcgtggttctggtcggggtgaaatctaggtag

SEQ ID NO: 207819 - DNA, 978 bp, synthetic construct
  misc_feature 1..978: note = Description of Artificial Sequence: Synthetic coding sequence
  source 1..978: mol_type = other DNA
atggccacccggcggctgaccgacgccttcctgctgctgcggaacaatagcatccagaataggcagctcctggcagaacaagtatcaagtcacatcacaagcagccccctgcatagtcggtcaattgctgctgagctcgacgagctcgccgacgatagaatggccctagtctccggtatctcactggaccctgaagcagccatcggggtcactaagaggcctcctcccaaatgggtggatggcgtggatgaaatccagtacgatgtcggaagaattaaacaaaagatgaaggaacttgcctcattgcacgataagcacttaaaccgccccacactagatgattccagcgaggaagagcacgccattgaaatcactacacaggagattacacagctctttcaccgctgccaacgggcagtgcaggccctgccctctcgcgcccgggcgtgctcagagcaggagggccgtttactcggcaatgtggtggcttcacttgcacaggccttacaggagctatctacatcctttagacacgcgcagtccggctacttgaagaggatgaaaaacagggaggagaggtcacagcactttttcgatacgagcgttcccctgatggacgacggggacgacaatacgctttaccatcgcgggtttacagaagatcagctggtgttagtggaacaaaacacgttgatggtggaggagcgggaacgtgagatcaggcagatcgttcaaagtatttctgacttgaacgaaatttttcgggatctcggggctatgatcgttgagcagggaaccgtactagatcggattgactataacgtggaacagtcgtgtattaaaactgaagatggactcaagcagttgcacaaagctgagcagtatcagaagaaaaaccgaaaaatgctcgttattctcattttgtttgtcatcatcatcgtgctgattgtcgtactggtgggagtgaagtcgcggtag

SEQ ID NO: 207820 - DNA, 366 bp, synthetic construct
  misc_feature 1..366: note = Description of Artificial Sequence: Synthetic coding sequence
  source 1..366: mol_type = other DNA
atggccctggtgagcggcatcagcctggaccccgaggccgccatcggtgttacgaagaggccgccaccaaagtgggtggacggcgtggatgagatccagtacgatgtaggcagaataaagcagaagatgaaagagttggcgagtttacacgataaacacctcaatcgacctaccctagacgatagttctgaggaggagcacgcgatcgagatcaccacccaggaaatcacccagctgtttcatcgctgccagcgcgcagttcaggcactgcctagcagagctcgggcttgcagtgagcaggaagggcgactactgggaaatgtggtggcctcacttgcacaggctcttcaggaactctcgacctag

SEQ ID NO: 207821 - DNA, 420 bp, synthetic construct
  misc_feature 1..420: note = Description of Artificial Sequence: Synthetic coding sequence
  source 1..420: mol_type = other DNA
atgaagaaccgggaggagcggagccagcacttcttcgacaccagcgtgccgctgatggacgatggtgatgacaataccttataccaccgcggtttcacagaggaccagctggtgctggtcgagcagaacaccctgatggtggaggaacgggaaagggagatcaggcaaatcgtgcaatcaatttctgacctgaacgaaatctttcgcgatctgggagctatgatcgttgagcagggcactgtgctagacagaatagactataatgtggaacagagttgtatcaagaccgaggacgggctcaagcagctgcacaaagctgagcagtaccagaaaaaaaaccgaaaaatgcttgttatcctgattctctttgtgattattatagtgctgattgtggtgctagtcggagttaaatctcgctag

SEQ ID NO: 207822 - DNA, 660 bp, synthetic construct
  misc_feature 1..660: note = Description of Artificial Sequence: Synthetic coding sequence
  source 1..660: mol_type = other DNA
ggcatcagcctggaccccgaggccgccatcggcgtgaccaagcggccacctcccaagtgggtcgatggggttgacgagatccaatatgacgtgggcagaattaagcaaaagatgaaggagctggcctcactgcacgacaaacaccttaatcgacccacactggatgattcttccgaggaagagcacgccatcgaaataacaacacaggagattactcagttattccaccgctgccagagggcggtgcaggcgcttccaagtcgcgctcgcgcgtgctcggagcaggagggaaggttgctaggcaacgtcgtggccagcttggcacaggccctccaggaactctccacttctttccgacatgctcagagcggatatctaaaacgcatgaaaaaccgcgaagagagatctcagcacttcttcgatacctcagtgccgctgatggatgacggcgatgacaacacactttatcaccggggtactgtgctggaccgcatagactacaatgttgagcagtcctgcattaaaactgaagacgggctaaagcagctccacaaggctgaacaataccagaaaaagaaccgaaagatgctggtgatcctaatcctgtttgtaataattattgtgttgatcgtggtactggttggggtgaagtcaaggtag

SEQ ID NO: 207823 - DNA, 369 bp, synthetic construct
  misc_feature 1..369: note = Description of Artificial Sequence: Synthetic coding sequence
  source 1..369: mol_type = other DNA
atggccctggtgagcggcatcagcctggaccccgaggccgccatcggcgtcacaaagcgccctcctcctaagtgggtggatggggtggacgagatacagtacgatgtgggacggattaaacagaaaatgaaagagcttgcctcattacacgacaaacatctgaataggccgaccctggacgattctagtgaggaggaacatgcaatagaaattacgactcaggagattactcaactgttccaccggtgtcagcgtgctgtgcaggcactccccagcagagcccgagcctgctcggagcaggaggggaggctcctcggcaacgtcgtggcctcgcttgctcaggcactacaagaattgagcacttcttag

SEQ ID NO: 207824 - DNA, 609 bp, synthetic construct
  misc_feature 1..609: note = Description of Artificial Sequence: Synthetic coding sequence
  source 1..609: mol_type = other DNA
atggccacccggcggctgaccgacgccttcctgctgctgcggaacaactccatccagaatagacagctcctggcggagcaggagctggacgaattagctgatgaccgtatggctcttgtaagcggcatttccttagaccctgaggccgccatcggcgtcaccaagaggccaccacctaagtgggtggacggagtggatgagatccagtacgacgtggggcgtattaaacagaagatgaaggaactggccagcctgcatgacaaacacctaaacaggccaaccctcgacgactctagcgaagaagaacacgctatagaaatcactacccaggagatcacccagctcttccacagatgccagcgcgctgtgcaagcattgccgtccagggcacgggcatgtagtgagcaagagggcaggcttctgggaaacgtggtggcatctctggcccaggcactgcaggagctttcaacttcttttcggcatgcacaatccggttaccttaagagaatgaagaacagggaagagaggtcacagcatttcttcgatacctctgttcctctgatggacgacggcgatgataataccctttaccaccgccgcacctcctag

SEQ ID NO: 207825 - DNA, 909 bp, synthetic construct
  misc_feature 1..909: note = Description of Artificial Sequence: Synthetic coding sequence
  source 1..909: mol_type = other DNA
atgagcgaggacgaggagaaggtgaagctgcggcggctggagcccgccatccagaagttcatcaagattgtgattccaaccgatctcgaaagacttcggaaacatcagattaatatcgagaagtatcagagatgtcggatctgggacaaactgcacgaagaacacattaatgccggtcgcacggtccagcagctgcgcagtaatattagagagattgagaagctgtgtctgaaggtccggaaagacgatctggtgttactgaaacggatgatcgacccagttaaggaggaggctagtgctgcaaccgcagaattcttgcaactgcaccttgagtcggttgaggagcttaaaaaacaatttaatgatgaggagacattgctgcagccccctctgacacgcagtatgactgtcggaggggcgttccatactacggaggccgaggcatcatcacagtctctcactcagatttatgcactgccagagatccctcaggatcaaaatgccgcagagtcttgggaaaccctcgaggccgatctgattgagctatcacagctggtgaccgatttttccttgctggtgaactcccagcaggagaagatcgatagtattgcagaccatgtcaatagcgccgctgtgaatgtcgaagaaggtaccaagaatctgggcaaagcggctaaatacaaattagccgcgctacccgtagcaggcgcgttaattggcggtatggtggggggccccatcgggctcctcgccggcttcaaggtggccggaatcgcagccgccttaggcggaggagtgcttgggtttactggtgggaaactcatacagcgcaagaagcaaaagatgatggagaagcttacaagcagttgtccagacctcccctctcagacagacaagaaatgttcttag

SEQ ID NO: 207826 - DNA, 909 bp, synthetic construct
  misc_feature 1..909: note = Description of Artificial Sequence: Synthetic coding sequence
  source 1..909: mol_type = other DNA
atgagcgaggacgaggagaaggtgaagctgcggcggctggagcccgctatccagaaatttatcaaaattgtcattcctaccgatcttgagagactgcgcaagcaccagataaatattgaaaagtaccaacgatgtagaatctgggataaactgcacgaggagcacataaacgccggccgcactgtgcagcaattgcgtagcaatatccgagagatcgagaaactctgtctgaaggtgagaaaagatgacttggtgttgctgaaacgcatgatcgaccctgtgaaggaggaagcttccgctgctaccgccgaatttctgcagctgcatcttgagagtgttgaagagctcaaaaagcaatttaacgacgaagaaacactgttacagccccccctgacccgctccatgacggtgggcggcgctttccatacaaccgaggcggaagccagctcccagagcttgacccagatctatgcgctgcccgaaatacctcaagaccaaaatgcagccgagagttgggagactctcgaggccgatctgatcgagctgtctcagttggtaaccgattttagcctcctcgtcaatagccaacaggagaaaatcgactcaatcgccgaccacgtgaacagtgcagctgtcaatgtcgaggaaggcacaaaaaacctcgggaaggcggctaagtacaagctagcagccttgcccgtagctggagctctaatagggggaatggtaggcgggcctattgggttactggctggtttcaaggtggccggcattgcagctgccctgggagggggggtgttgggttttaccggggggaaactgatacaaaggaaaaaacaaaagatgatggagaaactgacctcaagctgtccagacctgcctagtcagaccgataaaaaatgctcatag

SEQ ID NO: 207827 - DNA, 126 bp, synthetic construct
  misc_feature 1..126: note = Description of Artificial Sequence: Synthetic coding sequence
  source 1..126: mol_type = other DNA
atgagcgaggacgaggagaaggtgaagctgcggcggctggagcccgccattcagaaattcatcaagatcgtcatcccaaccgaccttgagaggctgagaaagcaccagatcaacatcgagaagtag

SEQ ID NO: 207828 - DNA, 126 bp, synthetic construct
  misc_feature 1..126: note = Description of Artificial Sequence: Synthetic coding sequence
  source 1..126: mol_type = other DNA
atgagcgaggacgaggagaaggtgaagctgcggcggctggagcccgcaatccagaagttcattaagatagtgattcctaccgacttggagagactcaggaagcaccaaattaacattgaaaagtag

SEQ ID NO: 207829 - DNA, 909 bp, synthetic construct
  misc_feature 1..909: note = Description of Artificial Sequence: Synthetic coding sequence
  source 1..909: mol_type = other DNA
atgagcgaggacgaggagaaggtgaagctgcggcggctggagcccgcaatccagaaattcatcaaaatcgtgatacccacagacttggaacggctgcgcaagcatcaaatcaatattgagaagtatcagcgttgccgcatctgggataagctgcacgaggagcatatcaatgccggacgcaccgtgcagcagttgagaagcaatatccgcgaaatcgaaaagctgtgtttaaaagtgcggaaggatgatttggtattgctgaaaagaatgattgacccagtcaaggaggaggcctccgcggcaactgccgagtttctccagctgcacctggagagtgtggaggaactgaagaagcagttcaacgacgaggagaccttgttacagccccctctcaccaggtcaatgacagtgggcggagcattccacacaactgaagcagaagcaagttcccagtctctgactcagatttatgccttacctgagatcccacaggatcagaatgcggcagaaagttgggaaacactcgaggcagatctcattgagctgagtcagttagtgacagacttttctctcctggtgaacagccaacaggagaagatcgatagcatagcggaccacgtgaatagtgctgctgtgaatgtggaagagggcactaagaacctcggaaaggctgctaaatacaagttagcagctctgcccgtggcaggtgcactaataggaggaatggttggggggccgattgggttgctggctggctttaaagtcgcaggtattgccgccgctctgggaggcggggtgctggggttcaccgggggcaaactgatccagcgcaaaaagcaaaagatgatggagaaactaacatcttcttgcccggacttaccttcccagacagacaagaaatgcagctag

SEQ ID NO: 207830 - DNA, 636 bp, synthetic construct
  misc_feature 1..636: note = Description of Artificial Sequence: Synthetic coding sequence
  source 1..636: mol_type = other DNA
atgcggctgttcctgtggaacgccgtgctgaccctgttcgtgaccagtctcataggtgccctcatcccagaacctgaagtgaagatagaagtgctccagaagccttttatctgccatcgtaaaactaaggggggagacctgatgttggtgcactacgagggttaccttgaaaaagatggtagtcttttccactcgacccataaacacaacaatggtcagcccatctggtttactttgggtatcctagaggcccttaaaggctgggaccagggactgaaaggcatgtgcgtgggcgagaagcgtaaattaattattcctcccgccctaggttacggaaaagagggaaagggaaaaattccacccgaaagcactctcatattcaacatcgatctgctggaaattcgcaacggtcctcggtcccacgagtccttccaagaaatggatctgaatgatgactggaagctgtccaaagacgaagtcaaggcttatctcaaaaaagagtttgagaaacacggagcggtggttaatgagagtcaccacgatgctctcgtggaagacatttttgacaaggaggacgaggataaggatggcttcatcagtgcacgcgagtttacatacaagcacgatgagctgtag

SEQ ID NO: 207831 - DNA, 783 bp, synthetic construct
  misc_feature 1..783: note = Description of Artificial Sequence: Synthetic coding sequence
  source 1..783: mol_type = other DNA
atgaaggaccggacccaggagctgcggaccgccaaggacagcgacgatgacgatgatgtagctgtgacagtggacagggatcggtttatggacgagttctttgagcaagtggaggagatacggggcttcatcgataagattgcagagaatgtagaagaagtgaaaaggaagcattcagccattctggctagccccaaccctgacgaaaagacaaaagaggaactggaggagttgatgagcgacattaaaaagactgcaaataaagtaagatcaaaacttaagagtatcgagcagagtatcgaacaggaagaaggactgaatagatcaagcgctgacttgcggatcagaaagacccagcatagcactctttcaaggaagttcgttgaagtgatgtcagaatacaacgccacccagtcagactatagggagcgctgtaaaggcagaattcagcgccagctggagatcacagggcggaccacaacatcagaggagctagaagacatgcttgaatccggcaatcccgccatctttgcttccggtatcataatggacagttccatttccaagcaggcactgagcgaaatcgagacacgtcattccgaaattataaagctggaaaactccatccgggaactccacgacatgttcatggatatggccatgttggtagagtctcagcctcaaggagcattcctaaagtcttgcccagagcctcagcctaatccagaggagggggctctatggagttctggcgccccagggcctgctggacgggatgattag

SEQ ID NO: 207832 - DNA, 516 bp, synthetic construct
  misc_feature 1..516: note = Description of Artificial Sequence: Synthetic coding sequence
  source 1..516: mol_type = other DNA
atgaaggaccggacccaggagctgcggaccgccaaggacagcgacgatgacgatgatgtcgctgtgactgtcgatcgggaccgtttcatggatgaatttttcgagcaggtcgaggtgatgtccgagtataacgcgacacagagtgactaccgcgaacgctgtaaaggacggattcagcggcagttggagataacggggcgtaccaccacatccgaagagctcgaggatatgctcgaatccggcaatccagccatatttgcatctggaatcattatggacagctctatcagcaagcaggccctgtcagagattgaaacgagacactccgagataattaaactggaaattgaatataacgtggagcatgctgtagactacgttgaacgagccgtctccgatactaagaaggctgtgaaatatcagagcaaagcccgccgaaaaaagataatgattatcatttgctgtgttatactggggatcgtcatcgccagtaccgtaggaggtatctttgcatag

SEQ ID NO: 207833 - DNA, 756 bp, synthetic construct
  misc_feature 1..756: note = Description of Artificial Sequence: Synthetic coding sequence
  source 1..756: mol_type = other DNA
atgaaggaccggacccaggagctgcggaccgccaaggacagcgacgacgatgacgacgttgcagtcaccgtggacagggatcgctttatggacgaattcttcgagcaggtcgaggaaattaggggttttatagacaagatcgctgagaacgttgaagaggtgaaacggaaacatagcgcaatacttgcatcgcccaatcccgatgagaagacgaaagaggaattggaagagctcatgagcgatatcaagaagacagctaacaaagtacggagtaagctgaagtccattgagcagtctatcgagcaagaagaagggctaaatcggagcagcgcagatttgaggattcggaaaacccaacatagcaccctgtctcgaaagttcgtcgaggtgatgtcagagtacaatgctacacagagtgattacagagaaaggtgcaagggccgaatccaaagacagttggagatcaccggccgcactacaactagtgaggagcttgaggatatgctggagtctggcaatccagctatttttgcgagtggcatcattatggacagctccatctccaaacaagcactctctgaaatagaaactcgacacagcgagataatcaaacttgaaaattctattagggagctgcacgacatgtttatggacatggcaatgttggtggagagccagaccatgtggcgaggcccttgccttactccacgtagaccctcttctacccgtgctaggcgggctgggcggaaatcctag

SEQ ID NO: 207834 - DNA, 1053 bp, synthetic construct
  misc_feature 1..1053: note = Description of Artificial Sequence: Synthetic coding sequence
  source 1..1053: mol_type = other DNA
atgttcatcaagggccgggccccccgggcccccccccgggagcggcgccgcgctacccgtggtggtctcaggcaggtggtggccccgcccagagcacttggaagcactagccgcccccacttccgacgggcatcagtttgtcgcaggcgctgtcgaaagtcaggggggctgttggccgccagccggaagatggctgcagctgctgtgaatggggcagctggattttcatcttctgggccggccgcaacgtcaggcgccgtgctgcaagccgccactggcatgtacgaacagctgaaaggtgaatggaatcgaaaatcccctaacttaagtaagtgcggcgaagaactcggccgcttgaaactagttttacttgaattgaactttcttcccaccactggaacaaaattgactaaacagcagctcattctggctcgagatattctggagatcggagcccagtggagcatacttaggaaggatattccatcctttgagcgctatatggcccagctgaaatgctactattttgactataaggagcaattgcccgagagtgcttacatgcatcagctgctggggctgaacctcttattcctcctgagccagaatcgtgtggccgagtttcataccgaattggagagacttcctgccaaagacatccagacaaatgtatacattaaacaccctgtatccttagagcagtacctgatggagggctcttacaacaaggttttcctggctaagggaaatattcctgccgagagttacacgttcttcattgatattttgttagacacaattcgggacgaaattgcaggctgcatcgagaaagcctatgagaagatcctttttactgaggccactcggatcctattcttcaatacccccaagaaaatgacagattacgcaaagaagcggggctgggtgctagggcctaacaattactactcttttgcatctcaacagcagaaaccagaggataccaccataccatcaacagagctcgccaaacaagtgatcgaatacgccagacagctagaaatgatagtgtag

SEQ ID NO: 207835 - DNA, 864 bp, synthetic construct
  misc_feature 1..864: note = Description of Artificial Sequence: Synthetic coding sequence
  source 1..864: mol_type = other DNA
atgcgggaccggctgcccgacctgaccgcctgccggaagaacgacgacggagatacagtcgtggtggtggagaaggatcacttcatggatgacttctttcatcaggtggaggagattagaaatagtattgataagatcacccagtacgtagaagaggttaagaaaaatcattccatcatcctgagcgcacccaacccagaaggcaaaatcaaagaagagctcgaagacctgaataaagagatcaagaagactgcaaacaaaataagagccaagttgaaggctattgagcaatcatttgatcaagacgaatcagggaaccgtacctccgtcgatctgcgtatacgtaggacccaacactccgtcctgtcccggaaatttgtagaggcaatggccgaatataatgaggcgcagactttattccgcgaacgatccaaaggcagaatccagcggcaattagaaataactgggcgcactaccaccgatgacgaattggaggagatgcttgaatctggtaaaccgtccatctttaccagcgatattatttctgacagtcagattacacgtcaggcactcaacgagatcgagagtaggcacaaggacattatgaaactagaaaccagcatccgtgagcttcatgaaatgtttatggacatggccatgttcgtagagacgcagggagaaatgataaacaacatcgaacgcaacgtgatgaacgcaacagactatgttgaacacgccaaggaagagacaaaaaaagctattaagtaccaatccaaggccagacgcaagctgatgtttatcatcatttgtgtcatagtgctgctggtcattttgggcatcatcctggccactacactgtcttag

SEQ ID NO: 207836 - DNA, 867 bp, synthetic construct
  misc_feature 1..867: note = Description of Artificial Sequence: Synthetic coding sequence
  source 1..867: mol_type = other DNA
atgcgggaccggctgcccgacctgaccgcctgccggaagaacgacgacggagacaccgtcgtcgtcgtcgaaaaggaccacttcatggatgacttttttcaccaggtggaggaaatacgcaatagtatcgataaaatcactcagtacgtggaggaagtgaagaagaatcacagcataatactctctgctcctaatcctgagggaaaaatcaaggaagagctggaagacctgaacaaagaaatcaagaaaacagcgaataaaatccgtgcaaagctgaaagctatcgagcagagcttcgaccaggacgagtccggaaatcgtacatcggttgatctccgaatcagacggactcaacactcggttctgtctcgtaaatttgtcgaagccatggccgaatacaacgaggctcaaacactgtttcgggagagaagcaagggtagaattcaaaggcagctcgaaatcacaggaagaacaaccaccgatgacgagcttgaagagatgctggagagtggaaaaccctctatttttacttctgatatcatctctgatagtcagatcactcgccaggcccttaacgaaatcgaatctcgccacaaagatattatgaagctggaaaccagtatccgggaacttcatgagatgtttatggacatggcaatgtttgtcgaaacccaaggagagatgatcaataatatcgagaggaacgttatgaatgcgacagattacgtggaacatgcaaaagaggagaccaagaaggccatcaagtaccaaagcaaggctcgtagaaagaagtggatcatcatcgccgtgtctgtggtgctggttgccattatagcgctcatcataggactgtcggttgggaaatag

SEQ ID NO: 207837 - DNA, 777 bp, synthetic construct
  misc_feature 1..777: note = Description of Artificial Sequence: Synthetic coding sequence
  source 1..777: mol_type = other DNA
atggacgagttcttcagcgagatcgaggagacccggctgaacatcgataaaatttcagagcatgtagaagaggccaaaaagctctattcaattatactgtcggctcctattcccgaacccaagactaaggacgatctggagcagctgactactgaaatcaagaaacgggctaacaatgtacgaaacaaacttaaaagcatggaaaaacatattgaagaagatgaggtgagatcaagcgctgatctcaggatccgcaagtcccaacactcggtactctcgcgtaaattcgtggaggtgatgaccaagtacaacgaggcccaagtggattttcgggagagaagtaaagggaggattcagagacaacttgaaattaccggcaagaagacgactgatgaggagctggaggagatgcttgagagcgggaatcccgccattttcaccagcgggattattgattcacagatctcaaaacaggctctttctgaaattgagggcaggcacaaggacatcgtgaggctcgagtcttccattaaagagcttcacgatatgtttatggatatcgctatgttggtggagaaccagggagaaatgttggacaatatcgaactgaacgtcatgcacactgtggatcacgtcgagaaggccagagatgagactaaaaaggcggtgaagtaccagtcacaagcaagaaagaagctgatcattatcattgtgctcgttgtggtactcttgggcatcctcgctttgataatcggtctcagtgttggcctgaattag

SEQ ID NO: 207838 - DNA, 870 bp, synthetic construct
  misc_feature 1..870: note = Description of Artificial Sequence: Synthetic coding sequence
  source 1..870: mol_type = other DNA
atgaaggaccggctggagcagctgaaggccaagcagctgacccaggatgacgatacagacgcggtggaaatcgcaattgacaatacagcttttatggacgagttcttctcggagattgaagaaacacgattaaacatagataagatatctgagcacgtggaagaagctaagaagttatactccatcatcctgagtgcaccgatacctgagcccaagacaaaagacgaccttgagcagctgactaccgagattaaaaagcgagcgaataacgtacgcaataagctgaagtccatggaaaagcatattgaagaagacgaagtccggtcctcggcagacctgaggatcaggaaatctcagcactcagtcctgagtaggaagttcgtcgaagtcatgaccaaatataacgaggctcaggtggatttcagggagaggtcaaaaggtagaatccagaggcagctggaaattacagggaagaagaccaccgatgaagaacttgaagagatgttagagtccgggaatccagccatttttacctctggtattatcgacagccagattagtaagcaagccttgtccgagatcgagggtcggcataaggatattgtgcgccttgagagcagtataaaggaactgcacgatatgttcatggacatcgctatgctcgtggagaaccagggtgaaatgcttgacaacattgagctgaatgtgatgcacactgtcgaccacgtcgaaaaggctcgcgatgaaacgaaaaaagcagttaagtaccagagccaagctagaaagaaacttataataatcattgtgctggtggtggtgttgcttgggattcttgcactgattataggcctgtctgtgggcctcaattag

SEQ ID NO: 207839 - DNA, 543 bp, synthetic construct
  misc_feature 1..543: note = Description of Artificial Sequence: Synthetic coding sequence
  source 1..543: mol_type = other DNA
atggagaagcacatcgaggaggacgaggtgcggagcagcgccgaccttaggattcgtaagagccagcacagtgttctgagcagaaagtttgtcgaggtcatgacgaagtacaacgaggcccaggttgactttagagaaagaagcaagggacgcattcaaagacaattggaaatcaccggtaagaagactacagacgaggagctcgaggagatgctggaaagcgggaaccccgccatctttacctccgggataattgacagccaaatcagtaagcaagctcttagcgaaattgaggggagacacaaagatattgtgaggttagaaagcagcattaaagagctgcacgacatgttcatggacattgccatgttggtcgagaaccagggatccatgattgaccggatcgaaaacaatatggaccagtctgtgggcttcgtggagcgggccgttgcagacactaaaaaggccgttaagtaccagtccgaagcacgacggaaactgatcagtctacagacaggggtggccacgctcgtatttcggtag

SEQ ID NO: 207840 - DNA, 834 bp, synthetic construct
  misc_feature 1..834: note = Description of Artificial Sequence: Synthetic coding sequence
  source 1..834: mol_type = other DNA
atgaaggaccggctggagcagctgaaggccaagcagctgacccaggatgacgataccgacgctgtcgagatagctatcgataatacagcattcatggatgagttcttctctgaaatcgaggagactcggctgaatatcgataagatctccgaacacgttgaagaagctaagaaattgtattccattatcctgtcagcccccatccccgagcctaagacgaaggatgacctagaacagttgacaactgaaattaagaagagagcgaacaatgtgagaaataaactcaagtcaatggaaaagcatattgaagaggacgaagtgaggtcatcagcagatttgcgcatccgcaaatcacagcacagtgtgctgagtagaaaatttgtggaggtgatgaccaagtacaatgaggcccaggtggacttccgggaaaggtctaaaggcaggattcagcgacagttggagattaccgggaagaagacgactgacgaggagcttgaggagatgctcgaaagtggtaaccccgccatcttcacttccggaattattgatagtcagatcagcaagcaagcactttctgagatagagggccgtcacaaggacatagtacgcctcgagtccagtatcaaggagctccacgacatgtttatggatattgctatgctcgtggagaatcagggcgagatgctggacaatatcgagctgaacgttatgcataccgttgatcacgtcgagaaggcccgcgacgagaccaaaaaagccgtcaaatatcagtcgcaagcccggaaaaagctgatttctctccagacgggagttgccacactggtgtttcgttag

SEQ ID NO: 207841 - DNA, 231 bp, synthetic construct
  misc_feature 1..231: note = Description of Artificial Sequence: Synthetic coding sequence
  source 1..231: mol_type = other DNA
atgttcatggacatcgccatgctggtggagaaccagggcgagatgctagataatatcgaactcaacgttatgcatactgtggaccacgtagagaaggccagagatgagaccaaaaaagccgtgaagtatcaatctcaagctcgtaagaaattaattattattatcgtgctcgtcgtcgtgctcctcggcattctggcgctcatcatcggcctgagcgtggggttgaactag

SEQ ID NO: 207842 - DNA, 759 bp, synthetic construct
  misc_feature 1..759: note = Description of Artificial Sequence: Synthetic coding sequence
  source 1..759: mol_type = other DNA
atgaaggaccggctggagcagctgaaggccaagcagctgacccaggatgacgataccgatgctgtggaaattgccatcgataatactgcttttatggacgagtttttctctgaaattgaggaaactcggctgaatattgataagatatccgagcacgtggaggaagctaagaagctctacagcattattctttctgctcccattccagagcccaagacaaaagatgacctcgagcaactgactactgaaattaagaagagagccaataacgtgaggaacaagctgaagtccatggagaagcatatcgaggaggacgaagtgcgctcatctgcggatctgcgaatcagaaaatcccaacactccgtgctatctcgtaagtttgtagaagtgatgaccaaatacaatgaagctcaggtggattttcgtgagcgcagtaagggaagaatacagagacagctggagattactggcaagaaaaccaccgacgaggaactggaggagatgctcgaatctggcaatccggctatttttaccagtggcataatagattctcagatctcaaagcaggctctgagcgagatagagggccgccataaggatatcgtgaggttagaatcttcaataaaggagcttcacgacatgttcatggatattgccatgctggtggaaaatcaaaagttgatcatcatcatagtgctggttgtcgtgttactgggaatcctggcactcattatcggcctctcagtcgggcttaactag

SEQ ID NO: 207843 - DNA, 894 bp, synthetic construct
  misc_feature 1..894: note = Description of Artificial Sequence: Synthetic coding sequence
  source 1..894: mol_type = other DNA
atgcgggaccggacccacgagctgcggcagggcgacgacagcagcgacgaagaggacaaggagcgggtggcattggtggtgcacccaggaactgccagactaggtagtccagatgaggagttcttccataaagtccgaactatccgtcaaaccattgtcaaattaggtaataaagttcaggagcttgagaagcaacaggttaccatactggcaacgcctttgcccgaggagtccatgaagcaagagctacagaatttaagagacgagatcaaacaattaggtcgcgaaatccgactgcaacttaaagctattgagccgcaaaaggaagaggcggacgagaattataattccgtgaatacgcgaatgagaaagacacagcacggggtgctgtcccaacagtttgtggaacttatcaacaaatgtaattcaatgcaatcagagtacagagagaagaacgttgaacgaattagacgacagctaaaaattaccaacgctggaatggttagtgacgaagagcttgagcagatgcttgactcagggcagtccgaggttttcgtatccaacatcctgaaggacacccaggtaactaggcaagctctcaacgagatttcagctaggcattctgagatccaacagctcgagaggtccatccgcgagctgcatgatatcttcacatttctagcaacagaagtggagatgcagggcgaaatgattaataggattgagaagaacatcctctccagtgctgattacgtcgaacgcgggcaggaacacgtcaagaccgctctggagaaccagaaaaaagcacgcaagaagaaggtcttgatagctatctgtgtgagcatcaccgtggtcctgctggcggtcatcatcggcgttacagtcgtgggttag

SEQ ID NO: 207844 - DNA, 888 bp, synthetic construct
  misc_feature 1..888: note = Description of Artificial Sequence: Synthetic coding sequence
  source 1..888: mol_type = other DNA
atgggcatgaccgcccggaccaagcggacccggagcggcagccggtggtggtgcacacgggctcgccacggatggggggcccgcaccaggtcatcttccacatctccgctcgggcacccacctcaggtgcgtaccataaggcagactatcgttaaactggggaacaaagtccaagaattagagaagcaacaagtgacaattcttgctacacctcttcctgaggagagcatgaagcaggaactgcaaaacctgcgcgatgaaatcaagcagctcggtagggagatccggctgcagctgaaagccatcgagcctcagaaagaggaagcagacgagaactacaattccgtcaacacacggatgcggaaaacacagcacggagttctctcccagcaattcgtggagctcataaataagtgtaacagcatgcagtctgaatatagggagaaaaatgtggagaggatcagaagacagctgaaaattacgaatgccgggatggtgagtgatgaagaactggagcagatgctggatagcggccagtcagaggtatttgtgtcaaatatcctgaaagatactcaggtaacccggcaagcattaaatgagatttcggcgcgacatagtgagatccaacagctcgagcggagtattcgggagctccacgacatttttactttcctcgctactgaagttgagatgcagggcgaaatgatcaatcgaatcgaaaagaatatcctgagttcagcagattacgtggaacgtggacaagagcatgtgaaaacagcattggagaatcaaaaaaaggctcgcaaaaagaaggttctgatcgccatatgtgtctcaatcaccgtcgtacttctggctgttatcattggggttactgtggtgggttag

SEQ ID NO: 207845 - DNA, 1068 bp, synthetic construct
  misc_feature 1..1068: note = Description of Artificial Sequence: Synthetic coding sequence
  source 1..1068: mol_type = other DNA
atgatcccccggaagcggtacggcagcaagaacaccgaccagggcgtctatctcgggctgtctaagacacaagtactaagcccagccactgcaggaagcagcagctccgacatcgcccctctaccacctcccgttacgctggtgccgccaccacctgacactatgtcttgcagagacagaacgcaggaatttctgagcgcctgcaagtcactccagaccagacaaaatggtatacagaccaacaaacctgcccttagggcggttcggcagcggtccgagtttactctgatggctaagaggatcggcaaggacctgagcaacacgtttgccaagctcgagaagcttaccatcttggccaaaaggaagagtttatttgacgataaggctgtcgagatcgaggagctgacatacattattaaacaggacattaacagtctgaataagcagatcgcgcaacttcaagatttcgtgcgtgccaaagggtcccagtctggtcgtcatctgcagacacactcaaatacaatagtggtctccttgcaatctaagctagccagcatgtccaatgacttcaaatctgtgttggaagtacgtacagagaatttaaaacagcaaagatctaggagggagcagtttagccgcgcaccagttagcgccttaccccttgctccaaaccacctgggcggtggtgccgttgtcctaggggccgaaagccacgcttcaaaagacgtcgccattgacatgatggattcacgaacctctcagcagctgcagctgatcgacgaacaggattcctatatccagtccagggccgataccatgcagaacatcgagagcaccatcgtggaattggggagtatttttcagcagctggcacacatggtaaaagaacaggaggagacaatacagcggattgacgagaacgtgctgggcgcacagttggacgttgaagccgctcattccgaaatactaaagtatttccaaagtgtgacaagcaacagatggctaatggtgaagattttcttgattctaatcgtcttcttcatcatttttgtcgtgtttttggcctag

SEQ ID NO: 207846 - DNA, 966 bp, synthetic construct
  misc_feature 1..966: note = Description of Artificial Sequence: Synthetic coding sequence
  source 1..966: mol_type = other DNA
atgatcccccggaagcggtacggcagcaagaacaccgaccagggcgtgtacttaggtctgtcaaagacccaggttctatctccagccactgcaggtagctctagttctgacattgccccgctgcctcccccggtcaccctggtcccccccccgcctgataccatgtcctgccgcgaccgcacccaggagttcctctcggcctgcaaatctctacaaacgcgccagaacggaatccagacaaacaaacctgctctgagggcggtacgtcagagatcggagttcactcttatggctaaacgcatagggaaagatctgtctaatacattcgctaaactcgaaaaacttacgatcctggctaagcgtaagtctttatttgatgataaggctgttgaaatcgaggaacttacgtatattattaaacaggacatcaactcccttaataagcaaatcgctcaacttcaggatttcgtaagggcaaagggtagtcagtcgggtcgccacctccagacccactctaatactattgtggtatccctccagtccaagctggcttcgatgtctaatgatttcaagtccgtgctcgaggtgagaactgagaacttaaagcagcaaagaagccgaagggagcaattcagccgagctcccgtttctgctttacccctggcccctaatcacctgggagggggggctgtagtgctgggagccgagtcacatgcctcaaaagacgtcgctatcgacatgatggactccaggacatcccagcagttacaactcatagatgaacaagacagctacatccagagccgggcagacacaatgcagaatatcgagtctactatcgtcgagttaggttccatctttcaacagctggcacacatggtaaaagaacaggaggaaacaattcagagtgtccttctgtttcccctgctccccgccctgagtcctggctcaacccgaacgtgttag

SEQ ID NO: 207847 - DNA, 906 bp, synthetic construct
  misc_feature 1..906: note = Description of Artificial Sequence: Synthetic coding sequence
  source 1..906: mol_type = other DNA
atgagctgccgggaccggacccaggagttcctgagcgcctgcaagagcttacagacccggcagaatgggatccaaaccaataaaccagctctgagggctgttcggcagcgttccgagtttacattgatggccaaaagaattggcaaagatctgtccaatactttcgctaagcttgagaaacttacaatactcgccaagcggaagtctctgtttgatgataaagctgtagaaattgaggagcttacttatattattaagcaggacatcaattccttgaataagcaaatagcccagttacaggatttcgtgcgggcgaaggggagtcagtctgggaggcacctgcagacccattctaatacaattgtagtcagtttgcagagcaagttagccagcatgagcaacgatttcaaaagtgttctcgaagtgaggacagaaaacctgaagcagcagcgctcccggcgtgaacagttctcaagagcgcctgtatctgccctgcccctggcccctaatcacctggggggaggggcagtggtgctcggagccgaatcacacgcctctaaggatgtggcaattgatatgatggatagccgcacctctcaacaactgcagctgattgatgagcaggatagttacatccagtctcgggccgacaccatgcagaatattgagagcaccattgtggaactcggatccatttttcaacagctcgctcacatggtaaaagagcaggaagaaactatccagagaatcgacgagaatgtgttgggggctcagctggacgttgaagccgctcacagcgagatactgaaatattttcagtcagtgaccagcaacagatggttgatggtcaaaatctttctcattctgattgtgttcttcattatcttcgtggtattcttagcctag

SEQ ID NO: 207848 - DNA, 780 bp, synthetic construct
  misc_feature 1..780: note = Description of Artificial Sequence: Synthetic coding sequence
  source 1..780: mol_type = other DNA
atggccaagcggatcggcaaggacctgagcaacaccttcgccaagctggaaaaacttacaatactggctaaaagaaagagcctctttgatgacaaagccgtggagatcgaggaactcacttatataatcaaacaggatatcaattctttgaacaagcagattgcccagctgcaggacttcgtgcgagccaaaggttcccaaagtggtcgccatctacagacccactcaaacacaatagttgtgagcctgcagtctaagctcgccagtatgtctaacgatttcaagtctgtccttgaggtgcggacagagaatctcaagcagcagcgcagcagaagggagcagtttagtagagcgcctgtgtctgcactgcccctggcccctaatcatctgggcggcggcgccgtggttctgggtgcagagagtcacgcttctaaggacgtggcaatcgacatgatggattcaagaacgtcccagcaactgcagctgatcgatgaacaggactcctacatacagtctcgcgctgatacaatgcagaatattgagtctacaatcgtcgaacttgggagtattttccagcagcttgcgcacatggtgaaggaacaggaggaaacaattcagcgtattgacgagaatgtgctaggggctcagctcgatgtcgaagctgcccacagtgaaattctcaagtatttccagtccgtgacaagcaaccggtggctgatggtcaaaatatttctgatccttatagtgttctttattatcttcgtggtcttcttagcctag

SEQ ID NO: 207849 - DNA, 720 bp, synthetic construct
  misc_feature 1..720: note = Description of Artificial Sequence: Synthetic coding sequence
  source 1..720: mol_type = other DNA
atgagctacacccccggcgtgggcggcgaccccgcccagctggcccagcggatctcatccaacattcagaaaattactcagtgtagcgtggagatccaaagaactctcaaccagctagggactccccaagacagtccagagctgcggcagcagcttcagcaaaagcagcagtataccaatcagctggccaaagagaccgataaatacattaaagaatttggttccctgccgacaactccttccgagcagagacagaggaaaattcagaaagaccgactcgtcgcagagtttaccacctctttgacaaattttcagaaggtgcagagacaggccgcagagcgagagaaagaattcgtcgcccgggtacgagctagctcacgggtgagtggatcattccccgaggacagttcaaaggaacggaacttggtgtcctgggaatcacagacacagcctcaggtgcaagttcaggatgaggagataacagaggatgaccttcggctgatccatgagcgggagagtagcatccggcagctcgaggcggatataatggatatcaacgagatttttaaagacttaggcatgatgatccatgagcaaggggacgtgatagactccatcgaggcaaatgtcgaaaatgctgaggtgcacgtgcagcaagccaaccagcagctgagcagggctgctgactaccagaagaaggactcctgcatgctcatgtag

SEQ ID NO: 207850 - DNA, 786 bp, synthetic construct
  misc_feature 1..786: note = Description of Artificial Sequence: Synthetic coding sequence
  source 1..786: mol_type = other DNA
atgagctacacccccggcgtgggcggcgaccccgcccagctggcccagcgcatcagctctaatattcaaaaaatcacccagtgtagtgtcgagattcagagaacattaaaccagctcggcaccccacaggacagtccggagttacgacaacagctccagcaaaagcagcagtataccaatcagttggccaaggagaccgataaatatattaaagagtttggctccttgcctaccactccaagcgaacagcggcagagaaagattcagaaagatcgcctggtcgccgagtttaccacctcactgacaaatttccagaaggtgcagaggcaagctgccgagcgggaaaaagaattcgtggcccgggtacgggccagttctagagtttcgggctcctttcctgaggactcatcgaaagaaaggaacttggtctcctgggagagtcagacacagccgcaagtgcaggtacaggatgaagagatcaccgaagacgatctgcgccttattcatgagagagagtcatccattcgccaactggaagctgatatcatggatataaatgaaatctttaaggacctcgggatgatgattcacgagcagggcgacgtcattgacagtatcgaagcgaacgtggaaaacgccgaagtgcacgtgcagcaggccaatcaacagctcagccgcgctgccgactaccagagaaagtctaggaaaaccctctgcattattatcctgatactagtcatcggggtggcaattatctcactgatcatttggggcctgaaccactag

SEQ ID NO: 207851 - DNA, 786 bp, synthetic construct
  misc_feature 1..786: note = Description of Artificial Sequence: Synthetic coding sequence
  source 1..786: mol_type = other DNA
atgagctacacccccggcgtgggcggcgaccccgcccagctggcccaacggatcagctccaacatacagaaaataacccagtgttcggttgagatccaaaggaccctgaaccagttaggaacccctcaggattctcctgaactcagacagcaactgcagcagaagcagcagtacaccaaccagctggccaaagaaacagacaaatacatcaaagaattcggatctctgcccacaacgccctctgaacaaaggcaacgcaagatacagaaggaccgcttagtggcggaattcactacgtctctcacaaatttccaaaaggtgcagcggcaggcagccgagagggagaaagaattcgtggcccgcgtgagagcctctagccgggtgagcgggtctttccctgaagatagttccaaggaaagaaatctggtttcgtgggaaagtcaaactcaaccccaggtgcaggttcaagacgaagagatcaccgaggacgacctcaggctgatccatgagagagaaagctctatccggcagctcgaggcagatatcatggacattaatgagatttttaaggacctcggaatgatgatccacgagcaaggggacgtgattgatagtatcgaggccaacgtcgaaaatgctgaggtgcatgtgcagcaggctaaccaacagctatcacgggcggctgactaccaaaggaagtctcggaagactctgtgtatcatcattctcatcctcgtcatcggcgtcgccattatcagcttaatcatttggggtctgaatcactag

SEQ ID NO: 207852 - DNA, 711 bp, synthetic construct
  misc_feature 1..711: note = Description of Artificial Sequence: Synthetic coding sequence
  source 1..711: mol_type = other DNA
atggcccccgacccctggttcagcacctacgacagcacctgccagattgcgcaggagattgcagagaaaattcaacagcggaaccaatatgagcgcaaaggggagaaggctcccaaacttacagtgaccattcgggccttgctgcagaatctgaaggagaaaattgccctgttgaaggacctcctgctccgagctgtcagtactcatcagatcacgcagcttgagggcgataggcggcaaaatctcctcgacgatctcgtcacgagagagcgtctgttgctggcctcctttaaaaatgagggggctgagcctgacctcatccggagttccctgatgtccgaggaggccaagcgcggtgcccccaacccctggttgtttgaagagccggaggagacccggggactcggttttgacgagatccgtcagcagcagcagaagatcatccaggagcaagatgcaggcttagacgccttaagctcaattatctctagacagaagcagatgggtcaggaaattggaaatgaactcgacgagcaaaatgaaatcatcgacgatctggccaatcttgtggagaacaccgatgagaaactgaggaatgaaacccgccgagtaaacatggttgatagaaagtcggcatcatgcggaatgattatggtgattcttctgttgctggtggccatcgtggtcgtcgctgtgtggcccaccaactag

SEQ ID NO: 207853 - DNA, 1785 bp, synthetic construct
  misc_feature 1..1785: note = Description of Artificial Sequence: Synthetic coding sequence
  source 1..1785: mol_type = other DNA
atggcccccatcggcctgaaggccgtggtgggcgagaagatcatgcacgacgtgattaagaaggttaagaagaagggcgagtggaaggtactggtggtcgaccaactgtctatgagaatgctgagcagttgttgcaaaatgaccgatatcatgaccgaaggcatcaccatagtcgaggacataaacaagcgccgagagcctctgcctagcctcgaagccgtctatctgattacaccaagcgagaagtcagttcattcactgattagtgactttaaagatccccctacggcaaagtatcgggcagctcacgttttctttacagattcatgtcctgacgctctttttaacgagctcgttaaaagccgcgctgccaaagttattaagaccttgaccgagattaacatcgccttcttgccttacgagtcacaggtgtacagcctggattccgcagacagctttcaatcattttacagcccacataaagctcaaatgaagaaccccatcctggagcggctggctgagcagatcgcgactctatgtgcgacgctcaaggaataccccgccgttcgttaccgaggagaatacaaggacaatgctctactcgcacaactcatacaggataaattggatgcgtacaaagccgacgaccccacaatgggggagggccccgacaaagccagatctcagcttcttatcctcgaccgtggctttgacccatcctccccggtactccatgagcttacattccaagcgatgtcctacgatctgcttcccatcgagaatgatgtttataagtacgagacctctggaattggtgaggcccgcgtgaaggaagtcctgctggacgaagacgacgacctgtggatagccttgagacacaagcatattgcagaggtttcccaggaggtaactagatcattaaaggacttctcatctagcaaacgcatgaacactggcgaaaaaacaacgatgcgtgacttatcacagatgctgaagaagatgccacagtatcaaaaagaattatctaagtatagtacgcacctacaccttgccgaggattgcatgaagcactatcaggggactgtggataagctgtgccgggtggagcaggacctggcaatgggcaccgatgccgagggcgagaaaattaaggatccgatgagggccatcgtccctatactgctcgacgcgaatgtcagtacttacgacaagattagaattatcctgctgtacattttcttgaagaacggaattaccgaggaaaaccttaataaactcatccagcacgcacagatccccccagaagactccgaaattattaccaacatggcccatctgggagtgccaatagttactgactctacgttgagacgtcgatccaaaccggagaggaaagaaaggatcagtgaacaaacataccaacttagtagatggacgcctattatcaaagacattatggaggacactatcgaagataagcttgatacgaaacactatccatacattagcactcgttcttcagccagcttcagcaccaccgctgtgagtgcgcggtacgggcattggcacaaaaacaaggctcccggcgagtatcgcagtggaccacgactgataatcttcattctaggcggcgtgtcactaaatgaaatgcgctgcgcctatgaggttacccaagccaatgggaaatgggaagtcctcataggatccacacacatcctgactccacagaagctcttagatacactgaagaaactgaacaagacagatgaggaaattagttcctag

SEQ ID NO: 207854 - DNA, 1674 bp, synthetic construct
  misc_feature 1..1674: note = Description of Artificial Sequence: Synthetic coding sequence
  source 1..1674: mol_type = other DNA
atgaccgacatcatgaccgagggcatcaccatcgtggaggacatcaacaagcgtagagagccactcccctcattggaggcagtatacctcataacgccctctgagaaaagtgtgcactcactgatttccgacttcaaggatccgcccacagccaagtatcgggccgcccacgtgttttttactgattcatgccccgacgccctttttaatgagttggtgaagagcagagcggccaaggttatcaaaactttaaccgagatcaatatcgcattcctcccctacgaatcacaagtttatagtctggatagtgctgattccttccagtccttctactctccacacaaagcccagatgaagaaccccattcttgagcggctggcggaacaaattgcaacgctgtgcgctactttgaaggagtatcccgcggtgagatatagaggcgaatacaaggacaatgccctgttggcccagctgatccaagataagttggatgcctacaaagctgatgatccaacaatgggagaagggccagataaggcacggagccagctgttgatactggatagaggctttgacccctcgtctcccgtcctgcatgaacttaccttccaggccatgtcttatgatctcctgccaatcgagaacgacgtctataagtatgaaacttctggcattggggaggcaagggtcaaggaggtgctgttggacgaggatgacgatctctggattgctttacgccacaagcatatcgcagaggtctcccaggaagtcacaaggagcctgaaagatttctcgtccagcaaaagaatgaacaccggggagaaaaccaccatgagagacctctcccaaatgctgaaaaagatgccacagtatcagaaggaactctccaaatatagcacacatctccacttggccgaggattgtatgaagcactatcagggaacagtggacaaattatgcagagttgagcaggacctcgctatggggacggatgcggagggagagaaaataaaggatccgatgagggccattgtgcccatcctcctggacgcgaacgtgtccacttacgacaaaatccgcatcatcctgctttacatatttctgaagaatggcataactgaagagaacctgaataagctcatccaacacgcccaaattccaccagaagacagcgaaattattaccaatatggcccacctgggcgtgccaatcgtgaccgattccaccctcagacgacggtcgaagcccgagcggaaagagcggattagtgaacagacatatcagctttcaaggtggacaccaatcataaaagacatcatggaggacaccatcgaagacaagcttgacacaaagcattacccctacatatccacgcgtagcagtgcctctttttccacaaccgccgtgtccgcacgttacggccattggcacaaaaataaagcccccggggagtataggtctggcccaagactaatcatcttcatcctcggaggtgtgtctctcaacgaaatgcgctgcgcctacgaagtgacgcaggcgaatgggaaatgggaggtgctgattggctctacgcacatattgacccctacgaaattcctaatggatttgcgacatcctgatttcagagaaagttcccgcgtgtcttttgaggaccaggcgccaacaatggagtag

SEQ ID NO: 207855 - DNA, 1308 bp, synthetic construct
  misc_feature 1..1308: note = Description of Artificial Sequence: Synthetic coding sequence
  source 1..1308: mol_type = other DNA
atggcccccatcggcctgaaggccgtggtgggcgagaagatcatgcacgatgtgataaaaaaggtgaaaaagaagggagaatggaaggtgctggtggttgaccaactgtccatgagaatgctgtcgagttgctgcaagatgacagacatcatgaccgaaggaccggacaaggctcgttcgcagttgcttatcttggatagagggttcgatcccagctcgccagtgttacacgagctgacgtttcaggccatgtcgtatgacctcctgcctattgagaacgatgtctacaagtatgaaacatcagggatcggcgaggcccgtgtcaaggaggtgcttctggatgaagacgacgacttgtggatagccctgcgtcacaagcacattgctgaggtcagccaggaagtcactcgttcactgaaagacttctcgagttcgaaaaggatgaatactggcgaaaagacaaccatgcgtgacctgtcccaaatgctgaagaagatgccacagtaccaaaaggaactcagtaaatattcaactcacctacacctcgccgaagattgtatgaagcactaccagggaaccgtggataaactgtgccgggtggaacaggaccttgctatgggtacagacgctgagggggagaagataaaggatccaatgcgagcaattgtaccaatcctgctggatgccaatgtgtcgacctatgataagatccgcataatacttctctatatttttctcaagaatggcattaccgaggagaacctcaacaagttgattcagcacgcacagattccgccagaggattccgaaattatcaccaacatggctcatcttggcgtgcctatcgtcactgactcaacccttagaagacgctcgaagccagaaagaaaagagcgcatcagtgaacagacctatcagctatcaaggtggaccccgatcatcaaagacatcatggaggacactatcgaggacaaattggatacaaaacactacccttatatttccacccgctccagcgcttcattctcgactacggcagtgtctgcacgatatggtcactggcacaagaacaaagcgcccggggagtaccgcagcggcccaagactgattatattcatcctaggtggagtctcgttgaacgaaatgcgctgcgcctacgaggtgacccaggccaatggaaagtgggaggtccttattggcagcacgcacatcctcacacctactaagttccttatggatctgagacaccctgacttcagagagtcaagcagagtgtccttcgaagaccaggcacctaccatggaatag

SEQ ID NO: 207856 - DNA, 1812 bp, synthetic construct
  misc_feature 1..1812: note = Description of Artificial Sequence: Synthetic coding sequence
  source 1..1812: mol_type = other DNA
atggcccccatcggcctgaaggccgtggtgggcgagaagatcatgcatgatgtgattaagaaggtcaagaaaaaaggagagtggaaagtcctggtagttgaccagctgtctatgcgaatgctgtcaagttgctgtaagatgacagacatcatgaccgagggcatcacgatcgttgaagatataaacaagcggcgagagcctttgccatcactggaagctgtgtacctaataacgcccagcgagaaaagtgtgcacagtcttatatccgacttcaaagatccccctactgcgaagtaccgcgctgcgcatgtgttttttacagactcctgccctgacgccttgttcaacgagctcgtcaagtccagggcagctaaggttatcaaaacgctcaccgagatcaatatcgccttcctgccctacgaaagccaagtgtactccctggattccgccgactcattccaatcattttattctccacacaaggcgcagatgaagaacccgatcttagagaggctggccgagcagattgctacactgtgcgcaacgctaaaggaatacccagctgtgagataccgcggagaatacaaagacaacgccttgctggctcagctcatccaggataagctggatgcttataaggctgacgatcctacgatgggagaagggcctgataaagcccggagtcaactactgattctcgaccgaggctttgatcctagctctcccgtgttgcacgaactgactttccaggccatgtcatatgaccttttgccaatcgaaaatgatgtctacaaatatgagacctccgggattggggaagctcgtgtaaaggaagtactcctggacgaggatgatgatttgtggatagctctgcgacacaagcacattgctgaagtgtcccaagaagtgactagatcactgaaggacttcagctcatccaagcggatgaatacaggtgaaaagaccaccatgcgggatctgagccagatgctcaaaaaaatgccgcagtaccagaaggagcttagcaagtattccacacatctacacctggccgaagattgcatgaagcactaccagggaacggttgacaaactctgtcgagtagagcaggatctggccatgggtacagacgctgaaggggagaagatcaaagacccaatgcgggcaatcgtccccattctgttagacgcgaacgtgtcaacctacgataagattcggataatcctgctctatatcttcctaaagaatgggatcacggaagagaatttgaacaagcttattcagcatgctcagattcctcctgaggactctgagattattacgaacatggcccacctcggggtccccattgtgaccgattccaccctgagaagaaggagcaagccggaacggaaggagagaatctcagaacaaacataccagctatcccgatggactccaatcatcaaagatattatggaggatacgatcgaagataaacttgacacaaagcattacccttatatcagtactcggtcttctgcgtcgtttagcacaacagcagtctcagctcgctatgggcactggcataaaaacaaggctcctggcgaataccgcagcgggcctcgcttgatcatcttcatccttggtggggtctcccttaatgagatgagatgtgcttacgaagttacccaggcaaacggaaaatgggaggttcttatcggatcaacgcatatcctgaccccaactaaatttctcatggacctgcgacaccccgacttccgggaaagctcaagagtgagtttcgaggaccaagccccaaccatggaatag

SEQ ID NO: 207857 - DNA, 1389 bp, synthetic construct
  misc_feature 1..1389: note = Description of Artificial Sequence: Synthetic coding sequence
  source 1..1389: mol_type = other DNA
atggcccccaccatccagacccaggcccagcgggaggacggccaccggtccggggtggtatgccgagtcaagtactgcaattctctgcccgatattccattcgaccctaagttcataacttatcccttcgaccagaatcggtttgtgcaatataaggcaactagccttgagaaacagcacaaacatgatctgttgaccgagccagacctgggtgtcacaatcgacctgatcaacccagacacataccggattgatcctaacgtgctgctggatccagcagatgaaaaactgctggaggaggagatccaggccccgacctctagcaagaggtcccaacagcacgccaaggtggtcccatggatgcgcaagactgaatacattagcacggagtttaataggtatgggatttccaatgaaaaaccagaggtgaaaattggcgttagcgttaaacagcaattcaccgaggaggaaatttacaaggaccgggatagtcagatcactgcaatcgagaaaaccttcgaggacgcccaaaaaagcatgtggatcaatccttgcgctcaggtcatcttcgactcagatcccgcccccaaggatacatccggggccgcagcactcgaaatgatgtcacaggctatgattagaggtatgatggatgaggagggtaatcagtttgttgcttatttcctgcctgttgaagagacccttaaaaaaagaaagcgcgatcaggaagaggaaatggactatgccccagacgacgtctatgactacaaaattgcccgtgagtacaactggaatgttaagaacaaggcctccaaggggtacgaagaaaactactttttcattttcagggagggcgacggagtttactataacgaattagaaacacgggtgagactttcaaaacgtagggccaaagctggcgtgcagtcagggacaaacgcactgctggtggttaaacaccgggacatgaacgagaaggagctggaagcccaggaggcacgcaaggcacaattggaaaaccacgaacccgaagaagaggaggaagaagaaatggagactgaagaaaaggaggccggagggtccgtcatgctgatactgcgtaccatgccgaccttaatgatgcgcacggaagacagacccaaggtggctgtgaccatgatccagaccgctgccgccatgggcgtggccagcggcgctggtgcgactgccgcagctcctgtgcctagccccgtggccgcatcgacacggccccggagaatggccgtcaaactgcagcttctaatccctgtgaagcttatcgtgacggtcaccgaatcgcaaggaatacagggatggtttaggcatcattactgcgaacagcagtctactttcctggtcgtgtgtctgtag

SEQ ID NO: 207858 - DNA, 1197 bp, synthetic construct
  misc_feature 1..1197: note = Description of Artificial Sequence: Synthetic coding sequence
  source 1..1197: mol_type = other DNA
atgtgcatccgggtgcacgtgagcatgtgcatgtgcatgtgcgtgcatgtgtgtgtgcatctctgcatgcacgtgtgcgccgtgtgcatgtgcgtttacgtttgcgtgtgtgtgcatgtgcacgtttgtgcgagcgtctgcgctttcgtgtgcatgtgcgtgtgcgtgtgcgtgtgtgggagcgtgtgcgcctttgtttccgtgcacgtgtgcatgcgggtgtacgtctgcgtgtgcatctgtgtccatttgtacgtctgtgtctgcgtgtgtctatgcgcctgcgtttatgcatgtgtctgcatgtgcctgcgactatgcgtcaggttgtgcgtgagcgtttgcgcatgcgtgtatgcttgcatctgtatgtgtatatgcgtgcacgtttccatgtatgtgtgtgcttcagtgtgcgcatgcgtctgcgtctgcgtctgcgtgtgtgtgtgcatgcgtgtttgtgcccaccaatgcctccacgtatgcatttgtgtttatgtgtgcgcacgaatctgtgtgtgtgcttgtgtgtatgtgtgcgtctgtatctctgtgtgcgcttgcgtgtatgtctgcgtccacctgtgcgtgtgtgcatgtgtacatgcctgtgtctgcgtgtgtgcttgtgtgcatctgtgtgtgtgcgcctgcgcacatgtgggagccaccctggtttgcatatgtacatatacatgccctagacctagcatgtttgcccacggcggcaggtggggggtggcgggaaggcctcggcagcccatgagtcttggggtgcaggcgcaggctcagagagtgattcacttgccccagtccgtgcaggcactgattaaggatttccagggcactcccaccttcacctataaagccgcacatattttctttactgacacatgtcccgaaccacttttttcggagctaggccggtcacggctggcgaaagtggtgaagaccctcaaagaaatacacttagcctttctaccgtacgaagcccaggtgcgcccggggttaattctggggagaggatggggcttcgtgaccaagtgccccctgtttcctcagaaacagactctgagactgggtgcagtcgcccatacatgcaacccgtctgctgttgggggtcagggacgcagaataacctggggtcaggaattcgaaacatcattgggtaccgagcaggacccagtgtcatag

SEQ ID NO: 207859 - DNA, 1773 bp, synthetic construct
  misc_feature 1..1773: note = Description of Artificial Sequence: Synthetic coding sequence
  source 1..1773: mol_type = other DNA
atggcccccagcggcctgaaggccgtggtgggcgagaagatcctgtctggggtcatccgttcagtcaaaaaggatggggaatggaaggtgctgattatggatcacccatccatgaggatcctgtcctcttgctgtaagatgtccgatattcttgctgaagggattacaatagtggaagatatcaataagcgacgtgagccaatcccttctctggaagctatatatcttctgtccccgaccgagaaagccctgatcaaagacttccagggaactcccaccttcacgtacaaggccgcccacattttctttacagatacctgtccggagccactgtttagcgagctcggccggagtaggttagccaaagtcgtgaagacactgaaggagattcacctcgctttcctgccctatgaggcccaagtgtttagcctcgatgcgcctcattccacctataacctctactgtccgttccgcgctgaggagcggactcgacaactcgaagtgttggcccaacagatcgcaactctctgtgccactctccaagagtatcccgctatccggtatagaaaaggtcccgaagacactgcacagctggcccacgctgtgctggccaagcttaacgcattcaaagcagacactcctagcctgggcgaaggcccagagaaaacgaggagtcaacttctgattatggaccgagctgcagacccagtgagtcccttgctccatgagttaaccttccaggccatggcatacgacctgttagatatagagcaggacacctatcgatacgagacaactggcttaagcgaagcgagggagaaagctgtattgctggacgaagatgatgatctatgggtagagctgcgccacatgcatatcgcagatgtatccaagaaggttaccgaactgctgagaacgttctgcgaaagcaagaggcttactacagataaggcgaacattaaggatcttagccagatcctgaagaaaatgccacagtatcagaaggaactgaacaagtattccacacatctgcacttggccgacgactgcatgaagcactttaagggttccgtcgagaaactgtgctcagtcgaacaggatctcgccatggggtccgatgctgagggggagaagattaaggattcaatgaaactgatagttccagtactgctggatgcggctgtgcctgcttatgacaagattcgtgtgttgctgttgtacatcctgctgcgaaacggcgtttccgaggagaatctggccaagctgatccagcacgctaacgtgcaggcccactcttctctgatccgcaaccttgagcagctcggaggcaccgtgaccaacccaggcgggagcggaacgagctccagactcgaaccccgggaaaggatggagccaacgtaccagttgtcaaggtggactcctgtgatcaaggatgtgatggaagacgcagttgaagaccgtcttgaccgcaatctgtggccctttgtgtcagatcctgccccgaccgcctcctcacaggctgctgtgtccgccaggttcggccattggcacaagaacaaggcgggtatcgaggctcgggcggggccaagattaatcgtatacgtgatggggggagtggccatgagcgagatgcgggcggcctacgaagtaactcgcgctacggaggggaaatgggaagtgctgatcggaagtagtcacatcctgactcctacacgcttcctagacgacctgaaggctctggataaaaaactggaagacatcgctctcccgtag

SEQ ID NO: 207860 - DNA, 1815 bp, synthetic construct
  misc_feature 1..1815: note = Description of Artificial Sequence: Synthetic coding sequence
  source 1..1815: mol_type = other DNA
atggcccccagcggcctgaaggccgtggtgggcgagaagatcctgtcgggcgtgatccgttctgtaaagaaggacggggaatggaaggtcctcataatggaccaccccagcatgcggatactgtccagctgttgtaagatgagcgatatcctggcagaaggaattacaatcgtcgaggatatcaacaagaggcgggaaccaatccctagtctcgaggccatctacctgctatcacccaccgaaaaggcccaggcgcagcgcgtaattcatctgcctcagagcgtgcaggccctcatcaaggatttccaaggtacaccaacctttacctataaagcagctcacatcttcttcaccgatacatgtccggagccgctcttctctgagttgggcaggagtcgacttgctaaagtcgtgaaaactttaaaagaaatccatctcgcctttctgccctatgaggctcaagtatttagtctggacgccccacactccacgtacaacctgtattgtcctttccgcgcagaggaacgaacccgacagctggaggtcctggcccagcaaatcgccacattatgcgcaacgcttcaggagtaccccgccatccggtatcggaagggacccgaggacaccgctcagctcgcgcacgcagtgcttgccaaacttaacgcttttaaggccgatacaccgagtctgggcgagggccctgagaagacccgcagccaacttctcatcatggaccgagccgcggatccagtgtcccctctgctccacgaactcactttccaggccatggcatatgacctgttggacatcgagcaggacacttatcgctacgaaacgacagggttatccgaagcgcgtgagaaggctgtactgcttgacgaggatgacgacctatgggttgagctgcggcatatgcatatcgcggatgtatcaaagaaagtgacagagttgcttaggaccttctgcgaatccaagaggctgacaaccgataaggctaatatcaaagacctgtctcaaattcttaagaaaatgcctcaataccaaaaggagctgaataagtactccacacatctgcatcttgcagacgactgcatgaaacactttaaaggatccgtggaaaagctctgctccgtggagcaggatctggctatgggttcagatgccgagggggaaaagattaaggacagcatgaagctaattgtgcccgttctcctggatgctgcggtgcccgcctacgataaaatcagagtcctgctgctctacatcctgctacggaacggcgttagtgaagaaaacctcgctaagctcatccagcacgctaatgtgcaagctcacagcagtctaatccgcaacctggagcagttgggtggaactgtgacgaatcccggcggatctggtacgtccagcagactcgagcctagagaacgtatggaacccacctaccagctgtcccgttggactccggtcataaaagatgttatggaggacgccgttgaagacagactggaccgcaatttatggcccttcgtcagcgacccagccccaaccgccagctcacaggccgcagtgagcgccagatttggacactggcataagaataaggctgggattgaagcgcgggcggggccacgtctaatagtatacgttatgggaggggtggccatgtccgagatgagagcagcgtacgaggtgaccagagctaccgagggcaagtgggaagtcctcattggttcctctcacatactaacacctactagattcctggatgacctgaaggccctcgacaaaaagttagaggacatcgcactgccatag

SEQ ID NO: 207861 - DNA, 1740 bp, synthetic construct
  misc_feature 1..1740: note = Description of Artificial Sequence: Synthetic coding sequence
  source 1..1740: mol_type = other DNA
atggcccccagcggcctgaaggccgtggtgggcgagaagatcctgtcgggggtgatacggagcgtgaaaaaagacggtgaatggaaggtactgatcatggatcaccctagcatgaggattctgagctcctgttgtaaaatgtccgacattctggctgaaggcatcaccatagtggaggatattaacaaacgtcgcgaacctatacctagcctcgaggccatatatctgctatctcccactgaaaagagtgtccaggccctgatcaaggactttcaagggacccccaccttcacgtataaggcggcgcatatctttttcactgatacttgtcccgaaccattattctctgaactagggcggtccagactcgctaaggtagttaaaactctgaaggaaattcatctggccttcttgccatacgaagcccaagtcttctccctggatgcgccccactctacttacaacctgtactgtccatttcgcgccgaagagcgtactcgacaattggaggtccttgctcagcagatcgcgactctttgtgcaaccttgcaagagtatcctgccatcaggtaccggaaaggccccgaggacacagctcagctggcgcatgcagtgcttgctaaacttaacgccttcaaggcagacactccatctttgggtgaaggccccgaaaagacccgaagtcaactactcataatggaccgcgcggccgatccagtaagtcccctgcttcacgaacttacattccaggccatggcatatgacctactggatatcgagcaggatacttacagatatgaaacaacaggactgtctgaagcgcgcgagaaagctgtgctactggacgaagacgatgacctgtgggtagagttgaggcacatgcatatcgccgacgtgtcaaaaaaagtaaccgaactgctccggaccttttgtgaaagcaaacggctcaccaccgacaaggcaaacatcaaggacctttcccagatcctgaagaagatgccgcagtaccaaaaggagctgaataagtactctactcacctgcatttagctgacgattgtatgaagcactttaaaggtagtgtagaaaagctctgtagtgtcgaacaggacttggccatgggttccgatgcagagggtgaaaagatcaaggattctatgaaactcatcgtacccgtgttgttggacgccgcagttcccgcatacgacaaaatcagggttctcttgttgtacatactccttagaaatggcgtatctgaggaaaacctcgcaaaacttattcagcacgctaacgtgcaggcccactcatctcttatccggaacctcgaacaactggggggaacagtgaccaatccgggggggagtggtacatccagccgactggagccaagggagcgtatggagcccacctatcagctttcaagatggaccccggtgataaaggacgttatggaggatgcagttgaagataggctagatcgcaacctatggcctttcgtaagtgatccggcgcccacagcttctagccaagccgccgtgagtgccagatttgggcactggcacaaaaacaaagctgggattgaggctagagcagggccccgattaatcgtctacgtcatgggcggcgtcgccatgtctgaaatgagggccgcatacgaggtgacaagggcaacggagggctccggacgatgttctctggcacctcacacaagttctcctaggcctgcctcgtggatgacgtag

SEQ ID NO: 207862 - DNA, 2421 bp, synthetic construct
  misc_feature 1..2421: note = Description of Artificial Sequence: Synthetic coding sequence
  source 1..2421: mol_type = other DNA
atgcacggcaagagcaccgccgtgctggagatggactacagcatcgtcgactttctgacattatgcgagaccccatacccaaacgattttcaagaaccgtatgctgtagttgttctgcttgagaaagatctagtgctcatcgaccttgcacagaatggataccccatatttgagaacccttacccgctgtcaatccacgaatccccagttacctgctgcgagtattttgcagactgtccagtggacttaatccccgcactatatagcgtgggagcccggcagaaacggcaagggtacagcaagaaggaatggccaatcaatggtggcaactggggtttgggcgctcagagttatcctgaaattattatcaccgggcacgcagacggaagcgtaaagttctgggatgctagcgctattactctgcaggtgctgtacaaactcaagaccagtaaagttttcgagaagagcagaaataaggacgatcgccccaacactgacattgttgatgaagacccttacgctattcagatcataagctggtgcccagagagccgcatgctgtgtatcgccggggtttctgcccacgttataatttatcgtttcagcaaacaggaggtgattacagaggttatccctatgcttgaagtacgactcctgtacgagattaatgacgtggaaacccctgaaggggagcagccccccccactgcccaccccggtgggcggctccaacccgcaacccatccctccccagtctcacccatcgactagtagctcaagctctgatggtctgcgcgataatgtcccctgtttaaaggttaaaaactccccattgaagcaaagcccaggataccaaacagagttagtgatacagctagtctgggtcggcggagagccaccacaacagattacatccctggctgtgaactcctcttacggtttggttgtgttcggcaactgtaacggcattgctatggtcgattacctccaaaaagcagtgcttctcaacctggggacgatcgaactctacggttctaacgacccataccgacgggagccccgctccccgcggaagagtcggcagccctctggagccggtctctgtgacatatctgagggaacagtcgtgccagaggacagatgtaagtcaccgacctcagggtcatcctcccctcacaattctgacgacgaacagaagatgaacaatttcattgagaaagcaaagatgtcccgcaagctgagtctgcctactgaccttaagccagatctggacgtgaaggacaattcttttagcagaagtaggtcgtccagcgtgacctccattgataaggagtcaagagaagctatttccgccctacatttttgtgaaacatttacccgtaagactgactcgagcccttcaccgtgcctttgggtgggaaccacgctcgggaccgtcctagtgattgcgctcaatctccctcctggaggcgaacaacggttgctacagccggttattgtgtctccctccggcacaatattgaggctgaagggtgcaattcttcgcatggcgttcctcgataccactgggtgtcttatacccccggcgtacgaaccttggcgagaacataacgtccccgaggagaaggatgagaaggaaaagctgaagaaacgccggcccgtgtcagtgtcgccttctagcagtcaggagatctctgaaaatcagtacgctgtgatatgctcggagaaacaggccaaggtgatcagtctgcccacccagaattgcgcatacaagcagaacataaccgagacttcctttgtccttcgaggagacatcgtcgccttatccaactccatttgtctggcctgtttttgcgccaacgggcacatcatgaccttttcccttccctccctgcggcccctgctcgatgtctactaccttcctcttaccaacatgcggattgctaggaccttttgctttaccaataacggccaggctctgtacctggtttccccaacagagatccagcgactgacctattcccaggaaacttgcgagaatctgcaggaaatgctgggagaactgtttacacccgtggaaacaccagaagcacccaacaggggcttctttaaaggtctcttcgggggaggcgctcagtctcttgaccgcgaagagttgttcggggagtcgagttctggaaaagcgtctcgctcgctcgcccaacatatacccggccccggtggcatcgagggcgtgaagggcgccgcaagcggcgtggtgggggagctggcccgcgctcgccttgcactcgatgagcggggccagaagctaggagatttagaggaacgcacagccgccatgctgtcgtcagcagaaagtttctctaagcacgcacacgaaataatgctgaagtataaggacaagaaatggtaccagttttag

SEQ ID NO: 207863 - DNA, 3456 bp, synthetic construct
  misc_feature 1..3456: note = Description of Artificial Sequence: Synthetic coding sequence
  source 1..3456: mol_type = other DNA
atgcggaagttcaacatccggaaggtgctggacggcctgaccgccggatccagttctgcgtcccagcagcaacagcagcagcatcctcccggaaatcgcgagcccgaaatacaagaaacattgcagtccgaacatttccagctgtgcaaaacagtccgccatggattcccatatcagccctccgctttggcctttgaccccgtccagaaaatccttgctgttggaacgcagacaggagccttaagactgttcggcagaccaggggtggagtgctattgccaacacgattcaggagcagctgtgattcaactgcaattcctgattaatgaaggagccttagtcagcgcactggcggatgatactctacacctctggaacctccggcaaaaaagacccgccattcttcattccctgaagttttgtagggaaagggtgaccttctgccaccttccatttcaatctaaatggctgtacgtggggacagagcgcggaaacattcatattgtaaacgtggaatcattcaccttaagcggctacgtgattatgtggaacaaggccattgaactcagctctaaatctcacccgggccctgttgtgcatatatctgataacccaatggatgagggaaagctgctcattggctttgagtctgggactgtggttttatgggacctgaaatccaagaaagcggactaccggtacacgtacgacgaggctattcattcagtggcgtggcaccacgaaggaaagcagtttatttgtagccactctgacggaacactgacaatttggaatgtacggtccccagcaaaaccggtccagaccataacaccccacggcaagcaactaaaggacggaaaaaaacctgaaccatgtaaaccaatcctgaaagtggaatttaaaaccacaagatctggcgagccctttataatcctgtcgggcgggctgagctacgacactgtcggcaggagaccctgcctaacggtgatgcacgggaagtcaacagccgtgctcgagatggactactctattgtggactttctgacattgtgcgagacgccatatccgaatgacttccaggaaccctatgcggtggttgtgctgctagagaaggatctggttctcattgatctggctcagaatggatatccaatattcgaaaatccctatccattgagcatccacgagtctccagtaacctgctgtgagtacttcgccgattgtccggtggatctgatccccgccctgtactctgtaggagcccgccagaagcgacaggggtacagtaagaaagagtggcctattaacggtggaaattggggtttgggcgcacagtcctatccggagattatcatcaccggccatgccgatggttcggtgaagttctgggacgcgtccgcaattacgttgcaggtgttatataagctgaagacatctaaggtgttcgaaaagtctagaaataaggatgatcggcctaacactgacattgtggatgaggatccatacgccatccagattatctcttggtgcccggagagcaggatgctctgcatcgcaggcgtaagtgcgcatgtcattatttacagattttctaaacaggaagtgattacagaggtgatccccatgttggaagtgcgcctcctgtacgagattaacgacgtggagactcccgagggagagcagccacctcccctccctacaccggtcgggggatctaacccacagcccattcccccccaaagccacccaagcactagtagtagcagcagtgatggactgcgggataacgtgccatgtttaaaggtgaaaaattccccactcaaacaatcaccgggatatcaaacagagctcgttatacagctggtttgggtggggggtgaaccccctcagcagatcaccagccttgctgtcaatagttcctatggactggttgtcttcggcaattgtaacggaattgccatggtggattacctacagaaggcggtcctcttgaatctcggaacgattgagctgtacgggtctaatgacccataccgaagggagcccagaagtcctaggaaaagcaggcaacccagtggggcgggtctgtgtgatatatcagaagggacagtcgtaccagaggataggtgtaaatctccgacatccggaagcagttcaccacacaactctgacgacgaacagaaaatgaacaacttcatcgagaaggtgaaaaccaagagtaggaagttctccaaaatggtggccaacgacatagcaaagatgagtcgcaaactttcattgcccacagacctgaaacctgatcttgatgtaaaggataatagcttttcgagaagccgctctagcagcgtgacctccattgataaggagtcccgggaggctatctcagctctgcatttttgtgaaactttcactcgcaaaacagattcgagcccctccccgtgcctgtgggttggaaccacccttggcactgtactggtgattgcgttaaatctgcccccaggcggcgagcagcgattgctccagcccgtaattgtgtcgccaagcggcacaattctgcggctaaagggggcaatcctgagaatggcattcttagacaccacgggatgcctaattcccccggcctacgaaccttggcgcgaacacaacgtgccggaagagaaggatgagaaagagaagctgaagaaacgacggcccgtgtcagtgagcccatcctcaagccaggagattagcgaaaaccaatacgccgtgatttgttcagaaaaacaggcaaaggttatatccctccctacacagaattgcgcatataagcagaatatcacggagacatcatttgtgctcaggggcgatatcgtcgctctttctaacagtatctgtctggcatgtttctgcgcgaatggccatattatgaccttctccctgccttccttgcgaccattgttggatgtttactacctcccgcttacgaacatgaggattgcccggactttctgttttacaaacaacggccaggccctgtacctggtgtcaccaactgagattcagagactgacttattcccaagagacatgcgaaaatcttcaggaaatgctcggagaactctttactccggtcgaaacccccgaagccccaaatagagggttctttaaagggttgttcggtggcggcgcgcagtctctagatagggaagaactgttcggcgaatcctcatctgggaaagcgagccgttccttagctcagcacatccccggtccaggtggcatagaaggagttaaaggggccgctagcggagtggtcggagaattggctcgggcaaggttagctctggatgagcggggtcagaagctgggtgatctcgaagaacgaactgcagccatgctctcctctgcagagtccttttcaaagcacgctcacgagatcatgctcaagtacaaagataaaaagtggtatcagttctag

SEQ ID NO: 207864 - DNA, 525 bp, synthetic construct
  misc_feature 1..525: note = Description of Artificial Sequence: Synthetic coding sequence
  source 1..525: mol_type = other DNA
tgaaaggccgtgctgctgaacctgggcaccatcgagctgtacggctccaatgatccctaccggcgcgagcccagaagcccccgaaagtcccgtcagccatccggagcgggattatgcgacatttcagaagggacagttgtgccagaagatcggtgcaagtctccaaccagcggcagttcctcaccccataactctgacgacgaacagaaaatgaacaacttcattgaaaaggccaaaatgagcaggaagttatccctgccaacggatctcaagccagatcttgatgttaaggataacagtttttctaggtcacgtagcagtagtgtgacctctattgataaagagtctagggaggctatctccgcgctccacttttgcgaaacttttactaggaagactgactcgtcaccctcgccttgcctgtgggtaggaaccacactcggtacagtgttggtgatagctctaaacctccccccgggtggcgaacaaaggttgctccaaccggtgatcgtgtctcccagttag

SEQ ID NO: 207865 - DNA, 840 bp, synthetic construct
  misc_feature 1..840: note = Description of Artificial Sequence: Synthetic coding sequence
  source 1..840: mol_type = other DNA
atggtggactacctgcagaaggccgtgctgctgaacctgggcaccattgagctttatggaagtaacgatccataccggagagagccccggtcacctaggaagtcccgacagcctagtggcggagtcttgatcgttacatcttgtatgtgcggactcagcagtctgtacagtgagagcatgaagaagttgcgttctagctttctgacgggtttatgtgatatttcagagggaaccgtagtccccgaggaccgctgcaagtctcctacctctgcgaaaatgtcacggaagttgtcgctaccaacagatctcaagcctgatttagatgtaaaggataacagtttcagccgtagccgaagctccagcgtgacatcaattgacaaggagtcgcgcgaagccattagcgcgcttcacttctgtgagaccttcaccaggaagaccgatagctccccatccccatgtttgtgggttggcactactctgggaactgtgctggttatcgctcttaacctgcctccgggcggagagcagagactgttacagccagtgatcgtcagcccatctggaacaattctccgcctcaagggggcgattcttagaatggcctttttggacaccacaggatgtttgatcccaccagcctacgagccgtggagagagcacaacgtgcctgaggagaaggacgagaaggagaaactgaagaagcgacggccagtgagtgtgtcgcctagctcaagccaggagatctctgaaaatcagtatgcggtgatatgctccgagaagcaggcaaaagttatctctttacctacacagaattgtgcctataaacagaacatcacttag

SEQ ID NO: 207866 - DNA, 3297 bp, synthetic construct
  misc_feature 1..3297: note = Description of Artificial Sequence: Synthetic coding sequence
  source 1..3297: mol_type = other DNA
atgcggaagttcaacatccggaaggtgctggacggcctgaccgccggctcttcttccgcctcccagcagcaacagcaacagcacccaccagggaatcgcgaaccagagatccaggaaacattgcagtctgaacatttccagctgtgtaagaccgttcggcatggcttcccgtaccagccttcagcccttgccttcgaccctgtgcagaagatcctggcagtcggcacacaaaccggggctctacgtctctttggccggccaggtgtggagtgctactgtcagcatgactcaggagctgccgttatccagctgcagtttctgatcaacgagggagcccttgtgtcggctctggccgacgacaccctgcacctgtggaacttgaggcagaagcggcctgccattctgcactcactcaagttttgtagagagcgggtgacgttctgccacctcccctttcagtcaaagtggctgtacgtgggcactgagaggggtaacatccacatcgtgaacgtggagtcctttaccctgtctggctatgtgataatgtggaataaggcgatcgagctatctagtaagtctcacccaggcccggttgtgcatattagtgataacccgatggacgaagggaaactgttgattggtttcgaatccggaacagtcgtgttgtgggatctgaaatccaaaaaagctgattaccgatacacttatgatgaggcaattcactccgtggcctggcatcatgaggggaagcaattcatctgctcacattctgatggaacactgacgatatggaacgtccgatccccagccaagcccgtgcaaaccatcacaccacatggcaaacagctgaaagacggaaagaaacccgaaccttgcaagcctattctcaaggtcgagtttaagactacccgtagcggagaaccattcattatcctcagcggtgggttatcatacgacaccgtgggccgacgcccttgtctgacagtgatgcacggcaaatcgaccgccgtactggagatggattacagcatcgtcgactttttgaccctgtgtgaaaccccatatccaaacgattttcaagagccatatgctgtcgtggtgcttctggagaaggaccttgttctgatcgacctcgcgcagaatggataccctatcttcgagaacccctaccctctgtcaatccatgaatccccggtgacatgttgcgaatacttcgccgactgcccggtggatctgattcctgcactttattcggtcggagcacgccagaaaagacagggctactctaaaaaagaatggcccattaacggcggcaattggggcttaggggcccagtcatatcctgagataataattacaggccatgctgatggatccgtgaaattttgggatgcatctgccatcacactacaggtcctgtacaagctcaaaaccagtaaggtattcgaaaaatcacggaataaggacgatagaccaaatactgacattgtggacgaggatccatacgcaatccagatcatttcctggtgcccagagagccgcatgctatgcattgccggagtgtctgcgcacgtgatcatctacagatttagcaagcaggaggtcatcacggaggttattcctatgctagaagtgaggcttctatacgagatcaacgacgtagaaacacccgaaggcgaacagccacccccactgcccacccccgttggcggctccaaccctcaaccgattccaccgcagtcccacccgtccacctcatcaagctcctccgacggacttagggacaacgtcccttgtctgaaagtgaaaaactcacctctgaaacagtccccggggtatcagactgagctcgtcatccagctagtatgggtgggaggtgagcccccccagcaaatcacatccctagcagtcaacagctcatacggcctcgtggtattcggcaattgcaacggcatcgctatggtggactatctacaaaaagctgttctgctcaacctgggcacgatagagctgtatgggagtaatgatccttacaggcgagagccacgtagtcctagaaagagcaggcagccttccggcgcgggcctctgtgacatttccgagggaacagtagtacccgaagacagatgtaaaagccccaccagcgatgtcaaagataacagctttagcagaagccgcagctcaagcgtaacttccattgacaaagagtccagagaggctatctctgccctgcatttttgcgaaacatttaccaggaagaccgattcctctccctcaccctgtctttgggtcggaaccaccctagggaccgtgctggtgatagctctcaatctgccccccgggggagaacaaagactccttcagccggtgatcgtgtccccctccgggacgattttacgactgaaaggggccatccttcgcatggctttcctcgacacgaccgggtgtttgatccctccagcttacgagccctggcgtgaacataatgtcccagaggaaaaagatgagaaagagaagctcaagaagcgccggccagtgagtgtttctcccagctccagccaagaaataagtgagaatcagtacgctgtgatttgtagtgagaaacaggccaaggtaatctcccttcctacccagaattgtgcgtacaagcagaacatcaccgaaacatctttcgtccttcgcggggacatagtcgcactttctaatagcatctgtctggcctgcttctgcgccaatggccatattatgactttctcactgcccagtttgcgtcctctgcttgacgtgtactacctcccgctgacaaacatgcgaattgcacgcacattctgttttacaaacaacggacaggctctctatctggtcagtccaactgaaattcagcggctgacgtattcccaggaaacttgcgaaaacttgcaggagatgctgggggagctgtttacacccgttgagacccctgaagcaccaaaccgcggctttttcaagggactgttcggtggtggtgcgcagtccctcgatagggaggaattatttggtgagtcatcgagcggcaaagcaagcagatccctagcccaacacatccctggccctggcggtatcgagggggtcaaaggagcggcaagcggcgtggtgggggagctggctcgcgctagattggcacttgacgaacggggacaaaagttgggagatctggaagagcgcacagcagctatgctgtcctccgccgagtcttttagtaagcacgcccacgagataatgcttaaatacaaggataagaaatggtaccagttctag

SEQ ID NO: 207867 - DNA, 3348 bp, synthetic construct
  misc_feature 1..3348: note = Description of Artificial Sequence: Synthetic coding sequence
  source 1..3348: mol_type = other DNA
atgcggaagttcaacatccggaaggtgctggacggcctgaccgccggctcgtcatctgccagccagcaacagcaacaacagcacccccccggaaacagggaaccagaaattcaagaaaccttgcagagcgagcatttccagctgtgtaagacggtcaggcacggattcccataccagcctagcgccttggctttcgatcccgtacagaaaattctagcagtgggaactcagaccggcgctttaaggctctttggcagaccaggcgtagaatgctattgtcagcacgatagtggggccgccgttatccagctccagtttctcatcaacgagggggcactagttagtgcactggcggatgacactctgcacctgtggaacctgaggcagaagaggcccgccattctgcacagcttaaaattttgccgcgagcgggtcactttctgtcacctcccttttcagtccaagtggttatatgtcgggaccgagcgggggaacatacatatcgttaacgtcgagagttttacactgagcggttacgtaataatgtggaataaggctatagagctaagcagtaagtcacaccccggtccggtagtccacattagcgacaatcccatggatgaaggaaagctgttgatcggtttcgaatccggaactgttgtcttatgggatcttaaatcgaagaaagctgactatagatacacatatgatgaggctatccactcagtggcgtggcaccacgaagggaagcagttcatttgttcacactccgatggaactctcacaatctggaacgtgcggagccccgcgaagcctgtccaaacaatcacaccacacggtaaacaactaaaagacggtaagaagccagagccctgcaagccaattcttaaggtcgaatttaagactaccaggtctggcgaaccatttattatcctgtccggcggcctttcctacgacaccgtgggccggcgcccttgcctcacggtgatgcacggtaaaagcacagcagtgctcgaaatggattatagcattgtggacttcctgactctgtgcgagacaccctaccccaacgacttccaagagccttatgccgtggtggtgctgcttgagaaagacctagtcctcattgacctggcgcagaatggctatcccatctttgaaaacccctacccattaagtatccatgaatctcctgtcacttgctgcgaatactttgctgattgtccagtggatttaattccagccctttacagcgtcggcgccaggcagaagcgacagggttactctaagaaggagtggccgataaatggagggaactggggcctgggggcccagagttaccctgaaatcataattacgggccatgccgacgggtccgtcaagttctgggacgcaagcgcaatcactctccaagtcctctacaaacttaagacttccaaagtttttgaaaaatcgcgcaacaaggacgatagacctaacactgacatcgtcgatgaagacccgtacgccattcagatcatctcctggtgtcccgaatcgcgaatgctgtgcatcgcgggcgtgtccgcccatgtgattatatacaggttctccaaacaagaggtgatcacggaggttatacccatgcttgaggtcaggctgctatacgagatcaacgacgttgaaacaccagaaggtgagcagcctcccccactgcccacccccgtcggcggctcgaatcctcagccgatccccccacagtctcacccgtcaacttcctcctcttcctccgacggcttgcgagacaatgtcccttgcctgaaggtgaagaattcccctttgaaacaaagtcctggctaccaaacggagctcgtgatacaactagtctgggttggaggagagcctccacagcagatcacttcgctagcagtcaactcgtcttatggactcgttgttttcggcaactgcaatggcatcgcaatggtggactatcttcaaaaagctgttctccttaaccttggcaccattgaactctatggatccaatgatccttataggagagaaccaaggagccctagaaaatcgcgacaacctagcggagcaggactgtgtgacatctccgaaggcaccgtggtgcctgaagatagatgcaagtcacctacatcagcaaaaatgagtaggaagctatcgctgcccaccgacctcaagcccgacctggatgtgaaagacaactcatttagcaggtccaggtcttctagcgtgacttctatcgacaaggaatctagggaggccataagtgccctccacttctgcgaaacattcacccgaaagacagactcttcaccctccccttgcctctgggtcggaacgactctcgggaccgtgcttgtcatcgcactcaacttacccccaggcggggagcagcgcctgctgcaacctgtcattgtgtcaccatcagggaccatattgcgcctgaagggcgccattttaaggatggcttttctcgacacaaccgggtgcctgattccccccgcctatgaaccatggcgtgaacacaatgtacccgaggagaaagatgagaaggagaaattaaagaaaagaaggcctgtctccgtttctccctccagttcgcaagaaatttccgagaaccagtacgccgtgatatgttcagagaagcaggccaaggtgatttctctgccaacgcagaactgtgcctataagcagaacatcacagagacatcttttgtccttaggggggacattgtagccctgtctaatagcatctgtctggcatgcttttgtgctaatggtcatataatgacattctcgctgccttctcttcgacctctcctggacgtgtattatctccccttgacaaacatgcgcatcgcccgtactttctgcttcaccaacaacggccaggcactgtatcttgtttctcctacagagattcagaggcttacctacagccaggagacctgcgagaacttgcaggagatgttgggcgagctgttcacacctgtagaaacccccgaggccccaaaccgggggtttttcaaaggcctgtttggtggcggggcgcagtcgcttgatagggaggagttgttcggcgaatcgagctcgggtaaagcctctcggtccctggcacaacacataccgggacctggaggtatcgagggagtgaaaggggccgcctcaggtgttgtgggcgagcttgcaagagccagattagcgctcgatgagaggggacaaaagttgggcgatcttgaagaaagaactgctgcaatgctgagttcagctgaatctttctccaaacacgcacacgaaataatgttaaaatacaaggacaagaagtggtaccagttttag

SEQ ID NO: 207868 - DNA, 795 bp, synthetic construct
  misc_feature 1..795: note = Description of Artificial Sequence: Synthetic coding sequence
  source 1..795: mol_type = other DNA
atcgagctgtacggcagcaacgacccctaccggcgggagccccggtcgccacggaaatctcgacagccctccggaggagtgctgattgtgactagttgtatgtgtgggctgtcctctctctatagcgaatccatgaaaaagctccgtagtagcttcctgacaggcctttgcgatatttctgaagggaccgtagtccctgaggatcgttgtaagtcaccaacctctgccaaaatgtcgcgaaagttgtctcttcccacagatctgaagcccgatttggatgtaaaggataactcctttagccgaagtcgaagctcctctgtgactagtatcgataaggaatctcgtgaggcgatctccgccttgcacttttgcgaaacatttacacgcaagactgatagttccccatccccttgcctctgggtagggactacactcgggactgttctagttattgccctgaatttaccacccggtggcgagcagaggctgctgcagccagttatcgtgtccccctcaggcacaatattaagacttaaaggggcaatcttgaggatggcatttcttgataccaccggctgtcttatcccacctgcgtacgagccatggcgtgagcacaatgtgcctgaggagaaggacgaaaaagaaaagctgaaaaaaagaagacccgtctctgtatccccttcatcatctcaagagatctcagaaaatcagtacgctgtgatctgctccgagaaacaggctaaggtgatcagcttgcctacccagaattgtgcctacaagcagaacatcacctag

SEQ ID NO: 207869 - DNA, 927 bp, synthetic construct
  misc_feature 1..927: note = Description of Artificial Sequence: Synthetic coding sequence
  source 1..927: mol_type = other DNA
atgcggaagttcaacatccggaaggtgctggacggcctgaccgccgggagctcttccgcatcacagcaacagcagcagcagcacccacccggtaacagggaacccgaaatccaggagacactccagtccgagcattttcaattgtgcaagacagtcaggcatggctttccataccagcccagcgccctcgccttcgacccagttcagaagatcctcgccgtggggacccagaccggagcgctgcggctgttcgggcgacctggagtggagtgctactgccagcatgattcaggagccgccgtgattcaattacagttcctgatcaacgaaggggcgttagtatccgcattggctgacgataccctgcacctgtggaatttacggcagaaaagacccgccatactacactctctgaagttctgccgagagagagttacgttctgccacctgccattccagtccaagtggctgtatgttgggacagaacgcggaaatatccacatcgtgaatgtggaatctttcactctgtctggctatgttatcatgtggaataaagccattgagctatcatctaagtcccaccctggccctgtggtacatatatccgataatccgatggacgaaggaaagctactgatcggctttgaatcagggacagtcgtgctttgggaccttaagtctaaaaaagcagattacagatatacttatgacgaagccatacattccgtagcctggcatcatgaagggaaacaatttatttgcagtcactccgacggaacgctaactatttggaatgtgcgcagccctgcgaagcccgtccaaacaatcactcctcacggcaagcagttgaaggacgggaagaaacccgagccctgtaaaccgatcctgaaggtggagttcaaaaccacacgctccggcgtttgttag

SEQ ID NO: 207870 - DNA, 3561 bp, synthetic construct
  misc_feature 1..3561: note = Description of Artificial Sequence: Synthetic coding sequence
  source 1..3561: mol_type = other DNA
atgaagaagttcaacttccggaaggtgctggacggcctgaccgcctcctcgcccggaagcggttcgagttccggttccaactctggaggaggcgccggttctggcagcgtgcacccagctggcaccgcgggagtgctgcgcgaggagattcaggaaacactgacttccgaatacttccagatctgtaagactgtgaggcatggattcccacatcagcccaccgcccttgccttcgacccagtccagaagattttggctataggcactcgaaccggcgccattcgaattcttggccgccctggcgttgactgctactgccaacacgagagtggggctgccgtgctgcagctgcagttccttatcaacgagggcgccttggtttccgccagctccgacgacactctgcacttgtggaacttacgacagaagagaccagccatcctgcactctcttaagttcaatagggagcggatcacatactgtcatctcccatttcaaagtaagtggctgtacgtcgggacagagcgcgggaacacacacatagtgaatattgagtctttcattctgagcggctacgtaatcatgtggaacaaggctatagagctctcaaccaagacccatcctggtcccgttgtccacttgtcagacagcccacgggacgaaggtaagcttctgatcgggtatgaaaacggcacagtcgtcttctgggacttgaagtccaagcgggcagaactgcgcgtgtactatgatgaagccatccattccattgactggcatcatgaagggaaacaattcatgtgtagccactcagacgggtctctcacactgtggaacttaaagagcccttcccgtccgttccagacaaccattccacatggcaaaagccaaagggaagggagaaagagtgagtcatgcaaaccgatactgaaagtggagtacaaaacttgtaagaacagcgagccctttattatctttagtggagggctgtcatacgataaggcatgccgccggccaagtctcaccatcatgcacggtaaggccattacggtccttgaaatggaccatccgattgttgagttccttacactgtgcgagaccccttatcctaacgagtttcaggaaccatacgcggtcgtcgtccttctggagaaggatttgatcgtagtggatctgacccagtcaaatttccctattttcgagaacccctaccccatggacatccacgagtcgcccgtgacttgcacagcttatttcgctgattgtccacccgatctcatcttggtgctttacagtatcggtgttaagcataaaaaacaagggtattccaataaagaatggcctatatcagggggcgcttggaacctcggtgctcagacctaccccgagataattattactgggcacgccgatggctcaatcaaattctgggatgcatctgcaatcactttgcagatgctatataagctcaagacctctaaagtatttgaaaaacaaaaagtcggggaaggaaagcagacatgcgaaattgttgaggaggaccctttcgccatccaaatgatctactggtgccccgaatcacggattttctgtgtgagcggagttagcgcctacgtaatcatctacaagttctccagacatgaaatcactaccgaaattgtctccctggaagtcagactgcaatacgacgtcgaggacataatcactcccgaacctgaaacctctcctccctttcctgacctctctgctcaacttccttcttctcgcagcttatctggtagcaccaataccgtggcctcagagggtgtgaccaaggattccatcccctgcctcaacgtaaagacacgtcccgtgcgtatgcctcctggataccaagcagaactcgtcattcagctggtttgggtggatggtgagcccccccagcagatcacaagcctcgcggtatccagtgcctatggaatcgtagccttcgggaattgtaacgggctggcagtagtggactttatacagaagactgtgctgttatccatgggcactatcgatctctaccggagttcagacctgtaccaaagacagccaagaagtccgcggaagaataagcagtttattgcagacaacttttgtatgagaggactgtccaatttctatcccgacctcaccaaacgcatccggacgtcttaccaaagcctgactgagctgaacgactcaccggtacccctcgaactggagagatgcaaaagtcctacctccgaccacgtcaacggccactgcacttcacctaccagtcagagttgctcctctggaaaaaggctgtcgagtgccgatgtttcgaaagtaaataggtgggggccagggcgcccacccttcaggaaagctcagtctgcggcctgcatggagatctctctacccgtgactaccgaggagaaccgggagaactcctacaacaggtcccgcagttcatccatctcctcaatagataaggacagtaaagaagccatcactgcgctgtattttatggatagtttcgcacgcaaaaacgatagcacaataagtccttgcctctttgtgggcacatcccttggcatggttctgataatctcactgaacctcccactggctgatgagcaacgcttcaccgagcccgtaatggtgcttcccagtggaactttcctcagtctgaagggcgccgtcctgaccttctcatgcatggaccggatggggggtctcatgcagcccccatacgaggtctggagggatccaaacaatatcgatgagaatgagaagagttggcgcagaaaggttgtgatgaattcttcaagcgcctcacaggaaatcggtgaccatcagtatactatcatttgttctgagaagcaagctaaagtgttttcacttccctcgcagacctgcctttacgtgcataatatcacagagacctcctttatcttgcaggctaatgtggtagtgatgtgctccagcgcctgcctggcgtgcttttgcgccaacgggcatatcatgataatgagcctcccctcactcaggcctatgctggatgtgaactacctgccattgacagacatgcggatcgcacggacattttgcttcacaaacgagggtcaggctctctatctggtgtctccaacagagattcagagacttacttattcacaggagatgtgtgataatctgcaggacatgttgggcgacctatttactccaatcgaaaccccggaggcacaaaataggggattcttgaaggggctgttcggaggtagcggccagacttttgatcgggaggagcttttcggagaagcctccgcagggaaggcctctagaagtcttgcccaacacatccccggccccgggtcgatcgaagggatgaaaggtgccgcaggcggggtgatgggagaactaacacgggctcgcattgccctcgatgagcgcggacaaaggttgggggagctggaggaaaagaccgctggcatgatgacatcagccgaggccttctctaaacacgcacatgaactcatgctgaaatacaaagataaaaagtggtaccagttctag

SEQ ID NO: 207871 - DNA, 384 bp, synthetic construct
  misc_feature 1..384: note = Description of Artificial Sequence: Synthetic coding sequence
  source 1..384: mol_type = other DNA
atgaagaagttcaacttccggaaggtgctggacggcctgaccgcctctagccctgggagcggctccagcagtggatcaaattccggcggcggcgcaggtagtggcagtgtccacccagccggcacagccggggtgctgagggaggagattcaggagacattaacttctgagtatttccagatctgcaagacagtccggcatgggttcccccatcagccgaccgctctcgcatttgatccggtgcagaaaatcctagctattggcacccgcactggcgccattcggattttgggacgccctggcgtggactgttactgtcagcatgagtcaggagccgccgtgcttcagttgcaatttttgatcaatgagggcgcattggtgtag

SEQ ID NO: 207872 - DNA, 633 bp, synthetic construct
  misc_feature 1..633: note = Description of Artificial Sequence: Synthetic coding sequence
  source 1..633: mol_type = other DNA
atgagcgccaagagcgccatcagcaaggagatcttcgcccccctggacgagagaatgctgggagcagtgcaggtgaagcgacgaactaagaagaaaattccctttctcgcaactggtggacagggcgagtatctaacgtacatttgtctctctgtgaccaacaaaaagcctacccaagctagcattaccaaggtcaagcagttcgaaggatctacctcattcgtccgacggtcacaatggatgttggaacagctgagacaggtaaatggcattgatccaaacggagactccgccgagttcgatttgctcttcgaaaacgccttcgatcagtgggtggcctcgaccgctagcgagaagtgtacatttttccaaatactgcatcatacatgccagagatatctgaccgatagaaagcctgaatttataaactgtcaatccaaaataatgggcggaaattccatcctgcacagtgctgcagattccgtaacctcggctgttcagaaggcatcccaggcattgaatgaacggggagagcggctcggcagagccgaagagaaaacggaagaccttaagaatagcgcccagcagtttgccgagaccgcacacaagttggccatgaagcataagtgctag

SEQ ID NO: 207873 - DNA, 633 bp, synthetic construct
  misc_feature 1..633: note = Description of Artificial Sequence: Synthetic coding sequence
  source 1..633: mol_type = other DNA
atgagcgccaagagcgccatcagcaaggagatcttcgcccccctggacgagcgcatgcttggtgctgtgcaggtcaaacgccgaacaaagaagaagatccccttcttagcgacaggcggtcagggcgagtaccttacctacatttgtctgagtgtgaccaacaagaaaccaactcaggcatccatcacaaaagtcaaacaatttgaaggcagcactagtttcgtgcgaagatcacagtggatgctggagcaacttcgccaggttaacgggatcgacccaaacggcgactctgccgagtttgacttactgttcgaaaatgccttcgaccaatgggttgccagtactgcctctgagaaatgcaccttttttcaaattcttcaccacacgtgccagagatatctgaccgaccgcaagccagaattcattaactgccagtccaagatcatgggcggaaactcaatcctgcatagcgcagcagattcggtgacatcggctgtccaaaaggccagccaggccctgaatgaaaggggggaacggctaggcagagccgaagagaaaacagaagatttgaagaattccgctcagcagttcgcagagaccgctcataaagtcactttccggggccgcaaatag

SEQ ID NO: 207874 - DNA, 633 bp, synthetic construct
  misc_feature 1..633: note = Description of Artificial Sequence: Synthetic coding sequence
  source 1..633: mol_type = other DNA
atgagcgccaagagcgccatcagcaaggagatcttcgcccccctggatgaacggatgctgggggcggtacaggtgaagcgccgcacaaagaagaaaatcccctttctcgccactggtggacagggtgagtatcttacttacatttgtctatccgtgaccaataaaaagccgacgcaagcttccattacaaaggtcaagcagttcgaaggctccacttcctttgtgcgtcgaagtcagtggatgctagagcaattgcgtcaggtcaacggaattgatcccaatggcgacagcgccgagtttgacttgctgttcgagaatgcctttgatcagtgggttgcaagtaccgcctccgaaaagtgcaccttttttcagatcttgcaccacacgtgtcagcgatacctgacagaccgcaaacccgaattcattaattgccagtctaagatcatggggggcaactctatcctacatagcgctgccgactccgtgacctctgccgtacaaaaggcatcacaagccctgaatgaaagaggtgagcggcttggtagggcagaggaaaagacagaagatctgaaaaactcagctcagcagttcgcggagaccgcccacaaactggccatgaaacacaagtgttag

SEQ ID NO: 207875 - DNA, 633 bp, synthetic construct
  misc_feature 1..633: note = Description of Artificial Sequence: Synthetic coding sequence
  source 1..633: mol_type = other DNA
atgagcgccaagagcgccatcagcaaggagatcttcgcccccctggatgagcgaatgctgggagccgttcaggtcaaaagacgtactaagaaaaaaatcccattcctggccacagggggacagggggaatatttgacttacatatgtctgtccgtgaccaacaaaaagcctactcaggccagcataacgaaagtgaaacagtttgagggctcaacatcatttgtgcggcgctctcaatggatgttggaacaactccggcaagtcaatggcatcgaccccaatggcgatagcgcagaattcgacctgctcttcgagaacgcattcgaccagtgggtcgcttctacagctagcgaaaagtgtaccttctttcaaatcctgcatcacacctgtcagcgctacttaacggacagaaaacctgagtttattaactgccaaagtaagatcatggggggcaactccatactccattctgccgccgactcagtaacgagtgctgtgcagaaagcttcacaagcacttaacgagaggggtgagaggcttggtcgagccgaagaaaagacggaagacttgaaaaattctgcccagcaatttgctgagaccgcacacaagcttgcaatgaagcacaaatgctag

SEQ ID NO: 207876 - DNA, 633 bp, synthetic construct
  misc_feature 1..633: note = Description of Artificial Sequence: Synthetic coding sequence
  source 1..633: mol_type = other DNA
atgagcgccaagagcgccatcagcaaggagatcttcgcccccctggatgagcgcatgctgggcgccgtgcaagtgaagaggaggaccaagaagaagatccctttcctagccacagggggacagggagagtacttaacatatatctgcttgagtgtcacaaataaaaagcccacccaagccagcattaccaaagtgaaacaatttgaagggtccacaagtttcgtgcgcaggtcccaatggatgctggaacagctgaggcaggtcaacggcatagacccaaatggtgattccgccgagtttgacctactattcgagaatgcatttgatcagtgggttgccagcactgcttcggagaagtgcactttcttccagatcctgcaccacacttgccagcgttaccttacggaccgtaaacccgaattcatcaactgtcagtccaaaataatgggcggcaactccatcctgcactccgcagccgacagtgttacgagcgccgtccagaaagccagtcaggccttgaacgaacggggtgaaaggctcggacgagctgaagagaaaacagaagacttgaaaaactcagcccagcagttcgctgagaccgctcataaattggctatgaagcataaatgctag

SEQ ID NO: 207877 - DNA, 327 bp, synthetic construct
  misc_feature 1..327: note = Description of Artificial Sequence: Synthetic coding sequence
  source 1..327: mol_type = other DNA
atgagcgcctgcttcctggacacccggcgggccgccttcctgcagtgtgatctcccttctagttacaggatcctgaccctaccggagtcagggcattgcggaagcgccgagcctgtgtcagatgcccctgcgttactcctaagtggaaacagcatccttcatagtgctgcagacagtgtgacctccgccgtgcaaaaggcttcacaggcactcaacgagcggggggagagactggggagagccgaggagaaaactgaagacctgaaaaattccgctcaacagttcgcagagacggcacacaaacttgcaatgaaacataagtgttag

SEQ ID NO: 207878 - DNA, 633 bp, synthetic construct
  misc_feature 1..633: note = Description of Artificial Sequence: Synthetic coding sequence
  source 1..633: mol_type = other DNA
atgagcgccaagagcgccatcagcaaggagatcttcgcccccctggatgagaggatgctgggcgccgttcaggtgaaaaggaggacaaaaaaaaaaatccccttcctcgccacaggaggtcagggggaatacctgacttacatctgtctgagcgtgaccaataaaaagcccacccaggcttctatcactaaagttaagcagtttgaagggtctactagtttcgtcaggcggtcccaatggatgctggaacaactgcgccaagtgaatggtattgatcccaatggggactccgccgagttcgatctgctgttcgagaacgctttcgatcaatgggtggctagcacagcatcagagaagtgcacattctttcagattctacaccatacctgccagagataccttaccgaccgcaagcccgagttcatcaactgccagtctaagatcatgggcgggaactccatactgcatagcgccgctgatagcgtgacttctgcagtacagaaggctagtcaggccctcaatgaacggggagagcggctgggacgagctgaggagaaaacagaagatctgaagaatagcgcccagcagtttgccgagacagctcacaagttggccatgaaacacaagtgctag

SEQ ID NO: 207879 - DNA, 633 bp, synthetic construct
  misc_feature 1..633: note = Description of Artificial Sequence: Synthetic coding sequence
  source 1..633: mol_type = other DNA
atgagcgccaagagcgccatcagcaaggagatcttcgcccccctggacgaacgaatgcttggagcagttcaggtgaagcgaagaaccaagaagaaaatcccctttctggccaccggaggccagggagagtatcttacttacatttgtctgtctgtgacaaacaagaaacctacacaagccagcattacgaaggttaagcagtttgaaggttccacatcattcgtgcggcggtcccagtggatgcttgagcagctaagacaggtgaacggtatagacccaaatggcgacagtgccgagtttgatctgctgtttgaaaacgcctttgatcagtgggttgcttctacagcctctgaaaaatgcacattttttcagatcctacaccacacctgccagagatacctaactgaccgcaaacctgaattcattaactgccagtccaaaattatgggaggtaatagtatcctgcattcagctgcggactcagtcacgagtgccgtacagaaggccagccaggctctgaacgaacgaggtgaaagactgggaagggccgaggagaaaaccgaggaccttaagaacagtgcccaacagttcgctgaaaccgcacacaaattggccatgaagcacaaatgctag

SEQ ID NO: 207880 - DNA, 1617 bp, synthetic construct
  misc_feature 1..1617: note = Description of Artificial Sequence: Synthetic coding sequence
  source 1..1617: mol_type = other DNA
atggccgtggccgccgccgccgccgccgccggccccgccggcgccggcggaggtagagcacagagatcaggcctgctagaggtgcttgtccgtgacaggtggcataaggtgctggtcaatctctctgaagatgctctggtactgtcctctgaagaaggcgccgcagcctacaacggcatcggcaccgcgactaatggctcattttgtcgcggagccggagccggacatccaggggctggtggtgcccagcctcccgactccccagctggcgtccggaccgccttcacggacctacctgagcaggtgcctgagagcatcagcaatcagaaaagaggcgtaaaagtgcttaagcaagagctggggggactcggcatctctattaaagggggaaaagagaataaaatgccaatcctgatcagcaagattttcaaaggactcgctgcagaccagacccaagctctatacgtcggagacgctattctttccgtaaatggcgctgatctccgcgatgctacccacgacgaagccgtacaagcgctgaaacgagccggaaaggaggtgctcctcgaggtgaaatatatgagggaagccaccccatacgttaaaaagggaagccctgtatctgaaattggttgggaaacaccccccccggagtctccccggcttgggggtagcacatcggaccccccttcctctcagagcttctcatttcacagagaccgcaagagcatcccgttaaagatgtgctatgtgacacgctctatggcacttgctgatcccgaaaatcgccaactcgagatacattcccccgatgctaagcatacagtgatcctgaggtcaaaagacagcgccaccgcccaggcctggttctcagccattcattccaatgtgaacgacctcctgacacgggtgattgcggaggtccgcgaacagctgggcaaaacgggcattgctgggtcacgcgagatccggcacctaggttggctcgcagagaaggttccaggggaatccaaaaagcagtggaaacctgcgttagtggtcctaactgagaaagatctcctgatctatgacagcatgccccgacgcaaagaagcttggttctctcctgtgcacacataccctctgctggctacaaggctcgtacattctggccctggtaaaggaagcccacaggcaggggtggacctcagctttgctacacggaccgggacgcgccaaggaatcgaaacccacttgttccgagcagagacctctagagatttgagtcattggacaagatccatagtgcagggttgtcataacagcgcagagctgatagcagagatcagtacagcttgcacttataaaaatcaggagtgcaggctgacaattcattatgaaaacggtttctcaatcacgaccgagccccaagaaggggcatttcctaagactatcattcagtcgccatacgaaaagctcaaaatgagttctgacgacggcatcagaatgctgtacctggacttcggggggaaagacggggagatccagctggacctccacagctgtcccaagcctatcgtcttcatcattcattcctttcttagcgcaaaaataactagactggggctcgtggcctag

SEQ ID NO: 207881 - DNA, 1617 bp, synthetic construct
  misc_feature 1..1617: note = Description of Artificial Sequence: Synthetic coding sequence
  source 1..1617: mol_type = other DNA
atggccgtggccgccgccgccgccgccgccggccccgccggcgccggtggcggtagagctcagcggtctggtctgttagaagtgcttgttcgcgacagatggcataaagtcctggtgaatctgtccgaggatgcacttgtcctgtcatcagaagaaggggctgcggcctacaacggaattggtacagccactaacgggtcgttttgccgtggcgccggtgctgggcacccaggggcagggggcgctcagccccccgactccccagctggcgtgaggactgcatttacagatcttcctgaacaggtcccagagagtatctccaaccaaaagcgcggcgtgaaagtgctgaaacaggaactcggaggtctgggcatcagcatcaagggagggaaggagaacaagatgcccattctcatttctaaaatcttcaagggcctcgccgcagaccaaacccaggcactgtatgttggggatgccatcttatccgttaatggggcagatctccgggatgccactcacgacgaagccgtgcaggcactgaagcgggccggtaaagaagtcttgctggaggtcaaatacatgcgtgaggccaccccatatgtgaaaaagggctctcccgtgtcggagatcggatgggagaccccgccccccgaatcgccaaggctgggcggctctacttccgaccccccctcttctcagtcatttagcttccacagggacaggaagtccatcccactgaagatgtgttatgtgacccgctcaatggctctcgccgatccagaaaaccggcagttggagattcattcccctgacgccaagcacaccgtgatactgagatccaaggattcagccacagcgcaggcctggtttagtgcaatccatagcaacgtgaacgacctcttgactagggtcattgccgaggtccgcgaacagctaggcaaaaccggaatcgctgggagcagggagataaggcatttaggatggctggcagagaaggtgcctggcgaatccaagaaacaatggaaacccgcattagtcgtcctgaccgaaaaggatctgctgatctacgacagcatgccaagaagaaaggaggcttggttttccccagtacacacctaccctctactggcaacacggcttgtgcattcggggccggggaaaggatccccccaagccggggttgacttatctttcgccacacgaacagggactagacaggggatcgagacacatttattccgcgccgagacttcaagggatctgtctcactggaccagatctatcgtccaaggctgtcataatagcgccgaactaatcgcagagatcagtaccgcctgtacatacaaaaaccaggagtgtagactaaccatccactatgagaacgggttctccatcactaccgaaccacaggagggcgcatttcccaagacgataattcagtccccctacgagaagctgaagatgtcctctgacgatggaatcagaatgctctacttagattttggcggaaaggatggcgagatccagttggatcttcattcctgccctaagccaattgtattcatcattcacagttttctatccgccaaaatcacgcgcctgggcctggtagcctag

SEQ ID NO: 207882 - DNA, 87 bp, synthetic construct
  misc_feature 1..87: note = Description of Artificial Sequence: Synthetic coding sequence
  source 1..87: mol_type = other DNA
atggccgtggccgccgccgccgccgccgccggccccgccggcgccggagggggcagagctcagcgttctggtctgctggaggtctag

SEQ ID NO: 207883 - DNA, 1623 bp, synthetic construct
  misc_feature 1..1623: note = Description of Artificial Sequence: Synthetic coding sequence
  source 1..1623: mol_type = other DNA
atgcgggtggccgccgccaccgccgccgccggcgccggccccgccatggcagtttggaccagggccaccaaggctggcctcgtcgagctactccttagagagcgctgggtgcgggtagtggcagagctttccggcgagagcctgagcctgactggcgatgccgctgctgccgaactggagcccgctctcggccccgccgcggccgccttcaacggactgccaaatggaggtggagctggcgactcgcttccaggcagcccgtccagggggctcgggccaccttcacccccagctcccccacgcggaccagccggtgaagctggcgcaagcccaccagtgagacgcgtacgcgtggtcaaacaggaagcaggagggttaggcatctccatcaagggaggaagagagaaccggatgcccatcctaatctccaagatcttccctggcctcgcagccgatcagagtagagcattgcggctgggcgacgcaatcctctctgtcaacgggacagacttgcgccaggccactcatgaccaagccgtccaagccctcaaacgggccgggaaagaggtcttgctggaggtaaaattcattagggaggttaccccctacattaagaaaccatctctcgtctccgacctgccctgggaaggggcagccccacagtccccgtcattctcagggtccgaggacagcgggtctccaaagcatcaaaacagcaccaaagatcgtaaaatcatccctctgaaaatgtgcttcgctgccaggaacttgtcaatgcccgatctagaaaacaggctcattgaactgcactcacccgacagccggaatactctcatacttagatgtaaggacaccgcaacggcccattcatggtttgttgccattcataccaacattatggcactgctcccccaggtgttagcagaactgaatgccatgttaggagccacgtcaacagcgggcggatctaaggaggttaaacacatcgcttggctcgctgagcaggccaaactcgatggaggtcgtcagcagtggcggcctgtgcttatggccgtgacggagaaggatctgctcctatatgactgtatgccttggacaagggatgcctgggcatctccctgtcactcttaccccctggtagccacacggttagtccacagtggaagcggctgtcggtctcctagcctggggtcagacttaacatttgccacgagaactgggagtagacagggcatcgagatgcacctgtttcgcgtggagacacatcgagacctatccagctggaccagaattttagtccaaggatgccacgcagctgctgaactcattaaagaggtgtcacttggctgcatgctgaacggccaggaggtacgactcaccattcactacgagaacggattcaccattagtcgggaaaatggaggcagcagctctatcctgtatcgatatccattcgagcgcctgaagatgtcagccgatgatggcatccgcaatttgtacctggactttggaggaccagagggagaattgaccatggatctccacagttgccccaaacccattgtgttcgtccttcacacattcctctcagcaaaagttacccggatgggactgctcgtatag

SEQ ID NO: 207884 - DNA, 1443 bp, synthetic construct
  misc_feature 1..1443: note = Description of Artificial Sequence: Synthetic coding sequence
  source 1..1443: mol_type = other DNA
atggacttccggaccgcctgcgaggagaccaagaccggcatctgcctcctgcaagatggtaaccaagaaccattcaaagtgcgattgcacttggcgaaagatatcctgatgatccaggagcaggatgttatctgcgtatctggtgaaccattctactccggtgagcgcacggttacaattaggcggcagaccgttggtggatttggactgtcgatcaaaggcggtgccgagcacaatattcctgttgtagtgagtaagatttcaaaagagcaaagagcagagctgtcagggttgctcttcatcggggacgccatcctgcagattaatggtataaatgtgaggaagtgccggcatgaggaggtggtgcaggtgcttcgcaatgccggcgaagaagtgacactgaccgtgtcctttcttaaaagagcccctgcttttctgaaacttccactgaatgaggactgcgcttgcgccccatccgaccagtcaagtggcacgtcaagtcctctatgtgattccggcttgcacctcaactatcaccccaataatactgatactctgtcctgttcttcttggcctacttccccaggacttcgttgggaaaaaaggtggtgcgacctgcgcctgattccccttttacatagccggttttctcagtatgtgccggggactgacctcagtcggcagaacgcgtttcaggtgatcgctgtggacggcgtctgtacaggcatcatccagtgtttatctgcggaagactgcgtcgactggctgcaagccatcgccactaatatatctaacctcaccaaacataatataaaaaagatcaacagaaatttccctgtgaaccagcaaatcgtctatatgggatggtgcgaggctagagagcaagatcctttacaggacagggtgtattccccaacgttcctcgctctacgagggtcgtgtctctacaagttcttagccccacccgtcaccacctgggactggacccgggctgaaaaaaccttttctgtatatgagattatgtgtaaaatattaaaagattccgacttgcttgacaggaggaaacagtgctttacagtgcagtctgagagcggagaggatctatatttttctgtggagttggaatctgacctggcgcagtgggagcgcgcctttcagacagccaccttcctggaggttgaaagaatccagtgtaagacatatgcttgcgttctcgaatcacaccttatggggctgaccattgactttagcaccggattcatttgttttgacgccgctacaaaggagttagagttctccaatttgtttgccgtcctccattgtatccactcttttttcgcagccaaggttgcatgcctggatccacttttcctgggcaatcaggccactgcatccacggcagcgtcaagcgcgaccacgtctaaggcaaaatacactacctag

SEQ ID NO: 207885 - DNA, 1443 bp, synthetic construct
  misc_feature 1..1443: note = Description of Artificial Sequence: Synthetic coding sequence
  source 1..1443: mol_type = other DNA
atggacttccggaccgcctgcgaggagaccaagaccggcatctgcctgctacaggatgggaaccaggagccgttcaaggttaggcttcatttggccaaggacatcctgatgattcaggagcaagatgtgatttgtgtctccggagagcccttctattccggcgaacgcactgtaactatccgcaggcagacagtcggggggttcggtctgagcatcaagggtggcgccgagcacaacatccccgttgttgtctctaaaatatctaaggagcagagggcggagctgagcggcctcctgtttatcggtgatgctatactgcagattaatggcatcaatgtgcggaagtgccggcacgaagaagtagtccaggttcttcggaatgcgggggaggaagtcaccctcactgtttcgttcttgaagcgcgcaccggcctttttgaagctgccactaaacgaggactgtgcgtgcgcacccagtgaccagagttccggtaccagttctcctctctgcgactctgggttacacctcaactaccatccaaataatactgatactctgtcatgctccagctggccgacgtctcccggattacgatgggagaagcggtggtgcgaccttcgcctaatcccgcttctacattctcggttttcccagtatgtacctggtaccgatctgtctcggcaaaatgccttccaagtcattgcagtagatggagtgtgcacggggattatccagtgccttagtgcagaagactgtgtggactggctccaggccattgcaacaaatatatccaacctgactaagcataatataaaaaagatcaatcgcaatttccccgtcaaccagcaaatagtttacatgggttggtgtgaggcaagggaacaagatcccctgcaagaccgcgtctactccccaaccttcttggctttgcgcggctcatgtctatacaagttccttgcaccccccgtgactacttgggactggacaagggcagaaaagacattctcagtgtatgaaatcatgtgtaagattttaaaagattcagatttgctggaccgtcgcaaacagtgctttactgtgcagagtgagtctggggaggatctgtactttagcgttgaactggaatcagatctggctcagtgggaacgggccttccagactgccacgttcctcgaggtggagcggattcagtgtaaaacctatgcttgcgtgttggagtctcacctaatggggctgacaatagatttctccacaggattcatttgttttgacgcggccactaaggagctggaattcagtaacctcttcgcagtcctgcattgtatccatagttttttcgctgccaaggtagcttgcctggatccattattcttgggcaatcaggcgaccgcgtcaacagcagcatccagcgccaccactagcaaagccaagtacacaacctag

SEQ ID NO: 207886 - DNA, 1554 bp, synthetic construct
  misc_feature 1..1554: note = Description of Artificial Sequence: Synthetic coding sequence
  source 1..1554: mol_type = other DNA
atggacttccggaccgcctgcgaggagaccaagaccggcatctgcctcctgcaggacggtaatcaggagccatttaaggtgcggctgcacctagccaaagacatcctgatgatacaggagcaagacgtgatctgcgtgagtggcgagcccttttacagtggtgagcgcacggtcaccatcaggcgacagacagtcggaggctttggtttgtcgattaaagggggggccgaacacaatattcccgtggtggtttcaaaaatcagcaaagaacagagagccgagctatcgggcttactgttcatcggcgacgctatactgcagattaacggcataaatgtgcgcaagtgtcgacatgaggaagtggtgcaggtgctcagaaatgccggtgaggaggtaaccctgaccgttagctttctgaaacgcgcccctgcattcctgaagctgccccttaacgaggactgcgcttgcgcccccagcgaccaatccagtgggacatctagcccgctatgcgattccggtctccacctgaactatcatcctaataatactgatacgctgagttgctctagctggcccactagtcccggactgcgttgggaaaaaaggtggtgcgatctccgcttaattcctcttctgcacagtcggttttcacagtacgtgcctggaactgacctgagcaggcagaatgccttccaagttatcgctgttgacggggtgtgcacaggcataatccagtgcttgagcgccgaggattgcgtggactggcttcaggctatagccacgaacatctcaaacctgaccaagcataacattaagaagatcaaccgcaacttccccgtcaaccagcagattgtgtatatgggatggtgcgaggccagagagcaggaccctctgcaagatcgtgtatactcccccactttcttggcattacgagggtcatgtctctataagtttttggctccacctgtgacgacatgggattggactagggccgaaaaaacgttctctgtgtacgagatcatgtgcaagatactgaaagactccgatctgctcgaccggcgtaagcaatgttttaccgtccagtccgaaagtggagaagacctgtacttctctgtggaacttgagtcagatctggcacagtgggaacgggcattccagacagcaacatttctcgaggtcgagaggatacaatgtaaaacttacgcgtgcgttttagaaagtcacttaatgggacttacgattgatttttcgacagggtttatctgttttgacgctgcgaccaaagccgtgctgtggaggtataagttctcccagctgaagggatcctccgacgatggcaaaagcaagattaagtttctgtttcagaaccctgatacgaagcagatcgaggcaaaagagctggaattcagcaatctcttcgctgtcctgcattgcattcacagcttctttgccgccaaagtggcatgcctagacccactgtttctgggcaatcaggctacggccagtacagccgctagcagcgctaccacctccaaggccaagtataccacctag

SEQ ID NO: 207887 - DNA, 1554 bp, synthetic construct
  misc_feature 1..1554: note = Description of Artificial Sequence: Synthetic coding sequence
  source 1..1554: mol_type = other DNA
atggacttccggaccgcctgcgaggagaccaagaccggcatctgcttactgcaagacggtaatcaagaaccgttcaaggtccggttgcacctggcaaaggatatactaatgattcaagagcaagatgtcatttgcgtctcaggtgaacccttttatagtggagagagaacagtaactatccgtcggcagaccgtcggaggctttggtctatcgattaaggggggcgctgaacacaacatccccgtggtggtcagcaaaatctcgaaggaacaacgggctgagctttctgggcttctgttcatcggcgatgccatcctgcagattaacggcattaacgtgagaaaatgccggcacgaagaggttgtccaggtgctccgaaacgctggtgaagaagtaaccttaactgtctcatttcttaagcgggctcccgcttttctgaagctaccattaaacgaagattgtgcctgcgccccttccgaccagtcttccggcacaagtagccctctgtgtgatagcgggctacacctgaattaccatcccaataacactgatacgctcagctgctcaagctggcctacttctcccggcctgcggtgggagaagagatggtgcgatctcagactaattccactgctgcacagtagattttcacagtacgtgcctggaaccgatctgagtagacaaaacgctttccaggtgattgccgttgatggcgtctgcacagggataatccagtgtctcagcgccgaggactgcgtggactggctgcaggccattgcaacaaatatctctaatttgactaaacataacattaagaaaattaataggaactttccagtgaaccagcagatcgtatatatggggtggtgcgaagccagggaacaggaccctttacaggatcgagtgtacagccctacctttctagccctccgcgggagctgtctgtacaaatttctggcaccgccggtgacaacctgggattggacccgggccgagaaaaccttctcagtctacgaaatcatgtgcaaaattctgaaagatagtgaccttttagacaggagaaaacagtgctttactgtgcagagtgaaagtggagaggatctctatttcagcgtggaactcgaaagcgacctcgctcaatgggaaagagctttccaaactgcaacctttctcgaggtggagcgtattcagtgcaaaacatatgcctgcgtgcttgaatcacacctgatgggactcacaattgatttcagcactgggttcatatgtttcgacgctgccactaaagccgtgctgtggaggtataagttctcacagctgaagggtagctctgatgatgggaaatcaaagatcaaattcctgttccagaacccagatacaaaacagatcgaggctaaagaactggagttttctaatctttttgccgtcttacactgcatacatagcttctttgctgcaaaggtggcctgcctggatcctctgtttctcggtaatcaggctactgccagcaccgctgcttctagtgccacgacatcaaaggccaaatataccacctag

SEQ ID NO: 207888 - DNA, 279 bp, synthetic construct
  misc_feature 1..279: note = Description of Artificial Sequence: Synthetic coding sequence
  source 1..279: mol_type = other DNA
atggacttccggaccgcctgcgaggagaccaagaccggcatctgcctgttgcaggacggaaaccaggaaccattcaaggtgagactgcaccttgccaaagacatcctgatgattcaggagcaggatgtgatttgcgtgtctggtgagcctttctactctggagaaaggaccgtgactattagaaggcagactgtgggcggattcggcctgagtatcaagggtggtgcagagcacaatatacccgttgtggtctccaaaatcagtaaagagcaaaggtag

SEQ ID NO: 207889 - DNA, 423 bp, synthetic construct
  misc_feature 1..423: note = Description of Artificial Sequence: Synthetic coding sequence
  source 1..423: mol_type = other DNA
atggacgtgttcatgaagggcctgagcaaggccaaggagggcgtggtcgctgccgccgaaaaaaccaaacaaggcgtagccgaagctgccggcaagactaaagaaggcgtgctttatgtcggctccaagaccaaagagggcgtcgtgcacggcgttgcaactgtagccgagaaaaccaaagaacaggtcaccaacgttggcggcgcggttgtcaccggggtaaccgccgttgcgcaaaaaacagttgagggcgcgggctccatagctgctgccacgggatttgtcaagaaagatcagctcggaaagaatgaggagggggctccacaggagggcattcttgaggacatgccagtcgaccctgacaatgaagcttatgagatgcccagtgaggaaggctaccaggactatgaacctgaggcctag

SEQ ID NO: 207890 - DNA, 339 bp, synthetic construct
  misc_feature 1..339: note = Description of Artificial Sequence: Synthetic coding sequence
  source 1..339: mol_type = other DNA
atggacgtgttcatgaagggcctgagcaaggccaaggagggcgtggtggcagctgccgaaaaaaccaagcaaggggtagccgaggctgcaggtaagaccaaggaaggtgtactttacgtgggttctaaaactaaggagggcgtcgtgcatggggttgccaccgtggccgaaaagacaaaggaacaggtgaccaacgtcggaggggcagtggttaccggcgtgacagctgtggcgcagaagacagtagaaggtgctggatctatcgcagctgctactggatttgtgaagaaggatcaactgggtaaggaaggttaccaagactatgagcccgaagcctag

SEQ ID NO: 207891 - DNA, 423 bp, synthetic construct
  misc_feature 1..423: note = Description of Artificial Sequence: Synthetic coding sequence
  source 1..423: mol_type = other DNA
atggacgtgttcatgaagggcctgagcaaggccaaggagggcgtggtggcggccgcagaaaaaacgaaacaaggcgttgccgaggccgcaggtaaaaccaaagagggcgtgctgtatgtgggttcaaaaaccaaggaaggagttgttcatggtgtggcaacagttgcagagaaaactaaggagcaggttacaaacgttgggggggctgtggtgacgggagtaacagcagttgcacaaaaaaccgtagagggtgctggcagtatagctgccgccactggcttcgttaaaaaggatcaactagggaagaatgaggaaggagctccacaagagggtatattagaggatatgccagtcgatcccgataatgaggcttacgaaatgccctctgaggagggataccaagactatgaacctgaggcctag

SEQ ID NO: 207892 - DNA, 381 bp, synthetic construct
  misc_feature 1..381: note = Description of Artificial Sequence: Synthetic coding sequence
  source 1..381: mol_type = other DNA
atggacgtgttcatgaagggcctgagcaaggccaaggagggcgtggtagcagcggccgagaagacaaaacaaggagtcgcagaggctgcaggcaaaaccaaagagggtgttttgtatgtcgtggctgagaaaaccaaggagcaagtgacaaatgtaggcggggccgtggtgacgggggtgacagcagtggcacagaagacagtcgagggagctggcagcattgcggcagccacgggctttgttaaaaaggatcagctaggaaagaatgaggaaggtgcgccccaggagggcattctggaggatatgccagtggatccagacaatgaagcctatgagatgccttcagaggagggttaccaggactacgaacccgaggcatag

SEQ ID NO: 207893 - DNA, 423 bp, synthetic construct
  misc_feature 1..423: note = Description of Artificial Sequence: Synthetic coding sequence
  source 1..423: mol_type = other DNA
atggacgtgttcatgaagggcctgagcaaggccaaggagggcgtggtcgctgccgctgagaaaaccaaacagggagtcgctgaggccgcaggaaagacaaaagagggggtgctgtacgtgggaagcaagaccaaagagggtgtcgtgcacggagtcgccaccgtcgctgagaagacaaaggaacaggtcacaaatgtcggcggtgcggtcgtaaccggggtgaccgccgtcgctcagaagactgtggagggtgcgggatctattgctgccgcaaccggtttcgttaaaaaagatcagctgggaaagaatgaggaaggcgccccacaagagggaattctcgaagatatgccagtcgaccctgacaacgaggcatatgagatgccctccgaggagggttaccaggactacgagccagaagcgtag

SEQ ID NO: 207894 - DNA, 339 bp, synthetic construct
  misc_feature 1..339: note = Description of Artificial Sequence: Synthetic coding sequence
  source 1..339: mol_type = other DNA
atggacgtgttcatgaagggcctgagcaaggccaaggagggcgtggtggccgccgctgagaagaccaagcagggcgttgccgaagccgctggaaagactaaagaaggtgtcctatatgtcgggagcaagaccaaagaaggggtcgtccacggagtcgccacagtcgcagagaaaacaaaggagcaggttacaaacgtgggtggagccgtggtgactggcgtgaccgcagtagcccaaaaaacagtggagggagcaggaagtatcgcggccgctacaggttttgtcaagaaggaccagttaggaaaagaagggtaccaagattatgagcctgaagcttag

SEQ ID NO: 207895 - DNA, 348 bp, synthetic construct
  misc_feature 1..348: note = Description of Artificial Sequence: Synthetic coding sequence
  source 1..348: mol_type = other DNA
atggacgtgttcatgaagggcctgagcaaggccaaggagggcgtggtggctgctgctgaaaaaaccaagcaaggcgtcgcagaggccgctggtaagactaaagagggtgttctgtatgtgggttctaaaacaaaagaaggtgtggtgcatggcgtggcaaccgtcgccgagaagactaaagagcaggtgactaacgttggaggtgcggtagtgaccggagtaacggcggtagcacagaaaaccgttgaaggtgctggcagcatcgcggctgcaaccggcttcgtgaagaaagatcaactgggcaaagtatggctgtgtaccttctgtgtcacctttatttcctggtag

SEQ ID NO: 207896 - DNA, 381 bp, synthetic construct
  misc_feature 1..381: note = Description of Artificial Sequence: Synthetic coding sequence
  source 1..381: mol_type = other DNA
atggacgtgttcatgaagggcctgagcaaggccaaggagggcgtggtcgccgccgcagagaaaacaaagcagggcgtggccgaggcggcggggaaaaccaaagaaggagtgctgtacgtcgttgccgagaaaactaaagagcaggtgactaacgtgggcggtgccgtggttacaggagtgactgccgtggctcagaaaaccgtcgaaggggcagggtccatcgcagcggccaccggcttcgttaagaaagatcagttgggaaaaaacgaggagggggccccccaggagggcatcctggaggacatgcctgtagatcctgacaacgaagcctacgagatgccatccgaggaaggttaccaagactatgagccggaagcgtag

SEQ ID NO: 207897 - DNA, 423 bp, synthetic construct
  misc_feature 1..423: note = Description of Artificial Sequence: Synthetic coding sequence
  source 1..423: mol_type = other DNA
atggacgtgttcatgaagggcctgagcaaggccaaggagggcgtggtggctgcggcagaaaagactaaacagggtgtggccgaggctgcggggaaaaccaaggaaggtgtgctgtacgtgggctcaaaaaccaaagagggggttgttcatggggttgccactgtggccgagaagaccaaagaacaggtgacgaacgttggcggtgccgtagttaccggagtgaccgccgtggcccagaagacagtcgagggagcaggttcaatcgccgctgcaaccggttttgtgaagaaagaccagctggggaagaacgaggagggcgctcctcaggaaggcatcctcgaggatatgccagtggaccctgataatgaggcctatgagatgcccagcgaggagggctatcaggattacgagccggaggcatag

SEQ ID NO: 207898 - DNA, 204 bp, synthetic construct
  misc_feature 1..204: note = Description of Artificial Sequence: Synthetic coding sequence
  source 1..204: mol_type = other DNA
atggacgtgttcatgaagggcctgagcaaggccaaggagggcgtggttgccgcagcagagaagactaagcaaggcgtggctgaggctgctggaaaaactaaagaaggcgtgctgtacgtgggtagtaaaacaaaggaaggtgtcgtccatggggtggctactgtcgctgagaagaccaaggaacaggtgaccaacgtggggtag

SEQ ID NO: 207899 - DNA, 423 bp, synthetic construct
  misc_feature 1..423: note = Description of Artificial Sequence: Synthetic coding sequence
  source 1..423: mol_type = other DNA
atggacgtgttcatgaagggcctgagcaaggccaaggagggcgtggtggcagccgcggaaaaaacaaaacagggagtcgccgaggccgcaggcaaaacaaaggaaggcgtgctgtatgtgggaagtaagaccaaggagggcgtggtgcatggagtcgcaacagtagccgagaaaaccaaggaacaggtgacgaatgtcggcggtgcagtggtgaccggcgtaactgctgttgcacaaaagacggtcgaaggtgccggctcgattgctgccgcgacagggttcgtgaaaaaggaccagctgggtaagaacgaagagggcgcgcctcaggaaggcatccttgaagatatgcctgttgatcctgacaacgaagcctacgagatgccatctgaagaagggtaccaagattacgagcctgaagcttag

SEQ ID NO: 207900 - DNA, 2760 bp, synthetic construct
  misc_feature 1..2760: note = Description of Artificial Sequence: Synthetic coding sequence
  source 1..2760: mol_type = other DNA
atggaggcccccgagtacctggacctggacgagatcgacttcagcgacgatataagctactctgtaacctctctcaaaacaatccctgaactatgtcggcggtgcgatactcagaatgaggacagaagtgtttccagcagctcatggaattgtgggatttcgaccctgatcacaaacacccaaaagcccacaggtattgcggacgtgtattctaaattccgccccgtgaaacgggtcagtcccctgaagcaccagcccgaaacactggagaacaatgagagcgatgatcaaaaaaatcagaaggttgtggaataccaaaagggaggagaaagcgaccttggtccccagccccaggaactaggacctggcgatggcgtaggggggcctcccggcaagagctctgaacctagcacctctttaggggagcttgagcattacgatttggacatggacgaaattctggacgttccgtacatcaagtctagtcagcagctcgcctctttcaccaaagtcacaagtgagaagagaattctgggattatgcacgaccataaatgggctcagcgggaaagcctgctctaccggtagctccgaaagtagttctagtaatatggctcccttttgcgttttatccccagtgaaatctccccatctacgaaaggcttccgctgttatccacgatcagcataagctctccacggaggagacggaaatttcaccacccctggtaaagtgtggttccgcatacgaacccgagaaccagtcaaaagactttcttaataagacattctcagatcctcacggccggaaggtggagaagacgaccccggactgccagctgcgggcttttcatctgcagagctccgccgctgaaagcaagcctgaggaacaggtgtcaggtctgaaccgaacatcctcacagggaccagaggaaagaagtgagtacctaaaaaaggttaagagtatcctgaatatcgtcaaagaggggcagatttcactactgcctcacttagcggctgataatctggacaagattcatgatgagaacgggaacaatctcctgcatatagccgccagccaaggtcatgctgagtgtcttcagcacctcacttctctaatgggcgaggactgtttgaacgagagaaataccgagaagctgacacctgcgggtctcgccattaagaacggccagctggaatgcgtgaggtggatggtgtctgagacagaggccatagctgagctctcatgttccaaagacttcccctctctcattcactatgccgggtgttacggccaggaaaagatcctcctgtggttactgcagttcatgcaggaacagggtatcagcttggacgaggtggatcaagatggcaactccgctgtgcacgtcgctagccagcatggctatctcggctgtattcagaccctggtcgagtatggtgctaatgttactatgcagaaccacgcgggcgagaagccctcacagagcgcggaacgtcagggccacacactgtgctcacgctatctggttgtggtggaaacttgcatgtctcttgcctcccaagtcgtcaagctaacgaaacagctgaaagagcagacagtggaaagagtgactctacagaaccagctacaacaattccttgaagcgcagaaaagtgaaggtaaatccctccctagctctcctagctctccctccagtccagctagtagaaaaagccagtggaagtctccagacgctgacgacgactcagttgctaaatctaagccaggggtacaagagggtatccaggtcctaggatctctgagcgccagttcgagagctaggccaaaagctaaggacgaagatagcgataaaattctgcgacagctcctgggcaaagagatcagcgagaatgtctgcacacaggaaaagctttcactggagttccaggacgcccaagcctcaagcagaaattctaagaaaattccactcgaaaagcgagagctgaagctggcccgactgcggcaacttatgcagaggagcctgagtgagtctgatactgactcaaataattctgaggaccccaagaccacacctgtaagaaaagcggatcgtccacggcctcagcccatcgttgagtccgtggagagcatggatagcgcagaatccctgcaccttatgattaagaagcacacacttgcctccggcggtagacgttttcccttcagtataaaggcgtctaaaagcttggacggacactcccccagcccaacgagcgaaagcagcgaacctgacttagaatctcagtatcctggctctggatctatccctccaaaccagcctagtggcgatccacaacagcccagcccggatagtaccgccgcacagaaagtggcaacaagcccaaagtccgcacttaagtcccctagtagcaagagacggaccagccaaaatctgaagttgagggtgaccttcgaagaaccagtcgtgcaaatggaacagccgagcctcgaattaaacggcgaaaaggacaaggacaagggcaggacattgcagcggacttcaaccagcaatgagtccggtgaccagcttaaaaggcctttcggagctttccgcagtatcatggagactctgagtggcaatcagaataacaacaacaattatcaggctgccaatcagctgaaaacgagcaccctgcctttgactagtctgggccgaaagacagacgctaaagggaacccagctagttccgcctctaaaggtaagaacaaagcagcatag

SEQ ID NO: 207901 - DNA, 3051 bp, synthetic construct
  misc_feature 1..3051: note = Description of Artificial Sequence: Synthetic coding sequence
  source 1..3051: mol_type = other DNA
atggaggcccccgagtacctggacctggacgagatcgacttcagcgacgacatatcagacaaccgcagtcagggtaaccggctgcagaaactggggctggaagatactgatcgggaggatgctatgggtttcgggagccatagggccaaattgactgtggttgcagccttaggagcctgtcactgcccggagaacgagtattctgtgacaagtctgaagacaattcctgagttgtgccgccggtgtgatacccagaatgaagaccggtctgttagctcctctagttggaactgtgggatctccactttgatcactaatacacagaagcctactgggatcgccgacgtctattctaaatttcggccggtcaagcgggtgagccccctgaaacaccagcccgagaccttggaaaataatgagagtgatgaccagaaaaaccaaaaagtcgtggagtaccagaagggcggcgaaagtgatctgggccctcagccacaggaacttggacccggtgatggagtggggggcccacctggtaagagcagcgagccttctacttccctcggagaactggagcactatgacctggatatggacgagatattggacgtgccttacattaaatcaagccagcaattagcttcttttacgaaggtaacatctgaaaaaagaattctggggctgtgcacaactattaacgggctgtcaggtaaggcttgcagcaccggaagttcagagagcagtagtagcaacatggctcctttctgtgtactgtctcccgtcaagtcgccccacctccggaaagccagcgccgtcatccatgatcaacacaaactctcgaccgaagagaccgagatctccccacctctggttaaatgtggttccgcctatgaacccgagaaccagagtaaagactttttaaacaagaccttctcagacccgcacggcaggaaggttgagaaaacaacacctgactgtcagctgcgggcctttcatctccagagtagtgcagccgagtccaaacccgaggaacaggtaagcggactcaatcggaccagcagtcaaggacccgaggaacggtccgagtacctcaagaaggtgaaatcgattctgaacatagtaaaagagggccagatctcccttcttccacatcttgctgcggacaatttggataagattcatgatgagaatggaaacaatttgctgcacatagcagcttcccaggggcatgctgaatgtttgcaacacctgacgtcacttatgggtgaggactgtctgaacgaaaggaatacagagaaactgacaccggccggtcttgcaatcaaaaatgggcagctggagtgcgttcggtggatggtctccgagaccgaagccatagccgagctgtcatgttcaaaagacttcccctctctgattcattacgctgggtgttatgggcaggagaagattttactttggctgctgcagtttatgcaagagcagggaatctctctggatgaagtggatcaggatggcaattccgctgtccacgttgcatcccaacacggctacctggggtgcatccagacgctcgttgaatatggtgctaatgtcactatgcaaaatcatgccggagagaaacctagccagagcgccgagaggcagggccacactctgtgcagcaggtacctggttgtggtggaaacctgcatgtcactggccagtcaggtggttaagttgaccaagcaacttaaagagcagactgtcgagagggtgacactgcagaaccaactgcagcagtttttagaagcccaaaaaagtgagggcaagagcctgccatcatcacctagtagtcctagttcccccgctagccgcaagagccaatggaagtcccccgacgccgacgatgactccgtggccaaatcaaaaccgggggtgcaggaagggattcaggtgctcgggtccctgtccgcgagctctagagcgcggcccaaggccaaggatgaagactcggataaaattttaaggcagctactgggtaaggagatttccgagaatgtgtgcacgcaggagaagctgagcctggagtttcaggacgctcaagcctcatcacggaactcgaagaagataccacttgagaaacgcgagctgaagctggcccgcctccgacagttgatgcagcgttctctgtcggagtctgacaccgatagcaacaactccgaggatcctaagacaacacctgtacgtaaggctgaccgccctcgtccacagcccatcgttgaatctgtggaaagtatggactctgctgaatcactgcatctgatgattaaaaagcatacactggcctcaggggggcggagatttccgttctctatcaaggccagtaaatctctggatgggcactccccatctcccaccagcgagagttccgaacccgatcttgaatcacagtatccagggagtggctcaatcccgcctaaccagccctccggcgatccgcagcagccttctccagattccacagcagcccagaaggtagcaacctcccctaaaagcgccctgaagtctcctagctcgaagagaaggaccagccagaatctgaaactacgtgtgacttttgaggaaccagtggtgcaaatggagcaaccttccctggaactcaacggcgaaaaggataaggacaaagggcggaccctacaaaggaccagcacctctaatgaaagcggagatcagctgaagcgcccatttggagcatttagaagcattatggagaccctaagtggaaaccaaaataataacaataactatcaggctgccaatcaactcaaaactagtacattgccattgacgagtctgggcagaaagaccgatgcaaaaggtaatccagcttctagcgcgagcaagggcaagaataaagccgaaatgtatagcagttgcatcaatctcagctcaaatatgcttattgaggagcacctgtgcaatgatacccgccacaacgacattaaccgcaagatgaagaaatcgtactcgataaaacacattgcagagccggaatccaaggaactctttctgtag

SEQ ID NO: 207902 - DNA, 2580 bp, synthetic construct
  misc_feature 1..2580: note = Description of Artificial Sequence: Synthetic coding sequence
  source 1..2580: mol_type = other DNA
atggaggcccccgagtacctggacctggacgagatcgacttcagcgacgacatctcctactccgttaccagtctgaaaacaattcccgaattatgtagaagatgtgacactcagaacgaggatcgcagcgttagctcatcatcttggaactgtggcatttctactctcataaccaacacacagaaacctacggggatcgctgatgtctattctaagtttcgtcctgtgaagagagtgtctccacttaagcaccaaccggaaaccttggaaaataatgaaagtgacgatcaaaaaaaccagaaagtagtggagtatcagaaaggtggcgagtctgacctcgggcctcagccccaagagctgggtcctggcgacggcgtgggaggtccacccggtaagtctagtgagccctcaacgtcattgggtgagctggagcactatgacctcgatatggacgagattctggacgtgccatatatcaagagcagccagcagctagcctcattcaccaaggtaacctccgagaagagaatcttggggctttgtactaccatcaacggactgagtggcaaagcatgcagtacaggaagttcagagtccagtagcagtaatatggcgcctttttgcgtcctttctccagttaagtctcctcatctgagaaaagcttcagctgttatccacgatcaacacaagctctctacagaggagacagaaatctcccccccgctcgtgaagtgcgggagtgcatacgaacctgagaaccaatccaaagacttcctgaacaaaaccttttcggacccacacggacgcaaagtcgagaagacaacccctgattgtcaactgagagcttttcacctccagtcgtctgctgccgagtccaagcccgaggaacaggtgagcggactcaatcggacaagctctcaaggtcctgaggaaagatccgagtacctaaagaaagtgaagagcatactaaatattgtcaaagagggacaaatctcactgctgaacggacagctcgagtgcgtgaggtggatggtatccgaaaccgaagccatcgctgaattgtcctgctccaaggatttcccatcccttatccactacgcaggatgttatgggcaagagaaaattttgctgtggttactccagttcatgcaggagcaaggaatcagcctggacgaagttgaccaggacggtaacagcgcggtgcacgttgcttcccagcacggctacttaggctgtattcagaccctcgtcgaatatggggcaaacgttaccatgcaaaatcacgcgggcgagaagccctcacagtcggccgaacgacagggacataccctgtgctctagatacctggtcgtggtcgagacatgcatgagccttgcatcgcaagtcgtcaagctcaccaaacaacttaaagagcaaaccgttgaaagagtgacgctacaaaaccagctccagcagtttctggaggcccagaaatctgaaggaaagagcctgcctagtagtccctcttccccatcaagccccgcaagccgcaagagtcagtggaagtcccctgatgccgacgatgactctgtcgctaagtccaaaccaggtgtccaggagggaatccaggtactgggaagcctcagcgcctccagtcgtgcgcgacctaaggctaaagacgaggactccgacaaaatccttaggcaactgctggggaaggagatttcggaaaacgtttgcacacaggaaaaattgtccctggaatttcaagatgcgcaggctagttctaggaactcgaaaaaaataccccttgagaagcgcgagcttaagctggcaagattacgacagctgatgcagagatcccttagcgagtcagatacagactctaataacagcgaggacccaaagactaccccagtgcgtaaagccgatagacctagaccgcagcctattgttgaatcggttgaaagcatggatagcgccgaaagccttcacctgatgatcaaaaaacacacgttggcttcaggcggccggcggttcccatttagcattaaagcaagtaagtccctggatggccattctccgtctccaacttccgagagtagtgagcctgatttggagtctcagtacccagggtctggctctatcccacccaaccagccatctggggatccacagcagccctcaccagactcaaccgcagcacagaaggtcgctaccagccccaagagtgcactcaagtctccatcttctaagagacggactagtcagaacctgaaactccgagtcaccttcgaggagcctgtagtacaaatggagcaaccttctctggaactgaatggagaaaaggacaaggataagggacggaccctccaacgaacctcaactagtaatgaatcaggcgatcagctgaagcgtccctttggggctttcaggtccattatggagaccctatcagggaatcagaacaacaataacaactaccaagccgccaaccagctgaagacgagtaccctccctctgaccagtctgggacgcaagaccgatgcgaaaggaaacccagcatcttctgcttcaaagggcaagaataaagcagcatag

SEQ ID NO: 207903 - DNA, 1812 bp, synthetic construct
  misc_feature 1..1812: note = Description of Artificial Sequence: Synthetic coding sequence
  source 1..1812: mol_type = other DNA
atgacctacctgatccagagccaccacagccggcggagccagaactgtgcagaggacgtgattcgcaagacaaaaacagaccaaaacggccaattggaatgtgtgcggtggatggtgtcagagactgaagcaatcgcggagcttagctgttccaaagatttcccttctctgattcactatgcagggtgttatgggcaggaaaagatactgctttggctactgcaatttatgcaggaacaggggatttccctggacgaggtcgaccaggatggtaacagcgcggtgcacgttgccagccagcacgggtacctaggttgcatccagactctggtggagtacggggccaacgttaccatgcaaaatcacgccggagaaaaaccctcacagagcgcagaaaggcaagggcatactctctgtagccgatatctggtagtggtggaaacgtgtatgagcctagcttcccaggtcgttaagctgactaagcagctgaaggaacagaccgtggaacgggtgacactgcaaaatcagctgcagcaattcctcgaggcccagaagtccgaagggaagtcactgcccagttcccctagtagcccatccagtccggcttcccgcaagtcccaatggaagagcccagacgccgatgacgattctgtggccaaaagtaaaccaggagtgcaggaaggcatacaggttctggggagtcttagtgcttcatcccgcgcccgcccaaaagcaaaagatgaagacagcgacaagatcctcagacagcttctgggcaaggaaatttctgagaacgtatgcacacaagagaagctaagtctggagttccaggatgctcaggcctcctcacgaaactctaaaaaaatccctttggaaaaacgtgagctgaagctcgcccgcctgcgacagctgatgcaacggagcttgagtgaatccgatactgatagtaataactccgaggatcccaaaaccactcccgttcgcaaggctgatcgcccccgaccgcaaccgattgtggaatctgttgaatctatggacagcgctgaaagtctccatctaatgattaagaaacacacattagccagtgggggacgaagattcccattctcgatcaaagcaagcaagtcactggacgggcattccccctctccaactagcgagtcctcagagccagacctagaaagccagtacccaggaagcggctctatccctccgaaccagccctctggagacccgcagcagcccagccccgattctactgccgctcagaaagtagcaactagcccgaagtccgctctcaaaagccccagctccaaaaggcgcacaagccagaatttgaaacttcgcgtgacttttgaggaacctgtcgtccagatggaacagccttctttggaattaaacggagaaaaggataaagataagggacgcactctccagagaacctctacctctaatgaaagcggcgaccagctcaaacgcccatttggggctttcaggagcattatggaaacactctctggaaatcagaataacaacaataactaccaggctgccaatcaactgaaaacctccaccctacctctgacttcgctgggtaggaaaactgacgccaagggaaaccctgcttctagtgcctccaaaggtaaaaataaggccgaaatgtatagcagctgcatcaatctgagtagtaacatgctcatcgaggagcatctgtgcaacgatactcggcacaatgacattaataggaaaatgaaaaaatcttactctatcaagcatatcgctgaacctgagtccaaagagttgttcctgtag

SEQ ID NO: 207904 - DNA, 1566 bp, synthetic construct
  misc_feature 1..1566: note = Description of Artificial Sequence: Synthetic coding sequence
  source 1..1566: mol_type = other DNA
atgaagctgaccctggtgatgacctacctgatccagagccaccactcccgtcgctcccagaactgcgcagaggatgtgatccgaaagacaaaaacggatcaggagaaaatcctgttgtggctcctccagtttatgcaggaacaagggatcagcttagacgaggtggatcaggacggcaacagcgctgttcacgtcgcttcccagcatggatatctgggctgtattcagacattagttgaatatggcgctaatgttacaatgcagaaccacgctggagagaagccatcgcagagcgccgaacggcaggggcacactctgtgctctcgttatttagttgtcgtggagacttgcatgagcctcgcgtcccaagtagtgaagttaactaagcagctgaaggaacagacagttgagagggtgaccctgcagaaccagcttcagcaatttctggaagcccagaaatcagaggggaagtccctgccctccagtccgtcatcaccgtcttcccccgcctcccgcaagtcacagtggaaatcccctgatgccgatgatgactccgtggctaaaagcaaaccgggcgtccaagaggggatacaagtgctgggctcgttgagcgcctcgtcacgcgcacggccaaaagcaaaggatgaggactctgataaaatccttcgccagcttttgggaaaggagatcagcgagaacgtgtgtacccaggagaagctgagcctcgagtttcaggatgcacaggcaagtagccggaattccaagaaaattccacttgaaaaaagggaactgaaattggccaggctgaggcaattgatgcagaggagcctttcggagtcagacaccgacagtaataatagcgaggaccctaagacaacaccagtgaggaaagccgatcgccctcgaccccaaccaattgtggagtctgtggaatcaatggacagcgccgagagtttacatttgatgattaagaaacacacactggcttcggggggcagacggttcccgtttagcataaaagcctccaaatccctggatggccattccccgtcacccacaagcgagtctagtgagccagatttagagagccagtacccaggcagcgggtccattcctccgaatcagccctctggtgacccccaacaacccagtccggacagcacagctgcccagaaagtggctacatcccctaaatcagcacttaagtcaccctccagtaagaggcggaccagccagaatcttaaactgagagttaccttcgaagagcctgtcgtacagatggagcaaccaagcttagagctcaatggggagaaggataaagataagggtcgaaccctgcagagaacctccacatcgaacgaaagcggcgatcaacttaaacgaccattcggcgctttcaggtctatcatggaaactttatccggcaaccagaataacaataataattatcaggctgcaaaccagctaaaaacatccaccctgcctctgaccagcctgggtaggaagacagatgcgaagggcaatccagcatcctcggcttccaagggaaaaaataaagcagcatag

SEQ ID NO: 207905 - DNA, 1146 bp, synthetic construct
  misc_feature 1..1146: note = Description of Artificial Sequence: Synthetic coding sequence
  source 1..1146: mol_type = other DNA
atgaagctgaccctggtgatgacctacctgatccagagccaccacagtcggaggtctcagaattgtgcagaagatgtaatccggaagaccaaaaccgaccagaatggacagctcgagtgtgtgcgctggatggtgtctgagacggaagctatcgctgagttatcgtgtagtaaggactttccgagcctgatccattacgccggatgttacggacaggagaagatattgttatggctgctgcagttcatgcaagaacaagggatatcactcgacgaggtcgaccaagacggaaattctgcagtccatgtggcatcacagcacggttatctgggctgcattcagaccctggtcgaatatggtgctaatgtgactatgcagaaccacgccggtgaaaagcccagccagagcgccgaacgtcaggggcacaccctgtgtagccgttatcttgttgtggtggaaacatgtatgtctctggcatctcaggtggtcaaactgaccaagcagttgaaagagcaaacggtggaacgtgtaacgttgcagaaccaattgcagcagttcctcgaggctcagaaaagtgagggtaagtcgctccctagttctcctagctcgccatcatctccagcatctcgcaagagtcaatggaagtcaccagacgctgacgatgacagcgtggcgaagtccaaacccggcgttcaggagggtatacaggtgctaggctcactctcggccagctcacgcgcgcgacccaaagccaaagatgaggacagcgacaagatccttcgccaacttttaggaaaagaaatctctgagaatgtgtgtacgcaggagaaactcagcctggagttccaggatgctcaggcttcctcgcgtaacagcaaaaaaattcctctggagaagagggaactgaaactcgccagactgcggcaactcatgcagcggtcccttagcgaatctgatacagacagcaacaactccgaagaccctaagactacccccgtccggaaggcggacaggccaaggccacagccaattgtagagagcgttgaaagcatggactccgccggtttcctgtccgcgagtcgtccaccaaatccttggatggcaactgcccatcttccaccgcaaagggccgccaaccaaacctag

SEQ ID NO: 207906 - DNA, 1767 bp, synthetic construct
  misc_feature 1..1767: note = Description of Artificial Sequence: Synthetic coding sequence
  source 1..1767: mol_type = other DNA
atggaggcccccgagtacctggacctggacgagatcgacttcagcgatgacatcagcgacaatcgatctcagggcaataggcttcagaaacttggactggaagacactgatcgcgaagacgccatgggatttgggagccacagagcgaagttaaccgtggttgctgcactgggtgcttgccactgtcctgagaatgaatattcagtgacttcgctgaagaccattccagaactgtgtagaaggtgcgatactcagaacgaagataggtctgtgtctagcagcagttggaactgcggcatttctaccttgatcacaaatactcagaaaccgacaggtattgcggatgtctactccaagttccgacctgtcaagagggtctcaccgctgaaacatcagccagaaacgctcgagaacaacgaatccgatgatcagaaaaaccagaaagtcgtggagtaccagaaaggcggggaaagcgacttgggtccacagccccaggagctagggcccggggatggagttggtggtcctcccgggaaaagcagcgagccatccacaagcctgggggagctagaacactacgatctcgacatggatgagatactcgacgtaccatacattaaaagcagccagcagttagcctcttttacgaaggtgacctctgagaagagaatcctgggtctgtgcacaacaatcaacggcctgtccggaaaggcttgctctaccggctcttctgaatccagctccagtaacatggctcctttctgtgtactttctcctgtcaagagcccacaccttagaaaagcatccgctgtaatacacgatcaacacaagctgtcgactgaggaaaccgagattagtccccccttggtgaagtgcggcagcgcttacgagccagagaatcaaagcaaagacttcctgaataagaccttctccgacccacatggaagaaaggtggaaaaaactacccccgactgccagctgcgcgcattccatttgcaatccagcgctgctgagtcaaaacctgaggaacaggtgagtggcctgaacaggacatcttcccagggtccagaggaacgctcagagtacttaaagaaagtaaagtccattctgaacattgtgaaggaaggacagatcagccttttgccccatctcgccgctgacaatctggataaaatacacgacgagaatggcaataacctgctgcacatagccgcaagccagggtcacgccgaatgtctgcagcatttaacatcccttatgggtgaagactgtcttaacgagcggaacaccgaaaagcttacccccgccggtttagcaatcaaaaacggccaacttgagtgtgtgcgttggatggtcagcgaaacggaagcaatcgccgaacttagctgttctaaggatttcccctcactgatacactatgctggctgttatggccaggaaaaaatactgctgtggctgcttcagtttatgcaggaacaaggtataagtctggacgaagtggatcaggacggtaattcagcagttcacgtggctagtcagcacgggtatctcggctgcatccaaacgagattgaagattcaaggcacatggaacggcagcgaaacatgcctatttactcaccacttctcttcttacccgcctatcagctcaggactccagtgccagggtcaagaaggagtgttatttataccagaccaggtgggtgcagccacgaacaagcaggtgctgtttcagaaccagctgcctgagacgaagtcgagttactag

SEQ ID NO: 207907 - DNA, 267 bp, synthetic construct
  misc_feature 1..267: note = Description of Artificial Sequence: Synthetic coding sequence
  source 1..267: mol_type = other DNA
atggaggcccccgagtacctggacctggacgagatcgacttcagcgacgatatatcctattcggtgacctcactcaaaacaattccggaactatgccgccggtgcgatacacagaatgaggatagatccgccacacccagctgcaggcagtcccgccagaattctagaagaaaatggaagcagagtattacatactgtggggtcacgggtacaaggagggtgtccacggctccccacttcttcgacggaaggcgcctgccccaatag

SEQ ID NO: 207908 - DNA, 297 bp, synthetic construct
  misc_feature 1..297: note = Description of Artificial Sequence: Synthetic coding sequence
  source 1..297: mol_type = other DNA
atggaggcccccgagtacctggacctggacgagatcgacttcagcgatgatatctcatacagcgtgacttccttgaagactattccagaactgtgccgccgctgcgacacacagaacgaggataggtccgtttcctcttcaagttggaattgcgggatatccactttaatcacaaatacacagaagccaacgggaattgcagacgtttacagcaagttccgcccagttaaaagagtctctcccctcaagcatcaacccgaaactttagagaataacgaaagtgatgaccagaaatag

SEQ ID NO: 207909 - DNA, 45 bp, synthetic construct; identical to SEQ ID NO: 101715
  misc_feature 1..45: note = Description of Artificial Sequence: Synthetic coding sequence
  source 1..45: mol_type = other DNA

SEQ ID NO: 207910 - DNA, 408 bp, synthetic construct
  misc_feature 1..408: note = Description of Artificial Sequence: Synthetic coding sequence
  source 1..408: mol_type = other DNA
atggaggcccccgagtacctggacctggacgagatcgacttcagcgacgatatttcctactccgttacatcactgaaaacaatccccgaattgtgtagacgttgtgatacccagaatgaggatcgaagcgtctcctcatcatcttggaactgtggcattagtaccctgatcacaaacacgcagaagcccactggcattgcagacgtgtatagcaagtttcgtccagtgaaacgtgtcagccctctcaagcaccagcctgaaacgttagagaataacgaatccgatgatcagaaaaaccagaaagttgtcgaataccaaaaagggggcgagtccgatcttggaccccaacctcaggaactcggacccggcgacggcgtgggcggccccccggggaagtccagcgagtag

SEQ ID NO: 207911 - DNA, 1434 bp, synthetic construct
  misc_feature 1..1434: note = Description of Artificial Sequence: Synthetic coding sequence
  source 1..1434: mol_type = other DNA
atgcaggagcagggcatcagcctggacgaggtggaccaggacggcaacagcgctgtccacgttgcatcccagcatggataccttggctgcattcagacacttgtcgagtacggcgccaatgtcacaatgcagaatcatgccggcgagaaacccagccagagtgcagagcgccaaggacacacgctgtgttcacggtacctggtcgtggttgagacatgcatgtcactggcaagccaggttgtgaagttgactaagcagctgaaagagcaaaccgtggagagggtgacactacagaaccaactacaacagtttctggaggctcagaaaagtgaaggcaaatcactcccgtccagtccttcttcccccagctcacctgcatcccggaagtctcagtggaaatcaccagacgctgacgacgattctgtggccaagagcaaaccgggcgtgcaagagggcatccaagttctaggtagtctgagtgcctcttccagagctcggcccaaggcgaaggatgaagacagcgataagattctaaggcagctccttggaaaagaaatttcggagaacgtatgcacccaagaaaagctctctttggaatttcaggatgcccaggccagtagcaggaacagtaagaagattccattggagaagagagaactaaaactcgcacgtttgcggcagctgatgcagcgcagtttgagcgagtccgacacggacagcaacaattcagaagatcccaaaactaccccagtaaggaaagcggacaggccaagaccacaacctatcgtggaaagcgtggaatctatggactccgcagagagcttacaccttatgatcaaaaagcacaccctagcaagcggcggccggaggttccccttcagtataaaagctagtaaatcattagacgggcatagtccctcacctacctccgaatcgagtgagcccgacctggaaagccaatatcccggaagtggctctatcccacccaatcaacccagtggtgatcctcaacaaccgagtccggacagtaccgcagcccagaaagtggcaacctcaccaaaatctgccttgaaatctccttcgtcaaagcgccgcacaagccagaacctgaagctccgcgtaactttcgaggagccagtggtccagatggaacagccttcgctcgagttgaatggtgagaaagacaaggacaagggacgcacgttacagcgaacctccacaagcaatgagagcggtgaccagctgaaacggccctttggagcattccgcagcataatggagacgctcagcgggaatcagaataataataacaactatcaagccgccaaccaactgaagacgtcaaccttacctctgacttctctgggtagaaaaactgacgctaaagggaaccccgctagcagcgcaagtaaaggtaagaataaggccgcctag

SEQ ID NO: 207912 - DNA, 405 bp, synthetic construct
  misc_feature 1..405: note = Description of Artificial Sequence: Synthetic coding sequence
  source 1..405: mol_type = other DNA
atggacgtgttcatgaagggcctgagcatggccaaggagggcgtggtcgccgctgcagaaaaaaccaagcagggtgtgacagaggcagctgagaagacaaaagagggggtgctctatgtgggcagcaaaactcgcgaaggcgttgtgcagggagttgcttcagtagccgagaaaacgaaggaacaagcttctcatctcgggggggctgtgtttagtggcgcaggaaacatagcggctgcgaccggccttgtgaaacgggaggagttccctactgacctgaagccagaggaagtagcccaggaggcagcagaagagccgttaatcgaacccctcatggagcccgaaggcgaatcctatgaagatcccccccaggaggagtaccaagagtatgaaccagaagcctag

SEQ ID NO: 207913 - DNA, 405 bp, synthetic construct
  misc_feature 1..405: note = Description of Artificial Sequence: Synthetic coding sequence
  source 1..405: mol_type = other DNA
atggacgtgttcatgaagggcctgagcatggccaaggagggcgtggtggccgcagcagagaagacgaaacaaggagtcacagaagccgcggagaaaactaaggaaggggtgttgtacgtgggaagcaaaacccgagaaggcgtggtccaaggagtggccagcgtagctgaaaaaacaaaagaacaagcttcgcacctgggcggagctgtgtttagtggcgcgggaaacatcgcagcagcaaccggccttgtgaagcgggaggaattccccactgatctgaaacccgaagaagtggctcaagaagctgctgaggagccactgatcgagccgttgatggaacctgagggcgaatcatacgaggatccaccccaggaggagtatcaggaatacgaacctgaagcttag

SEQ ID NO: 207914 - DNA, 405 bp, synthetic construct
  misc_feature 1..405: note = Description of Artificial Sequence: Synthetic coding sequence
  source 1..405: mol_type = other DNA
atggacgtgttcatgaagggcctgagcatggccaaggagggcgtggtggccgcagccgaaaaaaccaaacagggagtgacagaagctgccgagaaaacaaaagaaggcgtcctgtatgtgggcagcaagactcgggagggcgtcgtgcagggggtcgcgtccgtggccgagaagactaaggaacaagcgtcccacctgggtggggccgtgttctccggtgcgggcaacatcgccgctgccacagggttggtgaagcgagaggaatttccaacggaccttaaacccgaggaggtggcacaagaggcagcagaagaacccctgatcgaaccgctgatggagcccgaaggcgaaagctacgaggatccacctcaagaggagtatcaggaatacgaaccagaggcctag

SEQ ID NO: 207915 - DNA, 405 bp, synthetic construct
  misc_feature 1..405: note = Description of Artificial Sequence: Synthetic coding sequence
  source 1..405: mol_type = other DNA
atggacgtgttcatgaagggcctgagcatggccaaggagggcgtggtcgcagccgcagagaagacgaagcaaggcgtaacagaggccgcggagaagaccaaagaaggggtgctgtatgtgggatctaaaacgcgggaaggggttgttcagggcgttgcgtctgttgctgagaagactaaggaacaggcctcacacctcggaggagctgtgttcagcggggcaggcaatatcgctgccgcaactggtctcgtgaaacgcgaggagttccccaccgacctcaaaccggaagaagtcgcacaggaagccgccgaagaacctctgatcgagccactgatggagccagagggggagtcgtatgaagacccccctcaggaagagtatcaagagtatgagccagaggcctag

SEQ ID NO: 207916 - DNA, 381 bp, synthetic construct
  misc_feature 1..381: note = Description of Artificial Sequence: Synthetic coding sequence
  source 1..381: mol_type = other DNA
atggacgtgttcaagaagggcttcagcatcgccaaggagggcgtggtgggggcggtagaaaagactaagcagggtgttactgaggccgcagagaaaactaaagagggcgtgatgtacgtgggggccaagaccaaggagaatgttgtgcagtcagtgacctccggtttaccatggggatggggatggggtggagggcaacccgtatcttctcactcaggccgtgaggaccagggcgcagggcaacggcgggagcgcggatgcggcgagcaacgccaacattgtggacatcaggaccgggggggtggaggcgagcatcgcgggcatctgaggggaggcgcacagggaggattggaggccatttgtccacccacgggaggctag

SEQ ID NO: 207917 - DNA, 384 bp, synthetic construct
  misc_feature 1..384: note = Description of Artificial Sequence: Synthetic coding sequence
  source 1..384: mol_type = other DNA
atggacgtgttcaagaagggcttcagcatcgccaaggagggcgtggtgggggcggtggagaaaacaaagcagggcgttacagaagccgccgaaaagacgaaggaaggcgtcatgtatgttggcgcaaaaactaaagaaaacgttgtgcaatccgtcactagcgtggcagaaaaaactaaggagcaggcaaatgcagtctctgaagccgttgtgagcagtgtgaacacagtcgctactaagactgtggaagaggctgaaaacatagctgtcacatcgggagtggtacgcaaggaagatctgaggccatccgctccccagcaggagggcgaagccagcaaggagaaggaggaagtggctgaagaggctcagtccggcggagactag

SEQ ID NO: 207918 - DNA, 471 bp, synthetic construct
  misc_feature 1..471: note = Description of Artificial Sequence: Synthetic coding sequence
  source 1..471: mol_type = other DNA
atggccggccagttccggagctacgtgtgggaccccctgctgatcctgagccaaattgtgttaatgcaaaccgtgtattacgggtctctgggtctctggctggcactggtggatggactcgtcagatcatctccttctctggaccagatgttcgacgccgaaatccttggatttagtacgcctccggggcgcttgtccatgatgtccttcattctgaatgctctgacttgcgctctcggcctgttatatttcattcgtcggggcaagcagtgtctggactttaccgtcacagtgcacttcttccatcttctcggttgttggttctactcatcccgtttcccaagcgctctgacctggtggctggtccaagctgtctgtatcgctttgatggcagtgataggtgaatatctgtgcatgcgtaccgagttgaaagagattccattaaattcagccccaaaaagcaatgtctag

SEQ ID NO: 207919 - DNA, 471 bp, synthetic construct
  misc_feature 1..471: note = Description of Artificial Sequence: Synthetic coding sequence
  source 1..471: mol_type = other DNA
atggccggccagttccggagctacgtgtgggaccccctgctgatcttgagccagatcgtgctgatgcagaccgtctattacggaagtctggggctgtggctggcactggttgatgggcttgtgaggagctctccctcactggatcagatgttcgacgcggaaatccttggatttagtacccctccgggccgcctctccatgatgagttttatcctgaatgccctgacctgcgccctgggtctgctctattttatcaggagaggcaagcagtgcctggattttaccgtgacggtgcatttcttccatttactcggatgctggttctactccagccgatttcctagcgccctgacctggtggcttgtgcaagctgtatgcattgccctaatggccgtgataggtgagtatctgtgtatgcggactgagcttaaggagatcccactgaacagtgcccccaaatctaacgtatag

SEQ ID NO: 207920 - DNA, 357 bp, synthetic construct
  misc_feature 1..357: note = Description of Artificial Sequence: Synthetic coding sequence
  source 1..357: mol_type = other DNA
atggccggccagttccggagctacgtgtgggaccccctgctgatcttgagccaaatcgtgctcatgcagaccgtgtattacgggagtctggggctctggctggcgttagtggacggcctggtccgcagctctccatccctcgaccagatgtttgacgccgagatactcggcttctctactccacctggacggctgtcaatgatgtcgttcatactgaacgctctaacctgcgccctcgggctgctgtactttatacggcgaggcaagcagtgtctggactttaccgtgacagttcatttttttcatctgttgggctgttggttttattctagcaggtttccttcagcccttacatag

SEQ ID NO: 207921 - DNA, 231 bp, synthetic construct
  misc_feature 1..231: note = Description of Artificial Sequence: Synthetic coding sequence
  source 1..231: mol_type = other DNA
atggccggccagttccggagctacgtgtgggaccccctgctgatcctgtcacaaattgttctgatgcagactgtctactacggctccctaggtctctggctggcgctggtggatggactcgttcgctcatccccctccttggaccagatgtttgacgccgagatcctggggttcagcacccctccaggacggctgtctatgatgtcttttatcctgaacgctctcacctag

SEQ ID NO: 207922 - DNA, 1134 bp, synthetic construct
  misc_feature 1..1134: note = Description of Artificial Sequence: Synthetic coding sequence
  source 1..1134: mol_type = other DNA
atgagcagccccggcaccgagagcgccggcaagagcctgcagtacagagtggaccacttgttgtcggcagtggagaacgagctgcaggctggttcggaaaagggggaccccaccgagcgcgaattgcgagtgggcctagaagaaagcgaactgtggctgcgctttaaagagctaaccaatgagatgatagttactaagaacggtcggcgaatgttccccgtgctcaaagtgaatgtatcggggctcgatccaaatgccatgtactcctttttgcttgattttgtcgcggccgacaatcaccgatggaagtacgtgaacggggaatgggttccgggaggaaaacccgagccgcaggccccgagctgtgtctatatacatcccgactcacccaactttggagcccattggatgaaggctcctgtgagcttctccaaagttaagctgaccaataaactgaacggagggggccagataatgttgaattccctgcacaagtacgaaccacgcatccacattgttcgagtgggcgggccacagcgcatgattacttctcattgttttccagagacccagttcatcgctgtcaccgcttatcagaacgaggagatcaccgctctgaagattaagtacaaccccttcgccaaggccttcctggatgcaaaggagaggtcagaccacaaggagatgatggaggagccgggcgactcccaacagccagggtactctcagtcgtattccgacaatagccccgcttgtttgtcaatgctccaaagccacgacaattggtcttctctgggcatgccagcacacccatccatgttgcccgtgagtcacaacgcttcaccaccgacttctagttcccagtatccctccctgtggagcgtgtctaatggcgccgtcacaccaggatcccaagccgctgcagtcagtaatggtctgggcgctcagttttttcgagggagcccagcccactacacaccgctgacacatcctgtgagtgcccccagcagctccgggtcccctctgtatgagggtgctgctgccgccactgatatcgtggacagccagtacgatgctgcagctcagggtaggctaattgcctcctggactcctgtgagccccccaagcatgtag

SEQ ID NO: 207923 - DNA, 735 bp, synthetic construct
  misc_feature 1..735: note = Description of Artificial Sequence: Synthetic coding sequence
  source 1..735: mol_type = other DNA
atgcggtggtgcctgctgctgatctgggcccagggcctgcggcaggccccacttgcatccggcatgatgaccggcaccattgagacgaccgggaatatctccgctgagaaagggggttcaatcatactgcagtgtcacctctcctcaaccactgctcaggtgacacaggtgaattgggaacagcaagatcagctgttggctatctgtaacgcagacctgggatggcatatctccccatctttcaaagatagagtggctcctggacccggactcgggctcacactccaatctctgacagtcaatgacactggcgagtacttctgtatttaccacacgtatccagatggcacatacacaggccgaatttttctcgaggtgttagagagtagtgtggcagagcatggcgcgagattccagattcccctacttggagccatggcagctacgctggtggtgatctgcaccgccgtaatcgtggtcgtggcgcttaccaggaaaaagaaggccttacgcattcacagtgtggagggggacttgcggcggaaatctgccggccaggaggaatggagccccagtgccccaagtcccccagggtcgtgtgtccaggcagaggctgcacctgccggtctctgtggagagcaaaggggtgaggattgcgccgaactccatgactatttcaatgtgttatcctaccgatctctggggaattgttcttttttcacggagaccggatag

SEQ ID NO: 207924 - DNA, 936 bp, synthetic construct
  misc_feature 1..936: note = Description of Artificial Sequence: Synthetic coding sequence
  source 1..936: mol_type = other DNA
atggccttcctggtggcccaccccatgcagttcgtgtacctgctgacaacactgtgcgtgttcaatatggtctttgccaaattaggattcagcgagacagttttttctcagcgactgtccttcactgtcttaagcgctgtcggctactttcagtggcagaaaaggccacatctactcccggtgggtcccctcggaagatctatgagatggtgccttctgctcatttgggcccagggactccgccaagcacctctggcctcaggaatgatgacaggcacaatcgaaactacgggcaatatctctgctgagaagggtggatcaattatactccaatgccacttaagctcaaccactgcccaggtgactcaggtgaattgggagcagcaggatcagctgcttgcgatatgtaacgcggatctgggatggcacatttctccatccttcaaggatcgagtggctccaggcccaggccttgggctgaccctacagtctctgacagtgaacgacaccggagaatacttctgtatttaccacacctatccggatggtacttacacaggccgaatattcttggaggtgctggaatccagcgtggctgaacacggtgcacggttccaaatcccacttctgggtgctatggcagcaaccttagtcgttatttgtacggctgtcatcgtggtcgtggccctgacccgcaaaaagaaagctctgcgaatccacagtgtggaaggggacttgagacggaagtccgcaggacaggaagagtggtcgcctagcgctccttccccccctggctcatgcgtgcaagccgaggcggcgccagcaggtctttgcggagagcagaggggcgaggactgtgccgaactgcatgactacttcaacgtgctgagctaccggtcccttggaaattgctcattctttaccgaaaccggctag

SEQ ID NO: 207925 - DNA, 735 bp, synthetic construct
  misc_feature 1..735: note = Description of Artificial Sequence: Synthetic coding sequence
  source 1..735: mol_type = other DNA
atgcggtggtgcctgctgctgatctgggcccagggcctgcggcaggcccctctggcctcaggaatgatgacggggaccattgagacaaccgggaacatcagcgcagaaaagggcgggtctattatactgcagtgccacctgtctagtaccacagcccaggttacacaggtgaattgggagcagcaggaccagctgctggcaatttgcaacgccgatctggggtggcatatttccccctctttcaaagatcgggtggcccccggaccgggcttgggactaacacttcagtcgttgacagtgaacgatacaggcgagtatttctgcatctaccacacttacccagacggtacctataccggacgtatctttctcgaagtgctagagagtagcgtagccgagcacggcgcccgcttccagatccctctcctgggcgcgatggctgccaccctggtcgtcatctgcactgccgtaatcgtagttgtcgctcttacgaggaagaagaaagcattgcgaatccatagcgtggaaggtgaccttagacgtaaatcagccgggcaggaagagtggtctccctctgcaccaagccccccaggcagttgcgtccaggccgaagctgcacctgcaggcctttgtggtgaacaacgcggcgaagattgcgcagaactccacgattattttaacgtgctctcatatcgctctctcggtaactgctccttctttacagagactggatag

SEQ ID NO: 207926 - DNA, 561 bp, synthetic construct
  misc_feature 1..561: note = Description of Artificial Sequence: Synthetic coding sequence
  source 1..561: mol_type = other DNA
atgagcggcatcagcggctgccccttcttcctgtggggcctgctggccctgctgggactggccctggttatttcgctcatcttcaacatttctcattatgtcgagaaacagagacaggataaaatgtacagttactccagtgaccatacaagggtggatgaatactacattgaagacacaccaatctatggtaacctggacgacatgataagtgagcccatggacgaaaactgttacgagcagatgaaagctaggccggagaagtccgtaaacaagatgcaggaagccacaccaagtgcacaggccacaaatgagacccagatgtgctacgctagcctggatcattctgtgaaagggaaaaggaggaagccgaggaagcaaaatacacacttctccgacaaggacggtgatgaacagttacatgcgatagacgcgagcgtatccaaaacaaccttagtggactcgttttcaccagagagccaggcagtggaagagaacattcatgatgatcctattcggctctttggactgattcgggccaaaagggagcccatcaattag

SEQ ID NO: 207927 - DNA, 1308 bp, synthetic construct
  misc_feature 1..1308: note = Description of Artificial Sequence: Synthetic coding sequence
  source 1..1308: mol_type = other DNA
atgagcagccccggcaccgagagcgccggcaagagcctgcagtacagagtcgatcatctgctctcagctgtggagaatgaactacaggcaggctccgagaaaggtgatccaaccgaaagggagctgagagtcgggctggaagaatccgaactttggctgagatttaaggagttaaccaatgaaatgatcgtgactaagaatggacggcgcatgtttcccgtgctgaaggtgaatgtatctggactagacccaaacgctatgtattctttcctgcttgatttcgtggctgctgataaccaccggtggaagtacgttaatggggaatgggtgcccggagggaagcccgagccacaagcaccctcctgcgtctacatacatcccgattcgcccaacttcggtgcccattggatgaaagctccagtctccttttccaaggtgaagcttacgaacaagctaaacggggggggtcagattatgctgaactcgctgcacaaatatgaacccagaattcatatcgtacgtgtgggaggtccgcagcgtatgatcacaagtcactgtttccctgagactcagtttattgccgtcacggcttatcaaaacgaggagattacggctttgaaaatcaagtataacccctttgccaaggcttttctggacgccaaggagaggagcgatcacaaggaaatgatggaggagccaggagactctcaacaacccgggtactcccagtggggatggttgctgcctggaaccagcacattgtgcccccctgccaaccctcacccccagttcggcggcgccttgtctctgccgagtactcactcctgcgacagataccctactctgaggagccacagaagcagtccttatccttctccatatgctcataggaataactctcctacatacagcgacaactcccccgcctgtctcagcatgctacagtctcacgacaattggagttcattaggcatgccagcccatcctagtatgctgccagtcagccacaatgcctctcctcccactagcagtagccagtacccttctctgtggtcagtgagcaacggagccgtcacccctggcagtcaggcagccgcagtctccaatggattaggggcacagttcttcagggggtcgccagcccactacactcctctcacccatcctgtgagcgcgccttcatcttccgggtctcccctgtatgaaggcgctgctgctgctaccgatatcgtggacagccagtacgacgctgctgcacagggtcgtctcattgcatcttggacccccgtctccccaccctctatgtag

SEQ ID NO: 207928 - DNA, 732 bp, synthetic construct
  misc_feature 1..732: note = Description of Artificial Sequence: Synthetic coding sequence
  source 1..732: mol_type = other DNA
atgagcagccccggcaccgagagcgccggcaagagcctgcagtaccgggtggatcaccttttgtccgccgtcgaaaacgaactgcaagccggaagtgagaaaggcgaccctacagagcgtgagctgcgcgtgggattagaagagtccgaactctggctcaggtttaaggagttaacgaacgagatgattgtaacgaaaaatggtagacggatgttcccagttctgaaagtcaatgtctcaggactggatcccaacgccatgtacagcttcctcttagattttgttgccgctgacaaccacagatggaagtatgttaatggagaatgggttcccggcgggaaaccagagccacaggccccgtcatgcgtgtatattcaccctgattcaccgaatttcggggcccactggatgaaagccccagtatcattttctaaggtaaagctgacaaacaaactcaatggaggtggacaaataatgcttaactccctccacaaatacgagcccaggatacacatagtgcgtgttgggggaccccagcgcatgatcacgagtcactgcttcccggaaacccagttcatcgcggtgactgcttatcagaacgaagagatcaccgccctcaaaataaaatacaatccgtttgctaaggcttttttggacgcgaaggaaaggtctgatcacaaagagatgatggaagaaccgggcgatagccaacagccgggctattcgcagtag

SEQ ID NO: 207929 - DNA, 366 bp, synthetic construct
  misc_feature 1..366: note = Description of Artificial Sequence: Synthetic coding sequence
  source 1..366: mol_type = other DNA
atgcggatcatgctgctgttcaccgccatcctggccttcagcctggcccaatcctttggggcagtctgtaaggaacctcaagaagaagtcgtccccggcggggggcgttcgaagcgagatcctgatttatatcagctcctgcaaagactgttcaaaagtcactcatctcttgaagggctcctgaaagcactgtcgcaagcctccactgaccccaaagagagcacgagtcctgagaagcgggacatgcacgacttttttgttggcctcatgggaaagcggtcagtgcagcccgactccccaacagatgtaaaccaagaaaatgtgccctccttcgggatactgaaataccccccccgagccgaatag

SEQ ID NO: 207930 - DNA, 366 bp, synthetic construct
  misc_feature 1..366: note = Description of Artificial Sequence: Synthetic coding sequence
  source 1..366: mol_type = other DNA
atgcggatcatgctgctgttcaccgccatcctggccttcagcctggcccagagcttcggtgcagtgtgcaaggaaccccaagaggaggtggtgcctggaggcggccggtccaaacgggaccccgacctttatcaactactccaaagactttttaagtctcacagttcactcgaaggactgcttaaagcactgtcccaggcgagcacagaccccaaagaatccacatcccccgaaaaaagagacatgcatgactttttcgttggactgatgggcaagcggtccgtacagcctgatagtccaaccgacgttaatcaggaaaacgtcccctcgttcggaatattgaaatatcccccccgggcggaatag

SEQ ID NO: 207931 - DNA, 312 bp, synthetic construct
  misc_feature 1..312: note = Description of Artificial Sequence: Synthetic coding sequence
  source 1..312: mol_type = other DNA
atgcggatcatgctgctgttcaccgccatcctggccttcagcctggctcaatcctttggcgccgtttgcaaagaacctcaggaagaagtcgtccccggcggcggtagatccaaaagggaccccgatctgtaccagttgcttcagagactcttcaaatcccatagtagccttgagggactgctgaaagccctgagccaggcgagcaccgatccaaaagaatccactagtcctgaaaagcacagtcccaccgacgtgaatcaagagaatgttcctagtttcggtatcctgaagtatcccccccgagcggaatag

SEQ ID NO: 207932 - DNA, 366 bp, synthetic construct
  misc_feature 1..366: note = Description of Artificial Sequence: Synthetic coding sequence
  source 1..366: mol_type = other DNA
atgcggatcatgctgctgttcaccgccatcctggccttcagcctggctcagtctttcggtgccgtctgcaaagaaccccaggaagaggttgtccccggaggcggcaggagcaagagggacccggacctgtaccaactgctgcaaagattgtttaagtctcactcatcccttgagggcctcctgaaggctctgagccaggcttccacagacccaaaagagagcaccagcccagagaaaagggacatgcatgatttctttgtgggcttaatgggcaagagatctgtccagccagattcaccaaccgacgtgaaccaagagaacgtaccatccttcggaattctgaaatacccacctcgggcagagtag

SEQ ID NO: 207933 - DNA, 1224 bp, synthetic construct
  misc_feature 1..1224: note = Description of Artificial Sequence: Synthetic coding sequence
  source 1..1224: mol_type = other DNA
atggacaacgtgctgcccgtggacagcgacctgagccccaacatctctaccaacacaagcgagcccaaccagtttgtgcagcctgcctggcaaattgtgctatgggccgctgcctacacagtcatcgtggtgacctctgtggtcgggaacgttgtggtgatgtggattatattggctcacaaaagaatgagaacagtgaccaactacttccttgttaacctagcgttcgctgaggcttcgatggccgccttcaatacagtcgtgaactttacctacgcagtgcacaatgaatggtactacggcctcttttattgtaagttccacaatttctttcctatcgccgccgtatttgccagcatctattcaatgacagccgtggctttcgatcggtatatggccattattcatcctctgcaaccgaggctatcagctacagcaacaaaggtggtaatttgcgttatctgggtgctggccctcctacttgcattcccccaaggctactacagcaccaccgaaaccatgccatcaagagtcgtgtgcatgattgagtggccggaacaccctaacaagatatacgagaaggtatatcacatttgtgtgacagtcctcatttatttcctgccactcctggtgatcggatacgcctatactgtcgtggggatcaccctctgggcctccgagatacctggcgatagcagcgataggtaccacgaacaagtcagtgcaaagaggaaggtcgtcaagatgatgattgtggtagtttgcacctttgccatctgctggctcccattccatatcttctttctgcttccctatatcaacccggacctatacttaaagaagttcatacagcaggtgtacttggcgattatgtggctggctatgtcctcgacaatgtataacccgatcatttactgttgcttaaacgatcgattcagattgggtttcaagcacgccttcagatgttgtcccttcatctccgctggcgattacgagggcctggaaatgaagtccacgcggtatctgcagactcaggggtctgtctataaagttagcagacttgaaactacgatctccaccgtggtgggcgcccacgaggaggagccggaagacggccctaaggccacaccttcatcgctggatctgacatccaactgctcatctcgctctgactccaaaaccatgacagagtcgttttccttttctagtaatgtactcagctag

SEQ ID NO: 207934 - DNA, 936 bp, synthetic construct
  misc_feature 1..936: note = Description of Artificial Sequence: Synthetic coding sequence
  source 1..936: mol_type = other DNA
atggacaacgtgctgcccgtggacagcgacctgagccccaacatcagtactaataccagtgaaccgaatcagtttgtccaaccagcgtggcagatagtgctctgggccgctgcatataccgtgatcgtggtgacgtccgtggtgggtaatgtcgtggtaatgtggattattctggcacataagcgaatgagaacagtgaccaattacttcctcgtgaaccttgcctttgccgaggccagcatggccgcttttaacaccgtggtgaattttacatatgcagtccacaacgagtggtattatggcctgttttactgtaaatttcataatttctttcctattgccgctgtttttgcttcgatatattcaatgactgccgtggcgttcgatagatacatggcaatcatccacccgttacaaccccgcctgtccgcgaccgccactaaagtggtgatctgtgtcatctgggtgcttgctttactgttggcctttccccaaggctattattccaccacagagacaatgccaagccgagtggtgtgcatgattgagtggcccgaacatcccaacaaaatctacgaaaaagtgtatcacatttgcgtgaccgtgctcatctatttcctgcctctgctggtgatcggctacgcctatacagtcgtgggcattactctgtgggcgagcgaaattcctggggactcctcagaccgataccacgagcaggtcagcgctaagaggaaggttgtgaagatgatgattgtggtggtgtgtactttcgccatttgctggttaccctttcacatcttttttttgcttccctatatcaaccctgacctgtatttgaagaagtttattcagcaagtgtatctggctattatgtggttagcgatgtccagtacgatgtataatccaataatctactgttgcctgaacgaccgctag

SEQ ID NO: 207935 - DNA, 1197 bp, synthetic construct
  misc_feature 1..1197: note = Description of Artificial Sequence: Synthetic coding sequence
  source 1..1197: mol_type = other DNA
atgggcacctgcgacatcgtgaccgaggccaacatcagcagcggcccggaatccaacacaactggaatcacggccttctccatgccttcttggcagctggccctgtgggctacggcatatcttgccctggtgctggtggcagtgacaggaaacgccatagtgatatggatcattttggcccaccggcgcatgcggaccgtgaccaactattttatagtgaatcttgctcttgccgatttgtgcatggcagccttcaatgcagcctttaactttgtatatgctagccacaatatatggtacttcggcagagcattctgttactttcagaacctatttcccatcacagcaatgttcgtcagcatatattctatgacagcgattgcagccgaccgctacatggcgattgtacatcctttccagccccgcttgtcagctcccagtaccaaggcagttatcgctgggatctggctggtggcccttgcgcttgctagcccacagtgtttttactctactgtgaccatggaccagggtgccaccaaatgtgtcgtggcttggcctgaggattcaggaggcaagacactgcttctttaccacctcgtggtcatcgccctcatctactttctgccactcgcagtgatgttcgtcgcttacagcgttattggtcttacactgtggcggcgggccgttcctggccatcaggcacatggcgctaacctgagacacctgcaggccatgaaaaagttcgtaaagaccatggtgctggttgtgctgaccttcgccatctgttggctcccgtatcatctctacttcatcctaggtagctttcaagaagatatttattgccacaaatttattcagcaggtctatctcgcacttttttggctcgccatgtccagcactatgtataaccccatcatctactgctgtttgaatcatcggtttcgaagtgggtttcgcctcgcattcaggtgttgtccttgggtcacccccactaaggaagataagctcgagctgacccccacaacatctctgtccacacgggtgaaccgctgccatactaaagaaacattatttatggccggagacacagctcccagcgaagccacctccggcgaagccggccgaccacaggatggaagcgggctctggtttgggtatggcctgctggcacctaccaagacacatgtcgagatatag

SEQ ID NO: 207936 - DNA, 561 bp, synthetic construct
  misc_feature 1..561: note = Description of Artificial Sequence: Synthetic coding sequence
  source 1..561: mol_type = other DNA
atgttcgtggcctacagcgtgatcggcctgaccctgtggcggcgggccgtccctggccatcaggctcacggggccaatctccgacacctgcaggctatgaaaaaatttgtcaaaacgatggttctggtagttctgacgtttgctatttgttggctgccataccatctctattttattctggggtcctttcaggaggatatctattgccacaagttcattcaacaagtctacctggccttgttttggctggcaatgtcctccaccatgtacaaccccataatttattgctgcctcaatcataggtttaggagcggcttccggctagcttttcggtgctgcccgtgggtgacccccacgaaggaagataaactagagctcactccgactaccagtctatccacacgcgttaacagatgtcacactaaagaaacacttttcatggctggtgatacagccccgtctgaggcaacctccggggaagcgggacgaccgcaggacgggagcggcttgtggttcggctacgggctgctggctcctacaaagactcatgtggaaatatag

SEQ ID NO: 207937 - DNA, 1398 bp, synthetic construct
  misc_feature 1..1398: note = Description of Artificial Sequence: Synthetic coding sequence
  source 1..1398: mol_type = other DNA
atggccaccctgcccgccgccgagacctggatcgacggcggcggcggtgttggggcggatgctgtgaatctgactgcaagcctcgccgctggggcagcaactggcgcagtcgaaaccggatggcttcagttgcttgaccaggccggtaatctgtctagttctcccagtgcgttaggacttcccgtcgcatcccccgctccgtcccagccatgggctaatctgacgaaccagttcgttcaacctagctggaggatcgccctctggagtcttgcctatggagtagtggttgcggtggccgtgttgggaaacctgattgttatctggatcattttggcccataagcgcatgcggacggtaacaaattactttctcgtaaacctagccttttctgacgccagcatggcagcttttaacaccctcgtgaattttatctatgccctgcattccgagtggtacttcggcgctaactactgtagattccagaatttcttccctattacggcagtcttcgcctcaatatactcaatgacagccattgcagtggaccgctatatggccattatagatccactgaagccacgccttagcgctacggctactaaaattgtgatcgggtccatttggattctggcctttcttctggcatttccccaatgcctctacagtaagaccaaggtcatgcccggtaggaccctttgtttcgtccagtggcccgagggccccaaacagcatttcacgtaccacatcatcgtgatcatcctcgtttattgcttcccactcctgattatggggatcacatatactattgtgggaattaccctatggggcggcgagatccccggagatacctgtgataagtaccacgaacagctgaaggcgaagagaaaggtcgtgaagatgatgataatcgtagtgatgacattcgcaatctgctggcttccttaccacatctactttatcttaactgccatttatcagcaacttaatagatggaagtacatccagcaggtctatctggcgagcttttggctcgcaatgtcttccactatgtataaccctatcatctactgctgtctgaataagagattccgtgcaggttttaaaagggcctttcggtggtgtccttttattaaagtgtcatcctacgatgagctcgagcttaagacaacccgcttccatccaaacaggcaatctagcatgtatactgtgactcgtatggagtcgatgacagttgtcttcgacccaaacgatgccgacactacacggtcttcccgcaaaaaacgcgccactcctagagacccaagttttaatggatgcagtagacgcaattcaaaatccgcttccgccacctcatcttttatttcttcaccatacacgagcgtagacgaatattcttag

SEQ ID NO: 207938 - DNA, 5682 bp, synthetic construct
  misc_feature 1..5682: note = Description of Artificial Sequence: Synthetic coding sequence
  source 1..5682: mol_type = other DNA
atgggccccggctgcgacctgctgctgcggaccgccgccaccatcactgcggctgctatcatgagtgacactgacagcgatgaagactccgcagggggaggccctttctccctggccggttttctgttcggcaatatcaatggagccggacagttggagggagaaagtgtacttgacgatgaatgtaagaaacacttggctgggctcggtgcactcgggttggggtccctgatcaccgagctaacggctaacgaagagttgaccggaacagacggcgctctggtcaatgatgagggctgggtccggagcacagaggatgccgtggactactccgacataaatgaggtggccgaggacgagtctaggagatatcagcagaccatgggctcacttcagccgctctgtcatagcgattacgacgaggacgattacgacgcagattgtgaggatatcgactgtaagctgatgcccccgcctccccctccgcctggcccaatgaaaaaagacaaggaccaagatagcatcacgggtgtatccgaaaacggcgaagggatcattttgccctcgattattgcccctagctcacttgcatccgaaaaggtggatttcagcagcagcagcgacagcgagagtgagatgggaccccaggaagccacccaggcggaaagtgaagatggaaagttgacacttcccctggcggggatcatgcaacacgatgcgacaaagttgctaccttccgtgactgaactctttccggagtttcgccctggaaaggttttgaggtttttaaggctgtttgggccgggaaagaacgtgccaagcgtctggagatcagctagacggaaacgaaagaagaaacacagagaactcatccaggaggaacagatccaggaagtcgagtgctccgttgagagtgaggtgagtcaaaagtctctctggaactacgactacgccccacctccgcctcccgaacagtgcctgtctgacgatgaaattaccatgatggcacctgttgagtctaaattttctcaatcgaccggggacatagacaaggtcaccgatacaaagcctcgggtggccgagtggcgttacggacccgcccgcttatggtatgatatgctcggtgttccagaggacggatcaggttttgactacggcttcaagctgcggaagactgagcatgagcctgtgattaagtcccgcatgatagaagagttcagaaagctggaagaaaataacggcacagacctgctcgccgacgaaaattttttaatggtcactcagctacactgggaagatgacatcatttgggacggtgaagacgtgaaacacaaaggaacgaagcctcagcgagcttcactggccggctggctgccctctagtatgacccgcaatgccatggcatataacgtccagcagggatttgcagctactcttgatgacgataagccatggtactccatttttccaatagataacgaggatctggtctacggccgctgggaagacaacatcatctgggatgcacaggcgatgccccgattattagagcctcctgtgctgactctcgaccctaatgacgagaatttgattctggagattcctgatgaaaaggaggaagcaacgagtaactctccttcaaaagaatccaaaaaagagagtagtctgaagaagagccgtatactgttggggaagacgggcgtgattaaggaggagccacagcagaacatgtcccagccagaagtaaaagacccttggaacctgtccaacgacgaatactattatcctaagcagcaaggcctaaggggcaccttcggaggcaacattatccagcatagcatccccgctgtggaactgagacaaccattctttcctactcacatggggccgataaagctgaggcagtttcataggccgcctctcaagaagtattcttttggcgccctgtcccagccaggtcctcactctgttcagccccttcttaagcatatcaagaaaaaggctaaaatgagagaacaggagcgccaggcatccggagggggggagatgttttttatgaggacaccccaagacctaaccgggaaagatggtgacttgatcctcgccgagtactccgaagagaacggaccgctgatgatgcaagttgggatggcgaccaagattaagaactattacaaaagaaagccaggcaaggacccaggcgcaccagactgcaagtatggagaaactgtctactgtcacacgagtccctttttagggagccttcatcctggccagctgctgcaagctttcgaaaataacctgtttcgcgcccctatctatctccataaaatgcccgaaactgactttctcattattagaaccaggcaaggttactatatcagagagcttgtcgacattttcgtggttggccaacagtgcccgctcttcgaggtccctgggccgaactctaagcgggccaatacccacattagagactttctccaggttttcatttatagattgttctggaaatctaaggacagaccaagaaggatcaggatggaggacatcaagaaggcattcccttcccacagtgagtctagcatcagaaagaggctgaagctctgtgccgatttcaaacgaacgggaatggattccaattggtgggtgttgaaatcagacttccgtctgccaacagaggaagagatccgagccatggtgtccccagaacagtgttgtgcctattattccatgatcgccgccgagcagaggttgaaagatgcggggtacggcgagaaatctttcttcgctcctgaggaggagaatgaagaagacttccaaatgaagattgacgacgaggtgcgcactgccccttggaatacaacgcgggccttcattgccgccatgaaaggaaaatgtcttctggaagtcactggagtggccgaccccactgggtgtggagaagggttctcttatgtgaagattccaaataaacctacgcagcagaaagacgacaaagaaccgcagcccgtgaaaaagacagtgaccggcactgacgctgacctgcgaagactcagtctgaagaacgcaaagcagctgctacggaaatttggagtgccagaagaagagatcaagaagctgagtaggtgggaagttattgacgtggtgaggaccatgagcacagaacaggctagaagcggggagggacctatgtctaaattcgcgaggggtagcagatttagtgtcgccgagcatcaggagcgttataaggaagaatgccagaggattttcgatttgcaaaacaaggtgctatcctcaaccgaggtgctctcaaccgatactgattcaagctcggccgaagactcagacttcgaagagatgggtaagaacatcgaaaacatgctgcagaacaagaaaacatcatctcagctgtcacgcgagcgtgaagaacaggaaaggaaggagttacagcgaatgctgttggccgcggggtctgccgcttcagggaataaccacagagatgatgacacagcctctgttacaagtcttaattcaagcgccacaggtaggtgccttaagatttatcggacttttagggacgaagagggaaaggaatatgtccgatgcgagacagtgagaaaacctgctgttatcgatgcctatgttagaatacggacgacgaaagacgaggaattcatcaggaagttcgctctgttcgatgagcagcacagagaggagatgcgaaaagaaagacgacggattcaggaacagctgcgccggctgaagaggaaccaggagaaagagaagctgaagggccccccagaaaagaagcctaagaagatgaaagaacgtccagacctgaaactcaagtgcggcgcgtgcggcgctattggacatatgcggaccaataagttttgccccctttactaccagacgaatgctcccccaagtaacccagtggcgatgactgaagagcaggaggaggaactcgagaaaacagtgattcacaatgataacgaggagctgataaaggtggaaggaaccaaaattgtgctgggaaaacagctgatcgaatcggccgacgaggtccgcaggaaaagccttgtactgaagtttcccaaacagcaactgccgccgaagaagaaacggagggtggggactacggttcactgcgactacctgaaccgccctcataagtccattcacagacgccgaacagacccaatggttactttgtcatccatcctggagtccatcatcaatgacatgcgcgacctgcccaacacttaccccttccacacccccgtcaatgctaaagtggtgaaggactactataagatcataactcgtccaatggatctgcagaccctaagagaaaacgtcagaaagcgcctgtacccctctcgggaggagtttcgtgagcacctcgagctgatcgtgaagaactcggccacttacaacggacctaagcacagcctcacgcaaataagccagtccatgctcgacctgtgcgacgagaaattaaaagagaaggaagacaagctagctcgcctggagaaagccattaatccactgctagacgacgacgaccaggttgcatttagctttattctagataacatcgtgactcagaagatgatggccgtcccggatagctggcctttccatcatcctgtcaacaagaaattcgtgccagactactacaaggtgatcgtcaaccccatggatctggaaacaattcgaaagaatatatctaagcacaaatatcagtcccgggagagcttcctcgatgacgtgaaccttatactggcgaacagcgtgaagtacaatggacctgaatctcagtacacgaagacagcccaggagatagtcaatgtgtgttatcagactctcacagagtacgacgagcatctcacccaactcgaaaaagacatttgtacagcgaaagaggctgccctagaggaggcagaactggagagcctcgacccaatgacccctggcccttacaccccccaacccccggacttatatgacaccaatacgagcctttctatgtctcgtgatgccagcgttttccaggacgagtcaaacatgagtgtcttagacatcccctctgccacgccagagaaacaggttactcaggagggcgaggatggcgatggcgacctcgcagacgaagaggaaggtacagtgcaacagccacaggcctccgtattgtacgaggatctgctgatgtccgagggagaagacgacgaagaggacgccggcagcgatgaagagggggataaccctttttccgccatccaacttagcgagtctgggtcagattccgacgtggggagcggcggcatcaggcccaaacaaccacgcatgctgcaagaaaacaccagaatggatatggaaaatgaggagtccatgatgagttacgagggagacggtggcgaggcgagccacggactggaggatagtaatatctcgtacgggtcttatgaagagccggaccccaagtctaacactcaagacacgtccttctcatcaatcggcggctacgaggtgtctgaagaggaggaggatgaggaggaggaggagcagaggagtggaccatctgtcctgagtcaggtacacctgtccgaagacgaagaggactctgaggatttccacagcattgctggcgatagcgacctggattccgacgagtag

SEQ ID NO: 207939 - DNA, 5619 bp, synthetic construct
  misc_feature 1..5619: note = Description of Artificial Sequence: Synthetic coding sequence
  source 1..5619: mol_type = other DNA
atgggccccggctgcgacctgctgctgcggaccgccgccaccatcacagccgccgccattatgagcgatactgactctgatgaggatagtgccggcggtgggcccttttcactggccggcttcctcttcgggaatattaatggcgccggtcaattggaaggagagtccgtcctggacgacgaatgtaagaaacatctggccggtctcggagccctgggactggggtccctgatcaccgagctcactgccaatgaggaactgacaggaacggacggcgccttggtcaacgacgagggctgggtgagatctaccgaagatgcggttgattactcggatatcaatgaggtggctgaagacgaatcccggcggtatcagcaaacaatgggtagcttacagcccctgtgccatagtgactacgatgaggacgactacgatgcagattgtgaagatattgactgtaagctgatgcccccacccccacccccgcccgggccaatgaaaaaggacaaagaccaggacagtataacgggtgaaaaagtggacttctcttcttcttccgactccgagtcagaaatgggcccacaggaagccacccaggccgagtctgaagatggtaaactcaccctaccactggccggcatcatgcaacatgacgcaaccaaactgctcccaagcgttacagaactgtttccagagttccgtcccggcaaggtgctgagattcctccgactgttcgggcccggaaaaaacgtgccaagtgtgtggcggagtgcccggagaaagcgcaaaaagaagcacagggagctgatacaggaggagcaaatccaggaggttgagtgcagcgtggagagcgaagtgagccaaaaatctttgtggaattatgattacgccccaccacccccccccgagcagtgcctctccgatgatgaaatcacaatgatggccccagtggagtcgaagttctctcagtccacaggagatattgacaaagttactgatactaaaccaagggtcgcggaatggcggtacggcccagctagactgtggtatgatatgctgggggttccggaagacgggagtggattcgattacggatttaagctcagaaagaccgaacacgaaccagtgataaagagccggatgattgaagagtttagaaaactggaggagaacaatggaactgacctgctcgcagacgaaaactttctgatggtaactcagttgcattgggaagacgatattatttgggacggcgaagacgtgaaacataagggaacaaaaccacagcgcgcctctctggctggctggttgccttcttctatgactagaaatgctatggcctacaatgttcagcagggctttgccgcaacattagacgatgacaaaccatggtactcaatcttccctattgataatgaggacctggtgtatggcagatgggaggacaatattatctgggatgcacaggcaatgcctagactgctggaacctccagttttgactctggaccctaatgatgagaacttaattcttgagatcccagacgagaaagaggaagcgacgtctaactctccgagcaaagaatccaagaaagaatcctcattgaaaaagtccaggattctgctgggaaagaccggtgtgattaaggaggagccacagcaaaacatgtcccagcctgaggtgaaggatccatggaatttgagtaacgatgagtattactatcccaaacaacaggggctcagggggacattcggcggcaatatcattcagcattcaatacctgctgtagaactgcggcagccctttttccctactcacatgggacccattaaactgcgacagttccatagaccaccactaaagaaatatagcttcggagccctcagccagcccggcccccacagcgttcagccgctgctgaaacacattaaaaaaaaggccaagatgcgcgagcaggaaagacaagcctcaggtggtggcgagatgtttttcatgcgcacaccgcaggatctgaccggtaaggacggcgatctgatccttgcggaatatagcgaggaaaacggtcccctgatgatgcaggtgggaatggcaacgaagatcaagaactactacaagcgcaaaccgggcaaagatccaggggcgccagattgtaaatatggggagacagtctactgtcacacctcacccttcctggggagtctgcaccctggccagctcctccaagctttcgaaaataatctgttcagagcccccatctatctgcataaaatgccagagacagatttcttaatcatcagaacgagacaggggtattatatacgcgagctggtggacattttcgtggtgggccagcagtgtccgctgtttgaggttcccggccccaattccaagcgcgcaaatacccacatccgggattttctgcaggtatttatctatagactcttttggaagagcaaggataggcctaggcgcataaggatggaagatattaagaaagcgtttcctagccactcagagtccagcatccgcaaacggttgaaactctgtgcggactttaagcgcacagggatggatagcaattggtgggtcttgaaaagcgacttccgtcttcctacagaggaagaaattcgagccatggtcagtcccgagcaatgttgtgcctactacagcatgatagccgctgagcaaagactcaaagacgcaggctatggcgaaaaaagctttttcgccccagaagaagagaacgaggaggatttccaaatgaagatagatgacgaggtccgcaccgcaccttggaataccacccgagcctttattgctgcaatgaaggggaagtgcctccttgaagttacaggggtggcagacccaacaggctgcggagaaggcttttcctacgtgaagatccccaataagcccactcagcagaaggatgataaggagcctcagcccgtgaagaagactgtcacgggtaccgacgcagatcttagacgcttgtcgctcaagaatgcgaaacagctgcttaggaagtttggtgtccccgaagaggagattaagaaactgtctagatgggaagttatcgatgtcgttaggaccatgagtactgagcaggcaaggtctggcgagggaccaatgtccaaattcgccagggggtctagattttccgttgcagagcaccaggagcggtacaaagaggaatgtcagcggatattcgatctgcaaaacaaagtcctgtctagtacagaagtgttaagcacagatactgattcttcttcggcagaggattcagattttgaagaaatggggaagaacattgagaacatgctacagaacaagaaaacctcgagtcagctgtcacgggagcgtgaggagcaggagagaaaagaactccagaggatgttgctggctgctgggagcgctgcttccggcaataaccacagagacgatgacactgcttccgtcacgtctctaaattcgagcgccaccgggagatgtctcaaaatttacaggacctttagggatgaggaaggcaaagaatatgtacggtgcgagacggtaagaaaacctgcagtgatcgacgcctacgttagaatccgcactacaaaggacgaggagttcatccggaagttcgcgctattcgatgagcagcacagagaggaaatgcgcaaggagcgcaggcgtatccaggaacagctgcggagactgaaacggaatcaggagaaagaaaagctgaaaggcccccccgagaagaaacccaaaaagatgaaggagagaccagacctgaaacttaagtgtggcgcttgtggtgctattgggcacatgcgtaccaataagttttgccccctttactatcaaacaaatgctcccccctccaatcccgtcgcaatgaccgaggaacaagaggaagaattggaaaaaactgtgatccataatgacaacgaagaactgataaaggttgaggggaccaagattgtgctgggtaaacaactgatcgagagcgctgacgaagtgaggagaaagagtctggtgctcaagtttccaaaacaacagctgccaccaaagaaaaaacggcgtgtgggaacaactgttcattgcgactatctgaaccgccctcacaagtccatacaccggcgccgaacagatcccatggtcactctgtcttctatcctcgagagcataattaatgacatgcgagatttaccaaacacgtatcccttccatacacccgtgaatgctaaggtggtgaaagactactacaagattatcactcgacctatggatcttcaaacgttacgcgaaaacgtacggaaacgtctttatccctctcgggaagagttccgcgaacaccttgagttgatcgttaagaacagtgcaacgtataacggtcccaagcactccttgacacagatctctcagtccatgctcgatctgtgtgacgaaaaactaaaggaaaaggaggataaattggcccgtctcgagaaggcaattaatcccctgctcgacgatgacgaccaggtcgctttctcttttatactggataacatcgttactcaaaagatgatggccgtccccgactcctggccgttccaccaccctgtgaataaaaagtttgttcctgactactataaggttatcgtgaaccctatggatctcgaaactatcaggaagaacatcagtaagcacaagtaccagtcgagagagtcttttcttgatgacgtgaatctgatcctggcgaatagcgtgaagtataatgggcccgaatcccagtacacaaaaaccgcccaagagattgtcaacgtgtgctaccagacactaaccgagtacgacgaacatctgactcagctcgagaaagacatttgcactgctaaagaagcagcactggaagaagcagaactggagagcctcgaccccatgacgccagggccttacacgcctcagccacctgacctttatgatacaaatacatcactctcaatgtcgcgggatgcgagcgtcttccaggacgagagtaatatgagcgtgcttgacatcccttctgccacccccgaaaaacaagtgacccaggaaggagaggacggagacggggacctggccgatgaggaggagggtaccgttcagcagccgcaggcctccgtgctgtatgaggatctcctgatgagtgagggtgaggacgatgaggaagatgctggatcagacgaggagggtgataacccgttttccgcaatccagctgtctgagtccggatcggactctgatgtgggatctgggggcatccggccaaagcagcctagaatgctccaggaaaacacacggatggacatggagaacgaggagtccatgatgtcctacgaaggagacggtggcgaagcatcccacggcctggaagatagtaatatttcatatggctcgtacgaggaaccggaccccaagagcaacacacaggacacatccttctcctcaattggcgggtatgaagtctccgaagaggaagaagatgaggaagaggaggagcagagatcaggcccatcggtgctctctcaggtccacctgtcagaggatgaagaggactctgaagatttccatagcattgccggtgattctgacctggacagcgacgaatag

SEQ ID NO: 207940 - DNA, 1632 bp, synthetic construct
  misc_feature 1..1632: note = Description of Artificial Sequence: Synthetic coding sequence
  source 1..1632: mol_type = other DNA
atgaccgaggagcaggaggaggagctggagaagaccgtgatccacaatgataatgaagagcttattaaggtcgagggaacgaagatcgtgctcggaaagcagctgatagaatccgccgatgaagtccgccggaagtccctggtactcaaatttccaaaacaacaactgccaccaaagaaaaaaaggagagtgggaacaaccgtgcactgcgactatttgaatcgccctcacaagtcaatccacaggcgcaggacagatcccatggtgacgctgtcctccatcttagaatccatcatcaacgacatgagagacctgccaaatacttacccttttcatacaccagtgaacgcgaaggttgtgaaggactactacaagatcatcacccggccgatggatttacagaccctgcgtgaaaatgttcgtaaacggctgtacccttcacgagaagaattcagagaacatcttgaacttatcgttaagaactcggcgacttacaatggcccaaagcattcgcttacccagatcagccagtccatgcttgacctgtgtgatgagaagctcaaagaaaaagaagacaagctggcgcgactggaaaaggctattaaccccttgttagatgatgatgaccaggtggccttcagcttcattctcgataatattgtgactcagaagatgatggccgtgccagactcttggccatttcaccacccagtgaataaaaagttcgtccccgactactataaggtgattgtcaatcctatggatctggagaccattagaaaaaacatatctaaacacaagtatcaatcaagggagagttttctcgacgacgttaaccttatcctcgccaactctgtaaaatataatggccctgaatcccagtacaccaaaacagcccaggaaatcgtcaacgtgtgttaccagacgctgaccgaatatgatgagcacttgacccagctcgagaaggacatctgcacagccaaggaggctgccttggaggaggccgaacttgaaagtctggaccccatgacaccaggcccatacacaccccaagctaaacccccggatctttatgatactaacacctccttgtctatgagccgggatgcatctgtttttcaggacgagtctaacatgagtgtgctcgacataccctccgccacgcccgaaaagcaagtcacgcagatgcggcagggcagagggagactcggagaggaggattctgatgttgatattgaaggctacgatgacgaggaagaggatggcaaacccaagacaccggccccagaaggcgaagatggagatggagaccttgcagatgaggaggaggggacggtacagcagccacaggccagtgtattatacgaagatctattgatgagcgaaggcgaagatgacgaggaagacgccggctccgatgaggagggcgacaacccattctcagcaatccaactgtccgagagtgggtctgactctgacgtcgggtcgggcggaatcaggcccaagcagcctagaatgctgcaagaaaacacccggatggatatggagaatgaggagagcatgatgtcctatgagggcgacgggggggaagcatcccatggactggaagacagtaatattagccatcagtag

SEQ ID NO: 207941 - DNA, 5688 bp, synthetic construct
  misc_feature 1..5688: note = Description of Artificial Sequence: Synthetic coding sequence
  source 1..5688: mol_type = other DNA
atgggccccggctgcgacctgctgctgcggaccgccgccaccatcaccgcagcagctatcatgtccgacaccgactctgacgaagactccgcaggcgggggcccattctctctggccgggttcctgtttggcaatatcaacggggcaggtcagctcgaaggcgaaagcgtgctggacgatgaatgcaagaagcacctggccggcctgggcgctcttggactgggcagcctgatcacggaactcaccgcgaatgaagagctcaccgggactgatggggctctggtcaatgacgaggggtgggtcaggtcaacagaagacgccgtagactattctgatattaatgaagtggccgaagacgaaagtcggcgataccagcaaacgatgggaagcctgcagccgctttgccactcagattacgatgaggacgactatgacgccgattgtgaggatatagactgcaagctgatgccccctcctcctcctccaccggggcctatgaaaaaggacaaggaccaggactccatcaccggggttagcgaaaacggcgagggtattatcctaccatcaattattgctccctcttcacttgccagcgagaaagttgatttctcatcttcatcagatagcgaaagtgagatgggcccacaggaggcgacccaggcggagagtgaggacggtaaactcacgcttcccctagccggcataatgcaacacgatgctaccaaattgttaccatctgtcactgagctgttccccgaatttcgacccggcaaggtgctgcgctttctcaggctttttgggcctggcaaaaatgtgccttccgtgtggagatcggcacgccgcaaaagaaagaaaaagcaccgagaattgatacaagaagagcagatccaggaggtcgaatgttcagtggagagtgaagttagccaaaagtctctgtggaattacgattatgcgccccccccacctccagagcaatgcctttccgatgacgaaattacgatgatggcgcctgtggaatctaaattctctcaatctaccggcgacattgataaggtgactgacactaaacccagggtggccgagtggcggtacggtcctgctaggctgtggtatgatatgctgggggtcccagaagacggaagtgggttcgactacggcttcaaactgaggaagacagagcatgagcctgttattaagtcgcgcatgatcgaagaatttcggaaacttgaggagaacaatggcactgatctgctggcggacgagaactttctcatggtcactcagctccattgggaggatgacattatttgggatggggaggacgtgaagcacaaaggtaccaaacctcaaagagcatccctggcggggtggctgcccagtagcatgacgagaaacgccatggcttataacgtccagcaaggttttgcagcaacccttgatgacgacaaaccctggtacagcatatttccaattgacaatgaggaccttgtgtacgggaggtgggaagataatataatttgggatgcccaggcaatgccccgactgctagagccccctgtccttacgctagatcctaacgatgagaacctgatcctggagatacctgacgagaaagaggaagctacatcaaattccccaagcaaggaatcaaaaaaagagagctctctcaaaaagtctcgcatacttctggggaaaaccggggtaatcaaagaggagcctcagcaaaatatgtcacagccagaagtgaaggacccttggaacctgtctaacgacgaatattattatcctaagcaacaaggattgagagggactttcggaggaaatatcatccagcattccattccagcagtcgagctgagacaacccttcttccccactcacatgggaccgattaaactccgccagttccatcgaccaccattgaagaagtattcattcggagctctgtcgcagccaggcccacacagcgttcagcccctgctaaagcacatcaagaagaaggcgaaaatgcgagaacaggaaagacaggccagcggtggaggggaaatgttcttcatgcgaactccacaggatttaacagggaaggacggagatctgatcctggcagaatactccgaagagaatgggccactgatgatgcaggtcggtatggctactaagattaagaattattacaaaagaaaacctgggaaagatccgggtgcacctgattgtaaatacggggagacggtatactgccacacatcgccctttttgggcagcctgcaccctggacaactgctgcaggcattcgaaaacaatctatttcgggcccccatctatctccacaagatgcccgaaactgattttctgatcatccggacccggcaaggttactacatcagggaactggttgacatatttgtggtcggacagcagtgtcctctgttcgaggttcctggccctaactcaaaacgagctaatacccacatccgcgacttcttgcaggtattcatttaccgtctcttctggaaatctaaagatcgccctcgacgcattcgaatggaagatataaaaaaggcattcccgagccatagcgagtccagcatacggaagagactcaagctctgcgctgacttcaaacgaacagggatggatagcaattggtgggtgcttaaaagcgactttcgactgcccaccgaggaagagatccgcgcaatggtcagtcctgagcagtgttgtgcttattacagcatgattgctgccgagcagcggttaaaggatgccggttacggagaaaaaagctttttcgcccccgaagaggaaaatgaagaagatttccaaatgaaaatcgacgacgaggtgcgcacagcaccatggaacacgaccagagccttcatcgccgccatgaaagggaagtgcttactcgaagttaccggggtagctgatcctacgggctgcggggaagggttttcctacgtgaaaatcccaaataaacctacccagcagaaagacgataaggagccacaaccggtcaaaaagaccgtcaccggcacggatgccgatctgcgacggctgagcctcaagaatgccaagcagttgttacgaaaattcggtgtcccggaggaggaaattaagaagctgtcacgctgggaggtgatcgatgttgtgcgaaccatgagcaccgagcaggcccgctccggcgaagggcccatgtcaaagttcgcgcgtggatcccgtttttcggtggccgagcatcaggaacggtataaagaagaatgtcagcggatcttcgacctgcaaaataaggtgttatcttcaactgaggttctgtccactgataccgacagtagctcggcagaggattccgacttcgaggagatgggcaaaaacatcgagaatatgttgcaaaacaagaaaacctcgagccagttgtctcgagaaagggaagaacaagagcgtaaggagctgcaacggatgctgctggcagccggctcagctgcatctggaaacaatcatcgggatgacgacactgcctccgtgacctctttgaatagcagtgcaacagggagatgcctgaagatttataggaccttccgtgatgaggagggaaaggagtacgtgaggtgtgaaacagttcggaagccagcagtaattgacgcatatgtacgcatccgtaccacaaaggacgaagagttcatccgtaagtttgccctgttcgacgagcaacatcgagaggagatgcggaaggaacggagacggatccaggaacagttgcgaaggcttaagagaaatcaagagaaggagaaactgaagggccctcctgaaaaaaaacctaaaaagatgaaggaaaggccagaccttaaactgaagtgcggggcctgtggtgccattggccacatgcggaccaacaaattttgtcctttgtattatcagaccaatgcaccgccctccaaccctgtggcgatgactgaggaacaagaggaggaactggaaaaaacagtgatacacaacgataatgaggagctgattaaggtggaagggacaaaaatcgttctgggcaaacagctaattgaatctgctgacgaagttcggcgcaagtcgctggtgctgaaatttccaaagcaacagctcccgcccaaaaagaagaggcgcgtcggaactacagttcattgtgattatctcaatagaccccacaagagcatacacagaaggagaacagatccaatggtaacgctttccagcattcttgagtctattatcaacgacatgcgggacctgccaaacacatatccgtttcacactccggttaacgccaaggtagtcaaagattactacaagattatcacgagacccatggatctacaaaccttgcgggagaatgtccgcaagcgcctctatcccagcagggaagaattccgggagcatctggaattaatcgtgaagaacagtgccacctataacgggccaaaacacagcctaacccagatctcccaaagtatgttggacctgtgtgatgagaagctcaaggagaaggaagataagcttgccaggctcgagaaagcaattaatcccctgctggacgatgacgaccaggtggccttcagcttcatccttgacaacattgtcacccaaaaaatgatggccgtgcctgactcctggccgttccatcaccccgtaaacaagaagtttgttcccgattactacaaggtgatcgttaaccctatggacctcgagacgattcggaagaatatctcaaagcataagtatcagtctcgggagtcttttttggatgatgtgaacctcatactagccaattccgtgaagtacaatggaccggaatcccaatacactaaaaccgcccaggaaattgtgaatgtgtgctaccaaacgctcacagagtacgacgagcacctgactcagctggagaaggacatttgtacggctaaagaggctgctttggaagaggctgaactggagtcactggatcccatgactcctgggccatacaccccacaggctaagccaccagacctgtacgatactaacacctcactgtccatgtccagggatgcgagcgtgttccaggacgaatctaacatgtctgtgttggatattcccagtgcaacgccagagaaacaggtgacccaggagggcgaagatggcgatggcgatttggctgatgaagaggaggggacagttcaacagcctcaggctagtgtactatacgaagacctccttatgtccgagggcgaggacgatgaggaggacgcagggtctgatgaagagggtgacaaccccttttctgctattcagttgtcagagagtggcagtgactcagatgtcggcagcgggggaatccggcctaagcagcctcggatgctgcaggaaaacacccggatggatatggagaacgaagaatccatgatgagctatgagggagatggcggtgaagcctcccatgggctggaagactccaacatctcttatggctcatatgaggagccggatccaaagagcaacacacaggatacatccttcagcagtatcgggggatacgaggtctcagaggaggaggaggatgaggaagaggaggaacagcgcagcggcccatccgtgttgagccaagtccacctcagtgaagacgaagaagattctgaagacttccatagtatcgcaggggacagtgatctggacagtgatgaatag

SEQ ID NO: 207942 - DNA, 5721 bp, synthetic construct
  misc_feature 1..5721: note = Description of Artificial Sequence: Synthetic coding sequence
  source 1..5721: mol_type = other DNA
atgggccccggctgcgacctgctgctgcggaccgccgccaccatcactgctgccgcaataatgagcgatacggactcggatgaggactccgcagggggagggccatttagtctggccggttttctgttcggcaacattaatggtgccgggcagctggagggggaatccgtcctcgatgatgagtgcaaaaaacatctagccgggttgggcgcactcggccttggctctttgattaccgaattaactgcaaatgaggagctgacgggaacagacggcgcgctggtgaacgacgagggttgggtgcgatcaaccgaggatgctgtcgattattccgatattaatgaggtggcggaagacgagagccgcagatatcagcagacgatgggtagtctccagccgctgtgtcacagtgattatgacgaggatgattatgacgctgactgtgaggatattgactgtaagttgatgcctcctcccccacctccaccggggccaatgaaaaaggataaggaccaggatagtatcacaggagagaaggtcgactttagctcctcatctgacagcgagagcgagatggggccgcaggaagcaactcaagctgaaagcgaggatggtaaactgactctgcccctggctggcatcatgcagcacgacgctacaaaattgctaccgtcagttacagagctgttcccagagttccggcctggtaaggtgctgaggtttctgcgactcttcggtccagggaaaaacgtcccgagtgtgtggagatccgccagacgaaagcgcaagaagaagcacagagaactcattcaggaggaacagatacaggaagtcgaatgtagcgtggagtccgaggtgtcacagaaaagtctatggaactacgattatgccccaccacctccccctgagcagtgcctttccgacgatgagatcacaatgatggctccagtggaatccaagttctctcaatctaccggagacatcgacaaagtcactgataccaagccacgcgtggccgaatggcggtatggtcccgctaggctttggtatgatatgctcggagtgccagaggacggatcagggttcgactacgggtttaaactccgcaagacggaacacgagcctgtgataaaatctcggatgatagaagagtttcggaaactcgaagaaaacaatggaaccgaccttctggctgacgagaacttccttatggtcacacagttacactgggaagacgatatcatttgggacggcgaagacgtcaaacataagggcacaaaaccccagagagctagcctggcaggttggctcccctctagtatgacaaggaacgctatggcttataatgttcagcagggcttcgccgctacattagacgacgacaagccttggtactcaatcttccctatagacaatgaggacctggtgtacggacgctgggaggataacattatttgggacgcccaggcaatgcctcggctcctcgagccacctgtccttacgctggatccaaatgacgaaaacctcatcctagagattcctgacgaaaaagaggaggcaaccagcaactcaccatcaaaggagtccaaaaaggaatcatccttaaagaagtctcggattctgctaggaaaaactggcgttataaaggaggagccacagcagaatatgtcccagcccgaagttaaagacccgtggaatctatcaaatgacgagtactattaccctaaacagcaaggcctcaggggaacatttggaggtaatattatccaacattctatcccggcagtcgagctacggcaacctttctttcctacacacatgggccccatcaaattgcggcagtttcaccggccccctttaaaaaaatacagttttggggccttaagccagcccggcccccatagcgtacagcctctactgaaacatataaagaaaaaggctaaaatgagagaacaggaaagacaggcctctggcggcggggagatgttttttatgcgcaccccccaggatctcacgggaaaggatggggaccttattttggccgagtactcagaagaaaatggcccattgatgatgcaggtaggtatggcgaccaagattaagaactactacaagagaaagcctggcaaggatcctggcgcccctgactgtaagtacggagaaaccgtgtactgtcataccagccctttcttaggcagcttgcatcccggtcaactgcttcaggcatttgagaataacctgtttagggctccgatctacttacacaagatgccagagacagattttttaataatacggactaggcaaggctactacatccgcgagctggtggatatttttgttgtgggccagcagtgtcccctgttcgaggtccccggccctaatagtaagcgggccaacactcacatcagagatttcctccaggtgttcatatatcgcctattctggaagtcaaaagaccgcccaagaagaatccgaatggaggatattaagaaagccttcccatcgcactcagaatcttctatacgaaaacgcctgaaactgtgtgccgattttaaacgcacgggtatggactccaattggtgggtgctcaagtcagacttccgcttgcccaccgaagaggaaattagagccatggtctctcctgagcagtgttgtgcttattacagcatgattgcagccgaacagcgtctgaaggatgcgggttacggagagaagtccttcttcgcccccgaggaggaaaatgaagaggacttccagatgaagatcgatgacgaagttcgcacagctccttggaacaccaccagggcatttatcgcagctatgaagggaaagtgcctgttagaagtgacaggggtggctgacccaactggctgcggagagggattcagctacgtgaaaattcccaacaaacccactcagcaaaaagatgacaaggagccccaacctgtcaaaaagaccgtgaccgggaccgacgcagacttgaggagactgagtctgaagaatgctaagcaactactgcgtaaattcggggttcctgaagaggaaattaagaaactctctcgctgggaggtgatcgatgtggtgcgcaccatgtcaaccgagcaggcccgatcaggagaagggcctatgtcaaaattcgccaggggctcgcgattctctgttgccgagcaccaggaacgctacaaagaagagtgccaacgcatctttgaccttcagaataaggtgctgtcgagcaccgaggtactgtccacagacaccgatagttcttcggcggaagacagtgattttgaggaaatgggcaagaatatcgagaatatgcttcaaaacaagaaaaccagttcacaattgagcagggagagggaagagcaggaacgcaaggaactgcagcgaatgctgcttgccgcaggctcagcggccagcgggaataaccaccgcgacgacgatacagcttcagtgaccagtctgaattcaagcgcgacagggcggtgtctcaaaatctaccgcaccttcagagacgaagagggtaaggagtatgtccgctgcgaaacagtacgaaagccagccgttattgatgcctatgttagaattcgaactacaaaggacgaggagttcatacgaaaatttgccttatttgacgaacaacaccgtgaagaaatgaggaaagaacgcagacggattcaggaacagctccgtcgtttgaagcggaaccaggaaaaggaaaagctcaagggtcctcccgagaaaaagcctaagaaaatgaaagagaggcccgatctgaagctaaagtgtggagcctgtggagcaatcggccacatgcgcacaaataagttctgccctctctattaccaaaccaatgctccacctagcaaccccgtggccatgaccgaagaacaggaggaagagctggagaagaccgtgattcataatgacaacgaggaactgattaaggtcgagggcacaaaaattgtactggggaagcagttgattgagtctgcggatgaggtcaggagaaaatctttggtactgaagtttcctaagcagcaattaccgcccaaaaagaaacgccgagtcggcactacagtccactgtgactatttaaatcggccacacaagagtattcatcggaggaggacagatcccatggtgaccctgtcttccatactggaaagcatcatcaatgacatgcgtgacctgcctaatacatacccttttcacacgcccgtgaacgccaaggtagttaaagactattacaagatcattactaggccgatggatctccagacactgagagaaaacgtcaggaaacggctctatcctagcagggaagagttcagggaacacttggaacttatcgttaagaatagcgcgacctataacggaccaaagcactccttaacacagatctcccagtctatgctggacctttgtgatgaaaagctgaaggagaaagaagacaagctggctaggctggagaaggcaatcaaccctctgctggacgacgatgaccaagtggccttttcttttatattagataatatagtgacacagaagatgatggccgtcccagatagctggcctttccatcaccccgtgaacaaaaagtttgtgccggattactacaaggttattgtgaaccctatggatctggagacaatccgcaagaacatttctaaacacaagtaccagagtagagaaagtttcttagacgacgttaatttgatactggctaacagcgtgaaatacaacggacctgagtcccagtacaccaagaccgcacaggagatagtcaacgtttgttatcagaccttaactgaatacgacgagcaccttacccaacttgaaaaggacatctgcaccgcaaaagaagcagccctggaagaggccgagctggagagtctggaccctatgacacctggaccctatacaccccaaccccccgatctgtacgatactaatactagtctgagcatgtcgagagacgctagcgtgttccaggacgagtccaacatgagcgtgcttgacattccgtctgctactcccgagaaacaggttactcagatgcgccaaggcaggggccgactgggcgaggaggacagtgatgtggacatcgaaggatatgacgatgaggaagaggatgggaagccgaaaaccccagcacccgaaggggaagatggcgatggagacttggctgatgaggaggaaggtactgtacaacagcctcaggcctcagtcctctacgaggacctcctgatgtccgagggtgaagacgatgaggaggacgcgggcagtgatgaggaaggtgataatcctttcagtgcaatccagctcagtgagtcaggctcagattctgacgtaggatcaggaggaatcagacctaaacagccacgaatgctccaagaaaatacaagaatggatatggagaatgaggaatccatgatgtcttatgaaggtgatggaggcgaggcttcccatggtctcgaggacagcaatatatcctatggcagctacgaggaaccagatccgaaatctaacactcaggatacatccttctccagcattggaggctacgaggtgagcgaggaggaagaggacgaggaggaggaggagcagagatctggaccatccgtgctgtcccaggtccacctgagcgaagatgaggaggacagtgaggactttcactcaatcgcaggggacagcgatctcgatagcgacgaatag

SEQ ID NO: 207943 - DNA, 897 bp, synthetic construct
  misc_feature 1..897: note = Description of Artificial Sequence: Synthetic coding sequence
  source 1..897: mol_type = other DNA
atgaccgaggagcaggaggaggagctggagaagaccgtgatccacaatgacaatgaagagctgatcaaagtcgaaggtacaaagattgttttagggaaacagctgatcgagtcagcagatgaggtaagaaggaaaagtctggtactgaagtttccgaagcagcagcttcccccgaagaagaagaggcgcgtgggtacaaccgttcattgcgattatttgaacagacctcacaagtccatccacaggcggcggactgaccctatggtgactttgtcttctatcctggaatccataatcaatgatatgagggatctgccgaacacttatcctttccacacccctgtgaacgcaaaagtggtgaaggattattacaagattatcacacggcccatggacctccagacactgcgagagaacgtgagaaagagactataccctagcagggaggaatttcgagagcatctggagcttatcgtcaaaaattctgcaacctataacggccccaaacactctcttacccagatcagtcaatctatgctggatttgtgtgacgagaaacttaaagagaaagaggataagctggcccggctggagaaggccatcaacccacttttagatgacgacgatcaggtggcttttagttttatcttggataatatcgtgactcagaagatgatggccgtcccggactcatggccattccaccatcccgtgaataaaaagttcgtaccagactattataaggtgatagtcaatccaatggatctggagactattaggaagaacatatccaagcacaaataccagagtagagaaagcttcctcgatgacgtcaacttgatattggccaatagcgtgaagtataatggctacatgtgtaccacctgcagattctag

SEQ ID NO: 207944 - DNA, 657 bp, synthetic construct
  misc_feature 1..657: note = Description of Artificial Sequence: Synthetic coding sequence
  source 1..657: mol_type = other DNA
atgagctgcagcggcagcggcgccgaccccgaggccgcccccgccagcgcagccagcgctcctggtcctgcaccccctgtgtcggccccggccgccctgccaagcagtaccgctgccgagaacaaagcatcacccgcgggcaccgcggggggacctggagctggagcagccgctggggggaccgggcccttagccgccagggcaggggagcccgccgagagacggggggcagctccggtgagcgccggcggtgctgctccccctgaaggggcaatctccaatggtgtgtatgtgctgcccagtgccgccaatggtgacgtgaagcccgtggtaagttccaccccactggttgacttcctgatgcagctggaagactatacccctaccattccggatgctgtgacggggtattatctgaaccgagccgggtttgaggcaagtgatcctcgaattatccggttaatctcactggctgcacaaaagtttatatccgacatcgcaaacgatgctttacagcactgcaagatgaagggaactgctagcggctccagtaggagcaagagtaaggacagaaaatatactctgacaatggaagacctcactcctgctctttcggaatacgggataaatgtcaaaaagcctcattatttcacctag

SEQ ID NO: 207945 - DNA, 636 bp, synthetic construct
  misc_feature 1..636: note = Description of Artificial Sequence: Synthetic coding sequence
  source 1..636: mol_type = other DNA
atggacgacgcccacgagagccccagcgacaagggcggcgagaccggagaatccgatgaaacagcagctgtcccaggagatcctggagctactgacaccgacggaatccccgaggaaaccgacggcgatgctgatgtcgatctcaaggaggccgcagccgaggaaggtgagctggagtcccaagacgtgtcagacctgacaacagtagagagggaagattcgagcctactgaacccagccgctaagaaactgaagattgatacgaaagagaagaaagaaaagaaacagaaggttgacgaggacgaaatccagaagatgcaaattttggtgagctccttcagcgaggagcaactgaaccgatacgaaatgtatcgacgatccgcatttcctaaggcagccatcaagcgactcatacagtctattactggaacatcggtgagccagaacgtggttatcgcgatgagcggcatctcaaaagtttttgtgggtgaagtggtggaagaggccctcgatgtgtgtgagaaatggggtgagatgccacccctgcaaccaaaacacatgagagaggccgtgcgtaggctgaagtcaaaagggcaaattcctaactcgaaacacaagaagatcatattcttctag

SEQ ID NO: 207946 - DNA, 465 bp, synthetic construct
  misc_feature 1..465: note = Description of Artificial Sequence: Synthetic coding sequence
  source 1..465: mol_type = other DNA
atggacgacgcccacgagagccccagcgacaagggcggcgagaccggcgagtccgacgagaccgcagccgtaccaggagatcccggggctacagacacggacggaatccctgaggaaacagatggagacgccgacgtggaccttaaggaggctgctgcagaagagggcgagctggagtcgcaggacgtttcagatcttaccaccgttgagagggaggactctagtctactaaaccccgccgccaagaagctcaaaatcgatacaaaggagaaaaaggaaaagaaacaaaaggtagacgaagacgagattcagaagatgcagatattggtgtcgagcttttcagaagagcagcttaatcgctatgaaatgtaccgtaggagtgccttccctaaggccgcaataaagaggcattggatgtgcgtgaggagcggcgagaaatgccaccattacaaccctaatatctag

SEQ ID NO: 207947 - DNA, 486 bp, synthetic construct
  misc_feature 1..486: note = Description of Artificial Sequence: Synthetic coding sequence
  source 1..486: mol_type = other DNA
atgaaccagttcggccccagcgccctgatcaacctgagcaacttctcgtctatcaagccagagcctgctagtaccccgccacaaggtagtatggccaacagcaccgccgtcgttaagataccaggaacaccgggggccggaggaaggctgagccccgagaacaaccaggttctgaccaagaaaaaactacaggatctcgttcgcgaggtcgaccctaatgaacagctggacgaggatgtagaggaaatgctcctgcagatagctgacgattttattgaatcggtggttacagcagcctgccaactggccaggcaccggaagtcctcaactctggaggtcaaggatgttcaacttcatctagagcgccagtggaacatgtggatcccaggtttcggttccgaagaaatcagaccttacaagaaggcctgcaccactgaggcccacaaacagcgaatggcgctgattagaaaaaccaccaagaaatag

SEQ ID NO: 207948 - DNA, 486 bp, synthetic construct
  misc_feature 1..486: note = Description of Artificial Sequence: Synthetic coding sequence
  source 1..486: mol_type = other DNA
atgaaccagttcggccccagcgccctgatcaacctgagcaacttctcgtcgattaagcctgagcccgcctcaaccccccctcagggtagcatggctaacagtacagccgtagtgaagattccaggaacaccaggcgcgggaggaaggctgagccctgagaacaatcaagtgctgactaaaaagaaactgcaagatctggtgcgcgaggtggacccaaacgagcagctggacgaggatgtagaggagatgctcctccaaatcgccgatgatttcatcgaatcggtggttacagccgcgtgtcagctggcaaggcaccgtaagtcaagtactctggaagtaaaagacgtgcaactgcatctggaaagacagtggaatatgtggattccaggatttggaagcgaggaaattagaccctacaaaaaagcatgcactacagaggcccataagcagcgaatggccctgatccgcaagactactaaaaagtag

SEQ ID NO: 207949 - DNA, 1779 bp, synthetic construct
  misc_feature 1..1779: note = Description of Artificial Sequence: Synthetic coding sequence
  source 1..1779: mol_type = other DNA
atgagcgacagcggcagctacggccagagcggcggcgagcagcagtcctatagcacttatggcaatcccggcagccagggctacggtcaggcaagccagtcttactccggctatggtcaaaccacggattcatcatacgggcagaattactctggctactcttcgtatggacagagccagagcggatactctcagagttacggaggctatgagaaccagaaacagtcctcctacagccaacagccttacaacaaccaagggcagcagcagaatatggaaagttctgggagtcagggtggtcgagcaccttcgtacgatcagcccgattacggtcagcaagatagctatgaccagcagagtgggtacgatcagcatcaaggctcctacgacgaacagtccaattatgatcaacaacatgattcgtacagtcagaatcagcagagctatcattcacaacgggagaactattcccatcacactcaggacgacaggagagacgttagcagatacggcgaagacaataggggctacggcgggtcccagggtggtggacggggcagggggggctatgacaaagacgggcggggtccaatgaccggaagcagcggcggggaccggggcggcttcaagaactttggcggacatagggactatggaccgaggaccgacgccgacagcgagtcagataactccgacaacaacaccatctttgttcaaggcctcggcgaaggagtcagcacggaccaggttggggaatttttcaagcagatcggcattataaaaacaaataaaaagacggggaaaccaatgataaacctctacacagataaggacactggtaagccaaagggtgaggccacagtctcttttgacgatcctccttcagcaaaagccgcaattgactggtttgacgggaaggagtttcacgggaatattattaaagtgtcattcgccacacggaggcccgagtttatgcgtggagggggtagtggtggcgggaggagggggagaggtgggtacagggggagaggtggctttcagggtcgaggaggggatccaaaatccggcgactgggtttgccccaacccctcgtgcggaaatatgaacttcgccagacgaaactcttgtaatcaatgcaacgaacctcgcccggaggattctcggccttcaggcggggactttcgaggtcggggttacggtggcgagagaggctatcggggaaggggcgggagggggggggaccggggtggctacggaggggacagatcaggaggaggatatggcggtgacaggtcttctggcggcggctattcaggagatcgctcaggaggcggatatgggggagaccgaagcggtggcggttatggcggcgaccggggcggcggatatggcggggaccggggaggaggctacggcggggaccgcggagggggatacggtggggatagaggcggttacggcggggaccgaggcggcggctacgggggtgaccgcgggggatacggcggcgatcgcggtggatacggaggtgacaggggaggttacggtggagaccgcgggggctacggtggagaccgcagcaggggtggctatggcggggatagaggaggcggtagtggttacggaggcgaccgatcagggggctacgggggtgatcgctcagggggaggatatgggggtgaccggggcggcgggtacggtggtgacaggggaggttacggagggaaaatgggcggtaggaacgactaccggaatgatcagagaaacagaccttactag

SEQ ID NO: 207950 - DNA, 1779 bp, synthetic construct
  misc_feature 1..1779: note = Description of Artificial Sequence: Synthetic coding sequence
  source 1..1779: mol_type = other DNA
atgagcgacagcggcagctacggccagagcggcggcgagcagcagtcgtactctacttacgggaatcctgggagtcaagggtacgggcaagcctcacagagttactccggctacggacaaacaacggactcgagctacggccagaactacagcggttacagttcctatggtcagagtcaatctgggtactcacagtcatacggcggctatgaaaaccagaaacagtcttcctatagccagcagccttataacaaccagggacagcagcagaacatggagtcaagcgggtcacagggcggtcgggccccaagttacgaccagcctgactacgggcagcaggattcttatgatcagcagagcggttatgatcagcaccaggggagctatgacgagcagtccaattacgatcagcagcacgacagttattcgcagaaccagcaatcctatcactcacagagagagaattacagccatcacacgcaggatgaccgcagggacgtttcacgatacggtgaggataaccgcggatacggagggtctcaggggggtggtcgtggcagaggaggttacgacaaagacggccgcgggcccatgacaggatcaagcggcggggacagagggggctttaaaaattttggcggacatcgagactacggtccaagaaccgacgccgactccgagagcgataacagcgacaacaacactatttttgtgcaaggactcggagaaggggtctcaacggaccaagtgggtgagttcttcaagcagattggcataattaagaccaacaaaaagacaggaaagccaatgataaacctgtacactgataaagacacgggaaaacccaagggagaggccaccgtctcatttgacgatcccccatcagccaaagccgctatcgactggttcgatgggaaagagttccacggtaatattattaaggtatcttttgcaacacgcagacccgaattcatgcgaggaggcggaagcggcggaggcaggagaggccggggcggataccgcggtagggggggcttccaaggtcgaggcggagaccccaaatccggcgactgggtgtgtcccaaccctagttgcggcaatatgaactttgcacggcgcaattcttgcaaccaatgtaacgagcctcgcccagaggatagtcgtccctccggcggcgatttccgtgggcgcggatatggcggcgaacgcgggtataggggacggggcggcagaggtggcgatcggggcgggtatgggggggataggtctggagggggctacggaggtgacaggagtagtggaggcgggtactccggcgatcggtccgggggcggatatggtggggatcggtcggggggcggatatggcggtgatcgtggaggcggctatggaggcgacagggggggtgggtacggaggcgatcggggggggggttatggcggtgataggggtggatatggaggcgatagagggggggggtacggcggagaccgcggaggctatggcggggatcgggggggatacggcggagatcggggtggttatggaggcgaccggggcgggtatggtggcgacagaagccgcggcgggtatggaggagaccgcggcggaggttctggatatggaggcgatcgctcaggtgggtacgggggagatcggagcggcgggggctacggaggcgatcgcggagggggttacggtggcgaccggggagggtacggggggaagatggggggcagaaatgattacaggaacgatcagcggaacagaccttattag

SEQ ID NO: 207951 - DNA, 1188 bp, synthetic construct
  misc_feature 1..1188: note = Description of Artificial Sequence: Synthetic coding sequence
  source 1..1188: mol_type = other DNA
atgaccggcagcagcggcggcgaccggggcggcttcaagaacttcgggggacatcgcgattacggaccgcggacagatgccgactccgaatcagacaacagcgataacaacacgatattcgtccagggattgggtgaaggcgtcagcacagaccaggttggagaattctttaagcagatcggaataattaagacgaacaagaaaaccggaaaacctatgatcaatctctatactgataaggatacaggaaagcctaagggggaggccacagtttccttcgatgaccctccctctgccaaggccgcaatcgactggttcgatggaaaagagttccacggcaacatcatcaaagtgagctttgccaccaggcgaccggagtttatgagaggaggcggtagcggcggggggaggagaggtcggggcggttacaggggacgcggaggcttccagggcagaggcggcgacccaaagagcggggattgggtgtgccccaatcctagttgtgggaacatgaattttgcaaggcggaattcttgtaatcagtgtaacgagcctcgcccagaagactctagaccctcaggcggcgacttcagggggcgagggtacggtggggaacgaggttaccgaggacggggggggcgagggggggacagagggggctatggcggggatcggtcaggcgggggatacggtggggaccggtcatccggaggcggctactcgggtgatagatcaggaggaggctacggaggggatagaagtggcggcggctacggcggcgaccgcgggggagggtacggaggcgatcgaggggggggctatgggggagacagggggggaggatatggaggtgatcgtgggggttatggaggcgaccgggggggcggttacggcggcgatagggggggttatggtggcgaccggggagggtacgggggagaccgcggtggatacggtggagatcgcggaggctacggcggcgaccgatctcgtggcggatacggaggcgatcgcggcgggggctcaggctatggcggcgacaggtcgggaggctatggaggtgatcggtcaggtggagggtatgggggcgaccgagggggagggtacggtggggatagaggcggctacggtgggaaaatgggagggaggaatgactataggaacgatcagagaaaccgaccatattag

SEQ ID NO: 207952 - DNA, 2790 bp, synthetic construct
  misc_feature 1..2790: note = Description of Artificial Sequence: Synthetic coding sequence
  source 1..2790: mol_type = other DNA
atgtgcgagagctacagccggagcctgctgcgggtgagcgtggcccagatctgccaggcgctggggtgggactccgtgcagctctcagcttgccacctactcaccgatgtcctgcagcgatacctccagcagctaggcagggggtgccatcgatactccgaactgtacggtaggaccgaccctattctggacgatgtgggtgaggcgtttcagctaatgggtgtctccctccacgagctggaggattacatccacaacattgaacccgtgacattcccacatcaaattccatccttccccgtgtctaaaaacaacgtcctacagtttccccaaccaggaagcaaggacgccgaggagagaaaggaatatatccccgattatctgccaccgattgtttcgtcccaagaggaggaagaggaggagcaggtgccgacagatggtggcaccagcgcagaggctatgcaagtacccctcgaggaagacgacgagctggaggaggaggagatcatcaacgacgagaactttttgggaaaaagacccctggatagtccggaggcagaggagcttcctgcgatgaagaggcccagactgctgtctacgaaaggggacaccttggacgtggtgctcctggaggcgcgcgagcccttgagtagtataaacacgcagaaaattccccctatgctgtcccccgtgcacgtacaggacagcaccgacctggcaccgccctctccagaaccccccatgctggccccagtagccaagtctcagatgcccactgcaaagcctcttgaaacaaagtcctttacacctaaaaccaagaccaaaacctcttcgccaggacagaaaacaaagagcccgaaaacagcccagtctccagccatggtcggttcacccattcggtctccgaaaactgtatctaaggagaagaagtctcctggccgctcgaagagccccaaaagcccaaagtccccaaaagttaccacacatatcccacaaaccccggtgcgaccagaaacacccaacaggaccccttccgcgaccctttctgaaaagatttccaaggaaactattcaggtgaaacaaatccagactccaccagacgccgggaaattaaatagcgagaaccagcctaaaaaagccgtggtcgctgacaaaactatagaagctagcatagacgcggtcattgctcgcgcgtgcgctgaacgtgagccggacccttttgagttcagttctgggagcgagtcagaaggcgacatttttacaagcccaaagcgtatatccgggcctgaatgcaccacacccaaagcatctacatcagctaacaacttcacgaaaagcggctcaacacccctaccccttagcggcggaacaagttcgagcgataacagctggaccatggacgcctctattgatgaggtggtgcgaaaggcaaagctcggcacaccaagcaatatgccgcccaattttccatacatctcatctccatccgtcagcccacctactcccgaaccccttcataaggtatacgaggagaagaccaaactccccagctcagtggaagtgaagaaaaagttaaaaaaggaactcaagaccaaaatgaagaagaaggaaaagcagcgagacagggagcgtgagaaggacaagaataaggacaagagcaaagaaaaagacaaagtgaaagagaaagagaaggacaaggagacaggtcgagagacaaagtatccctggaaggagttcctgaaggaggaggaggccgatccttataagttcaagatcaaggagttcgaggatgtggaccctaaggtcaagctgaaagatggtttggtgaggaaagaaaaagagaaacacaaggataaaaagaaggaccgggaaaagggaaaaaaggataaggacaagagggagaaggaaaaagtgaaggataagggtcgagaagacaaaatgaaggccccagcgccccccctagtgctgccacctaaggaattggccttgcccctgttttcacccgccactgcatcgcgagtgcccgccatgctgcctagcctgctccctgtccttcccgaaaaactgttcgaggagaaggagaaggtcaaggagaaggagaagaaaaaagataagaaggaaaagaaaaagaaaaaagaaaaggagaaggaaaaaaaggagaaggaaagggagaaagagaaacgggagcgtgagaagagagagaaggaaaaggagaaacacaaacatgaaaaaattaaagttgagcctgtggctctcgcgccgtcccccgtgatccctcgattaacgctgcgggtcggcgccggtcaggacaagatcgtgatcagcaaggtagtacccgcccctgaggccaagcccgccccatcccagaatcgtccaaaaactcccccacccgcacccgctccagcccctggcccaatgcttgtatcccctgcgcccgttcccctgcctttacttgctcaggctgcagcgggccccgcactcctccccagccccggtcctgccgcatccggcgcttccgcaaaagctcctgtgcgcagcgtggtcaccgagacagtgtctacctacgtcataagggacgaatggggaaatcagatctggatctgtcccggttgtaataagccagacgatggctctcctatgataggatgcgacgactgtgacgattggtaccactggccttgtgtgggtattatgactgcccctcctgaggaaatgcagtggttctgtcccaagtgtgccaacaagaagaaggataaaaaacacaagaagcgcaaacaccgtgcccactag

SEQ ID NO: 207953 - DNA, 852 bp, synthetic construct
  misc_feature 1..852: note = Description of Artificial Sequence: Synthetic coding sequence
  source 1..852: mol_type = other DNA
atgtgcgagagctacagccggagcctgctgcgggtgagcgtggcccagatttgccaggcgttgggttgggatagcgtgcagctaagcgcctgccacctcctcacagacgtcctgcaacgctacctccaacagcttgggcggggatgtcatcgatattccgaactgtacggtagaacagaccctatcctcgatgatgttggtgaggcgtttcagttgatgggggtttcattgcacgaactggaagattacattcataacatcgagccggttactttcccacatcagatcccctcctttccggtcagcaaaaacaacgtgctgcagtttccccagccaggctccaaggatgccgaggaacgcaaagaatatatccccgactatctgccccccattgtctcttctcaagaagaagaagaagaagagcaggttcccaccgacggcgggacaagcgcagaggccatgcaggtcccactggaagaggacgacgaactggaggaagaagagattatcaacgatgagaacttcctcggaaagcgccctctcgatagccccgaagccgaagaactcccagcgatgaagaggcctcgactgttgagcacaaagggagacactctggacgtggtcctgctcgaggccagagagcctttatcttccattaacactcagaagattccgcccatgctctcccccgtgcatgtgcaggattctaccgatcttgccccgccctcacccgaacctccaatgttggctcccgttgctaagtcccaaatgcccacagctaagcctctggagaccaagtcttttacacctaagaccaaaactaaaaaaaagaaaaaaaagaagaagtcttag

SEQ ID NO: 207954 - DNA, 3258 bp, synthetic construct
  misc_feature 1..3258: note = Description of Artificial Sequence: Synthetic coding sequence
  source 1..3258: mol_type = other DNA
atggccgccggcagcgacctgctggacgaggtgttcttcaacagcgaggtcgatgagaaggtcgtaagcgatctggtgggctcacttgaaagccagctcgcagcctctgccgcccaccaccatcacctcgccccccggaccccagaagtgagggcggcggccgcgggggccctgggcaatcacgtggtatctggttccccggctggtgcagccggtgctgggccagcggcccccgctgaaggagccccgggggccgcccccgagcctccccccgccggcagggccagaccaggagggggaggaccacagcgacctgggccaccttctcctcgtcggcctctcgtgccggcagggcccgcccctcctgctgcgaaactgcggccgcctcccgagggatccgcagggtcgtgtgcccccgtccctgcagcagccgcggtcgcggctggcccggaacccgctcctgcggggcctgctaaacccgcagggcccgccgcactagcagcacgcgcaggcccaggccccggtccgggccctggccccggccccggaccagggcccggtaagcccgccggtcccggcgccgctcagacgctgaatgggtctgcagccttactgaactcacatcacgccgcagcaccagccgtttccctggttaacaatggccctgccgccctgctccctcttccaaagcccgccgccccaggtaccgtcatccaaactcctcctttcgtaggcgccgccgccccgcccgcaccagccgcccctagccctcccgcagcccccgccccagcagcccccgccgccgcaccaccaccacccccacctgctcccgccaccttagcaaggccaccaggacacccagccgggcctcctacagccgcacctgcagtgccacctccagccgccgcccagaatggaggctctgccggggctgctcctgcacccgcaccagctgccggaggccccgccggggtgtctggacagcccggccctggcgcggctgccgctgcaccagcacccggcgttaaggccgagagtcccaagcgggttgtgcaagctgccccccctgccgcacagactctcgcggccagcggaccagcctctaccgcagcttctatggtcatcggaccaacaatgcagggtgctcttccatcacctgctgctgtgccgcctccagctcccggaacgccaactggtttgccaaagggcgctgctggagcagtgacccagagcctgagccggacccccaccgccaccacctccggtattcgggcaacgttgacacccactgtcctggcccccagactgccacagcccccacagaatccgacaaacattcagaatttccaactgcctcctggaatggtgctggtgcgaagtgagaacggacagttactaatgattccccagcaggcattagcacagatgcaggcccaggctcatgcccagcctcagactacgatggctccacgacccgccactccaactagcgcccctccagtccaaataagcactgtccaagcgcccgggacaccgatcattgctcggcaggtgacacccactaccattatcaaacaggtctcacaggcgcaaacaacagttcagcccagcgcgaccctgcagcgctccccgggtgtccaaccgcagctagtgctcgggggcgctgcacaaactgcaagcctcggcacggctactgccgtgcagaccggaacaccccaacggaccgtcccaggagcgaccactacatcttcagccgcgacagagacaatggaaaatgtgaaaaagtgtaagaactttctaagtactctaatcaagctggcgtcctccggcaaacagagtacagaaacagccgccaatgtgaaagaacttgttcagaatcttttagatggcaaaattgaagccgaggacttcacttctagactttacagggaattaaacagtagcccacagccatacttggtccctttcctcaagcgcagtctgcccgccctgcgacaattgactccagacagtgctgcattcatccagcaaagccaacaacagcccccgccgccgacttcacaggccactacggctctgaccgcggtggttctgagttctagtgtgcaacggacagccggaaagactgctgctacagtcacaagcgccctgcaacctcccgtgctatccctcacacagccgactcaggtcggggtgggaaagcagggccaacccacgccactggtcatccagcaacctcccaagcccggtgcgttaatcaggccaccacaggtgacactcacccaaaccccaatggtggccctccgacagcctcataacagaataatgctaacaacacctcagcaaatccaactgaatccgctccagcccgttcccgtagtgaagcccgccgtgctcccaggaacgaaggcactgtcggctgttagcgcacaggcagccgccgcgcagaaaaataagctgaaggagccaggagggggaagctttcgtgacgacgacgatatcaatgacgtcgccagcatggcaggtgttaacctgagcgaggagagtgccaggatcttagccactaatagcgaactcgttgggaccttgacacgttcttgtaaggacgagaccttcctcctgcaggcgccgcttcagcgccgtatcctagagattggaaaaaaacacgggattactgagctccaccccgacgtggtgtcatacgtaagccatgcaacccaacagcggcttcagaatctggtggagaaaatctctgagaccgcccagcagaaaaacttctcttacaaggacgacgataggtacgagcaagcttcggacgtaagagctcaactaaagttctttgaacagcttgaccagatcgaaaaacagagaaaggacgagcaggaaagggagatcctgatgagggctgctaaatccagatctagacaagaagatcccgagcagcttaggttgaaacaaaaagccaaggagatgcagcagcaagagttagcacagatgcggcaaagagatgcgaacctcaccgcgttggccgcgattggcccacgaaagaagcgcaaagtcgactgcccaggccccggctcaggagccgaaggatctggccccggctctgtagtgcccggctcctctggggtcgggacccccagacagtttacacgccagaggatcactcgggtaaatctgagggatctgatcttttgcctcgagaatgaacgggaaacgtcccacagcttgcttctgtacaaggctttcctgaagtag

SEQ ID NO: 207955 - DNA, 2850 bp, synthetic construct
  misc_feature 1..2850: note = Description of Artificial Sequence: Synthetic coding sequence
  source 1..2850: mol_type = other DNA
ggccggggcctgctgcagcagcggggcggccgggagagcggccccgcgcctcccgccgcaaagcttcggccaccacctgagggtagtgctggctcgtgcgctcccgtgccagctgccgcagctgtcgctgccgggccggagcccgcccctgccgggcccgccaagccggctgggcccgcggcacttgccgccagggccggacctgggccgggtccaggtcctggcccaggcccaggtccaggcccgggcaaacccgccggcccaggcgccgctcagactctcaacggctccgccgcccttttgaatagccaccacgccgccgcccccgctgtcagtctggtcaataatggtcctgccgctttgcttcccttgccaaagccagctgccccagccgcagcccccccgccaccacctcccgctcctgctacactggctagaccccctgggcatccggctggccctccaacggctgccccagccgttcctcctcccgccgccgcacaaaacgggggatctgccggagctgcccccgcccctgcccctgctgctggcgggccagctggcgtgagtgggcagccaggccccggagccgccgccgcagcccctgctcccggcgtgaaggccgagtcccccaaaagggttgtgcaggcggccccccctgcagctcagactcttgcagcaagcggacccgcgtcgacagcggctagcatggtaataggaccaacgatgcagggggccttacctagtcccgccgccgtgccgccgcctgcgcccggcacaccaacaggtctacccaagggagcggctggcgccgttacgcagagcttatccaggactcccactgccaccacttcaggcattagagcgaccctgacacctactgtcttagcgccgcgcctgccgcaacctccccagaaccccacaaacattcagaactttcagctccccccgggcatggtcctggtgaggtccgaaaacggacagttgttgatgatcccccaacaagcattggcacagatgcaagcccaggcgcatgcccagccacaaaccactatggccccccgcccagcaaccccaactagcgccccgccagtgcaaatcagtacagtgcaggccccagggaccccgattattgccaggcaggtgacaccaacgacgattatcaaacaagtgagccaggctcagactacagttcaaccctcagctaccctccaacgatcacccggcgtgcagcctcagctggttctgggaggagctgcccagacagcctcgctcggcacagcaaccgccgtgcagacaggcacgccccagcggacagtgccgggagctaccacaacaagcagtgccgccacagagactatggagaacgtgaagaaatgcaaaaactttttgagtaccttgattaagctggcctcttccgggaagcagtcgacggagacagccgcaaacgttaaggagcttgtgcagaatttgctggacgggaagattgaggctgaggatttcacatcccgtctctaccgggaactgaactcatcccctcaaccttatctggtgccgtttctcaagagaagcctgccagctctccgacagctgactcctgacagcgccgcctttatccagcagagtcagcaacagccccctcctcctacatcacaagcgaccaccgcactaactgcagtggtgctgtcatcctccgttcagaggaccgctgggaaaaccgccgcaaccgtgacatctgctctacaaccgcctgtgttgtctctgacacagcctacgcaggtgggcgtcggaaaacaaggccaacctactcccttagtgattcagcaacccccaaagccgggagccctcatcagaccaccgcaagtcaccttaacacagactcctatggtagccctgagacagccgcacaaccgaatcatgctcaccaccccacagcagatacagttgaatcctctgcagcccgttcctgtggtgaagcctgcagtcctccccggcactaaagcattgtccgcagtctccgcacaggccgccgcagcccagaaaaacaagcttaaggagccaggagggggctcattcagggacgacgatgatatcaatgatgtggcaagtatggccggggtcaatctgtctgaagagtcagcacgaatacttgctacgaactctgaactggtggggacattaacccgttcatgcaaagatgaaactttcctgctccaggccccgctgcagcggcgaatcctggaaattggcaagaaacacgggatcactgagctccaccctgatgtggtctcatacgtgagtcacgccactcagcagcgcctccagaacctggtggaaaagatctccgagacggcccagcagaagaatttctcatataaagatgatgacagatatgaacaggcatctgatgtgagggcccagctcaagttcttcgaacaactggaccagatagagaaacagcgcaaagacgaacaggaacgcgagatcttaatgcgtgccgctaagtcacgaagtcgccaggaagaccccgagcagctgaggcttaagcagaaagccaaggaaatgcagcagcaggaactcgctcagatgcgccaaagagatgccaacttaactgcgctggccgctattggcccacggaaaaagagaaaggtcgactgtcccggacccggctcaggagcggaggggtccggcccaggctctgtggtgcctggtagctcgggagtggggacgccccgccagttcactcgccagcggattacccgagtgaatttgcgagatcttatcttctgcctggagaacgaacgggaaaccagccatagtttacttctctacaaggcttttttaaagtag

SEQ ID NO: 207956 - DNA, 2589 bp, synthetic construct
  misc_feature 1..2589: note = Description of Artificial Sequence: Synthetic coding sequence
  source 1..2589: mol_type = other DNA
atgcccgccggcctgaccgagcccgccggcgccgccccccccgccgccgtctctgcaagcggaaccgtcaccatggctccagccggggccttaccagttcgcgttgagtcgacccccgtcgccttaggcgctgtgacaaaagctcccgtgtccgtgtgtgtggagcctactgccagccagcctctcagaagtcctgtcggcacactcgtgacaaaagtagcacccgtctccgccccgcccaaagtaagctctgggccgagactgcccgcacctcagatcgtagctgtgaaagctccgaacacaacgacaatacagttccctgccaacctgcagctccccccagggaccgtcctcattaagtcaaactcaggccccctgatgctggtgagtcctcagcagacagtgacacgggcagaaacaacctcaaacatcacttcgcgcccagccgtacccgcgaatccccagacagtgaagatctgcacagtgcctaatagttccagtcagcttatcaagaaggtggctgttacccccgtcaagaaattagctcagattggaaccactgtagtgaccacagtccccaaaccaagctcagtacagagtgtggcagtacctacctccgttgtgacagtgaccccaggtaagccactgaacacagtaactactctcaagcctagctccctcggtgcctcttcaacaccatctaacgaaccgaatttgaaagccgagaactctgccgcagtacagatcaatctgtcaccaaccatgttggaaaatgttaagaaatgcaagaacttcctggctatgctgataaagctggcatgcagcggatcccaatcaccggaaatggggcagaacgtcaagaagctggtagagcagctcctcgacgccaaaattgaggccgaagagtttacgcggaagctgtacgtagagctgaaaagcagtccccagccacaccttgtcccatttcttaaaaagtctgttgtggctctaaggcagctgttgccaaactctcaatcatttattcagcagtgtgtgcagcaaacttccagtgacatggtgatcgcaacttgcacgactactgtcacaacttctccagtcgtcaccactaccgtgtcctcgtcgcagtctgaaaagtccatcatcgtgtccggtgctaccgctccgcggactgtgtccgtacagaccttgaacccacttgccggccctgtaggcgccaaggccggagtggttaccctccacagcgttggtcccactgcagccacaggcggtaccacagccggaacagggctgctgcagacgtctaagcccctggtgacttccgtggcgaatacagttaccaccgtgagtcttcaacccgagaaaccagtcgtgtcaggtacggctgtgacacttagcctcccggccgtgactttcggggagacgagtggggccgcgatatgcttaccctcagtcaagcctgtagtttcctcagcaggcactacttctgataaaccagtgattgggactcctgtgcagattaagctcgctcagcccggccctgtgctgagccagcccgcggggattccacaagctgtgcaggtgaagcagcttgtcgtgcagcaaccctcaggaggaaacgagaagcaggtcaccaccatttcccacagttccactctcaccattcaaaaatgtggtcagaaaacaatgccggtgaatacaatcattcccacctcgcaatttccaccggccagtattctgaaacaaattactctgcccggtaacaaaattctgagcctgcaggcctccccgacgcagaagaatcgcatcaaggaaaatgtgacaagttgctttagggacgaagatgacatcaacgacgtgaccagcatggccggggtgaacctgaacgaagagaatgcctgcattttggccaccaactctgagctggtgggcacacttatccagtcctgtaaggatgagccatttctcttcattggtgccctgcagaagcgcatcctcgatatcggcaagaagcatgatatcaccgagctgaatagcgacgcagtgaacctgatatcacaggcgacccaggagaggctaagagggctgttggagaagctcaccgcaatcgcccagcacagaatgacgacgtacaaagcctcagaaaattacattctgtgttccgacacaagaagtcagctaaagtttttggaaaaactggatcagcttgagaaacagcggaaggacttagaagaacgggaaatgttgctgaaggccgcaaagtcacgatcaaacaaggaagatccagaacagctccggttgaaacaaaaggctaaagaactgcaacagttggaactggctcagatacaacacagagatgcaaacctcacagcattggccgcaattggaccacgtaaaaagagacccctggagtctggtatcgagggactgaaagataacctgctggcatccggcaccagcagccttacagctactaagcagctacaccgtccacgcattaccagaatctgcctcagagatctcattttctgtatggaacaggagcgagaaatgaagtactctcgcgccctgtacctcgccctgctgaaatag

SEQ ID NO: 207957 - DNA, 1857 bp, synthetic construct
  misc_feature 1..1857: note = Description of Artificial Sequence: Synthetic coding sequence
  source 1..1857: mol_type = other DNA
atgcccgccggcctgaccgagcccgccggcgccgccccccccgccgcagtgtccgctagcggcactgtgactatggctcccgcaggcgctctccctgttcgggtggagagtacaccagtggccctcggggctgtcaccaaagcacccgtgtcagtttgcgtggagcctaccgcctcccagccccttcggtcccccgtgggcaccctggttacaaaagtggcacccgtctcggctcctcctaaggtctctagcgggcctagactgcccgcaccacagattgttgctgttaaagcaccgaacaccacgacaatccagtttccggctaacctgcaactgcctcccggaaccgtccttataaagtccaactccggccctctcatgctggtgtcccctcagcagacagtgacaagggcagagaccaccagcaatatcacctcacggcccgccgtgcccgcaaacccgcagactgtgaagatatgcacagtgcccaactcctcctctcagttgattaagaaagtggccgtcacccccgtgaaaaagctggcccagatagggaccaccgtggtcaccaccgtcccaaagcccagcagtgttcagtccgttgcagtcccaacaagcgtggttacagtaacccctggaaagccacttaacacagtgaccactctcaagccctcaagcctgggcgcgagcagtactccatccaatgagcctaatttgaaggcggagaacagcgccgccgtccagatcaacctttcccccaccatgttagagaatgtgaaaaaatgtaaaaattttctggccatgctcatcaaactcgcgtgctcaggctctcagtctcccgaaatgggccagaacgttaaaaagttggtggaacagcttctcgatgccaaaatcgaggctgaagaatttaccaggaagctctatgtagagctgaagtcgtccccgcagcctcatctcgtcccctttctcaagaagtccgtggtcgctctccgccagcttttgccgaattcacaatctttcatccagcagtgtgtacagcagaccagtagcgatatggtgattgcaacttgtactacaaccgtgacaacatccccagtcgtgacaaccacagtgtcctcctcgcagtcggaaaaatccatcattgtctctggagcaacggccccacggaccgtcagcgtgcaaaccctcaaccccctcgctgggccggtcggagcaaaggctggggtggtgactcttcactcagtgggacccactgccgctaccggtggcactacagccggcacaggcctgctccagacctccaaaccgctcgtgacctccgttgccaacaccgtcacaacagtttcactccagcctgagaagcccgtcgtgtcaggtaccgcagtcacgttatccttacctgctgtaacctttggcgaaacgtccggcgccgcgatctgcctgcccagcgtcaagcctgtggtgagctctgctggaaccacttctgacaagcccgtcattgggacacccgtgcagattaagcttgcacagcctgggccagttctttcccaaccagctggtatcccccaggccgttcaagtgaaacagcttgtggtccagcagccctctggaggaaatgaaaaacaggttaccaccatttctcactcaagtactcttacgattcagaaatgcggacaaaagaccatgccagtgaacacaatcataccgacttcccagtttccccccgcatcaatcctcaagcagataacactacctggaaataagattctgtccctccaggccagccccacccagaagaacaggatcaaagaaaacgtaacgtcctgtttcagaagcactttcatttgcgtgtactag

SEQ ID NO: 207958 - DNA, 2598 bp, synthetic construct
  misc_feature 1..2598: note = Description of Artificial Sequence: Synthetic coding sequence
  source 1..2598: mol_type = other DNA
atgcccgccggcctgaccgagcccgccggcgccgccccccccgccgccgtgtccgctagcggaactgtcacgatggcaccagcgggcgccctacctgtgagagtagagtccaccccagttgccctaggtgccgtaaccaaggccccagtctcagtgtgcgtggaacccacagcctcccagccactcagatctccagtgggaaccctcgtgacgaaagttgcccctgtcagtgcgcctccgaaagtttcttccggcccgcgcctgcccgccccccaaattgtggcagtcaaggctcccaacacaacgacaattcagttccctgccaacctgcagcttccacctggaaccgtcttgatcaagtcgaacagcggcccactgatgctcgtgtccccccagcaaaccgtcacccgggcagagactacctcaaatatcacaagccggcctgccgttcccgccaaccctcagaccgtcaagatctgcaccgtgccaaactcatcgagccagttaattaaaaaagtggctgtgactcctgtcaagaagctggcccaaatcggcaccactgtggtgacaacggttcccaaaccgagctcagtgcagagcgtggccgtccccacatccgttgtgaccgttacacccggaaaacccctgaacactgtgacgaccttaaagccatccagcctcggcgccagcagtacgccatccaacgaacccaacttaaaagcggagaactctgctgccgtgcagatcaacttgtcacccacaatgctggagaatgtcaagaagtgcaaaaatttccttgccatgttgataaaactggcgtgtagtggcagccagtccccagaaatgggccagaatgtaaagaaactggtggaacagttgttggacgctaagatagaagcagaggaattcactcggaaactctacgtcgagttgaaatcatccccccaacctcacctcgtgccgtttcttaagaaatctgtagtcgcactgcgtcagctacttccgaatagccaaagtttcattcagcaatgtgtacaacagacttcatcagacatggtgattgctacttgtacaaccacagtgactacctcacctgtggttacaactacagtctcttccagccagagcgagaagagtatcatcgtgtccggtgccactgcgcctcgcacagtgtctgtccagacattgaacccacttgcggggccggtaggtgccaaggcaggagtagtcacactgcatagtgtggggcctacagctgccacaggaggcaccacggcaggaacagggttgctccagacaagcaaacctctcgtgacatccgtcgctaatactgtgaccacagtgtccctgcagccagagaaacccgtcgttagcggaaccgccgtcaccttgtccctccctgccgtgactttcggcgaaacctctggcgcagctatatgtcttcctagcgtaaagcctgtcgtcttctgttgggaccatataaaaccagtcataggcacacctgtgcagataaagctcgctcagcctggcccagtcctaagtcagcctgcggggattccgcaagccgttcaggtgaagcaactcttctccctctttcaggtagtccaacagcctagtgggggcaatgagaagcaagtgactacgatttctcattcctccactctgacaattcagaagtgcggccaaaagaccatgcctgttaacacaattatccccaccagccagtttccacctgcctcaatacttaagcagatcacactacctggcaataaaatactgtccttacaagcctcccccacacaaaagaataggatcaaggagaacgtgacaagttgttttcgcgacgaagatgatatcaatgatgtcacgtccatggccggtgtaaatttgaatgaggagaacgcatgcatcctagccactaacagcgaattggtgggcaccctcatccagtcttgcaaagatgaaccatttctgtttatcggcgcccttcagaaacggatccttgacattggcaaaaaacatgacatcacggaactaaactccgacgccgtaaacctcatatcccaggctacacaagaacggcttagaggactcttagagaagctgaccgctatcgcccaacatcggatgacaacatacaaggcctcagagaattacatactgtgcagcgacacccgctcacagttgaaatttttggagaaactcgaccagctcgagaagcaaaggaaagatctggaggagagggagatgctgctcaaggcagctaaaagtaggagcaacaaagaggacccagaacagctgagactcaagcagaaagctaaggagcttcaacagctcgagcttgctcagattcaacaccgcgacgctaatttaactgccctggccgccattggtcctcggaagaagcgccctctggaatccggcattgagggacttaaggataatttacttgcttcgggaacaagctcattaacagctactaagcagcttcacagaccacgaatcacccgtatctgtctgcgggatctgattttttgtatggagcaggagagggagatgaaatacagcagggcgctgtaccttgcactcctgaagtag

SEQ ID NO: 207959 - DNA, 2238 bp, synthetic construct
  misc_feature 1..2238: note = Description of Artificial Sequence: Synthetic coding sequence
  source 1..2238: mol_type = other DNA
atggccgccctggccgaggagcagaccgaggtggccgtgaagctggagcctgaggggccccctactttgctcccaccccaggccggtgacggtgccggtgaagggtccggaggcactactaataacggacctaacggaggggggggcaacgtggctgctagctcttcaaccgggggtgacggcggtaccccaaagcccacggttgccgttagtgccgccgcaccggccggggccgcaccggtacccgcggcagctcccgatgctggtgccccccatgacagacagacacttttagctgttttacagttcctccgacagtccaaattacgcgaagcggaggaggccctgaggcgcgaagccggcttgctggaagaggcagtggccgggtcaggcgcgcccggggaagtagactccgccggagccgaggtgacgtccgccttgctatccagagtgacagccagtgcaccaggaccagctgctccggacccccccggaaccggagccagcggagcaacagtagtcagcggatccgcttccggccctgcagcacccggcaaagtcgggtctgtggccgtggaagatcagccagatgtgagcgctgtgctgagcgcctacaaccagcagggagatcccaccatgtacgaggagtactattcaggcctcaaacacttcatcgagtgtagcttggactgtcaccgggccgaactaagtcagctcttttatcccctgttcgtgcacatgtatcttgagttggtctacaaccaacatgaaaacgaagccaaatctttctttgagaagttccacggcgatcaagagtgctactatcaggacgaccttcgtgtcctgtcctctctaaccaagaaagagcacatgaaaggtaatgagaccatgcttgacttccgtactagtaagtttgtcctgaggataagtagagattcgtaccagctgctaaaaagacacctgcaagaaaaacagaacaaccagatctggaacatcgtacaggaacacctgtacatcgacattttcgatgggatgcccagatccaaacaacagatcgatgccatggtgggcagtcttgctggtgaagctaagcgagaagccaacaaaagtaaggtcttttttgggcttctgaaggagccagaaatcgaggtccccctagacgacgaggacgaagagggagaaaacgaggaaggcaagcctaagaaaaagaagcccaaaaaagactcaatcggttctaaaagcaaaaaacaggaccctaacgcccctccacagaataggatacctttgcccgagctgaaggactctgataagcttgacaaaatcatgaacatgaaggagacgactaagcgtgtgcgcctgggacctgattgtttgcccagcatctgcttctacacattcctcaatgcttaccagggcctcacagcagtagatgttactgatgactcctcccttattgcaggcggtttcgctgattcgactgtgagggtatggtctgtaacgcccaagaaattgaggtctgtaaagcaggcatcggacctgagcttaattgataaagagtccgatgacgtcctggaaagaatcatggacgagaagaccgcatccgagctcaaaatcctctatggccactctggccctgtgtacggagccagcttttctccagatcggttgtgggctacggatcactaccagccactgagaatttttgctggtcatctagccgacgtgaactgcactcgtttccaccctaatagtaactatgttgctacgggtagcgccgaccgtaccgtaagactgtgggacgtccttaacggcaattgtgtcagaatcttcacaggtcataaaggtccaatccactcacttaccttcagccctaatgggcgatttctcgcgaccggcgccaccgacggacgtgtgttattgtgggatatcggtcacggactgatggttggagagttgaagggccataccgacaccgtctgttccctgcggttctcccgggatggcgaaatcttagccagcggatcaatggataacacagtgcgactctgggacgctatcaaagccttcgaggatttggagacagacgacttcacaaccgccacgggtcatattaacctccccgaaaatagtcaggaactccttctgggaacctacatgacaaaatccacaccggtagtgcatctacacttcacccggagaaatttagtcttggccgccggcgcatattctcctcaatag

SEQ ID NO: 207960 - DNA, 2403 bp, synthetic construct
  misc_feature 1..2403: note = Description of Artificial Sequence: Synthetic coding sequence
  source 1..2403: mol_type = other DNA
atggccgccctggccgaggagcagaccgaggtggccgtgaagctggaaccagagggccccccgacgctactgccaccacaagccggtgatggcgcaggggaagggagcggaggtacgacaaataatggcccgaacggtggtggcggaaatgtggcggcttcatcttccacagggggcgatggcggcacgcccaaaccaactgttgccgtcagcgctgccgccccagctggggcggcaccagttcccgccgctgctccagatgcaggggcaccacacgaccgacagacactgttggccgtgctccagtttcttaggcagagcaagctccgagaagctgaagaagcgctaagacgagaggctggcctcctggaggaggctgtggccgggtccggggcaccaggagaggtcgatagcgccggcgctgaggttacatcggcgctattatcaagagttaccgccagcgctcccgggccagccgcccctgatccccctggcacaggagcatccggggccacagtggtctcgggttctgccagcgggcccgcagctcccggaaaggtgggatcggtcgccgttgaagatcaaccagatgtgagcgctgtgctgtctgcatacaaccagcaaggcgatccaaccatgtacgaggaatactattccgggcttaagcacttcatcgagtgttcattggattgccaccgggctgagctaagtcaacttttctatcccctgttcgtacatatgtacctggagctcgtctacaaccagcacgaaaacgaagctaagtcattctttgagaagttccatggagaccaggagtgttactaccaagatgacctgcgagtgttgtctagtctcaccaagaaggagcacatgaaaggaaacgagaccatgctagactttagaacttccaaattcgtactgcgcatcagcagagatagctatcaactgctgaagcgccacctccaggagaaacagaacaatcagatatggaatatcgttcaggagcacttgtatatagacattttcgacggaatgccacgctctaaacaacagatcgatgccatggtgggcagtctggccggggaagcgaaaagggaggcaaataagtccaaagtcttctttggattgctgaaggagccagagatcgaggttcccctggatgatgaggacgaagagggcgaaaatgaagaaggcaagcctaagaagaaaaaacccaaaaaggatagtatcggcagcaaaagtaaaaagcaagacccaaacgcaccccctcagaatagaatccctctgcctgagctgaaggatagcgataagctcgacaaaatcatgaacatgaaagagacaacaaaacgggtgcggctggggccggattgcttaccctctatctgcttctacacattcctcaacgcttatcaagggctgactgctgtcgacgttactgatgactccagtctgattgctggaggattcgctgacagcacagtacgcgtatggtctgtcacgccaaaaaagctgcgctccgttaagcaagcttcggaccttagcctgatagacaaggagtctgacgatgttctagagcgtatcatggatgaaaaaacagctagcgaattgaaaatcctgtacggccacagcggccccgtctatggtgcaagcttttccccggaccgtaactatctattgtcttcaagtgaggatggcacagtccggctctggtcattgcagacatttacttgtcttgtgggctacaaggggcataactatcctgtatgggatacccagttcagtccgtatggatattattttgtttcaggtggacatgatcgcgtggccagactgtgggccactgatcactatcagcccctccgcattttcgccggccatctggcggatgtcaactgtactcgtttccaccctaatagtaactatgtggctactggcagtgccgaccgcacagtacggctatgggacgtactaaacggcaactgcgtgagaattttcactggccacaaggggccaatccactctttgacttttagccctaacggacggtttctggccaccggagcaacagacggtcgggtgctcctgtgggacatcgggcacggcctaatggtaggcgagctcaagggacacaccgacaccgtgtgctctctccgtttcagcagggatggcgagatcctggccagcggaagcatggacaataccgttcggctgtgggatgccatcaaggccttcgaggaccttgagacagatgactttacaacagcgaccgggcatataaacttgcccgaaaattcacaagaactgttattgggcacctacatgacaaagtcaacaccggtggtgcacctccacttcacacggcggaatctggtgttggccgccggtgcttatagccctcagtag

SEQ ID NO: 207961 - DNA, 2034 bp, synthetic construct
  misc_feature 1..2034: note = Description of Artificial Sequence: Synthetic coding sequence
  source 1..2034: mol_type = other DNA
atggccgaggagaagaagctgaagctgagcaacaccgtgctgccctcagagtctatgaaagtcgttgctgaaagcatggggattgcacagattcaggaagagacttgtcagctgttgacagatgaggtgtcttatcgcataaaagaaattgcccaggatgccttgaaattcatgcacatggggaaacgacaaaaactgaccacctcagacatagactatgctctaaagttaaaaaacgttgagcccctgtacggattccacgcacaggaattcatccccttccgtttcgccagtgggggtgggcgcgagctatatttctacgaagagaaggaagtcgatttgtctgatatcatcaacacccctcttccccgcgtgcctctggacgtttgcttaaaggcacactggttaagtatcgaaggatgtcagcccgccatccctgaaaatccaccacctgcaccaaaggagcaacagaaggctgaggctactgaacccctgaagtccgccaaacctgggcaggaggaggacggtcctctgaaggggaagggtcagggggccacaacagctgatggtaagggaaaagagaaaaaagcccccccccttctggaaggagccccactaaggctgaagcctagaagcatccatgagttatccgtagagcagcagctctattacaaggaaatcaccgaggcctgcgtaggcagttgcgaggcgaaacgtgcagaggctctccagtcgatcgccaccgatcccggcttgtatcagatgttgcctagattctctacctttataagcgaaggagttcgggttaacgtggtgcagaataatctcgctctgctgatttacttgatgcgtatggtcaaagctctgatggacaatcccacactgtatctggagaagtatgtgcacgagctgattcccgccgtgatgacatgcatcgttagtcgccagttgtgcttgcggccggacgttgataatcactgggctctaagggactttgccgcacgcttggtcgcccaaatctgtaagcacttttctacgaccacgaacaatattcagagtcgaatcaccaagacatttaccaaatcatgggtagatgaaaaaacaccctggaccacacgctacggctcgatcgcgggcttggcagagctggggcatgacgtgatcaagaccttgattctgccgcgtctgcaacaggagggcgaaagaattcgctctgtactcgacggtcccgtactttccaatattgacagaatcggtgctgatcatgttcagagcttgctcttaaagcattgtgcaccagtcctggccaagctccgtcccccacctgataaccaggacgcttacagggcggagtttggaagtcttggccccctgctgtgttcacaggtagtaaaagcaagagctcaggctgccctgcaggcgcagcaggttaacaggacaactctgaccataacccaaccccgaccaactctcaccctgtcgcaagcaccgcagcctggcccgcgcacaccaggattgttgaaggtccccggatcaattgccttacccgtgcagacgttagtttctgccagggctgcggcgccaccccaaccctcccccccccctactaaattcattgttatgagcagtagttcaagtgcaccgtcaacccagcaggttctctccctcagcacctctgcacctggtagcgggtccactaccacctctcccgtgacaacgacagttccctccgtgcaaccgatcgtcaagctggtctcgacggcaacaaccgctcccccaagcacagctcccagcggccccgggagcgtccagaagtacatcgtggtgtctctgccccccacaggggagggcaagggcggaccgacttcccacccctcgccagtccctccccctgccagctctccgtcaccactctccgggagtgctctctgtggtgggaagcaagaggccggggattcgcctcctccggctccagggaccccaaaggccaatggtagccagcccaactcaggtagcccccagcccgcgccttag

SEQ ID NO: 207962 - DNA, 231 bp, synthetic construct
  misc_feature 1..231: note = Description of Artificial Sequence: Synthetic coding sequence
  source 1..231: mol_type = other DNA
atggccgaggagaagaagctgaagctgagcaacaccgtgctgccctcggaatcaatgaaggtcgtagcggaatctatggggattgcccaaatacaagaagagacctgtcagcttttgacagatgaagtgagctacaggatcaaggagatcgcccaggatgccctgaagttcatgcacatgggcaaaaggcagaagctgaccacatctgacattgactatgccctgaagtag

SEQ ID NO: 207963 - DNA, 1806 bp, synthetic construct
  misc_feature 1..1806: note = Description of Artificial Sequence: Synthetic coding sequence
  source 1..1806: mol_type = other DNA
atgcacatgggcaagcggcagaagctgaccaccagcgacatcgactacgccctgaaacttaaaaacgtcgaacccctttacggttttcatgctcaggagttcatcccgtttcggtttgccagcgggggcgggagggaactctacttctacgaggagaaagaggtagatctttctgatataatcaatacgcctctgcctcgggtgcccctggatgtctgcctgaaggcacctaaagagcaacagaaagctgaggctaccgaaccgctcaaaagcgcgaagccaggccaggaagaggacggtcctttgaagggaaagggtcaaggagctacaaccgcagatggcaagggcaaagagaagaaggcgcctccgctgctggaaggcgcacccctgcggttaaagcctagaagcattcatgaactgagtgtggagcaacagctttattataaagagatcaccgaggcgtgcgtagggagctgcgaggctaaacgcgctgaagcgctccagagcatagccacagaccccggactctatcaaatgttaccgagattctcaaccttcatttctgaaggcgtgcgtgttaatgtggtccagaataatttggccctgctgatttacctgatgcggatggttaaagccctcatggacaacccgaccctctacctggaaaagtatgtgcacgagcttatcccggccgtgatgacatgcatagtgtctagacaattatgtctgaggcctgatgtcgacaaccattgggcactgcgtgactttgcagctcggctcgttgcccaaatctgcaagcacttctccacaacgaccaacaacatccagtcccgaatcacaaaaacattcaccaagagttgggtcgatgagaaaacaccctggacgaccaggtatggcagcatagctggactggctgagctgggccacgacgtaatcaagaccctaatccttcctcgcttacagcaggaaggtgagcgaatccgttcagtgctggatgggcccgtcctaagtaacattgatcgcatcggggccgaccacgttcagtccctgctgctcaaacactgcgcccccgtgttagctaaactgcggcctccccctgacaatcaggacgcctatcgcgctgagtttggctctcttgggcctttgctgtgcagccaggtggttaaggcccgcgcccaagccgctctccaagcacagcaggtgaacaggactactctcacgatcacccagccaagacctacgctgacattgagccaagccccacagccaggaccacgaacccccggactgctgaaagtacctggcagcatcgctttacctgtacaaacacttgtttccgctagagcggcagcccctccccaaccatctccaccccccaccaaattcatagtaatgtctagtagttcttcggctccaagtacccagcaggtgctgtccctttctacgtccgctcctggctccgggagcacaacgaccagtccggtgacaactaccgtgccttcagtgcagcctattgtgaaactggtcagcacagctactaccgctcccccttccactgcacctagtggccccgggtcagtacagaaatacattgtggtctccctgccgcctactggagaggggaaaggcggtcctactagccacccttctcctgtaccgccaccagccagttctccctccccactctctggaagcgctttgtgcggaggaaagcaggaggccggggatagcccgccccccgctcctggtacaccgaaagccaacggaagccagccaaacagcggctctcctcaacccgccccatag

SEQ ID NO: 207964 - DNA, 45 bp, synthetic construct; identical to SEQ ID NO: 101770
  misc_feature 1..45: note = Description of Artificial Sequence: Synthetic coding sequence
  source 1..45: mol_type = other DNA

SEQ ID NO: 207965 - DNA, 2145 bp, synthetic construct
  misc_feature 1..2145: note = Description of Artificial Sequence: Synthetic coding sequence
  source 1..2145: mol_type = other DNA
atgaccaagcggcggctgcagaccatcaccgcctgcctgcagctgcgagaaggatcccccagcctgcataggggcctacaccccagccgagaagaaaagagagacagtcgaatggcggaggagaagaaattgaaactgagcaacaccgtcctcccgtctgaatctatgaaagttgtggccgaaagcatgggaatcgcacagatccaggaagaaacatgtcagctcctgactgacgaagtgtcataccggatcaaagaaatagcccaagatgcactcaagtttatgcatatgggcaagaggcagaagttaaccacttctgacatcgactacgctctgaagttgaagaacgtcgaaccattgtatgggttccacgcgcaggaatttatccccttcagatttgcctccggaggagggagagagctgtacttctatgaggagaaggaggtggacttgagcgatataataaatactcctctcccgagggtccccctggatgtttgtctgaaagctcactggttgtccattgagggctgccagcccgccattcctgagaacccccctccagcccctaaggaacaacagaaggcggaagctactgagccattgaagtcagctaagcccggacaggaggaagatggcccactcaaaggcaaaggccaaggggctacaacagccgatgggaaaggcaaagaaaagaaggctccgcccctgcttgaaggcgcaccactcagactaaagccacgctcaatccacgagctcagcgtagaacagcaactgtattataaagagattacagaagcttgtgtgggttcctgcgaagcgaaaagggctgaggcactgcagtcaatcgccacggaccccggcctttatcaaatgcttccacgctttagtacatttatcagtgaaggcgtacgggtgaacgtagtccagaacaatctagccttacttatttatctcatgcgcatggtcaaggccttgatggataatccaacgctatatctggaaaaatacgtgcatgagctcatccccgccgtaatgacctgcatcgtttcacgtcagctgtgtctgcgccccgacgttgataatcattgggcattaagggactttgcagcccggttggtggctcaaatatgtaagcacttttccaccaccactaataacattcagtccagaatcactaaaacttttaccaaatcgtgggtcgacgagaagactccatggactaccaggtacggctctattgctgggctcgcagagcttggtcacgatgtcattaagactcttatactgcctaggctgcaacaagagggcgagcggatccggtctgttttagatggaccagtactcagtaatatcgataggattggggccgaccatgtccagtccctgctgttgaagcactgtgcaccagttctggccaagctccgccctcctccggataatcaggatgcctaccgcgctgagtttggctccctcgggccactgctgtgcagccaagtcgttaaagcgagagctcaggcagccctacaagcccaacaggttaacagaacaacattaactattactcagccacgtcccactctaaccctgagtcaggcacctcagcctggccccaggactcctggcctgctgaaagttccagggtctatagctctcccggtgcagactctcgtctccgcgagggctgctgctcccccccaacccagtccgccacctactaagttcatcgtcatgtcctcgagcagttctgctccctccactcaacaagttctgtcactatccaccagcgcccccggctctggctctaccacaaccagtcccgtgaccaccaccgtccccagcgtccagcctatcgttaagttggtctccactgccacaacagctccaccttcaacagcaccctccggacccgggagcgtccaaaagtatatcgtggtgagtttgcccccaacgggggagggcaaaggtggccctacatcccacccttcacccgttccccccccagcctcaagcccatctcctctctcaggctcagctttgtgcggggggaagcaggaggcaggagactcccctccgcccgcccctggaacacctaaggccaacggctcccagcccaattctggcagccctcagcccgccccgtag

SEQ ID NO: 207966 - DNA, 702 bp, synthetic construct
  misc_feature 1..702: note = Description of Artificial Sequence: Synthetic coding sequence
  source 1..702: mol_type = other DNA
atggccgaggagaagaagctgaagctgagcaacaccgtgctgccctctgaatccatgaaagtggtcgctgagtcaatggggattgcacaaatccaggaagaaacttgccagctcctgacagacgaggtaagttaccgcataaaggaaatcgctcaggatgccctcaagttcatgcatatgggcaagcgacagaaacttacaacatcggacattgattacgctttaaagctcaagaacgtggagccgctgtacggttttcatgcacaggagttcatcccattccgcttcgctagcggcggagggcgtgagctgtatttttacgaagagaaggaagtcgatctgtccgatattattaacactcctctgccgcgagtgccactggatgtctgcttgaaggcccccaaagagcagcaaaaagcggaagcaactgagcccctcaagtccgctaagccaggccaagaagaggatggtccacttaagggcaaaggtcagggagccacaacagccgatggcaagggcaaagagaagaaagcaccgccgctgctcgagggtgctcccttaagattgaagcctagatctatccatgagctcagcgtcgagcaacagctgtattacaaggagattaccgaggcctgtgtggggtcatgcgaagctaaaagggccgaggcgctgcaatccatcgctaccgatcctgggttatag

SEQ ID NO: 207967 - DNA, 405 bp, synthetic construct
  misc_feature 1..405: note = Description of Artificial Sequence: Synthetic coding sequence
  source 1..405: mol_type = other DNA
atggccgaggagaagaagctgaagctgagcaacaccgtgctgccctccgaatccatgaaggtggtggcagaaagtatgggcatcgcccagattcaggaagagacctgccagctgctgaccgatgaggtgtcttatcgcattaaggagattgcccaagacgctcttaaattcatgcacatgggaaaacggcagaaattaactactagcgacatagattacgctctgaagctgaaaaatgtcgagccactgtatggttttcacgcgcaggagttcatacccttccgcttcgcctcaggggggggacgcgaattgtatttttacgaggaaaaagaggtcgacctgtccgacattattaacacccctctcccccgggtgcctctggacgtatgccttaaggcgcattag

SEQ ID NO: 207968 - DNA, 345 bp, synthetic construct
  misc_feature 1..345: note = Description of Artificial Sequence: Synthetic coding sequence
  source 1..345: mol_type = other DNA
atggccgaggagaagaagctgaagctgagcaacaccgtgctgccctccgagagcatgaaggtagtcgccgagtctatgggcatcgcccaaattcaggaggaaacgtgtcagctgttaacagatgaggtgagctataggatcaaagaaatagcccaggacgccctgaagtttatgcatatgggaaaaagacagaaacttaccacttctgatatcgattatgccctgaagctgaagaatgtggaacccctgtacggcttccatgcccaagaattcattccctttcgttttgcgtctggcgggggccgtgagctttatttttatgaagagaaagaagttgatttgtag

SEQ ID NO: 207969 - DNA, 2034 bp, synthetic construct
  misc_feature 1..2034: note = Description of Artificial Sequence: Synthetic coding sequence
  source 1..2034: mol_type = other DNA
atggccgaggagaagaagctgaagctgagcaacaccgtgctgccctccgaatccatgaaggtggtggccgagagtatgggcatagctcagatccaagaagagacctgccagctgctaactgacgaggtatcataccgaatcaaagaaatcgcccaggatgcattaaagttcatgcatatggggaagcggcagaagctgacaacatctgacatagattacgcactgaagttaaagaacgtcgaaccgctttatgggtttcacgcacaggagtttatccccttcagatttgcctccggaggaggacgtgaactgtatttctatgaggagaaggaggtggatcttagcgacataattaacacgccgctgccccgcgtccccctggatgtgtgcctaaaagcgcattggctctcaatcgaaggctgtcaacctgccatcccagagaatccaccccctgccccaaaagaacaacagaaggcggaggccacagagccactgaagtcagccaaaccaggccaggaagaagacgggccgctgaaaggcaaggggcagggcgcaacgaccgcagatggcaaggggaaagagaagaaagcccccccattgctggagggagcccccttgcggttgaagccgaggtccatccacgagttaagtgtcgagcaacagttgtattataaagaaattaccgaggcttgtgtgggaagttgcgaagcaaagcgggcagaggctttacagagcattgccactgatccaggactgtatcagatgctgccacggttctctacatttatcagcgaaggcgtgcgggtgaacgtcgtccagaataatctggccctattaatataccttatgcgtatggtgaaagctctcatggacaaccctacgttgtacctggagaaatacgtgcacgaactcatcccggctgtcatgacatgcatcgtgagcaggcagctctgcctgcgacctgatgtcgacaaccattgggccctgagagatttcgccgcaagactcgtggcccagatttgcaagcacttttctaccacgacaaacaacatccagtcacgaatcactaaaactttcactaaaagctgggttgacgagaagaccccttggactacacggtacggctctattgcaggtctggctgagctgggccacgacgtgatcaagaccctaatcctgccacgattgcaacaggagggtgagcgcatcagatcggtgttagatgggccagtgctgtcaaacattgatcgaatcggtgctgatcatgtccagtcactgcttcttaagcattgcgcccctgttttggctaagcttcgccccccgccggataaccaggatgcctacagggccgagtttggaagcctaggtcctcttctgtgttcacaggtcgttaaggcacgggcacaggcagccctccaggcccagcaggtaaacaggacaactttgactattactcagcctagacccaccctaacactcagtcaagccccccagcctgggccacggactcctggacttttaaaggtgcccggatctatcgccctcccagtgcagacgctggtttcagcccgtgccgctgcacctccccaaccatcacctccgccgaccaaattcattgtcatgtcttcttcgtcatcagcaccatctacccagcaggtgctgtccctctcaaccagtgctccaggcagtgggagcacaactacctctcccgtaaccaccaccgtccccagtgtgcagccaatcgtgaaattagtgtccactgccacaacagcaccaccaagtactgcaccctcaggccctggcagtgtacagaaatatatcgtggtgtctttaccgccgactggcgagggcaaggggggtcctacctcccacccttcccctgtccctccccctgcctcatccccatcgcctttgtccggcagtgccctatgcggcgggaagcaagaggcgggcgattctccccctcccgcacctggcactcccaaagccaacggttcccaaccaaactccgggtctccacaaccagccccttag

SEQ ID NO: 207970 - DNA, 2034 bp, synthetic construct
  misc_feature 1..2034: note = Description of Artificial Sequence: Synthetic coding sequence
  source 1..2034: mol_type = other DNA
atggccgaggagaagaagctgaagctgagcaacaccgtgctgcccagcgaaagcatgaaagttgtggcagaatccatgggaatcgcgcagatccaggaggaaacatgtcagctgttgactgacgaagtctcctaccgtattaaagagatcgcccaggacgccctcaagttcatgcatatggggaagcgccagaaacttacgacatcggatatcgactacgcactcaagctgaaaaacgtcgaaccactgtacggctttcacgcacaggaattcatcccattccggtttgcaagtggaggcggccgggagttatatttttatgaggaaaaagaagttgatctgtccgatataattaatactcccctgccacgggttcccctggacgtgtgcttgaaagcccattggcttagcatcgagggctgccaaccagctattcccgagaatcctccacctgctcccaaggagcaacagaaagcggaggcaaccgagcccttgaaaagtgctaaacccggtcaggaagaagatggcccccttaaaggaaaaggtcagggcgccactactgccgatggaaaagggaaggagaaaaaggcaccaccactgttagagggcgcacctctgaggctcaaacctcggtctattcatgagctcagtgtagagcagcagctgtactacaaagaaataacagaggcgtgcgtaggaagctgcgaggcaaagcgagcagaggccctgcagtccattgcaacggatcctggtctctaccagatgcttccgcggtttagtacatttatcagtgaaggcgttcgggtcaacgtcgtgcagaataacctagccctattaatctacctcatgcgtatggtcaaagctctcatggataatcctaccctttatctggagaagtatgtgcatgagcttatcccggcagtcatgacttgcattgttagtcggcagctttgtctgaggccagacgtggacaatcactgggcccttagagatttcgcagcacgtcttgtagcacagatttgtaaacacttttctactactactaacaacatacagtcaaggattaccaaaacctttaccaaaagttgggttgatgaaaagacaccttggacgaccaggtacggttctattgcaggattagcggaacttggtcacgatgtcatcaagacactgattcttcccaggttacagcaggaaggagagcggattaggtctgtgcttgatggccctgtgctgtccaatatcgacagaattggagctgaccacgttcagtctttgctgttaaaacactgtgctcctgtgctggccaaattgcggcctccacccgataaccaggacgcctacagggccgagtttggctccttgggccccctcctttgttcccaggtggttaaggcccgggctcaggccgcccttcaggcgcagcaggtgaaccggacgactcttaccatcacccagccaaggccaactctgacactgtcccaggcacctcaacccggtccacggacaccaggtctgcttaaagtcccagggagtatcgctcttcccgtccagactctcgttagcgcccgcgctgctgcgcctcctcagccgtccccccctcccaccaagttcatagttatgtccagctcctcttccgctcccagcacccagcaggtcctcagtctgtcaacatctgccccgggatcagggtccacaaccacgagtcctgtgacaacaactgtgccttctgtgcagcccatcgtgaagctcgtgagcacagcgactacagcacctccatccactgccccgtctggcccaggatctgtacaaaagtacatcgtggtatcactgccccccactggggagggaaagggagggccaactagccatcccagtccagtgccaccaccagcatcaagccccagcccactttctggcagcgccctctgtgggggaaaacaggaggctggagatagcccaccaccagcgccgggcactcccaaggccaacgggagtcaacctaatagtggctctccccagcctgcaccatag

SEQ ID NO: 207971 - DNA, 30 bp, synthetic construct; identical to SEQ ID NO: 101777
  misc_feature 1..30: note = Description of Artificial Sequence: Synthetic coding sequence
  source 1..30: mol_type = other DNA

SEQ ID NO: 207972 - DNA, 2205 bp, synthetic construct
  misc_feature 1..2205: note = Description of Artificial Sequence: Synthetic coding sequence
  source 1..2205: mol_type = other DNA
atggacatccggcacagcgagttcctgccctgcctgcactgcccccctttcgttgggcccctgcccgtctcgcatgtcagtttctccagcgcctgtcctgtgcctttgcccggatcaccttcactgcaccgtgggctccaccccagccgtgaagaaaaaagggactctcgaatggctgaggaaaaaaagctgaagctgagtaatacagtgctgcctagcgagagtatgaaagtggtcgccgagtcgatggggatcgcccaaatccaagaggaaacctgccagctgctgacagatgaggtttcctaccgcattaaagagatagcccaggatgcactgaaattcatgcatatgggtaaacgccaaaaactcactacatcagatatcgattatgcgctcaagcttaaaaacgtggaacccctgtatgggtttcacgcccaagaatttataccttttaggtttgcgtctggcggaggccgcgaactgtatttctacgaggaaaaggaggtcgatctgtccgacatcatcaacacccctttaccccgcgtgccccttgacgtgtgcttgaaggcacattggctgtccattgagggttgtcagcccgctatccccgagaaccctcctcccgcacccaaggagcagcagaaagccgaggccaccgagccccttaagtcggctaagccaggccaggaggaggatggtcctttaaaaggcaaaggtcagggagccaccacagcagacggcaaaggcaaggaaaagaaggcaccaccgctgttggaaggcgctcctctgcggttaaaaccccgcagcatccacgagctgagtgtggaacagcagctgtattataaggagatcaccgaggcctgcgtggggtcttgcgaggctaaaagggctgaagctttgcagtccatagctacagatcccggtctttaccagatgctgccccggttttcaacgtttatttctgaaggagttcgcgtcaacgtggtgcaaaacaacctggcactactcatctacttgatgcgtatggtgaaagcactcatggacaatcccacgctttatctggagaagtatgttcatgagcttatccccgctgtaatgacatgtatcgtctcgaggcaactgtgtctgaggcccgatgtggacaaccattgggccctgagggattttgcagcacggcttgtcgcgcagatctgcaagcatttttcaacgacaactaacaacatccagagtaggatcacaaaaaccttcaccaagtcatgggtggatgagaaaacaccttggactactcgatacggttcaatcgctgggcttgctgagttgggccacgacgtgataaaaaccctgatcttaccacgtctgcaacaggagggagaacgtatccgtagcgtgttagatggccctgtgttgtcgaacattgatcggataggagccgatcatgttcagagtctactccttaagcattgtgcccccgttctggcaaaactccgcccgcctccagacaatcaagatgcttaccgcgctgagttcgggagcttaggccccctgttatgtagccaggtcgtaaaagcacgggcccaggccgctctgcaggctcagcaggtcaatcgtacgaccctgactatcacacagcctcgacccacactgacactgtctcaggccccacagccaggcccaaggacccctgggctgttaaaggtgcctggaagcattgctctcccagtgcagacacttgtttcggcccgagccgccgcccccccacagccttccccacccccaaccaaatttatcgtcatgtccagctccagttccgccccttccactcaacaggtgctctcactctccacatccgctcctggtagcggctcaaccactacgagcccagtgacaacgactgtgcctagcgtgcagccaattgtgaaattggtctctacagctaccactgcgccaccctccaccgctccatcaggtccaggttctgttcaaaaatacattgtggtctctctgccccccacaggcgaaggcaagggaggcccgacatctcatccctcgccagtgccacctccagctagtagcccgtctccactgagtggatctgccctatgcgggggcaagcaagaggccggagattcgcctccccccgccccgggtacccctaaagccaacggatcacagcctaattccggatctccacagccagctccatag

SEQ ID NO: 207973 - DNA, 768 bp, synthetic construct
  misc_feature 1..768: note = Description of Artificial Sequence: Synthetic coding sequence
  source 1..768: mol_type = other DNA
atggccgaggagaagaagctgaagctgagcaacaccgtgctgccctcggagtccatgaaagtggtggccgagagcatgggtatcgctcagatccaggaggagacctgccagctgctgacggatgaagtgtcttaccggatcaaagagatcgcccaagatgctctgaaatttatgcatatgggcaagcgacagaagttaacaacctcagatatcgattacgcactgaagctcaaaaatgtcgaacccctgtatggcttccatgcccaggaattcataccctttcgttttgcgtcaggaggcggtagagagctgtatttctacgaagagaaggaggtggacctaagtgatattatcaatacaccattgcccagggtgccccttgatgtatgcctcaaggctcactggctgtctattgaaggctgccaacccgccatcccggagaatccaccaccagctcccaaagaacagcagaaggcagaggctaccgagccactgaaaagtgcgaaaccagggcaggaagaggacggccccctgaagggaaaaggacagggagccacaactgcagatgggaaaggcaaggagaaaaaggctccacctctgctagagggagccccactgaggctcaaaccacgcagcatccacgaactatcggttgaacagcagctctactacaaggagataaccgaggcctgtgtcggatcgtgcgaagccaagcgtgcggaagccctgcaaagtattgcaacagatcccggactgtaccagatgtag

SEQ ID NO: 207974 - DNA, 1050 bp, synthetic construct
  misc_feature 1..1050: note = Description of Artificial Sequence: Synthetic coding sequence
  source 1..1050: mol_type = other DNA
atgagcaagagcaaggacgacgccccccacgagctggagagccagttcatcctccgtctgcctcctgagtacgcgtccacagtacgcagggccgtgcagtctggccacgtgaatctgaaggatagactcacaatagaactgcatcccgatggaaggcatggtattgtccgagtcgaccgcgtcccattagctagcaagctggtcgacctcccttgcgtaatggaaagccttaagacaatcgacaaaaagacgttttacaagactgcggacatatgccaaatgctcgtttctacagttgacggcgatttatatccacccgtggaggagcccgtggcgtcgactgaccctaaagcatcaaaaaaaaaagacaaggacaaggagaagaagttcatttggaatcacggcattacgcttcccttgaagaacgttcggaagcgaaggtttaggaaaacagcgaagaaaaaatatattgagtctcctgacgtggagaaagaagtcaaaagactgttgagtaccgatgccgaggcggtttccacccgctgggagataattgcagaggatgagacaaaggaggcggaaaaccaagggttggacatatcctctcccggcatgtccggacaccggcaagggcatgattccctcgaacacgatgagctgagagagattttcaacgatttatccagcagcagcgaagacgaagacgagactcagcaccaggacgaagaagacattaacattatcgatacggaagaagatctggaacgccagctccaagataagcttaacgaaagtgacgaacagcatcaggagaatgagggaaccaaccaacttgttatgggcattcagaaacaaattgacaacatgaagggtaagctacaggagacacaggacagagcgaaacgacaggaagatctgattatgaaagttgagaatttggctctgaaaaatcgcttccaggcagtactggacgagctcaagcagaaggaagatcgagagaaagaacagctgtcatctcttcaggaggaactcgaatccctgctagagaaatag

SEQ ID NO: 207975 - DNA, 909 bp, synthetic construct
  misc_feature 1..909: note = Description of Artificial Sequence: Synthetic coding sequence
  source 1..909: mol_type = other DNA
atgagcgagagccaggacgaggtgcccgacgaggtggagaaccagttcattctcagactccctctggaacacgcttgcaccgtacgaaatctggctaggagtcagtcggtgaagatgaaggacaagctgaaaattgatctcctgcctgacggcagacatgccgttgtcgaggtcgaagatgtgcctctggcagcgaaactggttgatctgccctgtgtgattgaaagccttagaaccctcgacaagaagacgttctacaagacagctgatattagccaaatgttggtctgtaccgcagacggtgatatccatctatccccagaagaaccagccgcttccactgaccctaatatagtcagaaagaaagaaaggggccgggaggaaaagtgcgtgtggaagcacggaattaccccccctctaaagaacgttcgcaagaagagattccggaagacgcagaaaaaggtcccagacgtgaaggaaatggagaaatccagcttcaccgagtacattgagtccccggacgtggaaaacgaggtgaagaggcttctgcggtccgacgccgaggccgtatccacccggtgggaggtgattgcagaggacggcacaaaggaaatcgagagtcagggttccatccctggcttcctcatttcgagtggcatgtcttcccacaaacagggccacacatctagtgtgatggagattcaaaagcagattgagaagaaggaaaaaaagctgcacaagattcagaacaaagctcaacggcagaaggaccttataatgaaggtggagaacctgactctcaaaaaccacttccagtctgttctcgaacagctggagctgcaggaaaaacagaaaaacgagaaacttataagtctgcaagagcagctccaaaggtttttgaaaaaatag

SEQ ID NO: 207976 - DNA, 1131 bp, synthetic construct
  misc_feature 1..1131: note = Description of Artificial Sequence: Synthetic coding sequence
  source 1..1131: mol_type = other DNA
atgagcgagagccaggacgaggtgcccgacgaggtggagaaccagttcattcttcgcctcccactcgagcatgcctgcactgtccgaaatctagcgcggtcacagtccgtgaagatgaaggataaattgaaaattgacctactcccagatggaaggcatgctgtcgttgaagttgaggacgttcctttagcagctaagctcgttgatctcccatgtgttattgagtctttgcgtacactggataagaagactttctataaaaccgccgatataagccagatgctggtgtgtactgccgatggcgacatacatcttagtcccgaggagcccgccgctagtactgatcctaatattgtccggaagaaggaaaggggtagggaagaaaagtgtgtctggaaacacggtatcacaccgcccttaaaaaacgtcaggaagaaacggttcaggaaaacacagaaaaaggtaccagacgtgaaggagatggagaagagcagctttaccgagtatatagagtcccccgacgtcgagaatgaagtgaaaagacttcttcgttcagatgctgaagcagtctccactcgttgggaagtgattgccgaagacggaaccaaggagattgaaagtcaagggagcatcccagggtttctgatctcaagcggaatgtcaagtcacaagcagggacacactagttcggaatatgacatgttgcgagaaatgtttagcgattcacggagcaataatgacgatgatgaggatgaagacgatgaggatgaggacgaggacgaagacgaagatgaagacgaagacaaagaagaagaagaagaagattgctcagaagagtatctggagaggcagctacaggcagagtttattgagtctggccagtaccgggcaaacgaggggacatcttctatcgtaatggaaattcagaagcagatcgagaaaaaagagaagaagctgcacaaaatccagaacaaagcccaacggcagaaggacctgatcatgaaggttgaaaatctgaccctcaaaaaccacttccagtccgtactcgagcagcttgaacttcaggagaaacagaaaaacgaaaagctcattagcctgcaagagcaattgcagcgatttctcaaaaagtag

SEQ ID NO: 207977 - DNA, 909 bp, synthetic construct
  misc_feature 1..909: note = Description of Artificial Sequence: Synthetic coding sequence
  source 1..909: mol_type = other DNA
atgagcgagagccaggacgaggtgcccgacgaggtggagaaccagttcattctccggctgcctctggagcacgcctgcaccgtgcgcaacctagccaggagtcaatctgtcaaaatgaaggacaaattgaagattgacctcttgccagacggcagacatgcggtggtggaggttgaggatgttcccctggcggccaagctcgtggatttaccgtgcgtgattgagtctctgcgtactctggataagaagacattttataaaacggctgatatctcgcagatgctggtgtgtaccgccgacggagacatccacctttcgccggaggagcccgcggcgagtacagatccgaatatcgtccggaagaaggaacgcggccgtgaagagaaatgcgtgtggaagcatggcattacacctcctcttaagaacgtgagaaagaaaagatttcgcaagacccagaagaaggttcccgacgtaaaagagatggagaaaagttcattcacggagtacattgagtcaccggacgtggagaatgaagtcaaacgcctgctgcgaagcgatgctgaggccgtaagcacgcgttgggaggtcatcgcagaggacggtactaaggagatcgagtctcagggcagcattccgggttttttaatctcgtccggaatgagctctcacaaacagggccatacatctagcgttatggaaatccaaaagcagattgaaaaaaaagagaagaagctgcacaagatccaaaataaagcccagcgccaaaaagatttgattatgaaggtggagaatctgacgctaaaaaaccattttcaatctgtgcttgagcagctagaactgcaggagaagcagaagaacgagaaactcatctccctgcaggagcaactccagcgctttcttaagaaatag

SEQ ID NO: 207978 - DNA, 1389 bp, synthetic construct
  misc_feature 1..1389: note = Description of Artificial Sequence: Synthetic coding sequence
  source 1..1389: mol_type = other DNA
atggagtgccccgagggccagctgcccatcagcagcgagaacgactctactccgacggtgtcaacgtcagaggtgacgtcccagcaggaaccacagatccttgtggataggggttctgagacaacctatgaatcgtcggctgacatagctggggacgaaggaactcagatcccagccgatgaagatactcaaaccgacgccgatagctccgctcaagcagctgctcaagcgccggagaattttcaggagggcaaggatatgtcggagtcccaggacgaggtgccagacgaggtggaaaaccagttcatacttcggctacctctggaacatgcttgtacggtgcgcaacctcgcccgctcccagagcgtcaagatgaaagataaactcaagatcgaccttttgcctgacggccggcacgccgtcgttgaggtcgaggatgtccctctcgctgctaaactagtcgacctgccttgtgtgatcgagtcgttacgcacactggataaaaagaccttctataaaactgccgatatctcacagatgctggtatgtacagctgacggagatattcatctgagcccagaggaacctgcagctagcacagaccctaacatagtgcgtaaaaaggaacgcgggagggaggagaaatgtgtctggaaacacgggatcacaccccccctgaagaacgtgcgcaaaaagcgatttagaaaaacccaaaagaaggtgcccgacgttaaagaaatggaaaaatcttctttcactgaatacatcgagtctcccgacgtggagaacgaagtgaaaagactgcttcggagtgatgccgaagcagtgtcgactcggtgggaggtaatcgcagaggacggtacaaaggaaatagaatcacaaggcagtatacccggctttctcatatccagtggcatgtcctcgcacaaacagggccacacgtcaagcgagtacgacatgctgagggagatgttttcagactctagatctaataatgacgacgatgaggacgaagacgacgaggatgaagacgaggatgaagatgaagatgaggatgaggacaaggaggaggaggaagaggactgttcagaggagtaccttgaacggcagctgcaggctgaatttatcgaatccggtcagtacagagccaatgagggtaccagcagcatcgttatggaaattcaaaagcagatcgaaaaaaaggaaaagaagctgcataagatccaaaacaaggcccaacgacaaaaggacctgatcatgaaagttgagaatttgactctgaagaatcacttccagagtgtgttggagcagctggagctgcaagagaagcaaaaaaacgaaaaattgatcagcctccaggaacagttacagagatttctcaaaaaatag

SEQ ID NO: 207979 - DNA, 1548 bp, synthetic construct
  misc_feature 1..1548: note = Description of Artificial Sequence: Synthetic coding sequence
  source 1..1548: mol_type = other DNA
atgggcaactgggtggtgaaccactggttcagcgtgctgttcctggtggtatggctgggactgaatgtcttccttttcgtcgatgctttcttgaaatatgagaaagccgataaatactattatacccggaagattctcgggtctacacttgcttgtgcccgggcatctgcattatgcctgaattttaactccacccttatcctgctgcccgtctgccgcaacttgttgagctttctccggggcacttgctccttttgcagcagaacattgaggaaacagttggatcacaatctcacattccacaaactggtggcctacatgatttgtctgcatactgcaatccacataatcgcacatctcttcaattttgactgttattcccgcagtaggcaggctaccgatggcagcttggcatctatcctgagcagtttaagtcatgacgagaagaaaggcggatcctggttgaaccccatccagtcaagaaacacgaccgtcgaatacgtgacattcacgagcatagcagggctgacaggtgtgatcatgaccatcgctttgatactcatggtgaccagcgccacagaattcattagacgctcatacttcgaggtgttctggtacacacatcacctgtttatcttctatatactgggtctcggtatacacgggattggtgggattgtacgtggccagaccgaagagagcatgaacgagtctcatcctcggaaatgcgcggagtcctttgagatgtgggacgatcgtgacagccattgccgccgccccaagtttgaaggacaccctccagaatcctggaaatggattcttgccccggtgatactctacatttgtgagaggatcctgaggttctacagatcccagcagaaagtagtgatcacgaaagtggttatgcatccgtctaaagtgcttgagctgcagatgaataagcggggttttagtatggaggtgggccagtatattttcgtaaactgtccatcgatttctctcctggaatggcacccattcaccttgacatcagcgcccgaagaagattttttctccattcacatccgcgccgcaggcgactggacagaaaacttaatccgtgctttcgagcaacagtattctcccatcccgcgcattgaggttgacggaccgtttgggaccgcaagcgaagacgtgtttcaatacgaagtcgccgtcctggtaggcgccggcattggagttactccttttgcaagcatactcaaaagcatctggtacaagtttcagtgtgccgaccacaatctgaagaccaagaaagtcgggcacgcagccttaaattttgataaggctaccgacatagtgactggcctgaagcagaagacttctttcggtcgaccaatgtgggataacgagttttctaccatcgccactagccaccccaagagcgtggtcggcgtattcctgtgcggcccaaggacactggcaaaaagcttgcgcaaatgctgccaccgctacagcagcctggacccacgaaaggtacaattctatttcaacaaggaaaacttttag

SEQ ID NO: 207980 - DNA, 795 bp, synthetic construct
  misc_feature 1..795: note = Description of Artificial Sequence: Synthetic coding sequence
  source 1..795: mol_type = other DNA
atggagagcggcaagaccgccagccccaagagcatgcccaaggacgcccagatgatggctcagattttaaaggatatgggcatcactgagtacgaaccacgggtgatcaaccagatgcttgagtttgccttccgctacgtgactaccatactggatgatgcaaagatctatagcagccatgccaagaaggccacagtcgatgccgacgatgtgcgccttgccattcagtgtcgagccgaccagagttttacatcacctccaccccgggacttcctgctggacatcgcgcgccagaggaaccaaacccccttgccacttatcaaaccgtattctggaccccgcttaccaccagatcgatattgccttaccgcacccaactaccgcctgaaaagcctccagaaaaaggcctcaactagtgccggccgtataactgtgcctaggctgagtgtcggatcggtcacctctagacctagtacccctaccctaggtactccgacaccacagacgatgagcgtctccaccaaggttgggacaccaatgagcttgactggtcaacggtttacagttcagatgcccacatcacagtcaccagcggtgaaagcatcaatcccagcaacttctgctgtgcagaatgttctgatcaatccttccctgatcggcagtaaaaatattctcattactactaatatgatgtcgtcgcagaacaccgcaaacgaaagctcgaacgctctcaaaagaaagcgcgaggacgacgatgacgacgatgatgatgacgatgattacgataatctgtag

SEQ ID NO: 207981 - DNA, 510 bp, synthetic construct
  misc_feature 1..510: note = Description of Artificial Sequence: Synthetic coding sequence
  source 1..510: mol_type = other DNA
atgtgccaccggaagcccggcacccccggcgtgggcaagaccacccttgggaaggaactggctagcaaatctggcctaaaatatattaacgtcggggacttggctcgggaagagcaactgtatgacggttatgacgaagagtatgattgtcccatattggacgaggatagagttgtcgatgagctcgacaaccaaatgagagaaggaggcgtgatcgttgactatcacggttgcgacttcttccccgagcggtggttccacattgtgtttgtgctcaggaccgatacaaatgtgttgtacgagcgcttagagaccaggggatataacgagaagaagttaacagacaatattcagtgcgagatctttcaagtgctctatgaagaggctacagcaagctacaaagaggagatagtgcaccagctgccctctaataaaccagaggaattggagaataatgttgaccagattcttaaatggatagagcagtggataaaagaccataactcgtag

SEQ ID NO: 207982 - DNA, 519 bp, synthetic construct
  misc_feature 1..519: note = Description of Artificial Sequence: Synthetic coding sequence
  source 1..519: mol_type = other DNA
atgctgctgcccaacatcctgctgaccggcacccccggcgtgggcaagaccaccctgggtaaagagctggcttcgaagtcaggcctaaagtacattaacgtcggcgacctcgccagagaagaacaactttatgacggctacgacgaggagtacgactgccctatcctggacgaagatagagtggtcgacgagttggacaaccaaatgcgggaggggggggtgatcgtagactaccacggttgtgacttcttcccagagaggtggtttcatattgttttcgtcctcaggaccgataccaacgtgctgtacgagcgcttggagaccagaggctacaacgaaaagaaactgacggacaacattcagtgtgaaatttttcaggtgctctatgaggaagccacggcctcttacaaggaagagatcgtacaccagctaccttccaataagcctgaagaactcgagaataacgtggatcagatccttaaatggattgagcagtggatcaaggaccacaactcgtag

SEQ ID NO: 207983 - DNA, 597 bp, synthetic construct
  misc_feature 1..597: note = Description of Artificial Sequence: Synthetic coding sequence
  source 1..597: mol_type = other DNA
atggagagcggcaagaccgccagccccaagagcatgcccaaggacgcacagatgatggcgcagattctaaaggacatgggcattactgagtacgaaccccgcgtgattaatcaaatgcttgagttcgcctttcgctatgtcaccacaattctcgacgacgccaaaatttacagttcccacgcaaaaaaagcgaccgtggacgctgacgacgtgagactggccattcagtgcagggccgatcagtccttcacctcaccacctccgagggactttctgttggatatagccaggcagcgcaatcagacccccctcccactgattaagccatacagcggcccacgtctaccccctgacagatactgtttgaccgctcctaactatagactgaagtctctacagaaaaaggcaagcacatccgccggacggattacagtgcctcggctcagcgtcggctctgtgacaagccggccttcaacacccacactggggacgcctactccacagaccatgtctgtgtccacgaaggtggggacccccatgtcccttaccgggcagcggttcaccgtgcagatgcccacaagccaatcccctgcctag

SEQ ID NO: 207984 - DNA, 411 bp, synthetic construct
  misc_feature 1..411: note = Description of Artificial Sequence: Synthetic coding sequence
  source 1..411: mol_type = other DNA
atggagagcggcaagaccgccagccccaagagcatgcccaaggacgcacagatgatggcgcagatactcaaggacatgggcatcacagaatacgagcctcgagtcattaatcagatgttagagtttgcttttcgttatgtgacaactatcctggatgacgctaaaatttatagcagccacgcgaagaaggccaccgtggatgccgatgacgtgcggctggccattcagtgtcgtgcagaccagtccttcacaagcccacctcctcgggatttcctgcttgatattgcaagacagagaaatcagacaccacttcccctgatcaagccttattctggtccacggctcccccccgaccgatattgtctcaccgctccaaactatcgacttaaaagccttcaaaagaaagcctag

SEQ ID NO: 207985 - DNA, 795 bp, synthetic construct
  misc_feature 1..795: note = Description of Artificial Sequence: Synthetic coding sequence
  source 1..795: mol_type = other DNA
atggagagcggcaagaccgccagccccaagagcatgcccaaggacgcacaaatgatggcgcagatcctgaaggacatgggaatcacagagtacgaaccaagagtcatcaatcaaatgctagagtttgcattcagatacgtgactactattctggatgacgcgaaaatctactcttctcacgcaaagaaagccaccgtcgatgcagacgacgtgcgactcgctatacagtgcagggccgaccagtcctttacaagcccaccacctcgagactttctgctcgatatagctagacagagaaaccaaacaccgctccccctcataaaaccctatagcggacccagactgcccccggacagatattgcctcactgccccaaactacaggcttaagtctcttcagaagaaggcaagcacctctgccggtagaatcacggtcccacgactctccgtgggcagcgttacaagcaggccgtctacccccacacttggtacccccaccccacagaccatgagtgtgtctactaaggtgggcaccccaatgagtctcactggtcaacggttcaccgtccagatgccaacctcacaatcgcctgctgtgaaggctagcatccctgcaacatcagcagtgcagaacgtgcttattaaccctagcctgattgggtccaaaaacatcctcatcacaactaatatgatgagctctcaaaataccgccaacgaatcaagtaacgccttaaaacggaaacgggaggatgacgacgatgacgacgacgatgacgatgactacgataacctgtag

SEQ ID NO: 207986 - DNA, 309 bp, synthetic construct
  misc_feature 1..309: note = Description of Artificial Sequence: Synthetic coding sequence
  source 1..309: mol_type = other DNA
atggagagcggcaagaccgccagccccaagagcatgcccaaggacgcccagatgatggcccagatcttgaaagacatggggattacagagtatgaaccacgtgtgataaaccagatgttagaatttgccttcaggtatgtgaccacaatactggatgacgcaaagatctattcatcgcacgccaaaaaagctacagtggatgctgacgacgttcgccttgctattcagtgccgagcagaccagagcttcaccagccccccaccccgtgacttcctcctagacattgccagacaaagaaatcagacatag

SEQ ID NO: 207987 - DNA, 501 bp, synthetic construct
  misc_feature 1..501: note = Description of Artificial Sequence: Synthetic coding sequence
  source 1..501: mol_type = other DNA
atggagagcggcaagaccgccagccccaagagcatgcccaaggacgcacagatgatggcgcagatccttaaggacatgggtataacagagtatgagccacgcgtcattaatcagatgcttgagtttgcgtttcggtatgtgactactatacttgacgacgccaagatatatagcagccatgctaaaaaggctactgtggacgcagatgacgtccgcctggcgatccagtgcagggctgatcaatcttttacgtcacccccgcccagggatttcctgctcgatatcgcccgccagcggaaccagactcccctgcccctcattaagccttatagcggtccaagactgccccccgacaggtactgcttaaccgctccaaattatcgtctcaagagcttacagaaaaaggccagcacctcagcaggccgcattaccgtgccgagacttagtgtagggagcgtaaccagcaggcccagtacaccaactctggggaccccgacctag

SEQ ID NO: 207988 - DNA, 384 bp, synthetic construct
  misc_feature 1..384: note = Description of Artificial Sequence: Synthetic coding sequence
  source 1..384: mol_type = other DNA
atggagagcggcaagaccgccagccccaagagcatgcccaaggacgcgcagatgatggctcagattttgaaggatatgggcattaccgaatatgagcccagggtgatcaatcagatgctggagtttgcgttccgctacgtgaccaccatcttagacgacgccaagatatatagttctcacgcaaagaaagctacagtcgacgccgacgacgtaagactggcgatccaatgcagggcagatcagagctttacatcacctccaccccgcgattttcttctagatatcgccaggcagaggaaccagactccactccctctgataaagccttactctggcccacgactcccccccgacaggtattgtctcacagctcctaactactag

SEQ ID NO: 207989 - DNA, 756 bp, synthetic construct
  misc_feature 1..756: note = Description of Artificial Sequence: Synthetic coding sequence
  source 1..756: mol_type = other DNA
atggagagcggcaagatggccccccccaagaacgccccccgggacgcattggtgatggctcagattcttaaggatatgggcattacagaatatgaaccccgagttatcaaccagatgttggagttcgcttttcgatacgttacaacaattctggatgacgctaagatctattcaagtcacgcaaagaaacccaacgtagacgcggacgacgtacgcctcgctattcagtgccgagctgaccagtcatttacatcccctcctcctcgcgacttcctcctggacatcgctaggcaaaagaaccaaacccccctgccgttgatcaaaccttacgctggacccaggctgccacctgaccggtattgcttgacagccccaaactacagactaaaatcacttatcaagaaaggtccgaaccagggcagacttgtgccacgccttagcgtgggagcagtgagttccaaacccactactccaacgattgccactccccagactgtgtcagttcctaataaagtggccacacccatgagtgtcacaagtcagaggttcaccgttcaaataccgccaagccagtcaactcccgtcaagccggtaccggcaactactgccgtccagaacgtcttaatcaatccatcgatgatcggtcccaagaacatactcattaccaccaatatggtgtcgtctcagaacactgccaatgaggctaacccgcttaaaagaaaacatgaggatgacgatgacaacgacatcatgtag

SEQ ID NO: 207990 - DNA, 879 bp, synthetic construct
  misc_feature 1..879: note = Description of Artificial Sequence: Synthetic coding sequence
  source 1..879: mol_type = other DNA
atgcccctgcacgtgaagtggcccttccccgccgtgccccccctgacctggactcttgcttcctctgtggtgatgggactcgtgggaacctactcgtgcttctggacaaagtacatgaaccatttaacagtccacaacagggaggttctgtacgagttgattgagaaacgaggtccagcgaccccattaattacagtgtccaatcatcagtcgtgtatggacgacccgcatctatggggaattctaaagttgagacatatatggaatctaaaactaatgaggtggacccctgctgctgccgacatctgtttcacgaaggagctgcacagccactttttcagcctgggcaagtgcgtgccagtctgtaggggcgccgagttcttccaggctgaaaacgaagggaagggtgtgctggacaccgggcgccacatgcctggggccggtaaaagaagggagaagggggatggcgtttaccagaagggaatggactttattctcgagaagttaaaccatggagattgggttcacattttcccagagggcaaggtcaatatgagcagcgagtttctccggtttaagtgggggatcggcaggctgattgccgaatgtcatctcaaccctataattcttccactgtggcatgtgggcatgaatgacgtgctccctaatagccctccctattttccaagattcggtcaaaagataactgtgcttatcggcaagcctttttctgcacttcccgtactggaacgtctacgagccgagaacaaaagcgccgtggaaatgcggaaagccctgacagactttatccaggaggaatttcaacaccttaaaacacaggcggaacagctgcacaaccacctccagccagggcggtag

SEQ ID NO: 207991 - DNA, 789 bp, synthetic construct
  misc_feature 1..789: note = Description of Artificial Sequence: Synthetic coding sequence
  source 1..789: mol_type = other DNA
atgcccctgcacgtgaagtggcccttccccgccgtgccccccctgacatggaccctggccagcagtgtggtcatgggcctcgttgggacatattcctgtttctggacaaagtacatgaaccaccttaccgtacacaatcgagaagttctttacgaactgatcgagaagagaggacctgcaactcctctgatcaccgtgagcaatcaccagtcttgtatggacgatccccatttgtgggggatcttgaaactgcgtcacatttggaatcttaaactgatgcggtggactcccgcagcggccgatatatgtttcaccaaggaactccacagtcacttcttttccctcggtaaatgtgtgcccgtgtgcagaggcgacggagtgtaccagaagggtatggacttcatcctggagaaacttaaccatggcgactgggtgcacattttcccagaagggaaggtcaacatgtcgagtgagttcctgcgttttaaatggggaattggcagactgattgctgaatgtcacctgaatcctatcattcttcccctgtggcacgtcggcatgaatgatgtgctcccaaatagccccccctattttcctaggttcggtcagaagatcaccgtcctgattggcaagcccttctccgccctgcctgtcctcgaacgacttagggccgagaataaatcagccgtcgaaatgagaaaagcattaaccgacttcattcaggaggagttccagcacttgaagacacaagccgaacagctgcacaatcacctgcaacctggcagatag

SEQ ID NO: 207992 - DNA, 837 bp, synthetic construct
  misc_feature 1..837: note = Description of Artificial Sequence: Synthetic coding sequence
  source 1..837: mol_type = other DNA
atgcccctgcacgtgaagtggcccttccccgccgtgccccccctgacatggaccctggcctcttctgttgtgatgggattggtcggaacttattcctgtttctggacaaaatacatgaatcatctcactgtgcacaacagggaggtgctgtacgaattgatagagaaacgtgggcccgcgactcccctgatcactgtctccaaccaccagtcctgcatggacgatccccatctgtggggcattctcaagctccgccacatctggaatttaaagctgatgcgctggacacccgcagccgccgatatctgttttaccaaagaactacactctcattttttctccctcgggaagtgcgtgcctgtgtgcaggggggctgagttcttccaggccgaaaacgaaggtaaaggagtgctggataccggacggcacatgccgggcgctgggaaaagacgagaaaagggcgatggggtctaccaaaagggcatggactttatcctcgagaagctgaaccacggggactgggtgcacattttccccgaaggcattggacgccttattgctgaatgccatctgaaccctatcatcctccctctctggcacgtggggatgaatgatgtcttaccgaattcaccaccctatttccccagattcgggcagaaaatcaccgtgctcattggcaaaccattctccgcgctccctgtgctggagagactgagagctgaaaataaaagcgctgtggagatgcgtaaggcactgacagactttatccaagaagagtttcaacacttgaaaacacaagctgaacagctgcacaaccatctccaacctggcaggtag

SEQ ID NO: 207993 - DNA, 747 bp, synthetic construct
  misc_feature 1..747: note = Description of Artificial Sequence: Synthetic coding sequence
  source 1..747: mol_type = other DNA
atgcccctgcacgtgaagtggcccttccccgccgtgccccccctgacctggactcttgcgtcttctgtggtcatgggcctggtgggtacatactcatgcttttggacaaagtacatgaatcatctgactgtccataacagagaggtcctttacgagcttatcgagaaacgcgggccagcaaccccattaataaccgttagcaaccaccagagttgtatggatgatcctcacctgtggggaatactgaaattgaggcatatttggaatctgaaactgatgagatggacccccgccgccgccgacatctgctttacaaaggagcttcattcacatttttttagtctcggaaagtgtgttccagtgtgcagaggcgacggcgtttaccagaagggcatggattttatactcgagaagcttaaccacggagattgggtgcatatctttccagagggcattggtaggctgatagcagagtgtcacctgaacccaattatcttgcctctctggcacgttggaatgaatgacgtgctgcctaacagtccaccctatttcccacggtttgggcagaagatcacagtgttgatagggaagcccttcagtgccctaccagtattagaacggctccgagccgagaataagagtgcagtggaaatgcgaaaagctcttaccgacttcatacaggaggagttccagcacctcaagacacaggcagaacagctgcacaatcaccttcaaccagggcgctag

SEQ ID NO: 207994 - DNA, 798 bp, synthetic construct
  misc_feature 1..798: note = Description of Artificial Sequence: Synthetic coding sequence
  source 1..798: mol_type = other DNA
atgcccctgcacgtgaagtggcccttccccgccgtgccccccctgacttggactcttgccagttctgtggtcatggggctggtaggaacctactcttgcttctggaccaaatacatgaatcatttaaccgtacacaatcgggaggttttgtacgagctcatcgagaagcggggcccagccactccccttattactgtctctaatcaccagtcctgtatggacgatccccatttgtggggaattctcaaactccgacacatctggaatctgaagctgatgcgttggactccggctgccgccgacatatgctttaccaaagaattgcacagccacttcttctctctgggcaagtgtgttccagtatgtaggggcgcagagtttttccaggcagagaatgagggaaaaggtgtcctagacactggtcgacatatgcccggcgcgggtaaacgcagggaaaaaggcaaagtgaacatgtccagtgagttcctgaggttcaagtggggcatcggccgcctgatagctgagtgccaccttaacccgattattctgcccttatggcacgttggaatgaatgacgtgctccctaatagcccaccgtactttcctcgattcggtcagaagatcacggtccttattggtaagcctttttccgccctaccggtgttggagcgcctgcgggctgaaaacaaaagcgctgtcgaaatgaggaaggccctgaccgatttcattcaagaagagtttcagcaccttaagacacaggccgagcagctgcacaatcatttacaaccaggccgctag

SEQ ID NO: 207995 - DNA, 7629 bp, synthetic construct
  misc_feature 1..7629: note = Description of Artificial Sequence: Synthetic coding sequence
  source 1..7629: mol_type = other DNA
atggtggccctgagcctgaagatctgcgtgcggcactgcaacgtggtgaagaccatgcagttcgaacccagtaccgccgtgtatgatgcctgcagggtcatccgcgaacgagtacccgaggcacaaactggccaggcatctgattatggactgtttttgagcgatgaagatccacggaaagggatctggctggaggctggccgaacccttgactactatatgctgagaaacggcgatattctagaatacaaaaagaagcagcggccacagaaaatccggatgttggatggatctgtgaagactgtgatggtcgacgacagcaagactgtgggtgagctgctggtgactatttgcagtcgaataggaataactaattacgaagaatattcactgattcaggagactatagaggaaaagaaggaagagggaaccggaacccttaaaaaggaccgtacgttgctcagggatgagagaaagatggaaaaattgaaagctaaactccataccgacgacgatttgaattggcttgatcactcgcgaaccttccgtgaacagggggtcgacgaaaacgaaacactgctgttaagaagaaagtttttctattcagatcagaatgtggattcaagggacccagtccagctaaacctcctttacgttcaggcccgcgatgatatcttaaacggaagccaccctgtttcttttgagaaagcttgcgaatttggaggcttccaagctcagattcagtttggacctcatgtcgagcataaacacaaacccggcttcctggacctgaaggagtttttacccaaagaatatataaagcagcggggagccgagaagagaattttccaagaacacaaaaactgcggggaaatgagcgagatagaggctaaggtcaagtatgtgaaactggcccgttcattgaggacttatggggtgagcttttttctggttaaggagaaaatgaaaggaaaaaataaactcgtcccacgcttgctcggaatcactaaagactctgtcatgcgtgtggacgagaagacaaaagaggtgctgcaagaatggcccctgacaaccgtgaaaaggtgggccgccagccccaagtcgttcaccctagattttggagaatatcaggagtcatattacagcgtacagaccacagagggagagcagatttcccagctgattgctgggtacatcgacattatactcaagaagaaacagtcaaaggaccgttttgggcttgaaggcgacgaggagtccacaatgttagaggagagcgtgtcaccaaagaagagcacaattctgcaacagcaatttaaccgcacagggaaggccgagcatggatctgtggcacttcctgccgtgatgaggtccgggtctagcggtcccgagactttcaacgtgggctcaatgccaagcccacagcagcaggtgatggtcgggcagatgcaccgtggacatatgcccccgctgaccagtgctcaacaagcacttatgggtaccatcaatacaagtatgcatgccgtccaacaggcgcaggacgatctgagcgagctggactccctgccacctctcggccaagacatggcatcaagggtctgggtccaaaacaaggtggacgagtccaagcacgaaattcatagccaggttgatgcaattaccgccgggactgcttctgtggtgaacttaacagctggagaccccgccgataccgattatacagccgttgggtgtgccattaccacaatttcctcaaacttaacagagatgtccaagggtgtaaagctcctggcagcccttatggacgatgaagtcggaagcggcgaagatctcctgagagcagcacgcaccctggccggcgccgtgtctgacttgctgaaagcagttcagcctacctccggagaaccgaggcagaccgtgctgactgcagccggctccattggtcaggcctccggtgatctgctgcgccagattggcgaaaacgaaaccgacgagcggtttcaggacgtgctgatgagtttggcaaaggctgtggccaatgctgccgcaatgctcgtcttgaaggccaagaacgtcgcccaggtggccgaagatacagtccttcagaaccgcgtaatcgcggccgccacccaatgtgctcttagtacttcccagctcgtggcttgcgcaaaagttgttagtccgaccattagttcacccgtatgccaagaacagctgattgaagccggtaagctcgtggataggagcgtggagaactgtgtccgcgcttgtcaagcggccacaactgattcggaacttctgaagcaggtgtctgccgctgcctccgtagtttcccaggccctacatgatctgcttcaacatgtaagacagttcgcctctcgtggcgaacccataggacgatacgaccaggccactgataccattatgtgcgttaccgaatctatcttttcttcaatgggggacgccggcgagatggtgcgccaggctagggtcctggcgcaggcaacctctgacttggtgaacgccatgcggagtgatgccgaagctgagattgacatggagaactcaaagaaactgctcgcagccgccaagcttctcgcagattccaccgcccgaatggtggaggcggctaagggggctgccgcgaacccagagaatgaagaccagcaacagcggctccgcgaggctgcagaaggtctacgggtcgccacgaacgcggccgcccaaaacgctatcaagaagaaaattgtcaatcgacttgaggtggccgcaaagcaggcggcagcagcagctactcagactattgcggcatcccaaaacgccgccgtgtccaacaagaatcccgcagcacagcagcagctggtccagtcctgcaaagccgtggctgatcatatccctcaacttgtgcagggagttagagggagccaggctcaagcagaagatttatcggcacaactcgcccttattatatcttcccagaattttctacaaccgggaagcaaaatggtgtcgagcgcaaaagcagccgtacctaccgtaagtgatcaggcagccgccatgcagttgtcccagtgtgctaagaacttagctacctctctggctgagctgcggacggcaagccaaaaggcgcacgaagcgtgcggtcccatggagattgatagcgcgcttaacaccgtccaaaccctgaagaatgagctccaggatgccaaaatggctgccgtggagagccagttgaagccacttccgggggagacacttgaaaagtgcgcgcaggacttgggttcaacctctaaggccgtgggctccagtatggcgcagttactcacctgcgcagcacagggcaacgaacactatactggagttgcggctagggagacagcccaggctttgaaaacccttgcgcaggccgcccgtggagtggcagcttctaccactgacccagccgccgcacacgctatgttggattcggcccgcgatgtgatggagggctccgccatgctgattcaggaagccaagcaagctttaatcgctcccggggatgccgagcgacagcagcggctcgcgcaagtggccaaagctgtcagccattcacttaataattgcgtgaattgtctgcctggtcagaaggacgtggacgttgcactgaagtccattggagagtcatctaaaaagctgctcgttgatagtttgcctccaagtaccaagcctttccaggaggcacagtcagagttaaaccaggccgccgctgacctaaatcagagcgccggggaagtggtacacgccactcgagggcagagcggagagttggcggccgcctccgggaagttctccgatgatttcgacgaattcttggacgcaggcatagagatggccggtcaggcacagactaaggaagaccagatccaggtgattggtaacctgaagaacatatctatggcctcctctaagttgctcctggcagctaagtcgctgagcgttgatcccggcgctcccaatgctaagaatttgctggccgctgctgcacgcgcagtcaccgaaagtatcaatcaattgattacgttgtgcactcaacaggcaccaggtcagaaggaatgcgacaacgcactgagggagcttgagacagtgaaaggtatgcttgataatcccaacgagcctgtgtccgacttatcatattttgattgtatcgaatccgtgatggagaattcaaaagtgctgggcgagtctatggccggtatttcccaaaacgctaaaactggagatctaccagctttcggagagtgcgtcggaattgcatccaaagcgctgtgcggcttaactgaggccgccgcacaagccgcttacctcgttggaatctcagacccgaattcccaagccggtcaccagggcttagtggatcccatccaattcgctcgtgccaaccaggccatccagatggcatgtcagaatctggtcgatcctggatctagtccctcccaggtgctgagcgctgccacgatcgtggccaagcatacatccgcgctgtgcaacgcttgtcggatcgcttcctctaagaccgcgaacccagtggccaaacgccatttcgtccaaagtgctaaagaagtagctaactcaaccgcaaacctggtcaaaactataaaagctcttgacggcgatttttccgaagataaccggaacaagtgtcggatcgccaccgctccactcatcgaagccgtggagaaccttacagcttttgcctccaaccctgaattcgtgtccataccggctcagatcagttccgaaggaagtcaggctcaggaacccatcctcgtgagcgcaaaaaccatgttggaatcttcctcatacctgattcgaacagcccgatccttggcgatcaacccaaaggatccccctacgtggagtgtgctggctggacacagtcatacggtcagtgactccattaaatcattgataacaagcatccgggacaaagcacccggccagagagagtgcgattatagcatcgacgggattaatcgctgcattcgcgacatagaacaggccagcttagctgctgtgtctcaatctttagcgacacgggacgacatctctgttgaagcactgcaggaacagctgacctccgttgtccaggagattggtcacctcatcgatcccattgctaccgcagccagaggcgaggcagcacaattgggccacaaagtgacacagcttgcttcttactttgaacctctcattctcgcggcagttggtgtcgcaagcaagattctcgaccatcagcaacagatgactgtactggatcagaccaagacccttgcagagtccgctctgcaaatgttgtatgcagcaaaagagggaggaggaaatccgaaggcccaacacacacacgacgctattactgaggccgcacagctgatgaaggaagctgtggatgacatcatggtgacactaaacgaagccgcctctgaagtggggctggtcggagggatggtggatgcaatcgccgaggctatgtctaaattggacgagggaacaccccctgagcccaagggcacgttcgtagattaccagacaaccgtggtcaagtattctaaagcgattgcggtcaccgcccaagagatgatgactaagagcgtgacgaaccctgaagagctgggaggtctggcttcccaaatgacaagcgattacggtcacctggcttttcagggtcagatggctgccgctacagccgaacccgaggagattggttttcaaatccgcacaagagtgcaggatctcggccatggctgtattttcctggtgcaaaaagctggagccctacaggtgtgtcccaccgatagctataccaaacgcgagctaattgagtgtgcacgcgctgtgactgagaaggtgtccctggttctcagcgcactccaggctgggaataaagggacgcaggcctgcattaccgccgccacagcggtgtccgggatcatcgccgacctagatacaacaattatgtttgccacagccggtacactgaatgccgagaatagcgagacctttgcagaccatcgagagaacatcctgaagacggcgaaggctctcgtcgaggacacgaaactcttggtgagtggtgcagcttcaacccctgacaagctcgcccaggcagcccaatcatccgctgctactatcacacagctggctgaggttgttaaattgggagccgccagcctggggtctgatgatcctgaaacccaggttgtgctgatcaacgcaataaaagatgtcgctaaggctctgtccgatcttatctctgctaccaaaggcgccgcgagtaaaccagtcgatgatccctctatgtaccagttgaagggggcggctaaggtgatggtcacaaatgtgacgagtctacttaagacagtgaaggccgtggaggacgaggcaactagggggacccgggcactcgaggcaacgatcgagtgcataaagcaggagttaacagtctttcagagcaaagacgtgcctgagaagacctcgtcaccagaagagtctatcaggatgacgaaggggattaccatggccactgcgaaagctgttgcagccgggaattcatgtcgtcaagaggacgtgatcgcaaccgctaacctctctaggaaggcagtatctgatatgctgacagcttgtaagcaagcctcttttcaccccgatgtttctgatgaggtgcgcaccagggcactcagatttggcaccgagtgcacactgggctatcttgacctgttggagcatgtccttgtgattctgcagaagccaacacccgagttcaagcagcagctggccgccttctccaagagggtcgccggcgcggtgactgagctcattcaagccgccgaggccatgaagggaactgagtgggtcgatccagaggatcctactgtgatcgcagagacagagctactcggagccgctgcctccattgaagctgcagcgaaaaagttggaacagctgaaaccgagggctaagcctaagcaagcggatgagaccttggatttcgaagaacagatcctggaagctgcgaagagcatcgccgccgccactagtgcacttgttaagagtgcgtcagctgcccagcgggagttggtagcgcagggtaaggtgggcagtatccctgccaatgctgccgacgatggacagtggtctcagggtctcatcagcgctgctaggatggtggctgccgcgacttcctccctctgtgaagcagccaacgccagtgtgcaaggtcacgcaagtgaagagaaacttatatccagcgcaaaacaggtggccgcttcaacagcacagttgctggtggcttgcaaggtcaaggccgaccaagacagcgaggccatgcggaggctgcaggccgcaggtaacgccgtgaagcgtgcaagcgacaatcttgtgcgggccgcacagaaagcggctttcggaaaggccgacgacgatgatgtggtagttaagacgaagttcgtgggcggaatagcacagatcatcgctgcccaggaagaaatgttgaagaaagaaagggagctggaggaggcaaggaagaagttggctcagatcaggcaacagcagtataaattcctgcccaccgaactgagagaagacgagggatag

SEQ ID NO: 207996 - DNA, 7629 bp, synthetic construct
  misc_feature 1..7629: note = Description of Artificial Sequence: Synthetic coding sequence
  source 1..7629: mol_type = other DNA
atggtggccctgagcctgaagatctgcgtgcggcactgcaacgtggtaaagacaatgcagtttgaacccagtaccgcagtttatgacgcgtgccgtgtgattcgcgagcgcgtccctgaggcccagaccggccaggcatccgactacggactcttcctctcagatgaggatcctaggaaaggcatctggcttgaggccggtcgcaccctggattattatatgcttcgcaatggtgacatattggagtacaaaaaaaaacagcgtccacaaaagattcgtatgctggatggctcggtcaaaacagtgatggtcgatgattccaagactgtgggcgagctacttgtgaccatctgtagtcgcatcgggatcacaaactatgaggagtactcgttgatccaggaaacaattgaggaaaaaaaggaggagggcacaggtacactcaagaaagaccgaaccctcttgcgggacgaaaggaaaatggagaagctaaaggctaagctccatactgacgatgatttaaactggctggaccacagtagaacatttagggagcagggtgtggatgaaaatgagactctcctgctgcggcggaaatttttctatagtgaccagaatgttgattccagggacccggtgcagcttaacttgctgtatgtccaggcccgggacgatatcctgaacgggtctcaccctgtaagcttcgagaaggcatgcgagtttggaggcttccaggcgcaaatccagttcggtccacacgtggagcacaaacacaagcccggatttctggatctgaaagaattcctccccaaagagtatattaaacagcgcggggctgagaaacgaatttttcaggaacacaaaaactgcggggaaatgagcgagattgaagcgaaggttaaatatgtgaagctggctaggtccctcagaacatatggcgtgagctttttcctggtgaaagagaaaatgaagggcaaaaataaactggtgccaagactgctgggcatcaccaaggattccgtgatgcgcgtggatgaaaaaacaaaagaggtacttcaggagtggcctctcacaaccgtgaagagatgggcggcctctccgaaaagctttaccttggattttggggagtatcaagagtcttattactccgttcagaccacggagggtgaacagatttctcaactcatagccggttatatagacattattctgaagaagaagcagagtaaggatagatttggcctggaaggagatgaagagtcaaccatgctcgaggagagtgtcagtcctaaaaagtcgactatcctgcaacagcagttcaatagaacggggaaggccgagcacgggagcgtggcgctccctgcagtgatgagatctggcagctccggccctgaaacttttaacgttgggtcaatgccttccccacagcaacaggttatggttggtcagatgcacagaggacacatgccccctctcacgagcgcccaacaggctctgatgggcaccattaacacgtccatgcacgcagtgcagcaggcccaagacgatttgtcggaactcgatagtctcccacctcttgggcaggacatggcgagtcgcgtctgggttcagaataaagttgatgagtctaagcatgaaatccatagccaagtggacgcaatcactgccgggaccgcctcagtagttaatctcaccgctggcgacccagccgacactgactataccgcagtgggatgtgcaattactacaatcagcagtaacctgaccgaaatgtccaaaggagttaagttgctcgctgctctgatggatgacgaagtgggcagtggggaggatctgctgagggccgcacggaccttggccggggccgtgtccgacctgctcaaggccgtgcagcccacttccggagagcccaggcaaacagttctgactgctgccggatcaattgggcaggcatccggtgacttactccgccagattggcgagaacgagaccgatgagcggttccaggacgtactaatgagcctggctaaggctgtggctaacgcagcggcaatgctcgtgttgaaggcaaagaacgtggcacaagtggccgaagatacagtattgcaaaacagagtgattgccgcagccacacagtgcgcactatccacctcccagctcgtggcctgcgcaaaagttgtgtctcccaccatatcgtcgcccgtgtgccaggaacaactgatagaggctgggaaactggtcgaccggtctgtcgagaactgcgttagagcatgtcaggctgctaccacagacagcgagctgcttaaacaagtctcagcagccgcttccgtggtttctcaggcattgcacgatctgttgcaacatgtcaggcaattcgctagccgcggcgagccaatcgggcgctacgatcaagcaaccgataccattatgtgcgtgaccgagagcatcttcagtagcatgggtgacgcgggagagatggtgcgccaagcaagggttctcgctcaggctactagcgaccttgtgaacgcgatgcgctctgacgccgaagctgaaattgacatggagaacagcaaaaagttgctagccgcagcaaagcttttagcagactcaaccgcaagaatggtcgaagccgccaagggagccgccgcaaatccggagaatgaggaccagcaacagcgcctgagagaagctgcagagggacttagggtcgcaacaaatgctgctgcccagaatgctatcaagaagaagattgtgaatagactcgaagttgcagccaagcaggccgccgctgcagccactcagaccattgctgcttctcagaatgcggctgtgagcaacaagaaccccgcagctcagcaacagctggtgcaatcctgtaaggctgtcgcggaccacattccccagctggttcagggagtccgcggatctcaggcccaggctgaagacttgagcgcccagctggcactgatcataagctcccaaaacttccttcagccagggagtaagatggtgtcctcggcaaaagcagcggtccccaccgtctctgatcaggccgctgctatgcagctttcacagtgtgcaaagaaccttgccactagcttggcagaactacggaccgccagtcagaaggcccatgaggcgtgcggccctatggagatagactcagcactcaacacagtccagaccctgaaaaatgagttacaggacgccaaaatggccgcggtcgaatcacaacttaaacctctacctggggaaaccctggaaaaatgtgcccaggatctcggtagcacaagtaaagcagtgggtagctccatggcccagcttttgacatgtgcggcacagggcaacgaacattacactggagtggctgctagggagacagctcaggctctgaaaacactggcacaagcggccaggggggtcgcagcctccactacagatccggccgcagctcacgccatgctggactcggcaagggacgtgatggagggatccgctatgttaattcaggaggctaagcaagccctcatagctccaggagacgccgagcggcagcagcgactcgcccaagttgctaaggctgtgtcacactcacttaacaattgcgtgaattgccttcccggccagaaggacgttgacgtggccctcaagtcgatcggagaaagcagtaagaaattacttgtcgattcacttccccccagtaccaagccctttcaggaggcccagtctgagttgaatcaggctgcagctgacctaaaccaaagcgcaggggaagttgtgcatgccacccgcggtcagtcaggagaactcgcagctgcaagcggtaaattctcagacgatttcgacgaattcctggatgccggaatcgaaatggccgggcaagctcagactaaagaggaccagattcaggtgattggtaacctgaaaaatatctccatggcaagtagcaagcttctccttgcggcaaaatctctgagtgtggatcctggagcccccaacgccaagaacttgttagctgcagctgcccgcgcagtgaccgagagcatcaaccaactgattactctgtgcactcagcaggccccaggtcaaaaggagtgcgataacgctcttagggagcttgagacagttaaggggatgctagacaatcccaatgagcctgtgtcagatttgagctatttcgattgcatcgagtcagtgatggaaaattctaaggtgctgggggaatctatggcagggattagccaaaacgcaaaaaccggagacctcccagcattcggggaatgtgtggggatcgcctcaaaagcgttgtgcggcctgactgaggccgccgctcaggccgcctacctcgtgggcataagcgaccccaacagtcaggctgggcaccaggggctagtggacccaatacagtttgcacgcgcgaaccaggcaatacagatggcttgccaaaaccttgtggatccaggttcctctccaagccaggtactgagcgcagcaaccatcgtcgccaaacacacatctgccctgtgtaacgcgtgtcgtatcgcgtcctctaagacagcgaaccccgtggctaagcgacacttcgtgcagagcgccaaggaagtagctaacagcaccgctaatctggtgaagactatcaaggctctcgacggcgattttagtgaagataatagaaataagtgcaggatcgccacggctccactgattgaagctgtagaaaacctgactgcctttgccagtaaccccgaattcgtgagtatacccgcacagatctctagtgaaggctctcaggcccaggaaccaattctcgtgagtgctaaaaccatgctcgaatcctcttcataccttattcggaccgctcgatcattggcaattaacccaaaagaccctccaacttggtccgtattagccggtcatagtcatacagtgtccgactctatcaagagccttatcaccagcattcgcgacaaagcgccaggccagcgcgagtgcgactattctatcgatggcattaaccgatgtatccgggatattgaacaggcgagtctggccgccgtgagtcagtctctcgcaaccagagatgatatcagtgtggaggctctgcaagagcagctcacaagcgtggtccaagagattggacacctcatcgaccctatagctaccgcggcacgcggcgaggccgcccagttaggtcacaaagtaactcagctcgcctcatacttcgagcctctgattctggctgccgtcggagttgccagcaaaatcctggatcaccaacagcagatgacagtgctggaccaaacgaaaacactggcagaatcagctctccagatgttatatgctgccaaggagggcggcggaaaccctaaggcccagcatacccatgacgctatcacggaggctgcccagctcatgaaagaggctgttgacgacatcatggttaccctcaatgaggccgcaagtgaggtcggcttggtgggtggaatggtcgacgccattgcagaggcgatgagcaagctggacgaagggacaccacctgagcccaagggtacttttgtggattatcagacgacagtggtcaagtacagcaaggcaatcgctgtgacagcacaggagatgatgacaaaatccgttacaaacccagaggagctcggaggcctggcgtcccaaatgactagtgattacgggcacttggcattccagggacagatggctgctgctactgctgagccggaggaaattggctttcagataaggacacgagtacaagatctagggcacggatgcatcttccttgtgcagaaggccggagccttgcaagtgtgcccaaccgacagttacaccaaaagagagcttatcgagtgtgccagagctgtgaccgagaaagtgagtctggtactaagcgcgctccaggccgggaataaggggactcaagcctgtatcaccgcagcgaccgctgtttctggaattattgccgatctggataccaccatcatgttcgccactgccgggaccctgaacgccgagaatagtgaaacctttgcggatcacagagagaatatactgaagaccgccaaggctctagtggaggacactaagttgctggtctccggggctgcttcgacacctgacaaactggcgcaggccgcccagtctagcgctgccacaattacccagctcgcagaggtggtcaaactgggcgccgcttccctgggctcagatgatccagagacccaggttgtcctgattaatgctattaaagatgtagccaaagccctgtctgatctgatctccgccacgaagggagccgcctcaaaacctgtcgacgaccccagcatgtatcagctgaagggggccgccaaagtcatggttacgaacgtcacatcgcttctgaagactgtaaaggcggtcgaagatgaggccacccgggggacacgagccctcgaagctaccatcgaatgcatcaagcaggagctaaccgtgtttcaatccaaagatgtccccgaaaagactagctctccagaagaatctattcgaatgacaaaggggatcacaatggctactgccaaagctgtggcagctggcaacagctgtagacaagaagatgttattgcaacagccaacctgtcaaggaaggctgtctccgatatgctcacggcgtgtaagcaggcctcattccacccggatgtcagcgatgaggtgaggactagagccctgagattcggaacagaatgtaccttgggttatcttgacctgttggaacatgttctcgtgatcctgcagaaacccacacctgaattcaagcagcagctggctgctttcagcaaacgcgtggcgggcgctgtaaccgaactgattcaggccgccgaggctatgaaagggacggagtgggttgaccccgaggatcccacagtcattgcagaaactgaactcctgggagccgcagccagcattgaggcggccgctaagaagctggagcagctgaaaccaagagcgaagccaaaacaagctgatgaaactctggacttcgaagaacaaatcctggaggccgccaagagcatcgctgctgccacaagcgccctggttaagtccgctagcgctgcccaaagggagctggtagcccaaggtaaggtgggatctattccagcaaatgccgctgacgacgggcagtggtcccagggtctaatttccgctgctcggatggtggcagccgcaacctcctccctttgcgaagcagccaacgcctccgtccagggccacgcctcagaagagaagctaatatcttctgccaagcaggtggctgcaagcactgcccaactgttggtggcatgcaaggtgaaggcagaccaggactccgaagccatgcgccgtttgcaggccgccggcaacgcagtgaaacgcgcatcagacaatttagttagagccgcccagaaggccgctttcggtaaagccgacgacgatgatgtggtggtgaagacgaaattcgtgggcggcatcgcacagatcatagctgcgcaagaggagatgctgaagaaggagcgggaactggaagaggcccggaagaaattagcccagattaggcagcagcaatataagtttctgcctactgagctgcgcgaggatgagggttag

SEQ ID NO: 207997 - DNA, 5190 bp, synthetic construct
  misc_feature 1..5190: note = Description of Artificial Sequence: Synthetic coding sequence
  source 1..5190: mol_type = other DNA
atgaaggtgagcaccctgcgggagagcagcgccatggccagccccctccctagagaaatggaagaagagctggttcccacagggtcggagcctggggatactcgggcaaagccccctgtgaagcctaagccgcgggctctgcctgccaagccagccctccctgcgaaaccctccctgttggtgcccgtcggcccccgaccgccaagagggccactggccgaattaccttccgcccggaagatgaacatgctggccggacctcaaccttacggggggagcaagcgtcctctcccttttgccccccgacccgctgtagaggcctcaaccgggggcgaggctacccaggaaaccggaaaagaggaggccggaaaagaggaaccaccacctctgacccccccagcgagatgcgcagcgcccggaggagtgaggaaagccccagcccccttccggcctgcctcagagcgattcgctgctaccaccgtggaagagatcttagccaaaatggaacagcccagaaaagaagtgttggcatcccctgatcgactctggggtagcagactgaccttcaaccacgacggatcatccaggtacgggccacgaacctatggaaccactacggcaccaagagacgaggatggctcaacactttttagaggatggtcccaagaggggccagtaaaatcacccgcagaatgcagagaagaacattccaagacaccagaagagagaagcctgccatccgacttggctttcaacggtgacctcgcaaaggccgctagttctgaactaccagccgacatttccaagccctggattcccagctccccagctccctcaagcgaaaatggcggccccgcctctcccggactgccagccgaagcatccggtagcggtcctggatccccccatctgcacccacccgacaagtcctcgccctgtcactctcaattgcttgaagctcagacccctgaggcttcacaagctagtccttgtccagcagttacaccctctgccccaagcgcagccctgccagacgaaggctctcgacataccccctcaccgggtctgcccgccgagggggcaccggaggcgcccagaccctcttctcctccgccagaggtactcgagccacatagcctcgaccagccaccggccacttctccccgccctctcatcgaggttggtgagctcttggacctgacacgaaccttcccctcaggtggggaggaggaggccaagggggatgcacacttgcgccctaccagcctagtccaacgccgcttctctgagggagtgttgcagtctccctcccaggaccaggaaaaactcggcggatctctggcggccctgcctcagggacaaggcagccagctggctttggaccgtcccttcggtgcagaatctaactggtccctgagccagagctttgaatggaccttcccgactcgtcccagcggacttggcgtgtggaggttggattcaccccctccatcacctattacggaggcaagcgaggccgccgaagccgcagaagctggcaaccttgccgtcagtagtcgcgaagaaggagtgtcccagcagggccagggcgctggctcagcaccaagcggtagtggctcctcttgggtccagggcgacgatccttcaatgtcacttacgcagaagggcgatggcgagagtcaaccccaattccctgccgtgcccctagaaccactccctactacagagggcacccccggactccctttacagcaggccgaagagcgctatgagtcgcaggagccccttgccgggcaggaatctccactacccctagcaactcgcgaggccgctctgcccatcctcgaaccggtcctgggccaggagcagccggcagcacctgaccagccttgcgtgcttttcgctgacgcccccgaaccgggtcaggccttacccgtcgaagaggaggccgtgactctggcccgcgctgaaaccactcaggctagaacggaagcacaggacttgtgtagggctagccctgagcccccaggccccgaaagttcctctagatggctggatgatctgttggcgagcccaccaccaagcggcggaggagcccgtcgcggcgctggagcagagctgaaagacactcagtctcccagcacctgtagcgaaggcttgttaggctggagtcagaaagacctgcagtcggagtttggcattactggagatccccagccatcatcctttagtccgtctagctggtgccagggcgctagccaggattacggacttggtggggcgtccccccggggagatcctggtctgggcgaacgcgactggacaagcaagtacgggcaaggggcgggcgagggatcaacacgagagtgggcctcacgctgcgggatcgggcaggaagagatggaggctagttccagccaggatcagtctaaagtgtccgcaccaggggtcctcaccgcccaggatagagtggttgggaagcccgcacagctgggaacccagcgcagtcaggaggccgacgtccaggactgggagttcaggaaacgcgatagtcagggcacatactcaagtagggacgctgaattacaggatcaggagtttgggaagcgggactccctgggcacttacagtagtcgtgacgtgtcgctcggggactgggagttcggcaaaagggactccctgggagcttacgccagtcaggatgctaacgagcagggccaggacctggggaaaagagaccaccacggccggtacagtagtcaagacgccgatgaacaggactgggagtttcaaaaaagggatgtgtctctgggaacttacggcagtagagccgcagagccgcaagaacaggaattcggaaaaagtgcctggatacgtgactattctagcgggggtagctctcgcacactcgacgctcaggatagatcctttggcactagacctctgtccagcggctttagcccagaggaggcccagcagcaggacgaggagttcgaaaaaaaaataccgtccgtggaagatagcttaggcgaaggatccagagatgcgggccgccctggggagcggggttcaggaggactgttcagtcctagcaccgcgcacgtcccggacggcgccctgggacagcgggaccagtctagctggcagaattccgacgcatctcaggaagtgggaggccaccaggagaggcagcaggctggagcacagggaccaggttccgccgacctcgaggatggcgaaatgggcaaaaggggatgggttggggaattcagtctgtctgtagggccacagcgtgaggccgccttctctccaggccagcaggactggtctagagatttttgcattgaagcttctgaaagatcttatcagtttggaataatcggcaatgatagagtttccggagctgggtttagccccagcagtaaaatggagggcggacactttgttccacccggtaaaacgaccgcaggttcagtcgactggacggaccagctcgggttgaggaacctggaggtcagtagctgtgtgggtagcgggggaagtagcgaggcccgggaatccgcagtgggccagatgggatggtcaggaggtctctctttgcgtgatatgaatttgaccggctgcctggaaagtggaggtagtgaggagcctgggggaattggcgtcggtgaaaaggactggacaagcgacgtgaacgttaagagtaaggacctggctgaagtgggcgaaggcggcgggcactcacaggctcgtgagtccggagttggacaaactgactggagcggagtggaggccggtgaattcctgaaaagcagagaaaggggggtggggcaggcggattggacacccgacttaggccttcgtaatatggcacccggggcggtgtgcagtcctggagagtcaaaggagttgggagtcgggcagatggactggggtaataacctgggcttgagagatctggaagtgacgtgtgaccctgattctggggggtcacagggtttaagagggtgtggcgtcgggcagatggactggacacaagatctagcccctcaaaatgtcgaactgtttggcgcccccagcgaagcgagggagcatggggtgggcggggtaagccagtgcccggaacctggattgcggcataacgggagcctatccccaggcctggaggcccgtgaccccctggaggcgagggagttaggtgtaggggagacctcaggaccagagactcagggagaagactactctagcagttctctcgagcctcatccagccgatcctggtatggagacaggggaagcactttcctttggggcatcacccggtcgctgtccagcgcgacccccgccatccggatcacagggtttgctggaggagatgctcgccgcttcctcaagtaaggccgtcgcacgcagggaaagcgcagcatccggtctggggggcctgctggaggaggagggggctggagccggcgctgcgcaggaggaggtgctggagcctggccgcgactccccaccttcgtggaggccccagccagatggagaggcctcacaaacagaggatgtcgacggtacctgggggtcttccgccgctcgatggtccgatcaggggcccgcacaaacttcgcgccgaccctcacagggcccaccggctcgttcgccatctcaggacttttcctttatagaagatacagagatcctggatagtgccatgtaccggagtagagctaatttaggtaggaaaagagggcaccgcgcgcctgtgatcaggccaggcggtaccctggggctcagcgaggccgcagatagcgacgcacacctcttccaggacagtaccgagcccagggcaagccgtgtcccttcatctgacgaggaagttgtcgaagaaccccaatctagaagaacccgtatgtccctgggcacaaagggcttgaaggtcaatctatttccaggcctttcaccatctgctttgaaggctaagctacggccccggaacaggtctgcagaggagggtgagttggcggaaagcaaaagtagccagaaggaatcagccgtccaacggtcaaaatcatgtaaggttccaggtctgggcaaacccctgacgttaccgccaaaacctgagaagtcaagcggcagcgaaggttcaagccccaactggctgcaggcgctcaagctcaagaaaaagaaggtttag

SEQ ID NO: 207998 - DNA, 432 bp, synthetic construct
  misc_feature 1..432: note = Description of Artificial Sequence: Synthetic coding sequence
  source 1..432: mol_type = other DNA
atgaaggtgagcaccctgcgggagagcagcgccatggccagccccctgcctagggaaatggaggaggagctcgttccgacgggctcagaaccgggggacacccgtgccaagcctcccgttaaaccgaagccccgcgccttgccagcaaagcctgcactgcccgcgaagccctccctgctggtgcctgttgggcccagacctcctcggggaccgctggccgagctgccttctgcgcggaaaatgaatatgctggcggggccccagccctacggcggctctaaacggcccctccctttcgccccacggcccgccgtggaagcaagcactggcggcgaggcaacacaagaaactggcaaggaggaggcagggaaggaagaaccaccgccacttaccccaccagctcgttgcgcagcaccgggaggtgttagatag

SEQ ID NO: 207999 - DNA, 5190 bp, synthetic construct
  misc_feature 1..5190: note = Description of Artificial Sequence: Synthetic coding sequence
  source 1..5190: mol_type = other DNA
atgaaggtgagcaccctgcgggagagcagcgccatggccagccccttacctagagaaatggaggaggagcttgtcccaactggcagtgaacctggcgatactcgcgccaaaccccccgtaaaacctaagcctcgggccctacctgctaaaccagcgcttcctgccaagccatctctgctggtgcctgttgggcctcggcccccacgcggtccactcgctgagttacctagtgctcgcaagatgaatatgttggccgggccccagccatacgggggctcgaagcgacctttgccctttgccccgcgacctgcggtggaggccagcacggggggggaggctactcaggagacaggtaaagaggaggcaggaaaggaggaaccacctccactgacccctccggcccggtgtgccgcaccaggcggggtcagaaaagccccagctccctttcggcccgcttctgaaagattcgcggcgactaccgtggaggaaattctggccaagatggaacaaccgagaaaggaggtgctggcatctcctgacagattatggggcagcagacttaccttcaatcatgatggaagcagtaggtacgggccgcggacctatggcaccaccaccgcaccgcgggacgaagacggctccactctgtttcgcggatggagtcaggaaggacccgtgaaatcccccgccgaatgcagagaggagcactcaaaaacccctgaagagcgatcgctgcctagcgatttggccttcaacggagatctggccaaggccgcatcttccgaattaccggccgacatcagcaagccatggatcccctctagccccgccccctccagcgagaatggcggcccagcatctccaggcctgccagctgaggcctctggctccggtcctgggtctcctcatctgcaccctccggataagtcttcgccatgccattcccagttgctcgaagcgcaaaccccagaggcgagccaagccagtccctgccccgccgtcactccatctgcacctagcgccgccctacctgacgagggaagcaggcacacaccaagcccggggctgcccgcggaaggggcccctgaagctcctcgtcctagctcaccgccccccgaagtgctggagccccattccctggatcaacctcctgctacgagccccagacccctcattgaagtcggtgagttgcttgacttgacgaggactttcccttcgggcggcgaagaagaagctaagggcgacgctcacctgcggccgacgtctttggttcagagacggttcagcgagggggtgcttcagtcccccagccaggatcaagaaaagttgggtggctctttagccgcacttcctcagggacagggtagccagctcgctttagacagaccatttggggcggagtccaattggagcctcagtcagtctttcgagtggaccttccctacccgcccttcaggtttaggggtctggaggttggattccccccctccctcccctattaccgaagcgtcagaagctgctgaagcagctgaggccggcaatctggccgtgagctcgcgtgaggaaggcgtaagccaacagggccaaggagcgggctcggcaccatctgggtcaggctcttcttgggtgcagggtgacgaccccagcatgagtctgacccagaagggggatggcgagagtcagcctcagttccctgccgtccccctggagcctctcccaacgactgaaggcacaccaggactgccgttgcagcaggctgaggagagatacgaaagccaggagcccctggctggacaagagagccctttgccattggctacgagagaggcagccctaccgatcctggagcccgttctggggcaagagcaacctgccgcacctgatcagccatgtgttctgttcgccgacgctcccgaaccagggcaggcattgcctgtggaggaagaggccgtcactctcgcgcgtgccgagacaacccaggcaaggacagaggcacaggatctttgtagggcttcgccggagcctccaggacctgagtcatcaagtcgctggttggatgatctcctcgcctcccctccacccagcggcggaggggctaggcgtggcgccggtgctgaactgaaggatacccagtcaccgtctacttgttcagagggccttctggggtggtctcagaaggatctgcaatctgagtttggcataaccggtgaccctcagccgtcaagcttttctccatcctcctggtgtcagggcgcctctcaggactacgggctaggtggtgcgtcgccccggggcgacccgggcctcggcgaacgcgattggaccagcaagtacggccaaggcgctggcgaagggtccacaagggagtgggcgagccggtgtggcatcgggcaggaggagatggaagctagctccagccaggaccagagcaaggtgtcagcacctggtgtcttgactgcccaggatcgcgttgtagggaaaccagctcagcttgggacacagcggtcacaggaagcagatgtgcaggattgggagttccggaagagggattctcaggggacatacagcagcagagacgccgagctccaggatcaggagtttggcaaacgcgactccctgggtacctactcaagccgcgatgtgagtctcggtgattgggaattcggaaaaagggattcactaggagcatacgcatcccaagacgccaatgagcaaggacaggacctgggcaaacgcgatcaccatggacggtactcgtcccaggacgctgatgagcaggactgggaatttcaaaagcgtgacgtttcactggggacctatgggagtcgggccgccgagccccaagagcaggaatttggcaagagtgcctggatacgggattacagtagcggcggcagttcccggactcttgacgctcaggaccgttctttcggaacacgtcctcttagctctgggttttccccagaggaggctcagcagcaggatgaggaattcgagaaaaaaatcccatcagtggaggacagtttgggagagggctcgagggatgccgggagacccggcgaacgcggatctggaggactcttttcccccagcaccgcgcacgtgcccgacggcgctctcggtcaacgtgatcagagcagctggcagaactccgacgctagccaagaagtgggcggacaccaggaacgccagcaggcgggtgcgcaaggaccaggctcagcagacctcgaagatggagagatgggcaagcgcggatgggttggcgagtttagtttatccgtagggcctcaaagggaggcggcgtttagcccaggacagcaggattggtcgagagacttttgcattgaggcatctgagcggtcataccaatttggtattataggtaatgatcgtgtgagtggtgccgggttttccccctcttccaagatggaaggcgggcattttgtgccccctggaaaaacgactgctggatccgtggattggacggaccagctggggctacggaacttagaggtgtcttcctgtgtgggcagtggggggtcatcagaggccagagagagcgcggtcggtcagatggggtggagtggcgggctatctcttagagacatgaatttgacaggctgcctggagtctggcggaagtgaggaaccaggcggtattggagtgggtgagaaagactggacctcagatgtgaacgtgaagtccaaggatttggctgaggtgggagaaggcggcgggcatagccaggctcgggagtcaggtgtcgggcagacggattggtccggcgtggaagctggggaatttctcaagagtcgggagcggggtgtgggtcaggccgattggacacccgatctggggctgagaaacatggcccctggtgctgtctgtagtcctggggagagcaaggagctaggggtcgggcagatggactggggcaataatctgggcctgcgagacctggaggtgacgtgcgacccagacagcgggggcagccagggactgcgcggctgcggtgtgggtcaaatggactggacacaggatctcgccccccagaacgtggaactttttggcgcaccatccgaggcacgagagcacggcgtgggcggcgtgagccagtgtcccgaacctggactgcggcataatggctcattgagtcccgggctggaagcccgtgatcctctggaagccagggagttaggcgtgggagaaacaagtggccctgaaacccagggggaggattattctagcagctcattggagccccatcctgcagaccctggaatggagacaggagaggcgctgtcatttggggctagtccgggaaggtgtccagcccggccgcctccaagcggctctcaaggcctcctcgaagagatgctggcagcctccagctcaaaagcagtggctagacgtgaatctgcagcatcaggtttgggcgggcttctggaggaggaaggtgcaggagcaggggcagcccaagaggaggtattagaacctggccgagatagtcctccctcctggcggccccagcccgatggggaagcctcacaaacagaggatgtggatgggacctggggatcaagcgcggctcgatggagtgatcagggacctgcacagacatccagacgtcctagccaaggaccacctgctcggagtcccagccaggatttcagttttatagaggataccgaaatcctcgattccgccatgtaccgatcccgagccaatctcggtaggaaaaggggtcaccgtgctccggtcattaggcctggaggcaccctcgggctgagcgaagcggcagatagcgacgcacatctcttccaagactcaactgagcctcgtgcttcccgcgtgccctcgagtgatgaggaagtcgtcgaagagccgcagtccagacggacaaggatgtccctgggtacaaaggggctgaaagttaacctctttcccggcctctctccgagcgctcttaaggcaaaattacggcctcgaaatcggtcagccgaggagggagagctagctgaatctaaaagtagccagaaggagtctgccgtccagcgctcaaagagttgtaaggtgccggggctggggaagccactgaccctcccacctaaaccagagaagagctctggctctgagggcagcagccccaattggctacaggcactgaaacttaagaagaaaaaggtgtag

SEQ ID NO: 208000 - DNA, 3006 bp, synthetic construct
  misc_feature 1..3006: note = Description of Artificial Sequence: Synthetic coding sequence
  source 1..3006: mol_type = other DNA
atgcccagcaccaaccgggccggcagcctgaaggaccccgagatcgcagaattgttcttcaaagaggaccccgagaagctcttcaccgacttgagggagatcggccacggcagctttggagccgtctacttcgctagggacgtcaggactaacgaggtggtggcaatcaaaaagatgtcatactctgggaaacagagcaccgagaaatggcaagacattattaaggaggtgaaatttctgcagcggatcaaacaccccaatagtatcgaatacaagggctgctatctcagggagcataccgcatggctagtgatggagtactgtttgggtagtgcctccgacctgctggaagtccataagaagccactgcaagaagttgagatagccgccatcacacacggcgccctgcaagggttggcatatctccattcccataccatgatccaccgcgatattaaggcaggcaacatcttgctgaccgagcctgggcaggtgaagctcgctgatttcggatccgcctcaatggcgagtcccgctaatagcttcgtggggacgccatactggatggctccagaagtgatcctcgcaatggacgaaggccagtacgatggaaaagttgatgtctggagccttgggatcacctgtatcgagctggccgaaagaaaacccccattattcaacatgaacgccatgagcgcgctgtaccatatagcccaaaacgagtctcctaccctccagagtaacgaatggtcggactacttcagaaacttcgtggacagttgtctacagaaaattccccaggatcggccaacctcagaggaattgctgaagcacatttttgtgctgagagagcgccccgagacagtgctgattgatctgattcagcggacgaaagatgccgttcgggaactggacaatctgcaatatcgcaagatgaagaaacttctcttccaggaggcccataacggtcctgccgtggaggcccaggaggaggaggaggagcaggaccacggcgtgggccgtacagggaccgtaaacagcgtcggatccaaccagtccatcccatcaatgtccataagtgcttcttctcagtctagctccgtgaattctctgcctgacgtatctgacgacaagagcgagctggacatgatggagggcgatcacactgtgatgagtaatagctctgtcattcatctaaaaccggaggaggagaactatcgcgaggagggtgatcctcggacacgggcctctgacccccagagtccaccccaggtgtctcgccataagagccactataggaacagagaacacttcgccaccatccgcacagcctcactggtgacgcggcagatgcaggaacacgagcaggacagtgagctgcgcgaacaaatgtccggctataagcgcatgaggcgccaacatcaaaaacaattgatgacactggagaataaactgaaggccgagatggatgaacaccggctccggttggataaggacctcgaaacccaacggaacaatttcgccgctgagatggagaagttgatcaagaaacaccaagccgcaatggagaaagaagccaaggtgatgtccaacgaagaaaaaaagttccagcaacatatccaggcgcagcaaaagaaagagcttaattcatttctcgaatctcagaaaagagagtataagctgcggaaggagcagcttaaagaggaattaaatgagaatcagtccactcctaaaaaggagaaacaggagtggctgagtaaacagaaggagaacattcagcacttccaagctgaagaggaggctaatcttctcaggcgccagcgtcaatatctcgaacttgaatgccggcgctttaagcggcggatgctgctgggaaggcataaccttgaacaggatttagtgcgcgaggaactgaataagaggcagacgcaaaaagacctcgaacatgctatgctcttacggcagcatgagtctatgcaggagcttgaattcagacacttaaacaccattcagaaaatgcggtgtgagcttatcaggttacagcaccagacggagctcaccaatcagctggaatacaacaaacggagggaacgggagctgcgacggaaacacgtcatggaggtgaggcagcagccaaagtcactaaaatctaaggagttgcagatcaaaaagcagtttcaagacacgtgcaaaatccagaccagacagtataaggcattgcggaaccatttactggagactactccaaagtcagagcataaagcggtgctcaaacgcctcaaggaggaacagacccggaagctcgcgattctcgcggaacaatatgatcatagtattaacgagatgctgtcaacacaggcccttcggctggacgaagctcaggaagcagagtgtcaggtgctcaagatgcagcttcagcaggaactcgagctgctgaacgcttaccagtccaagataaagatgcaggctgaggcgcaacatgatagagagttgagagagctggaacagagagtgtccctgcgtcgagcactcctggagcagaagattgaagaggaaatgctggcactccagaatgagagaaccgaacgtatccggtcgctgctcgagcggcaagcaagagagatcgaggccttcgattctgagtctatgagactgggctttagtaacatggtcctgtccaatctttctccagaagcttttagtcacagctacccaggggctagtggatggtcacataaccccacaggtggtccaggccctcattgggggcacccaatggggggacctccgcaggcatggggccacccaatgcaggggggaccccagccatgggggcacccctcaggcccgatgcaaggcgtgcctagaggaagctccatgggcgtgcgcaacagtccacaagcactcagacggaccgctagtggtgggcgaaccgagcagggcatgtctaggagcacttccgtcacctcacagatctctaatgggtcccacatgtcctatacatag

SEQ ID NO: 208001 - DNA, 2562 bp, synthetic construct
  misc_feature 1..2562: note = Description of Artificial Sequence: Synthetic coding sequence
  source 1..2562: mol_type = other DNA
atgcccagcaccaaccgggccggcagcctgaaggaccccgagatcgccgaactattctttaaagaagacccggagaagctgttcactgaccttagagagatcggccacggaagcttcggcgcagtctactttgcacgtgacgtaagaactaacgaggtggtggctattaagaagatgtcatactccggaaagcagtccactgagaaatggcaggatattattaaagaggtaaagttcctgcaacgcatcaaacaccccaactctatcgaatacaaaggctgttacctgcgagaacatactgcctggctggtgatggagtactgtctcggctctgcttcagacctcctggaagtgcacaagaaaccactccaggaagttgaaattgctgctatcacccacggggcactgcagggtctcgcctacctccatagccatactatgatccatagggatatcaaggccgggaacatcctgcttactgaacccgggcaggtcaaactggcagacttcggctctgcctctatggcgtctcctgccaactcttttgtcggaaccccctactggatggctcctgaggtgattctggctatggatgaaggacagtatgacggtaaggttgacgtgtggagtctgggcattacatgcatcgaactagccgaaaggaagccgcctctgttcaacatgaatgccatgtccgctctctatcatatcgcccagaatgagagtccgaccctccagagcaacgagtggagcgattacttcagaaatttcgttgattcctgtctacagaaaattccacaggatcgacccactagcgaagagcttctgaaacacattttcgtgctccgcgagcggcccgaaaccgtgctcatcgacttgatccagagaacaaaagatgcagttcgggaactagacaacctccagtataggaagatgaaaaagctgctcttccaggaggcgcacaatgggcctgctgtcgaggctcaggaagaagaagaagagcaagatcacggggttggccggacagggaccgtgaattctgtagggtctaaccaaagcattccatctatgtccatttctgcgtcaagtcagagttcctctgtaaattctttgcctgatgtctccgacgacaaatctgaattggacatgatggagggtgatcacactgttatgtccaattcctcggtcattcatctcaaacctgaggaagagaactatcgggaagagggcgacccccggacacgcgcatccgatccacagtctcctcctcaagtaagccggcacaaatcgcattaccgaaacagagaacattttgccacaatcaggactgcctccctcgtaacaaggcagatgcaggagcacgagcaagattctgaactgcgggagcagatgagtggatacaaacgcatgcgcaggcagcaccaaaagcagttgatgacgctggaaaacaaactgaaggcagagatggatgagcaccggctgagactggacaaggatttggaaactcagagaaacaacttcgccgcagagatggagaaactgatcaaaaagcaccaagcagccatggaaaaggaggcaaaggtgatgagcaatgaggaaaaaaaatttcagcaacacattcaagcacagcagaagaaagagctcaactcgttcctggaaagtcagaaaagggagtacaagctgagaaaggagcaacttaaggaatccaaggagttgcagatcaaaaagcagtttcaggacacttgtaaaatccagacaaggcagtacaaggctctacgtaaccacctgctggagacgacccctaagtcggaacacaaagccgtcctgaagcggctgaaggaggaacagacacggaagctcgctatactcgccgagcagtacgatcacagtattaacgaaatgctgtctacacaggcgcttaggcttgatgaggcccaagaggcggagtgtcaggtactcaagatgcagcttcagcaggagctggaattgctgaacgcatatcagtccaaaataaaaatgcaggccgaggcccaacatgatagagagctgagggagctggaacaacgggtgtctcttagaagggcattgttggagcagaagatcgaagaggagatgctggctcttcagaatgaaagaacggaacgaatccgctcccttctggagcggcaggctcgggaaattgaggcctttgactcagagtctatgcgcttgggattttccaatatggtgttatccaatctcagtccagaggcgttctcccatagttaccctggcgccagcggatggagtcataaccctaccggagggcctgggcctcattgggggcatcccatgggtggccctccacaggcctggggacacccaatgcaggggggaccccagccctggggtcacccttctgggcccatgcaaggggtccctaggggcagctcaatgggagtccgcaactcgcctcaggcattgcgcagaaccgctagcggaggacgaacagagcaaggaatgtcacggtccacttccgtcactagccagatcagtaacggctcccatatgtcttacacgtag

SEQ ID NO: 208002 - DNA, 3150 bp, synthetic construct
  misc_feature 1..3150: note = Description of Artificial Sequence: Synthetic coding sequence
  source 1..3150: mol_type = other DNA
atgcccgccggcggccgggccggcagcctgaaggaccccgacgtggccgagctgttctttaaagacgaccctgagaagctcttcagtgacctgagagagatcggccacgggtcctttggcgcagtgtatttcgccagggacgttagaaattctgaagtggtggctatcaagaaaatgagttattctgggaaacagtccaacgaaaagtggcaggatattatcaaggaagtcagatttttgcagaaactgaggcatcctaatacaattcagtaccgaggatgctacctgcgggagcacacagcttggctcgtcatggagtactgcctggggtctgcatccgacttgttagaggtccataaaaaacccttacaggaagtcgaaatcgcagccgttactcacggggctctgcaaggattggcctaccttcacagtcataacatgattcaccgggatgtgaaggccggaaacatactgttaagcgagcccggcctggtgaaattaggtgacttcggcagcgcttccatcatggcgccagccaactcatttgtcggcacgccatactggatggccccagaagttattctcgccatggacgaagggcagtacgatggcaaggtggatgtctggtccttggggataacctgtatcgagcttgccgagcgcaagcctcccttatttaacatgaatgctatgtcagccctctaccacatagctcagaacgaaagccctgtgcttcaatccggccattggtctgaatattttcgcaatttcgtcgactcttgcctgcagaaaattcctcaagatcgtcccacaagcgaggttctgctgaagcatcggtttgtgctcagggaacgtccccccaccgtaattatggatctaattcaacggaccaaggatgctgtccgagagctggacaatttacaataccgtaaaatgaaaaagattctcttccaggaagcccctaatggacctggggccgaggcccccgaggaggaagaggaggcggaaccctacatgcaccgtgccggcaccctcacgtcgctggagtcttctcacagtgtacctagcatgtcaatcagcgccagcagccagagcagctcagtcaattcgttagcagacgcatccgataacgaagaggaggaagaagaagaggaggaggaggaagaggaagaggagggaccagaggcacgggaaatggctatgatgcaggagggcgagcacacagttaccagccacagctcgatcatacatcggctcccaggctctgataatctttacgatgacccataccagcctgaaataacaccgagcccattgcaaccaccggccgcccctgcgcccacctctaccacctcctcggctcggagacgcgcttactgccgcaatagagaccattttgcgactattcgcacagcatctctggtctcacgccagatccaagaacacgaacaggacagcgcgctgagagaacaattatcgggatataagagaatgcggcgccagcaccagaaacaactgctggccctcgagtcccgattgagaggtgagcgcgaagagcacagcgcacgcttgcagcgcgaattggaagctcagagggctgggtttggcgctgaagcagagaaactggctcggcgtcaccaggctatcggggagaaagaagcgcgggctgcccaggctgaagagagaaaatttcagcagcacattctgggccagcagaaaaaggagctcgccgccctcctggaagctcagaaaagaacctacaaactgcgcaaggaacagctgaaagaggaacttcaggaaaatccctctactccaaagcgagagaaagcagagtggctgctcaggcagaaagagcaactgcaacagtgtcaggccgaagaggaggctgggttacttcgaagacaacgacagtattttgagctgcaatgcaggcaatacaaaagaaaaatgctcctggccaggcactcacttgaccaggacctgttaagggaggatttgaacaagaaacagacccagaaggatttagaatgcgccctgctgctcagacagcatgaagctactagagagttggaacttagacagctgcaggccgtacaaagaactcgagccgaactgaccagactccagcaccagaccgagctgggcaaccagctcgagtataataagagacgcgagcaggagttgcggcagaaacatgcggctcaggttaggcagcaacccaagtccctgaaatctaaggaactacagattaagaaacaatttcaggaaacctgtaagatccagactagacagtataaagcattacgggcccatttgcttgagactactcccaaggctcagcataagtcactattgaaacgcttgaaggaggaacaaactcgaaaattggccatcctcgctgaacaatatgaccaaagtatcagcgagatgttatcgtcacaggccctccgcctggatgaaacacaggaagctgaatttcaagctctcaggcaacagctacaacaggaactggaactgctcaatgcttatcagagtaagattaagatacgaaccgagtcacagcacgaaagggaactgagggagttggagcagagggtagcactgcgccgggcgctgctggaacagcgggtcgaagaggaactgctagctctgcaaacggggcgcagcgaaagaattcgcagtctgcttgagaggcaggctcgcgagattgaagctttcgacgccgagagcatgcggctgggattctccagcatggctcttggcggtatccccgcggaggccgccgcacaaggttatccagcccccccccctgcaccagcctggccctcccgaccagtgccacgatctggtgcacactggagccacgggcccccgccacccggtatgccaccacctgcgtggaggcagccatctctgctggcgccaccggggccaccaaactggcttggaccccccacccaaagtggtacccctcgggggggcgccttgctgttactgcgcaactctcctcaacctcttaggcgggctgcctcgggcggtagtggatcagaaaacgtggggcccccagcagccgccgtaccaggccctctgagcagaagcactagcgtagcgtctcacatcttgaacggatcatctcacttctatagttag

SEQ ID NO: 208003 - DNA, 3708 bp, synthetic construct
  misc_feature 1..3708: note = Description of Artificial Sequence: Synthetic coding sequence
  source 1..3708: mol_type = other DNA
atgcccgccggcggccgggccggcagcctgaaggaccccgacgtggctgaactgtttttcaaagacgatccagagaaacttttctcagacctgcgagagattggacatggttcattcggtgccgtttattttgcacgggatgtgcggaattccgaagtcgtcgcgatcaagaagatgagttactctggcaaacagagcaacgaaaagtggcaggatattattaaagaagttcgctttctgcaaaagctgaggcacccgaatacaatccaataccggggatgctatctccgcgagcacaccgcttggttggtaatggagtattgcttgggaagcgcttctgacctcctagaggtccacaaaaagccactgcaggaggtagagatagccgctgtcacacatggagccctccaagggctcgcataccttcatagtcataatatgattcatagagatgtgaaggctggtaacatcctcctctcggagcccggcttggtgaaactgggggactttggaagtgccagcatcatggcccccgctaactcgttcgtggggaccccctactggatggcccccgaagtgatattggcaatggacgaggggcagtacgatggaaaggtggatgtgtggtcccttggaataacctgtatcgaactcgcggaacgaaagccccccctgtttaacatgaatgctatgagcgctctttatcatatcgcccagaatgagtcgcccgtattacaaagcgggcattggagcgagtactttcgtaatttcgtagactcttgcctgcagaagattccccaggatcgccctacttctgaagtgttactcaagcacagattcgtgctgcgggaacgtccccctaccgtaataatggatctgattcagaggaccaaagacgccgtgagggagttggataacctgcagtaccgtaagatgaagaaaatcttgtttcaggaagcaccaaatgggcctggcgctgaagcccccgaggaagaggaagaggctgagccttacatgcacagagcagggaccctgacctcgctggaatccagccattctgttccttcgatgtctatcagcgcgtcctctcagtcctcttcagttaacagcctggctgacgcctctgataatgaagaggaagaggaagaagaggaggaggaggaggaggaggaggagggacccgaagcccgggagatggccatgatgcaggaaggagaacacactgtcacaagccattcaagcatcatccaccggctgcctggctcagataatttgtacgacgatccgtaccagcccgagattacacccagtccactgcagccacctgcagccccagccccaacctcaacaacatcctcagctagaagaagagcctactgtaggaaccgggaccattttgcgaccatcagaaccgccagcctggtgtctagacaaatccaggagcacgagcaggattccgcgcttcgcgagcagctgagcgggtataaaagaatgcgccgacagcaccagaaacagctgctggcactggagagccgcttgcgaggggaaagagaggaacattcggcgcgtctccaaagagagctggaggcgcagagggctggcttcggcgctgaagccgaaaagctggctaggaggcaccaggcaattggagagaaagaggcacgtgctgcgcaggccgaagaaaggaaattccagcagcatatcctcggtcagcagaagaaggaattggctgccctgctggaagctcagaagcgtacctataaattacgcaaagagcagctaaaggaagagcttcaagagaaccctagcactccaaagagagaaaaagcagagtggctcctgcgccaaaaggaacaactgcaacaatgccaggccgaggaggaggccggcctactgcgaaggcagcggcagtactttgaactgcaatgccggcaatacaaacgaaagatgctgttggctagacattccctggaccaggacctgttgcgtgaggacttaaacaagaaacagacccaaaaggatctggaatgtgctctgctgttgagacagcatgaggcgaccagagagctcgaacttagacagcttcaggctgttcagcggactcgtgcagaattaacgcgattgcagcaccagacagaactgggtaaccagctggagtataacaagcgcagggagcaggagttgcgacagaagcatgccgctcaggtccggcaacagcccaagagcttgaaggtaagggctgggcagcgcccacccggtttaccactccctatacccggagccctgggaccacccaacaccgggacacccattgagcagcaaccatgttcaccagggcaggaagccgtgctggatcaacgcatgttgggcgaagaggaggaggccgtgggagaaagaaggattttgggtaaggagggagcaactctggaacctaaacaacagagaatcttaggtgaagaatctggggctcccagcccaagtccacagaagcacggttcattggtggacgaagaagtgtggggcctgccagaggaaatagaggagctccgtgtcccttcgttggttccgcaggagaggagtattgtcggccaggaagaggccggcacgtggtcactgtggggcaaagaagacgagtcattgcttgacgaggagtttgaactgggatgggtgcagggcccagcactgaccccagttcctgaagaggaggaagaggaagaggagggcgcccctatcggaaccccccgcgatcctggagacggctgcccgtccccggacataccccccgaacctcccccaacgcacttgaggccatgtccggccagccaattgcctgggctgcttagccacggtttgctcgcaggcctgagcttcgcagtgggcagtagctcaggcctcttgccattgcttctactcttacttctgcccctgctggcagcccagggcgggggcgggttgcaagccgctttgctggctctcgaagtcggcttggtcgggctgggagcctcctacctgttgctttgtacggctctccacctgcctagttctctttttctgctactggcacagggaaccgcgttgggcgcagtcctgggtctgagctggcgacggggtcttatgggggtgcccctgggactgggcgcagcatggttgttagcttggccaggtctggccttaccgttagtggccatggccgccggtggcagatgggtcaggcagcagggacctcgcgtcaggagggggatttccaggctgtggctgagagtgttgcttcgcctgtcccctatggccttcagagccctgcagggctgcggagccgtgggggatagaggtcttttcgcactgtatcccaaaactaataaggatggattccgctccaggcttccggtacccggtccgcgtaggagaaatcccagaaccacgcagcatccccttgcactcctggcgcgtgtttgggtgctctgtaaaggctggaactggagactggctcgggcctcccagggccttgccagccacctacccccttgggccatacacacattggcatcctggggtctcctgcgcggtgaacgcccaactcgtatacctaggctcctgccccgcagtcaaaggcaactgggaccacctgcctctagacaaccattgcctggaacccttgcaggcagacgttcaaggacaagacagagccgggccctcccaccttggaggtag

SEQ ID NO: 208004 - DNA, 2268 bp, synthetic construct
  misc_feature 1..2268: note = Description of Artificial Sequence: Synthetic coding sequence
  source 1..2268: mol_type = other DNA
atgcccgccggcggccgggccggcagcctgaaggaccccgacgtggccgagctattttttaaggacgatcccgaaaaactttttagcgacctaagggagattgggcacgggtctttcggtgctgtttatttcgctcgagatgttagaaacagcgaggtggttgccatcaagaaaatgagttattctggcaaacagtccaacgaaaagtggcaggatattataaaagaggttagatttctgcaaaagttgcgtcatccgaatacaatacagtacagaggctgctacctgcgggagcatactgcatggctggtgatggagtattgtttgggctcggctagtgacctgctagaggtgcacaaaaaaccattacaggaagtggaaatcgcagcagttacccatggcgcattgcagggtctggcatatctacactcccacaacatgatccaccgagacgtgaaggccggaaacattttacttagcgaaccgggcctcgtcaaactaggtgacttcggctccgcctcaataatggcccccgccaacagcttcgtgggaacgccctactggatggccccagaagtgatattagccatggacgaaggtcagtatgacggcaaggtcgatgtgtggtcccttggaataacctgcatagaactcgcggagcggaagcctcccctattcaatatgaacgccatgtctgccctttatcacattgcgcagaatgagagcccggtactccagagcgggcattggagcgagtacttccggaacttcgtagatagctgcctccagaagatcccccaggaccggcctacctcggaggtgctcctgaagcacagattcgtcttgagagagcggccacccacagtcatcatggatctaattcagcgtacgaaagacgccgttcgtgaactggataacctccagtatcgaaagatgaaaaaaatactgtttcaggaagctcccaacggccccggcgccgaggccccagaagaagaagaggaggcagaaccatacatgcatcgggccggaacacttaccagcctcgagtcttctcacagtgtgcccagcatgtcaatatctgcctcctcgcagagttcttctgtgaacagcctggccgacgcctcagacaacgaggaagaggaagaagaggaagaggaggaagaggaggaggaggaaggacctgaagcacgtgagatggctatgatgcaggagggggaacatacggtgacttctcactcgagcattatccacaggctgccgggttcagataacctatatgacgatccctatcagcccgaaatcaccccttctcctctccagccgccagccgctcccgcacccacttctaccacatctagtgcacgtcggagagcctattgccgcaatcgcgaccacttcgctaccattcgcaccgcctccctggtgtcacgccaaatacaggagcatgagcaggatagcgcgttacgtgagcaactcagcggttacaagaggatgcgtcggcagcaccagaaacagctgcttgccctggaaagtagactccgaggggagagggaggagcactccgcccggttgcagcgggagctagaagcacagcgcgccggctttggtgcagaagccgaaaaactggcacgccggcaccaagccatcggggagaaggaagcgagggctgcccaggcagaagagcgtaaattccagcagcatattctgggtcaacagaagaaggagcttgctgcattattagaggcccagaagagaacttataagctgaggaaggagcaattaaaggaagaacttcaggagaacccctcaacacctaaacgcgagaaggctgagtggctgctgcgccagaaagagcagctacagcagtgccaagccgaggaagaagcaggcttactccggagacagcggcaatatttcgagctgcagtgcaggcagtataagcgaaagatgctgcttgcacggcattccctcgaccaggatttgctgcgtgaagacctgaacaagaagcagacacagaaggatctcgaatgcgcgctgcttcttcggcagcatgaagcaacgcgggagctggagctccggcagcttcaggctgtgcagaggacccgcgcggaactgacacgcctgcagcaccaaaccgaactgggaaaccaactggaatataataaacgtcgggaacaggagctacgacagaagcacgctgcccaggttaggcaacagcctaagagtttaaagaagaaaaccaatacgaacaaaatctccgagcgatag

SEQ ID NO: 208005 - DNA, 3369 bp, synthetic construct
  misc_feature 1..3369: note = Description of Artificial Sequence: Synthetic coding sequence
  source 1..3369: mol_type = other DNA
atgcccgccggcggccgggccggcagcctgaaggaccccgacgtggctgaactgttcttcaaggacgatcccgagaagctgttctctgatctgcgagaaattggacacggctcctttggtgcagtgtattttgctagagacgtgcgaaattctgaggtggtggctattaagaagatgtcatatagtggcaagcagtcaaacgagaagtggcaggatataattaaggaagtgagatttctccagaaattgcggcacccgaatacaatccagtaccgcggctgctacctcagggaacacaccgcctggttggtgatggaatattgtctgggttctgcttcggacctgttagaagtgcacaaaaagccactgcaagaggtggagatcgccgcagtgactcatggggctcttcaagggctcgcgtatctgcacagccataacatgatccatcgagacgtgaaggctgggaatatcctgctgtccgaacctggactcgttaaattgggggacttcggaagtgcatcaatcatggcccccgcgaattcctttgtagggaccccttattggatggctccagaggttattctggccatggacgaaggtcagtacgacggaaaggtcgatgtgtggtcattaggaataacatgcattgaactggcagaacggaagccgcctttgttcaatatgaatgccatgagtgctctctaccatatagcccagaacgaaagtcccgtgctacagagcggccattggtctgaatattttaggaatttcgtcgattcttgcctgcaaaagatcccccaggacagaccgacgtccgaggtgctgctcaagcatcgcttcgttctcagggagaggccacctaccgtgataatggacctgatacagcggacaaaggatgcggtgcgtgagctggataatctgcaatacagaaagatgaaaaagattctcttccaggaggctcctaacggcccaggggccgaagcacccgaggaagaggaagaggccgaaccatatatgcaccgggcaggaacactcacttccctggagtcatcccattcagtcccatctatgagtatcagtgccagtagccagagttcttccgtcaactccctggccgacgcaagcgacaatgaagaggaggaagaggaagaagaagaggaagaggaagaggaggaaggccctgaagcccgcgagatggcaatgatgcaagagggcgaacacactgtaacttctcattcctccattatccacaggctgcctgggagtgacaacttgtacgacgatccttatcagccagagattacgccctccccactgcagccacccgctgctcctgcccccacaagcactacaagttcagccagacgacgagcctattgcagaaatagggatcactttgctacaattcgaaccgcctccttagtctccaggcagattcaggaacatgaacaggactccgctcttcgcgagcagctgtctggttacaaaagaatgcggcggcaacatcagaagcagctcttggctctggagtcaaggctccgaggtgagagggaggagcacagcgctaggctgcagcgggaacttgaggcccagcgcgctggtttcggtgcagaggctgaaaagcttgcccggaggcatcaggcgattggcgaaaaggaggcccgcgccgcccaggcagaagagcgaaagtttcagcagcacattctgggacagcagaagaaggaactggctgctctgctggaggcgcagaaacgcacatacaaacttcgcaaagagcaattaaaagaagagcttcaggagaatccatctacaccaaaaagggagaaagcagaatggctgctgagacagaaggagcagttgcagcagtgccaggccgaggaagaagcgggacttctgcggcgccagcgccagtattttgaattgcagtgtcggcagtacaagcgtaagatgttgctggctcgccatagtttggaccaggacctgttgagagaagacctcaacaagaaacagacccagaaagacctggagtgtgccctgttgcttcggcaacatgaagccacacgagaattggagctcaggcaattacaagccgtccagcgaacgcgcgcggaactcacaaggttgcagcaccagacggaactaggaaaccagcttgaatataataaacgccgagagcaggagttgcggcaaaagcatgccgcacaggtgagacagcagcctaaatccctgaaagaacgctcaattgtcgggcaggaagaagcaggaacgtggagcctgtggggaaaggaggacgaatccttgctcgacgaggaatttgagttaggctgggttcaggggcccgctctgaccccagtgcctgaggaggaagaggaggaagaagaaggagcccccatagggaccccaagggatcccggagacggctgcccctcgcccgacatcccacctgagcctccccctacacacctgagaccgtgtcccgcatctcagcttccaggtctcctctcccacggcctgttggccggcttatcattcgccgtgggctccagtagcggcctgctgcccttattgctgttgctccttcttcctcttctcgctgcccaaggcggcggcggtcttcaggccgccttactcgcacttgaagttggactggtagggctaggggcaagctatctcctactctgcacggccctgcaccttccaagttctctcttcctacttctggcacagggcactgctctgggtgccgtgctcgggctgtcttggagacgcggccttatgggtgtccccctggggctaggcgctgcttggctcctggcttggccagggctggcccttccactagtggccatggccgcaggtggccggtgggtgcggcagcaggggcctcgcgtgcgacggggaatcagccgactttggttaagggttttactgaggctgtctcctatggcgttccgggcactgcaagggtgcggagccgtcggggatcgaggactgtttgccctgtatccaaaaacaaacaaggatggtttcaggtcccggttgccggttccgggtccacggcggcgtaatcctagaactacccagcacccgctcgccctcctggccagagtctgggtgctctgcaaaggttggaattggcgcctcgcgagagcttctcaaggtctggcatcacacctgccaccttgggccatccacacgctggcttcctggggcttactgaggggagaacgccctacacgtataccccgcctgctgcctagaagccaaagacaactgggcccccccgccagtcgccaacctttaccgggaacgttagcagggcggcggagtagaaccagacagagtcgcgctctgcccccctggagatag

SEQ ID NO: 208006 - DNA, 1401 bp, synthetic construct
  misc_feature 1..1401: note = Description of Artificial Sequence: Synthetic coding sequence
  source 1..1401: mol_type = other DNA
atgaagagcctgagcctgctgctggccgtggccctgggcctggccacggcggtgagcgccggacctgccgtgatcgaatgttggtttgtggaggacgcaagcgggaaaggactcgcaaagaggccgggggccctgctcctgcgccaggggccgggcgaaccaccaccaagacccgatctggaccctgagctttatctttctgtacacgaccctgcaggcgcactgcaggccgcttttagacggtaccctagaggagccccagccccgcactgcgaaatgtcgagattcgtcccactgccagcttcagccaagtgggcgagtgggctcacacccgcccaaaattgcccgcgtgccctggatggggcctggctgatggtgagcattagtagtcccgttttatctctgtcctctttgctccgcccgcaacctgagccccaacaggagcccgtgttaatcaccatggcaaccgtggagatgggattccaccacgttgggcaggccgcgttggagcttcttactagcgttgtgctgactgtcctaacccacacgcccgctccaagggtccgcctgggacaggatgccctgcttgatctgagctttgcgtacatgccgcccacttcagaagcagcaagctcactggcccccgggcctcctcctttcggactggaatggagaagacagcacctggggaaggggcacctgcttctggccgctacacctgggcttaatggacagatgcccgccgcacaagagggggccgtcgccttcgcggcatgggatgacgacgagccctggggcccctggactggaaacggcactttttggctgcctcgagttcagccctttcaggaaggaacctacctggcaacgatccaccttccttacctccagggccaggtgactttggagctggccgtctacaagccacccaaagtctctttaatgcccgccacactagccagggccgcccctggggaagcaccacccgaactattgtgtctggtcagtcacttctacccaagcggcggtcttgaggtggaatgggaactcaggggggggccgggaggtagaagccagaaagccgaaggacaacggtggctgagcgctcttcgccaccatagcgatgggtccgtctccctgtccggccatctgcagcctccgcccgtgacaactgaacagcatggagcccgctatgcctgcagaatccatcatccctctctgcctgccagtggaaggtcagcagaagtgacgcttgaagtcgccggcctttctgggccttcgttggaagattccgtgggcttgttccttagcgcctttctgcttctggggctgttcaaggctctgggatgggctgcagtgtacctttccacatgcaaggattctaagaaaaaagccgaatag

SEQ ID NO: 208007 - DNA, 1347 bp, synthetic construct
  misc_feature 1..1347: note = Description of Artificial Sequence: Synthetic coding sequence
  source 1..1347: mol_type = other DNA
atgaagagcctgagcctgctgctggccgtggccctgggcctggccacagctgtctctgccggaccagccgtgatcgagtgctggtttgtggaggatgccagtggaaaagggctggcgaagaggcctggggccctcctgctgcgtcagggcccgggtgagccccctccccgacctgatctggatccagaattgtacctctcagtgcacgaccccgcaggtgctctgcaggctgccttccgccgataccctcgcggagcaccagctccacattgcgagatgtcaaggtttgttcccctgcctgcctcagccaaatgggcatccggccttacaccagcgcaaaactgtcctagggctctcgacggcgcgtggttaatggtgagcatcagctcaccagttctctctctcagctcactgctgcgcccacagcccgagcctcaacaagaacctgtgctgattaccatggccaccgtagtactcaccgtgctgacccacacccccgccccccgcgtgcgattgggacaggacgccttactggatttaagctttgcctatatgcctccgacctctgaggctgcttcttcattggctcccggaccacctcccttcgggctcgagtggcgccgacagcatctcggcaagggtcacctccttctggccgccacacccggactcaacggtcagatgccagccgcccaggagggtgcagtggcctttgccgcatgggacgacgatgagccttggggtccgtggacaggcaatggaacattttggctgcctcgggtgcagcccttccaggagggtacgtatcttgctaccatccacctgccatatctacaggggcaggtgacgctggagctagcggtttataagcccccgaaggtgtctctcatgcctgctacactggcccgtgccgcgcctggggaagcccctcccgaattgctgtgtcttgtatcccatttctaccctagtggaggtctcgaagtggagtgggaactgcgaggaggtcccggaggccgcagtcagaaagcggaaggccaacgctggctcagcgctctcagacaccactccgacggttccgtctctttgagcgggcacttgcaacccccgccagtgacaacggaacagcatggcgccagatatgcgtgcaggattcaccatccgagtctgccggcctccggtcgcagcgctgaggtgacactggaagtagcaggcctctcgggcccaagtctcgaagactcagtcgggttgttcctatccgcttttctgctactggggctgtttaaggccttaggatgggctgcggtatatctcagtacctgtaaggactcaaaaaaaaaggcagagtag

SEQ ID NO: 208008 - DNA, 1515 bp, synthetic construct
  misc_feature 1..1515: note = Description of Artificial Sequence: Synthetic coding sequence
  source 1..1515: mol_type = other DNA
atgaagagcctgagcctgctgctggccgtggccctgggcctggccacagctgtgtcagcggggccggcggtgattgagtgctggtttgtcgaggacgcaagtggtaagggattggctaagcggcccggagccctcttgctgcgacaagggcccggggagcccccacctcgcccagatctggatcccgagctgtacctgtcagtccacgaccccgccggagctttacaggcagccttcagaagatatcctaggggcgcccccgcaccgcactgcgaaatgtccaggtttgtcccattacctgcctccgccaagtgggcaagtggactgacccccgcccaaaactgtccccgcgcactggacggggcttggctgatggtgagcattagttcccctgtgctgtcactaagtagcctgctgagaccacagccagaaccgcagcaggagcctgtcctgattaccatggcgactgttgttctgaccgtcctgacgcatacacccgccccccgagtgcgccttggacaagatgccctgttagatctaagttttgcgtatatgccaccaaccagcgaagccgctagctctttagccccaggcccccccccgtttggccttgagtggcgcaggcagcacctcgggaaggggcatctattactcgccgccacgccgggcctgaatggtcaaatgccagctgctcaagagggtgcagtggcctttgcagcctgggacgacgacgaaccatggggaccttggaccggtaacggaaccttctggctcccgactgtacaaccattccaagaggggacatacctcgccactatccacttgccatatctccagggacaagtcaccctggaactcgcagtgtataaaccacccaaagtgtctctaatgcccgctacactcgcacgggctgcaccaggagaggccccccctgaattgctgtgcctcgttagtcacttctacccttcagggggcctggaagtggaatgggaactgaggggcggtccaggggggcgctcccaaaaagccgagggacagcggtggctgtcggctctgaggcaccactcagacggttccgtgagcctgtccggacacctacaaccgccccctgtgaccaccgaacagcatggagctcggtatgcctgtaggatacatcacccatccctccctgccagtggtcgatccgcggaggtgacactcgaggtggcgggtctctctggccccagcctcgaggatagtgtgggattgtttctaagcgcattcctgctactcggcctattcaaagcgctgggatgggccgcggtctatctctcaacttgcaaggactccaaaaaggtgcagtgctccacaagcctctacctgagcctggtgaccttgtccccacatcccatctccaaaccgatggaaggtggctgctggtgcgggagacagaatctgggcctggaattcaccctaatctgggtaaagacttggcactatatactgacagtgggactgttcgaacacgctacttag

SEQ ID NO: 208009 - DNA, 1347 bp, synthetic construct
  misc_feature 1..1347: note = Description of Artificial Sequence: Synthetic coding sequence
  source 1..1347: mol_type = other DNA
atgaagagcctgagcctgctgctggccgtggccctgggcctggccacagcagtctccgctggccctgccgtaatagagtgttggttcgtggaagacgcatccggtaagggattagcaaaacgaccaggggcactcttgctgagacagggtccaggtgagcctcctccaagacctgacctggatcctgagctgtatctgagcgtgcatgacccagctggcgctctgcaggccgcatttagaaggtatcccagaggagcaccagcaccccattgtgaaatgtctcgctttgtgccactgcctgctagtgcaaagtgggcctctgggctgactcctgcccagaactgtccccgagccctagatggagcctggctgatggtttccatcagctctccagtcttgtctttgtcctcgcttctgaggcctcaaccggaaccacagcaggagcccgtcctgattacaatggcaaccgtggtgttgacagtgttgacacacacccctgctcctcgcgttcgactgggacaggacgctcttctcgatctgagttttgcctatatgccaccgacatcagaagctgctagctcactcgccccaggtccccccccattcgggctggaatggagaaggcagcaccttggaaagggccatctcctgcttgcagctactccaggattgaacggccagatgccagcggcgcaagagggggccgtggctttcgccgcgtgggacgacgacgaaccctggggaccatggactggaaacgggacattttggttgcccaccgtgcagccattccaagaagggacgtatttggctacaatacatctgccatatctgcagggacaagtaacacttgagctggccgtatacaagccaccgaaggtgtccttgatgcccgccacattggccagagccgctccaggagaagcaccgccagagctgctgtgtttggtgtcacacttctatccctctgggggactcgaggtggagtgggagctccgaggagggccaggaggccgaagccaaaaggctgaggggcagaggtggctcagtgccctaagacaccactctgacggtagcgtgagtctgtcgggccaccttcagcccccccctgtcacaacagagcagcacggagcacgttatgcctgccgcattcaccatccttccctacctgccagcgggcgcagtgccgaggtgacgctcgaggtggccggactttctggcccatccctggaagacagtgtgggcctgtttctgagtgctttccttcttttagggcttttcaaagccctgggatgggcagcagtgtacttatcgacctgcaaggattcaaagaagaaagccgaatag

SEQ ID NO: 208010 - DNA, 1401 bp, synthetic construct
  misc_feature 1..1401: note = Description of Artificial Sequence: Synthetic coding sequence
  source 1..1401: mol_type = other DNA
atgaagagcctgagcctgctgctggccgtggccctgggcctggccaccgctgtgtccgctggtcccgccgtaatcgaatgctggttcgtggaagacgcctccgggaagggccttgcaaagaggccaggagcattattgctgaggcaaggaccaggagagcctcctccaaggcctgacttggacccagaactttacctctctgtccacgaccccgcaggagcattgcaggctgcttttagaaggtacccacgcggggctccggctccacactgtgaaatgtctaggtttgtccccctccccgcatctgccaaatgggccagtgggctgaccccagcacagaactgtccccgcgccctggacggggcctggcttatggtatctatttcctctcccgttctgagcctctcaagtctgcttaggccccagccggagccacagcaggaaccagtcttgattacaatggccaccgttgaaatggggttccatcacgtgggccaggctgcccttgaactgctgacgagcgtagttctgactgttcttactcacacaccagcgcccagggtgaggctgggccaggacgccctcctggacctgagttttgcctatatgccccccacctccgaagccgcctcttccctagctcccggaccccccccattcggtctggaatggcgcagacagcacctgggaaaaggacacttgctgcttgctgccactccaggtttaaatggtcagatgccagctgcccaggagggagccgtagcttttgccgcttgggacgatgatgaaccttggggaccttggactgggaatggaactttctggttgccaaccgttcaaccatttcaggagggcacctacctggcaactattcacctcccatacctccagggtcaggtcaccctcgagcttgcagtctacaaacctcccaaggtgagccttatgcccgccactctggcaagggccgcccccggggaggccccaccggagctattgtgtctggtcagccatttttacccctcaggagggctggaggtggagtgggaactgaggggtggccctggtggacggtctcagaaggcagaagggcagcgctggctatccgctctgcgccatcacagcgacggatcagtgtcactgagcgggcacctgcagccccctccagtgacaaccgagcagcacggggcccgttacgcctgtcgcatacatcacccaagcctacctgctagcggacggtccgctgaggtaacacttgaagttgccggcttgtctggccccagcctggaggattccgtggggctgtttctcagcgccttcctcttactgggtctgtttaaggcgctcggctgggcagcagtttatctgtcgacttgtaaggatagcaagaagaaggccgaatag

SEQ ID NO: 208011 - DNA, 1515 bp, synthetic construct
  misc_feature 1..1515: note = Description of Artificial Sequence: Synthetic coding sequence
  source 1..1515: mol_type = other DNA
atgaagagcctgagcctgctgctggccgtggccctgggcctggccaccgcagtctctgcaggtcctgcggtcatcgaatgttggtttgtggaggacgccagcggcaagggactggcgaagcgacccggagctttgcttctgaggcaaggtccgggggagccccccccccgccctgacctcgatcctgagctttatttgtccgtccacgatcccgccggcgctctccaggcagcttttcgaagatatcctcggggcgcacccgcacctcattgcgagatgagccgatttgtacccttgccagcttccgccaaatgggctagtggcctgacccccgcgcagaattgtcctcgcgcactggatggcgcatggctgatggtatccatcagctcacccgtactgtctctcagctccctccttcgaccacagcccgaaccccaacaagaacccgtgctgatcacaatggccacggtagtattaactgttctcacgcatacacctgcccccagagtcaggctgggccaggacgcgttgctggacctgagctttgcttatatgccaccaaccagcgaggcagcatctagtctggcaccaggacccccaccctttggactggaatggcggaggcagcacctaggaaaaggtcacttattgttggcggccacacctggcctgaatggacagatgccagcagctcaggagggcgctgtggcttttgcggcctgggacgatgatgagccctgggggccctggaccgggaacggcaccttctggctgccacgtgttcagccctttcaggaaggtacttatctggccaccatacacctcccatatttgcaaggtcaggtcaccctcgaacttgccgtgtacaagccccccaaggtctctttaatgccagccaccctcgctcgggccgctccaggggaagctccccccgaactgctgtgtttggtgtctcatttctatccctccggcggcctggaagttgaatgggaactgaggggaggccctggcggacggtctcaaaaggccgaaggacagaggtggctctctgcgctgcgtcaccattctgacggctcagtgagccttagcgggcacctgcagccccctccagtgactacagaacagcatggtgcgcggtacgcgtgtcgcatccaccacccaagccttcctgcgagcggtcgctcagctgaagttaccctcgaggtggcaggtctgagtggaccatccctcgaagactctgtgggcctgtttctctctgcgtttctgctgctggggctattcaaagctttaggatgggctgccgtgtatctctcgacatgcaaagacagcaagaaggtgcagtgctcaactagtctgtacttgtccctggtgacgctgagtccccaccccatctctaagcccatggaggggggctgctggtgtggccgtcagaatttgggtctggaattcactttgatttgggtcaaaacttggcactatatcttgaccgtgggcttatttgaacacgcaacttag

SEQ ID NO: 208012 - DNA, 1347 bp, synthetic construct
  misc_feature 1..1347: note = Description of Artificial Sequence: Synthetic coding sequence
  source 1..1347: mol_type = other DNA
atgaagagcctgagcctgctgctggccgtggccctgggcctggccacagctgtgtctgccggacccgcggtgatcgaatgttggtttgtagaagatgcgtctgggaagggcttggccaaacgccccggcgcactgttgctgcgtcagggacctggagagcccccccccaggcctgaccttgacccagagctgtatctctctgtacacgatcctgcaggagccctacaggccgctttccggaggtaccctagaggcgcgcctgccccccattgtgagatgagtcgctttgttccactgcccgcctcagcgaagtgggcatccggtttgacgcctgctcaaaactgtcctagagctctggacggtgcctggctaatggtttccatttctagccctgtcctttcattgtcctccctcttgcgcccccagccagagccacagcaggagcccgtgctgatcacaatggcaactgtggttctgaccgtcctcacacacacccccgctccccgggtccgtctcggccaggacgccctgctggacctgtcattcgcttacatgcccccaacctctgaggctgcctcctctctggcccctggcccaccaccgttcgggttagaatggcgacgccagcacctcggcaaaggccacttgctgttggcggccacccctggactgaacggccagatgccagccgcacaagagggagccgtggcttttgccgcatgggatgatgatgaaccatgggggccatggaccgggaacggaacattttggctgcctcgagtgcaaccgttccaagagggcacttatcttgccacaatacacctcccctacttgcaggggcaggtgacgctggagctggcagtatacaaacctccgaaagtttctttgatgcctgcaacactggctagggctgccccaggagaagcgccccctgagctcctgtgcctggtgtctcatttctatccaagcggtggtctggaagtggagtgggagctgagaggcggcccaggtggccgcagccagaaagcagaaggccagcggtggctgagtgcattaagacatcacagtgacggctcagtttctctgagcgggcatctccagcctccccccgtcacaactgagcagcatggggctcgatatgcttgccgtatacaccacccctctcttcctgccagcggtaggtctgctgaagtgaccttagaggttgccggattgagcgggccttcactggaggactctgtggggcttttcctgtccgcattcttgctcctgggccttttcaaggctttggggtgggcagctgtttacctctctacctgtaaggatagtaaaaaaaaagccgaatag

SEQ ID NO: 208013 - DNA, 1515 bp, synthetic construct
  misc_feature 1..1515: note = Description of Artificial Sequence: Synthetic coding sequence
  source 1..1515: mol_type = other DNA
atgaagagcctgagcctgctgctggccgtggccctgggcctggccaccgcagtctccgccggtccggcagtgatcgagtgttggttcgtcgaagacgcgtcgggaaaaggattagcgaagagacccggtgcattgttgctccgccaaggacccggcgagccacctccccggcccgacttggacccggagctgtacctgtccgtgcacgacccagcaggagccctgcaggctgccttccggcgctacccaaggggtgcacccgctccacactgtgagatgtcacggttcgtgcctttgccagcctctgctaagtgggctagcggcctgacccccgcccaaaactgccccagggccctcgatggtgcatggcttatggttagtatctcaagcccagtactgagtctgtcgagtctgcttaggccccaacccgaacctcagcaggaacctgtcctgattactatggctacagtggtgctcactgtgctgacccacactcctgctcctcgcgtgagattggggcaggacgccttattagacttgagtttcgcatacatgcctccaacatctgaggcagcctcttctcttgctccaggacctcctccttttggcctagagtggagacggcagcacctgggcaaggggcacctgctcctggccgccactccaggcctgaatggacagatgcccgcagcccaagagggagcagtggcattcgccgcatgggacgacgacgagccttggggaccatggaccggaaatggtactttctggcttccacgggtacagcccttccaagaaggcacatatctagctactatccacctgccttacctacaagggcaggtcacactggaactggccgtttacaaacccccaaaggttagtctcatgcccgctacacttgcccgcgcagcaccaggagaagccccccccgagttgctgtgcctcgtgtcacatttctacccctcaggggggctggaggttgagtgggagctccgcgggggcccaggaggcagatctcagaaagccgagggccagcgatggctgtccgccctgcgccaccactctgacggctctgtctctttgagcggacatcttcagccaccgccagtcacgacggaacaacacggggcccgctacgcctgtaggatacatcatccctcactgcccgccagtgggagatctgcagaagtcactctggaagtcgctggactgtccggacccagcctggaggattcagtaggtctgtttttgagcgcctttctgctgctgggtttgttcaaagcattaggctgggccgcggtgtacctatccacctgcaaagactccaaaaaggttcaatgctccacaagtctgtacctgtcgttggtaacactgtcgccacaccctatctccaagcctatggaaggtggctgttggtgtggccggcagaatctcggtctggagttcacactcatttgggtgaagacatggcactatattcttaccgtgggattgtttgaacatgctacctag

SEQ ID NO: 208014 - DNA, 1401 bp, synthetic construct
  misc_feature 1..1401: note = Description of Artificial Sequence: Synthetic coding sequence
  source 1..1401: mol_type = other DNA
atgaagagcctgagcctgctgctggccgtggccctgggcctggccaccgcagtgagcgccggccccgctgtgatcgaatgttggttcgtggaggacgcaagtggtaaaggacttgccaaaagaccaggagcgttgctgctgcgccaggggcctggcgagcctcccccccggcccgatctcgaccccgagttatacctgtccgttcacgaccccgccggagccctgcaagccgcgttcaggcgctatccccgcggcgcaccagctccccactgtgaaatgagcaggtttgttccgctcccggccagcgctaagtgggcctccggactgactccagctcaaaattgcccccgggcacttgatggagcatggttgatggtttcaatatcatcccccgtcctgagcctgagctcactcttgagaccacaacccgagccgcagcaggaacctgtgttgataacaatggcaactgtggaaatgggattccaccatgttggacaggcagcactggaactgcttacctctgttgttttgacggttctcacccacacgccagctcccagggtacggctgggccaggatgcgctgttggatctgtcattcgcgtatatgcctccgacctccgaagcagcttccagcctcgcccctggcccacctccattcgggctggaatggcgtagacagcatctgggtaagggtcaccttttactcgcggctacgcctgggttgaatggccaaatgcccgccgcacaggagggcgccgtcgccttcgcagcatgggacgacgatgagccatggggtccttggaccggaaacgggaccttctggctgcctcgcgtgcaacccttccaggagggtacataccttgccactatccacttaccatacctgcaggggcaggtgaccctggaactcgctgtatacaagcctcctaaggtgtctctgatgcctgcaaccctggcgcgcgccgctccaggagaggccccacctgaactgttgtgcctggtttcacatttttaccctagcgggggacttgaggtggaatgggaactacggggagggcccggaggcagatcccagaaggccgaagggcagcgctggctgtccgctttgagacaccatagcgatggctccgtgtccctgtcaggtcacctccaaccccctcctgtaactactgaacagcacggtgcccgctacgcatgtagaatacaccatccatccctgccggcttccggtcgctctgcggaagtgactctagaggtggccggcctgtccggaccgtccctggaagatagcgtgggcctattcctttcagcctttttattgctggggctgtttaaggctctgggatgggccgccgtgtacctctctacctgcaaggactccaagaagaaggctgaatag

SEQ ID NO: 208015 - DNA, 1347 bp, synthetic construct
  misc_feature 1..1347: note = Description of Artificial Sequence: Synthetic coding sequence
  source 1..1347: mol_type = other DNA
atgaagagcctgagcctgctgctggccgtggccctgggcctggccacagccgtaagcgcaggtccggcagttattgaatgctggttcgtagaggatgcatccgggaagggcctggccaaacggccaggcgcacttctccttagacagggccccggtgagcctccaccaaggcccgacctggacccagaactgtacctgagcgttcacgatccagccggcgctctgcaggccgccttcagacggtatcctagaggagccccagctccccactgcgagatgtctcggttcgtaccactcccggctagcgctaagtgggctagcggcctgacccccgcgcaaaattgtcctagggccctggacggggcctggttaatggtgagtatctctagccccgtcctgtctctctcttctctcttgcgacctcagccagagcctcagcaggaacccgtgctcatcacaatggcgactgtcgtactgaccgtactgacacacaccccggccccccgggtgagacttggccaggatgctctcttggatctgtctttcgcttacatgcccccgacaagcgaagctgcgtcctcgctcgcgcccggcccacctccctttggtctcgagtggagacggcagcatctcggtaaggggcatcttctgctggctgcaacaccgggactcaacgggcagatgcccgctgcacaagaaggcgcagtcgctttcgccgcctgggatgatgacgaaccctggggcccctggacaggaaatgggacattttggcttcctagagtgcaaccctttcaagagggcacctacctcgccacaattcatttaccttatttgcaaggccaagttacattggagttagccgtatataaacctccgaaagtgtctctgatgccagcaacccttgcccgcgctgccccgggcgaggctcctccagagttactttgcctggtgtcccatttctatccttcaggcgggctcgaggtggagtgggagcttcgtggaggacccggcggccggtctcagaaggctgagggtcagagatggcttagcgccctgcgtcaccatagtgatggctctgtcagtttgagcggacatttacaacctccacccgtaactactgagcagcacggggccaggtatgcttgtcgcatccatcaccctagcttacccgcctctgggagatcagcagaagtgaccttggaagtagcggggctttccgggccgtcactggaggattctgtcgggctgtttttgagtgccttcttgctgctcggcctctttaaagccctgggatgggctgcagtctatttgtcaacttgtaaagattccaaaaagaaagcagagtag

SEQ ID NO: 208016 - DNA, 1515 bp, synthetic construct
  misc_feature 1..1515: note = Description of Artificial Sequence: Synthetic coding sequence
  source 1..1515: mol_type = other DNA
atgaagagcctgagcctgctgctggccgtggccctgggcctggccaccgcagtgtctgctggtccggccgtgatcgaatgttggtttgtcgaggacgcgagtggcaaaggcctggccaaacgacctggggctctcttgcttcgccaaggtcccggagagcctcccccacggcctgatctggacccagaactctacctttcagttcacgatccagccggtgccctacaggccgcgttccgcaggtatccacgtggcgctcccgccccccactgcgaaatgagtcgttttgtgcccctacctgcgagtgccaaatgggccagtggtctcactcccgctcagaactgtccacgcgccctcgacggcgcctggttgatggtgtccataagttcccctgtcctgtcgctgtcatcactgttgagacctcagcctgagccccagcaggagcctgttctcattacaatggccacagtcgtgttaactgttctgacccacacccccgccccacgagtgaggctgggccaggacgcactcctggatcttagcttcgcttacatgccacccacctcagaggccgcgtcctccctggccccgggtcccccaccctttggcctggagtggcgccgacagcacctgggcaaaggacacctgctgctggctgcaacgcctggccttaatgggcagatgcctgccgcccaagaaggcgcagtggctttcgccgcttgggatgatgacgaaccttggggaccttggacgggcaatgggaccttttggctgcctactgtgcagccgttccaggaagggacctacttagccactatccatctgccctacctgcagggtcaggtaactctggaactcgctgtgtataaacccccaaaggtgtctctgatgccagcaaccctggccagggctgccccaggggaggccccccccgagctgctttgtttagtgtcccacttttaccccagtgggggactagaagtcgaatgggagctgaggggaggaccaggaggcaggtcacagaaggccgagggccaacgctggttgtccgccttacgccaccattctgatggtagtgtgtctttgtctggccatctgcagcctccacccgtgacaactgaacaacatggcgcaaggtacgcttgcaggattcatcatcccagcctccctgcctcggggagaagcgccgaagtaacccttgaggtggctggattgtccggccctagcttagaagatagcgtgggcttatttctgagcgcttttcttctgttaggattattcaaggctctgggctgggccgcagtgtatctgtctacctgtaaagactccaaaaaggtgcagtgcagcactagcctctacttgagcttggttaccctgtctcctcacccaatttccaaacctatggagggcggatgttggtgtgggaggcagaacctcggcttggaattcacactgatttgggtgaaaacatggcattacattctgactgtcggcctatttgagcacgcgacatag

SEQ ID NO: 208017 - DNA, 609 bp, synthetic construct
  misc_feature 1..609: note = Description of Artificial Sequence: Synthetic coding sequence
  source 1..609: mol_type = other DNA
atgaagagcctgagcctgctgctggccgtggccctgggcctggccacggcggtttccgcagggccagcagtgatagagtgctggtttgtggaggatgcctcaggtaaaggcctggcaaagcgccctggtgccctgttgctgcgtcaaggtcccggcgagccaccccctcgccctgatctagatcccgaactctacctctctgtgcacgtcgttttgactgttctgacccataccccggccccccgggtgcgtctgggccaggacgctctgcttgatctctcgttcgcttacatgccaccaacgagcgaggccgcatcctctcttgcgcctgggcctccacctttcggactggagtggaggcgacagcatcttggtaaggggcacctgctgctcgccgccaccccaggcctcaacggccaaatgcccgcagctcaggagggcgccgtcgccttcgccgcttgggacgatgacgagccttggggcccctggactggaaacggtaccttttggttgccaagagtccagccctttcaggagggcacttatctggccacaatacacttaccatatctgcagggccaggtcacactggagctggctgtgtattag

SEQ ID NO: 208018 - DNA, 1347 bp, synthetic construct
  misc_feature 1..1347: note = Description of Artificial Sequence: Synthetic coding sequence
  source 1..1347: mol_type = other DNA
atgaagagcctgagcctgctgctggccgtggccctgggcctggccactgctgtatccgccggaccagccgtcatcgaatgctggttcgtggaggacgctagcggcaaaggcctcgctaaacgaccaggagccctgctgctcagacagggacccggcgagccaccacctcgccccgatctggaccctgagttatacttatccgtgcacgatcccgcaggggcactgcaagcagctttccggcggtaccctcgaggagcacctgccccccactgtgagatgagccgattcgtgccactgcccgcctccgctaaatgggcatctggattgactccagcgcagaattgcccacgagctctggacggcgcttggctgatggtgtcaattagctctcccgtcttgtccctcagcagtctgctgcggccacaaccagagccccagcaggaacccgtgctcatcacaatggccaccgtcgttcttaccgtcttgacgcacacgccagcccctagggtcagactaggacaagacgcattgctggacctgagtttcgcctacatgccacccacttcagaagctgcttcttcactagctcctgggccaccgcctttcggtctggaatggagaaggcagcacttagggaaaggccatcttctgttggctgctacgccgggccttaacggccaaatgcccgcggcgcaagagggagccgtcgcattcgcagcttgggatgacgatgagccatgggggccttggaccggaaatggcactttttggctccctacagtgcaaccttttcaggaaggtacataccttgctacaattcacctgccctatctccagggacaggtgaccctcgagctggctgtttataaacctcccaaggtttccctaatgcctgcaactttagctagggcggccccaggggaggctccacccgagttgctctgtcttgtatcacatttttatccatcgggaggactcgaggttgaatgggaattgcggggcggtccaggaggcagatcccaaaaagctgaaggccaaaggtggttgagtgctctgagacaccattccgatggctcggtctcactaagcggccatttgcagccaccgcctgtgacaactgagcaacacggagctcgttacgcctgccgcatccaccaccctagtttgcccgcgagcggtcggtccgccgaggtgactctcgaagtggctggcctgagtggacccagcctggaagattccgtaggactgttcctcagtgcattcctgctgctaggacttttcaaagccctaggctgggcagctgtgtatctgtctacttgcaaggactccaagaaaaaagccgaatag

SEQ ID NO: 208019 - DNA, 1401 bp, synthetic construct
  misc_feature 1..1401: note = Description of Artificial Sequence: Synthetic coding sequence
  source 1..1401: mol_type = other DNA
atgaagagcctgagcctgctgctggccgtggccctgggcctggccactgccgtgtcagccggaccagctgtaatcgagtgctggtttgtggaggacgcttcaggaaagggcctcgctaaacggcctggtgcactgctgctgcggcaggggcctggagaaccccctcccaggccggacctcgacccagaactgtatctatctgtccacgatcccgccggggcgttgcaggccgcgttcaggcgctaccccaggggcgcgccagctccacactgcgagatgtctcggttcgtgcctctccccgccagcgcgaagtgggcctcaggtcttacacctgcccagaattgccctcgggcccttgatggcgcctggctcatggtgagtatctcaagtcctgtcttgagtctttcttccctgctgagaccacaacccgagccgcagcaggaacctgtactgattacaatggctacggtcgagatgggcttccaccacgtgggtcaggctgcgttggaactcttaacctccgtcgtgctcaccgtgttaacgcatacaccagcccctcgagttcggctcgggcaggatgccctgcttgacctgtcattcgcgtatatgccacctacctctgaggcggcatccagcttggcgcctggacctccaccgtttggcctggagtggcggagacagcatttaggaaagggacacctgctcttggctgcgacccctggccttaacggacagatgcctgcagcccaagagggtgccgtcgcatttgccgcatgggacgacgacgagccttgggggccatggaccggcaacgggactttttggctgccgagagttcaacccttccaggagggcacatacctggctacaattcacctgccttatcttcagggacaggtcactctagaactggcggtgtacaagccccccaaggtgtccttaatgccagctacattggctcgggctgcccccggcgaagcgcctcccgagcttctgtgcctggtcagtcacttctacccttcaggcggtcttgaggtagaatgggagctgagaggtggaccaggagggagatcccaaaaggcagaggggcagcgctggctgagcgccttaagacaccactctgatgggtccgtctccctgtccggacacctgcagccaccacccgttaccacggagcaacacggcgccagatacgcttgccggatccaccacccaagcctgccagcatccggccgtagtgccgaggttactctcgaggtcgcggggctatctggaccaagcctggaggattctgtcgggctctttctctccgccttcctcctgctgggactcttcaaggccctcggctgggccgccgtgtacctgagcacttgtaaggatagtaaaaagaaggccgaatag

SEQ ID NO: 208020 - DNA, 609 bp, synthetic construct
  misc_feature 1..609: note = Description of Artificial Sequence: Synthetic coding sequence
  source 1..609: mol_type = other DNA
atgaagagcctgagcctgctgctggccgtggccctgggcctggccaccgccgtgtcggccggcccagccgtcatcgaatgttggtttgtggaagatgccagcggaaagggcctcgctaaaaggcctggagcactccttcttcgccagggtccaggagagccaccacctcgccccgaccttgatcctgaactctatcttagtgttcacgtggtcctcacagtgctgactcacactcccgctccccgcgtgaggcttgggcaggacgccttgctggacttgtcttttgcgtacatgccccctacctcagaggccgcgtcaagcctggcacccggtccaccaccatttggcctggagtggaggcggcagcatttaggaaaaggccacctcttactggcagcgacacccggattaaatggtcagatgcctgcagcccaggagggtgcggtcgctttcgccgcttgggacgacgatgaaccctggggtccgtggaccggcaacggcaccttctggctgccgaccgtccaaccttttcaggagggaacttatctggccactatccatctgccatacctccaggggcaagtgacattagagttagccgtttattag

SEQ ID NO: 208021 - DNA, 609 bp, synthetic construct
  misc_feature 1..609: note = Description of Artificial Sequence: Synthetic coding sequence
  source 1..609: mol_type = other DNA
atgaagagcctgagcctgctgctggccgtggccctgggcctggccaccgcagtgagcgctgggcctgcggttattgagtgctggtttgtagaggacgccagcggtaaaggtctggccaagaggccaggtgctctcctgctgcgccagggcccaggagagcctcctcctcgcccagacctggacccagagctgtaccttagcgtgcacgtggtgcttactgtgctaacccatacaccggcaccgagggtccggttagggcaggacgctctactggatctgagctttgcctatatgcctcccacgagtgaagcggcaagttctcttgcccccgggccacctccctttggcctggaatggaggcggcagcacctgggaaaaggacacctgctgctcgctgccacccccggcctgaacggtcagatgcctgcagcgcaggaaggggccgtggcattcgcggcatgggacgatgatgaaccgtgggggccgtggacaggcaacgggacattttggctgccgcgtgtgcaaccatttcaggaggggacgtatttggccacaatacacctcccttaccttcaggggcaggtgacactcgagctcgcagtgtattag

SEQ ID NO: 208022 - DNA, 609 bp, synthetic construct
  misc_feature 1..609: note = Description of Artificial Sequence: Synthetic coding sequence
  source 1..609: mol_type = other DNA
atgaagagcctgagcctgctgctggccgtggccctgggcctggccactgccgtgtccgcgggacctgccgtgatagaatgctggtttgttgaggacgcgtcaggtaaagggctggctaaaaggccaggagcactgcttctgagacagggtcccggggagccacccccacggccagatttagatccagagctctatctgtcggtgcacgtagtgctgactgtcctcactcacacaccagccccacgggtgcggctgggtcaagatgcattgttagacttgtccttcgcctacatgccacccacctccgaagctgcctcttctcttgcccccggcccaccaccttttggcctggagtggaggagacaacatctgggaaaaggccacttactccttgccgctaccccgggactaaatgggcagatgcccgcggcccaggagggcgccgtggccttcgccgcgtgggacgacgacgagccatgggggccttggaccggaaatggcacattttggcttccgagggttcagccctttcaggagggtacctacctggcaactatccacctgccctatcttcagggccaggttactcttgaactcgctgtctactag

SEQ ID NO: 208023 - DNA, 1347 bp, synthetic construct
  misc_feature 1..1347: note = Description of Artificial Sequence: Synthetic coding sequence
  source 1..1347: mol_type = other DNA
atgaagagcctgagcctgctgctggccgtggccctgggcctggccactgcagtgagcgccggtcctgccgtaattgaatgttggtttgtggaagacgcaagtgggaagggcctggccaaaaggccaggagccctgctcctgcggcaggggcctggcgagcctcccccaaggcctgatttggaccctgagctgtatctgagcgtccacgaccccgccggcgctttacaggcagccttcagaagataccccagaggcgctcccgcaccccattgtgaaatgtctcggtttgtacctctgccggcttcagctaaatgggcaagcggtcttacaccggcgcagaattgtccccgggccttagatggcgcatggttgatggtttctatatcctccccagttttgtccctctcatccctgctgagaccccagccagagccgcagcaagagccagttctgatcactatggccactgtggttcttaccgtgctaacacatactccagcacctcgggtgcgcctgggccaggatgctcttctggatctgtcctttgcatacatgccacctacgagcgaagctgctagtagcctggcccccggcccacctccctttggcctggaatggagaagacaacacctgggcaaagggcatctcctgctggcggccactccagggctgaatggacagatgcccgcggcccaggagggcgcagtcgcctttgctgcttgggatgacgacgagccttggggtccctggacaggcaatggaacattctggcttcccaccgtccagccgttccaggaaggaacatacctggcaacaattcacctaccctacctccaaggtcaggtcacattggagctggcggtctataagcccccaaaagtgagcctcatgcccgccacgttggcacgggccgcccccggcgaggctccacccgagctgctgtgcttagtaagccacttctatcctagtgggggacttgaggtggagtgggagttaagaggcggaccggggggccgatcccagaaagccgaaggtcaacgctggctgagtgcgctgagacaccatagcgacggctctgtttcactcagtggccatctgcagccccctccagtaacaaccgaacagcacggggccaggtatgcttgcagaatccaccacccatctctgcccgcctccggacgctctgcagaggtcacgcttgaggtggctgggctttccggcccttccctcgaggattccgttggactgttcctgtccgcttttttactactgggcttgttcaaagcacttggttgggccgctgtttacctgagtacttgtaaggattctaaaaaacatgcgacctag

SEQ ID NO: 208024 - DNA, 1515 bp, synthetic construct
  misc_feature 1..1515: note = Description of Artificial Sequence: Synthetic coding sequence
  source 1..1515: mol_type = other DNA
atgaagagcctgagcctgctgctggccgtggccctgggcctggccactgctgtgagtgctggtcccgccgtgattgagtgctggtttgtggaagacgcatccggaaagggtctcgccaagcggccgggcgccctgctgctgaggcagggccctggtgaacctcctccaagacctgatttggaccccgaactctacttgtcagtccacgaccctgctggggctctacaggctgcttttcggaggtatccgcggggcgcaccagcgcctcattgcgagatgtccagatttgtacctctgccggcgagtgcgaagtgggctagcgggttaactcctgcacagaattgtccccgggccctcgatggagcttggctcatggtctcaatctcctctccagttctcagtcttagtagtctgctgcgaccgcagcctgaaccacaacaagaaccagtcttgattaccatggcaaccgtcgtcctgacagttctcacccatactcccgcccctcgcgtgaggttagggcaggatgcgttgttggacctgtccttcgcctacatgccacccacctccgaggcagcatcatccctagcccccggccccccgccttttggcctcgagtggcgcaggcagcatttgggcaaagggcatcttctgctcgcagctacaccaggactcaacggccaaatgcctgctgcacaggagggcgctgtggcttttgcagcatgggatgacgatgagccatggggaccatggaccgggaacggcactttttggctgccccgggtccaaccatttcaagagggcacatatcttgctacgattcatctgccgtacttacagggacaggtgacccttgaactcgctgtttacaagccacctaaggtatccctcatgcctgctacccttgcaagagcagcgcccggggaggcccccccggaactcctgtgcctcgtgtcacacttttacccctcagggggactcgaggtggagtgggagctccgcggcgggccggggggacgctctcaaaaggcagagggacaaagatggctctcggcgctgcggcatcattccgacggatcagtgtctttatccggacatttacagcctccaccagtgacgacggagcagcacggcgcccgctatgcctgcagaattcaccatcctagcttacctgcttcaggacggtctgccgaagtcacgctagaagtcgcgggactcagtgggcccagcctcgaggattcagtaggcctgtttctgtcagcgttcttgttgctggggctgttcaaggcactagggtgggctgccgtttatctgagtacttgtaaagattcaaagaaggtccaatgcagcacttcactgtacctcagcttagttactctgtcaccacacccaatctccaagcccatggaaggcggttgttggtgtggccgacagaacttaggtctggagttcaccctaatttgggtcaagacgtggcactacatcttaaccgtcggactgtttgaacatgccacctag

SEQ ID NO: 208025 - DNA, 471 bp, synthetic construct
  misc_feature 1..471: note = Description of Artificial Sequence: Synthetic coding sequence
  source 1..471: mol_type = other DNA
atgaagagcctgagcctgctgctggccgtggccctgggcctggccaccgctgtgtctgccggacccgctgtgatagaatgctggttcgtggaagacgcaagtggcaaggggctggcaaagcgacccggagccctgctcctgcgccaggggcccggtgagccaccgcccagacccgatttggatcctgaactgtatctgagcgttcatgatccagctggagctctccaggcagccttcaggcgatatcccaggggtgctccagcccctcattgtgagatgagccggttcgttcccctgcctgcctccgccaagtgggccagcggactgacgccagctcagaactgtccaagagcgctggacggggcctggctaatggtctctatctcaagcatgggacatgccatgccagtggagtttaccattcccgcctgcctgcccaggggggcagcgctccgtagtccctggaggtag

SEQ ID NO: 208026 - DNA, 1401 bp, synthetic construct
  misc_feature 1..1401: note = Description of Artificial Sequence: Synthetic coding sequence
  source 1..1401: mol_type = other DNA
atgaagagcctgagcctgctgctggccgtggccctgggcctggccactgcggtgtctgccggaccagccgttatagaatgctggtttgtagaagacgcttcagggaagggccttgcaaagcgtcccggggccctcctgcttcgccagggtccaggagagccgcccccccgacccgacttggaccctgaactctatctttcagtccatgatcccgctggggctcttcaggctgcttttagaaggtatcctcggggggcgccggcgccacattgtgagatgtcaaggttcgtgccgcttcccgcaagcgctaaatgggcgtccgggttaacgcccgcccagaactgtccacgcgctttggatggtgcttggctgatggtgtccatatcttcgccagtactctctctgtcctctcttctacggcctcaacctgaaccgcaacaggagccagttcttatcaccatggccaccgtggaaatgggtttccatcatgtaggccaggccgctcttgagctgctgactagcgtggtcctgactgtgttgacgcacacaccagcaccacgggtgagactggggcaggacgccttgctggacctgtcatttgcatacatgcctcccacctctgaagccgccagcagcttggcccctggaccgcccccttttggactggaatggaggaggcagcacctgggtaaggggcatctgcttctggccgccacccccggtctgaacggtcagatgccagccgcccaggagggcgctgtggcctttgcagcctgggatgacgatgagccttggggcccgtggaccggaaatggaactttttggctacctacagtgcagccctttcaggagggaacctacctggcaaccatccacctcccttacctgcaaggtcaagttaccttagaattggctgtgtacaagccccctaaggtctcactgatgcccgccacccttgcacgcgccgcgccgggtgaagcaccccccgaattactgtgtctcgtcagccacttctatccctcaggcgggctggaagtcgagtgggagctcagaggcggacctggaggacgctcacagaaagctgaagggcagcgatggctctccgccttgaggcatcactctgacggcagcgtgtccttaagtggtcacctccaacctcctcctgtaacgacggagcaacacggagcccggtatgcttgccgaatccaccatccttctctgccagcctcagggcggagcgccgaggtcacgctggaggttgcaggcttatcaggccctagtttggaggacagtgtgggactgtttctgagtgcgttcctcctgctgggcctttttaaagcccttgggtgggcggcagtgtacttgagcacatgcaaagattccaagaagaaggccgagtag

SEQ ID NO: 208027 - DNA, 1086 bp, synthetic construct
  misc_feature 1..1086: note = Description of Artificial Sequence: Synthetic coding sequence
  source 1..1086: mol_type = other DNA
atgaagagcctgagcctgctgctggccgtggccctgggcctggccacagccgtctcagccggccctgctgtaatcgagtgttggtttgttgaggacgcctctggtaaaggactggcaaagcggccgggcgcactcttgctacgacaaggaccaggcgagcctcccccccggccagatcttgatccagagctgtatctcagtgtacatgtggtcttaacagtactgactcacactccggccccgagagtccgcctgggacaggacgccttattagatttgtcatttgcttatatgccacccacttccgaggcggcctcttcattggctccggggccccctccattcggactggagtggcggcgacaacatctgggtaaggggcaccttctccttgctgcaacccccggattaaacgggcagatgcccgcggcccaggagggggccgtcgctttcgcggcttgggatgacgatgagccttggggaccctggactggtaacggaaccttttggctgcccacggtgcagccatttcaggaaggtacttatcttgctactatccatcttccttacttgcaggggcaggtcacactggaactggcggtgtacaagccccctaaggtttctctgatgccggccaccctggcacgggcagcaccgggcgaggccccacctgagctgctttgcctagtgtcccatttctacccctcaggggggctggaggttgagtgggaattaagaggtggccccggagggcgatcccagaaagctgaaggccagcgctggctctcggcccttagacatcattccgatggaagtgtcagtttgagcgggcacctgcagccaccgccagtgaccactgagcagcacggcgccagatacgcttgtcggatccaccacccttctttgcccgcgagcggcaggagcgccgaagtgactctggaggtcgcgggtctctccggccccagcctggaagactccgtcggactgttcctgagtgcattccttctcctcggactctttaaagcccttggttgggcagccgtctatttgtctacttgcaaagattctaagaagaaggccgagtag

SEQ ID NO: 208028 - DNA, 1347 bp, synthetic construct
  misc_feature 1..1347: note = Description of Artificial Sequence: Synthetic coding sequence
  source 1..1347: mol_type = other DNA
atgaagagcctgagcctgctgctggccgtggccctgggcctggccaccgcggtgagcgctggtcccgcagtgatcgaatgttggttcgtcgaagatgcctctggcaagggtctagccaaacgaccaggcgcgcttctcttgaggcagggcccgggtgagcccccgcccaggcctgacctggatcccgagctgtatctgtccgtgcacgaccctgccggggccctgcaggcagccttcaggcggtatcccagaggggctcccgcaccccactgtgaaatgtcacgcttcgtcccacttcccgcctccgctaaatgggccagcgggctgactcccgcgcagaactgcccacgggcacttgacggagcctggctgatggtctcaatcagctcaccagtgctgtcactctcttcgctcttgcggccacagcccgagccccagcaggaacctgtgctcattacgatggccacagtcgtgctcaccgtcttgacacacacccctgcaccaagggtccgcctaggacaggacgcactgctggacctgtctttcgcttacatgccaccaacctcggaagccgcctcatcattggcacctggacccccgcccttcggattagagtggaggaggcagcacttaggtaaggggcatcttttacttgctgccactccagggctgaatggccagatgcctgctgcccaggagggggcagttgcttttgcagcttgggacgacgacgagccttggggcccttggactggaaatggaactttctggctaccaactgtccagccgtttcaagagggtacgtatctggctactattcatctgccatacctgcaaggccaggtgaccctcgagctcgcagtgtacaagccacccaaggttagtctgatgcccgcgacattggctcgcgccgcccccggtgaggcacctcccgaattactatgtctcgtgtctcatttttatccctcaggcggcctggaggttgagtgggagttgagaggaggcccgggagggcgctctcaaaaagccgaaggccagcggtggctaagtgcactgagacatcacagcgacggttccgtgtcattatcaggacacctgcaaccccctccagtgacaactgagcagcatggagcccgctacgcgtgcagaatccaccatcccagcctgcccgcatccggacggagtgcagaagttaccctcgaggtggcaggcttaagtggcccttccttagaggactcagtcgggctgtttctctcagctttcctgctgctgggcctctttaaggccttggggtgggccgctgtgtacctaagtacttgcaaggattcaaaaaaacacgccacctag

SEQ ID NO: 208029 - DNA, 471 bp, synthetic construct
  misc_feature 1..471: note = Description of Artificial Sequence: Synthetic coding sequence
  source 1..471: mol_type = other DNA
atgaagagcctgagcctgctgctggccgtggccctgggcctggccaccgctgtgtcagccggtccagcagttattgagtgttggtttgtcgaagacgcgtctgggaaaggtctggccaagcggccaggcgccttgctgctaaggcagggacccggtgagcctcctcctaggcccgatctggatcctgagctttacctcagtgtgcacgaccccgccggtgccctgcaggccgcttttaggagataccccagaggcgcgccggctccacactgtgaaatgtctcgttttgtgccgctccccgcttccgccaagtgggcgagtggccttaccccggcccagaactgcccgcgggccctggacggcgcatggctgatggtaagtatttcgagcatgggccatgccatgccagtcgaattcacaatacccgcctgcttgccacgcggggccgctcttcgatccccctggagatag

SEQ ID NO: 208030 - DNA, 1086 bp, synthetic construct
  misc_feature 1..1086: note = Description of Artificial Sequence: Synthetic coding sequence
  source 1..1086: mol_type = other DNA
atgaagagcctgagcctgctgctggccgtggccctgggcctggccacagctgtcagcgctggccccgctgtgatagagtgctggttcgtggaagacgcttccggtaagggacttgccaagcgaccgggcgcactccttttaaggcaaggccccggggaacccccaccacgtcccgatctggatccagaactttatctatccgtgcatgtcgttttgaccgtcttgacacacaccccagcaccacgtgttcggctgggacaggatgctctgctggatttgtcattcgcttatatgccacctactagcgaggccgccagctctctggcgccggggcctcccccgttcgggctggagtggcgcagacagcatttggggaagggtcatcttctgcttgctgcaactccaggcctgaatgggcaaatgcccgccgcgcaggaaggtgccgtcgctttcgcagcttgggatgacgatgagccttggggtccctggactggcaatgggacattttggttgcctagagtgcagcctttccaggaagggacctatctcgcaaccatacaccttccgtacctccagggacaagtgacactcgaattggctgtctacaaaccccccaaagttagcctgatgccagcaaccctggcacgggccgcgcctggagaagctccaccggagttgctgtgtcttgtgagccacttctacccctctgggggcttggaagtggagtgggagctgcgcgggggcccaggaggcagaagtcaaaaggcagagggccagagatggctgagcgccttgagacaccactctgacggaagtgttagtctgagtggccatctgcagcctcctcccgtaactaccgagcagcacggcgcgagatatgcctgccggatacatcatccatctctgcctgcttctggcaggtccgccgaagtcacgttggaggttgcgggactgtctggcccctccctggaggactcagtaggtctcttcctgtctgcttttttactgcttggactttttaaagccctcggctgggcagccgtttacttgtcgacatgcaaggactccaagaagcatgccacctag

SEQ ID NO: 208031 - DNA, 1347 bp, synthetic construct
  misc_feature 1..1347: note = Description of Artificial Sequence: Synthetic coding sequence
  source 1..1347: mol_type = other DNA
atgaagagcctgagcctgctgctggccgtggccctgggcctggccacggctgtgtccgctgggccagccgtaattgaatgctggtttgtggaagatgcgtctgggaagggccttgcaaagcgtcccggggctctcctgctgcgtcagggaccaggcgagcctcctccgagacctgatctcgatcctgagctgtacctgagcgtgcacgacccagctggtgccttacaagccgcattcaggaggtacccaaggggagcaccggccccccattgtgagatgagcagattcgtccctcttccagcatccgcaaagtgggcctcgggactcacaccggcccagaattgtccccgggctctggatggcgcttggttgatggtgtctatttcctctcccgttttatcactgagcagcttactcagaccgcaaccggagccgcaacaggagcctgtgctgatcactatggcaactgtggtactcaccgtgctcacacatacgcctgcaccacgcgtgaggttgggccaagacgcactgctcgacctctccttcgcatatatgcccccgacgagcgaagcagcttcctctttagctcctggacctccccctttcgggctcgagtggcgcagacaacacctagggaaagggcacctgctcctggcagcgacacctgggcttaacgggcagatgcccgcagctcaggaaggagccgtggccttcgcagcatgggatgacgatgaaccttggggtccctggacaggtaacggtactttctggctgcctcgggtccagccgttccaggaaggaacatatctggccactatacatctgccatatctgcagggtcaggtgactcttgaactggccgtttataagcctccaaaagtgtcgttaatgccagctaccctggcgcgcgctgcccctggtgaagccccacccgaacttctgtgcttggttagccacttttatccctccggcggactcgaggtcgagtgggaattaaggggcggccctggcggaagatctcagaaggctgagggacagcggtggctgtctgcactgcgccatcacagcgacggatctgtctccctctccgggcatcttcagccgccccctgtcaccacagagcagcacggggcgaggtacgcttgcagaattcatcacccatccctaccggccagtggacgctcagctgaagtaacccttgaggtcgctggtctctccggaccatcactcgaagactccgtcggcctctttttaagcgcattcttattactgggactctttaaggcccttggctgggccgctgtgtatctcagcacctgtaaagactccaagaagcatgccacatag

SEQ ID NO: 208032 - DNA, 1086 bp, synthetic construct
  misc_feature 1..1086: note = Description of Artificial Sequence: Synthetic coding sequence
  source 1..1086: mol_type = other DNA
atgaagagcctgagcctgctgctggccgtggccctgggcctggccactgcagtcagtgccggtcctgctgtgatagagtgttggtttgtggaagacgcctcaggtaagggtctggccaaacgaccaggcgcccttctactgcgccagggcccgggggaacccccccctcgtcctgatttagatcccgaattgtacctttctgtccacgttgtgctcactgtcttgacgcatacgcctgcccccagagtccggctcggccaggatgccctcctggatctcagttttgcatacatgcctcccacctcagaagccgcatcctctctcgcacccggccccccccctttcggattagaatggcgacgacagcatcttgggaaaggtcacctccttctggccgcaactcctggtctgaacgggcagatgccagccgcacaggagggtgctgtggccttcgctgcttgggatgatgatgaaccctgggggccatggactggcaacggtacattttggttgcctcgggtgcagccattccaggagggcacatatctcgctacaatccaccttccatatctccagggccaggtaacactcgaactggccgtgtataagccaccaaaagttagtctgatgccggccacactggcccgagcggcccctggcgaagctccgcccgagctgttatgtctggtgagtcatttttatccaagtgggggcctggaggtggaatgggagctccgaggtggacccggaggccgaagtcaaaaggctgaggggcaacgatggcttagtgccctgaggcaccattccgatggttccgtgagcctatcagggcatttacaaccaccaccggtcaccactgaacagcacggagctaggtacgcgtgccggatccaccacccaagtctgcctgcaagcggaagatcagctgaggtgacgctggaggtcgccggtctaagcggaccatcattggaagactctgtgggcctcttcctgtctgccttccttctcctgggcctgttcaaagccctgggctgggctgcagtctatctgtctacttgcaaggactccaaaaaacacgctacatag

SEQ ID NO: 208033 - DNA, 471 bp, synthetic construct
  misc_feature 1..471: note = Description of Artificial Sequence: Synthetic coding sequence
  source 1..471: mol_type = other DNA
atgaagagcctgagcctgctgctggccgtggccctgggcctggccactgccgtctccgccggacccgcggttatcgaatgttggttcgttgaggacgcctccggaaaaggtttggcaaaaaggcctggagctctgctcctaagacagggtccaggtgagccgcccccccggccagatcttgaccctgaactctacttaagcgtgcatgatcccgccggcgccctgcaggctgcattcagacggtatccccggggggcaccagcccctcactgcgaaatgtctcgtttcgttcccttacccgccagtgctaaatgggcttcagggctgacccccgctcagaactgccccagagctttagatggggcctggctcatggtgtccataagctctatggggcatgctatgcccgtcgagttcacaatcccagcctgtctccctagaggagctgccttgcggagcccctggcgctag

SEQ ID NO: 208034 - DNA, 1347 bp, synthetic construct
  misc_feature 1..1347: note = Description of Artificial Sequence: Synthetic coding sequence
  source 1..1347: mol_type = other DNA
atgaagagcctgagcctgctgctggccgtggccctgggcctggccacagctgtctccgctggccccgcagtcatcgaatgttggttcgttgaggatgcttctggcaaaggtcttgctaagcgaccaggagccctgcttctccgtcagggacccggcgaaccgcctccgagaccagacctggacccagagctttacttgtctgtacatgaccctgctggtgccctacaagccgctttccggcgctatccgcggggggcacccgcccctcactgtgagatgtctcgatttgtgcctctgcctgcctctgcaaagtgggcctccgggttaacacctgcgcagaactgtccacgagctctcgacggcgcttggctgatggtatcaatctccagccccgtgctcagtctgagttcccttctgcgaccacagcctgagccccagcaggagcccgtcctaatcactatggcaacagtggtcctgaccgtcttgacacatacaccagcaccccgcgtgcgtttgggacaagacgccttactggacctctcttttgcatacatgcctcctaccagtgaggcagcgtcttcgctagcaccaggaccaccgccattcggcctcgaatggcggaggcaacaccttggtaaagggcatctcttgcttgctgccaccccgggtctgaatggccagatgcccgccgcgcaggaaggcgctgtggccttcgcagcctgggacgacgatgagccttggggtccctggactggaaacggtactttctggctcccgagggtccagccatttcaggagggtacctacctggctacaatccatctgccttacttacagggccaggtaacacttgaacttgctgtgtacaagccacccaaagtatctcttatgcctgcaactctggcacgcgccgctcccggggaagcacccccagagctcttgtgtttggtgtcacacttctacccctccggcggccttgaggtagagtgggaactgaggggtggacctggagggaggtcccagaaggccgagggacagcgatggctatctgcattgcgtcatcacagtgacgggtctgttagcctgagcggccatctccagccaccccccgtgacgactgagcagcacggggcccgctacgcctgcaggatccaccatccctcgttacccgcaagtggaagaagcgccgaggtgacactggaagtggcagggttgagtgggcctagcttggaagattcagtgggcctgtttctatccgcgttcctgctcctgggtctctttaaggctctaggatgggccgccgtctacctgtcaacctgcaaggactctaagaagcatgctacttag

SEQ ID NO: 208035 - DNA, 1086 bp, synthetic construct
  misc_feature 1..1086: note = Description of Artificial Sequence: Synthetic coding sequence
  source 1..1086: mol_type = other DNA
atgaagagcctgagcctgctgctggccgtggccctgggcctggccaccgctgtgtccgccggacccgcggttattgagtgctggttcgtggaggatgccagcgggaaggggcttgccaagcggcccggagcactactacttcgtcaggggccaggagaaccaccccccagaccagatcttgacccagaactgtacttaagcgtgcacgtcgtcttgaccgttctgactcacacaccggctccacgggtgagactcggtcaagatgctttgcttgacctgagtttcgcttacatgccaccaacatcagaagccgcttcgagtttggcacccgggcccccaccatttggattagaatggagacgccaacatttgggaaagggccatcttctgctcgccgcaacccctggtttgaatgggcaaatgcctgcggcacaggaaggggccgtggcgtttgcagcatgggacgatgatgagccctggggaccctggacaggcaacgggacattttggctgcctaccgtgcagccgttccaggagggaacttatttagctaccatccacttgccttatctacaaggacaggttaccttggaattggccgtttacaaacccccaaaggtaagcctgatgcctgccaccttggcccgggcggcccccggcgaggccccccccgagctgctctgcctcgtgagtcatttttacccatcaggagggttagaggtggaatgggagttgagaggtggaccgggcgggcgctcacaaaaggcagagggccagcgctggctgagtgcactgcgccaccattccgatgggtcagtgagcctctcaggccatctgcaacctcccccagtcacaacagagcaacatggcgcacgctacgcctgccggatccaccacccttccctgccagcaagtgggagaagtgctgaagtgacgctggaagttgccgggctgagcggacccagtttagaggattctgttggcctttttctgtcggcttttcttctgctcggcctttttaaagccctcggctgggctgctgtttacctctctacatgcaaggacagtaaaaagaaggcagagtag

SEQ ID NO: 208036 - DNA, 1347 bp, synthetic construct
  misc_feature 1..1347: note = Description of Artificial Sequence: Synthetic coding sequence
  source 1..1347: mol_type = other DNA
atgaagagcctgagcctgctgctggccgtggccctgggcctggccacagccgtaagtgcgggtcccgcagttattgaatgctggttcgtcgaggacgcttctggcaaaggattggccaaacggccaggcgccctcctgctacgccaaggcccaggggagccacctccgcggcccgacctggacccggagctgtatctgtctgtgcatgaccccgctggcgctctgcaagccgcattccggcggtacccccgaggagcaccagccccacactgtgaaatgtctagattcgtgccattacctgcctccgctaagtgggcaagtgggttaacacctgcgcaaaactgcccccgcgccctggacggcgcttggctgatggtgagcatcagctcacccgtgctctctctctcgtcacttcttaggccacagccggagccacagcaggagccagtgctcattacgatggcaaccgtggtgttgaccgttctcactcacacacccgctccaagagttaggctaggccaggacgctctgctggacctgtcatttgcctacatgcctcccacctccgaagccgccagctcactggctccaggacccccccctttcggcttagaatggcgaagacagcacttaggtaaggggcacctgctgcttgcggcaacccccggactgaatggccaaatgccagctgctcaggagggtgccgttgccttcgccgcatgggatgatgacgagccctggggcccttggacgggaaacggcactttttggctgcctcgggtacagccgttccaagaagggacctacctcgccaccattcaccttccgtatctgcagggacaggtgactctcgaactggccgtctacaagcctcctaaagtgtccttgatgccagccactcttgcccgggccgcaccgggtgaggctcctcctgagctcctgtgcctggtgagccacttctacccttcgggcggactcgaagttgagtgggagctcaggggcggtcccggagggaggagccagaaggccgaaggccagcgatggttgtcagcactccgacaccatagtgatgggagcgtgtccttgtccggccatctccagcccccaccagtaacaactgaacagcacggcgcacggtacgcatgcagaattcatcacccgtcacttcccgcttctggtcgaagcgctgaggtgacactggaagtggctggtttgagcgggccatccctggaggacagcgtcggtcttttcctatctgcatttcttctgctcggcttgttcaaagctttgggatgggccgccgtctacctgtcgacttgcaaagattccaagaagcacgccacctag

SEQ ID NO: 208037 - DNA, 1086 bp, synthetic construct
  misc_feature 1..1086: note = Description of Artificial Sequence: Synthetic coding sequence
  source 1..1086: mol_type = other DNA
atgaagagcctgagcctgctgctggccgtggccctgggcctggccacagccgtctcagccgggccggccgtaattgagtgttggtttgtggaggacgccagcggtaagggactcgccaagcgtcccggcgccctcctcctgagacagggccctggcgagcctccaccgcgccccgatctggaccctgagctgtacttatccgtgcatgtggtgcttacagtcctgacgcatacgccagccccccgtgtgcgcctcggccaggacgctctgctcgatctgagttttgcctacatgccacccacttcagaggcggcgtcctctctagcacctgggcctccccccttcggtttggagtggcggcgccagcacctgggaaaggggcacctgctgctggccgcaacccctggtctgaatggtcagatgccagccgcgcaggaaggcgcagtcgcctttgctgcctgggacgacgacgaaccctggggaccctggactggcaacggaaccttttggcttccccgcgtgcagccctttcaggagggcacttatttggccaccatccacctgccttacctgcagggccaggtcaccctggagcttgccgtctataagcccccaaaggtctcattgatgcctgccacgctggcccgcgcagcccctggcgaagccccccctgagctgctgtgtctggttagccatttttaccccagcggcggcctggaggtagagtgggagctccggggcggacccgggggccgctcccagaaggcagaagggcaacgatggctctctgcgctgagacatcattctgacggcagcgtgtccctttctggccatctacagcccccgcccgtgaccacggagcagcatggagctaggtacgcatgcaggatccaccacccctctttacctgctagcggccggtccgcggaggtcaccctggaagtcgccggcctgtcggggcctagcctggaagatagcgtgggcttgtttcttagcgcattcctgttgcttggattatttaaggctctcggctgggccgccgtgtacctttctacctgcaaggattccaagaagcacgctacttag

SEQ ID NO: 208038 - DNA, 2037 bp, synthetic construct
  misc_feature 1..2037: note = Description of Artificial Sequence: Synthetic coding sequence
  source 1..2037: mol_type = other DNA
atgctgctggaggccgagcggcggcggggcggcggcgccgccggcgcaaggctactggaacggtaccgcagagtccctggagttagggccttgagagcggactccgtgctcatcatcgaaaccgtcccagggtttccccccgccccccctgcaccaggtgccgctcagatccgggctgctgaggttctggtgtacggagcccccccaggtcgggtaagcaggctcctggagcgcttcgacccacccgctgcaccccggagaaggggctccccagagcgggctcggcctcctcccccacctcctccccccgcccctcctcgtcccccgccagcagcaccctcccccccggccgcccccggtcctcgtggaggaggggcgtcacctggggcccgcaggagtgactttctgcagaaaactggctcaaattcttttactgtacatccccgtggcctgcatcggggtgccggagctaggctcttatctaacggtcatagtgcccccgagccacgcgcagggccggctaatcgcctagccggatcaccccctggatccggccagtggaaacccaaagtggagtctggcgatcctagcctgcacccacctccgtcgccaggcaccccctctgcaacccccgcatccccacccgcaagcgctacgccttcccagcgccagtgcgtaagcgctgctacgagcacaaacgacagcttcgagatcaggccagcccccaaacctgttatggaaacaattcctctcggagacctacaggcccgcgccctcgcatcactgcgtgctaatagcagaaattcatttatggtcataccaaaatctaaagcctccggggccccccccccagaggggcggcaatccgtggagttacctaagggtgaccttgggcccgcttccccctcccaggaactcggatctcagccagttccgggaggggacggcgcacccgcactcggcaagtcacccctggaagtggaggcccaatgggctgttgaagagggagcctgcccacggacagccaccgccctagctgaccgggctattagatggcaacgcccatcctcgccaccccctttccttcctgcagcctccgaagaggccgagccggccgagggcctgagagtccctggactggccaaaaactctcgcgagtatgtcagacccggacttcctgtgaccttcatcgacgaggtggattcagaggaggccccccaggccgctaagctgccgtatttacctcatccggcccgcccactgcatccggcacgccctggatgtgtcgccgagctccaacccagagggagcaataccttcacggtggtccctaagcggaagccgggtaccctccaggatcagcacttttctcaggcaaatagggaaccaaggccccgggaggccgaagaggaagaagcaagctgtctcctgggacccactctcaagaagagatatccgaccgtccatgagatagaggtaatagggggctacctggcactccagaagtcttgcctgaccaaggccggcagcagccggaaaaagatgaagatatccttcaatgacaagtctctacagacaacttttgagtacccgtccgagtcaagtctggaacaagaggaagaggtggaccaacaggaggaggaagaggaggaggaggaggaggaagaagaggaggaggagggatcaggcagtgaagagaaaccgtttgcactgttccttccaagagccacttttgttagttcagtgaggccagaatcgtcaagactgccggaaggctcctctgggctttcctcttacactcccaaacactccgtggcgttttcaaagtggcaggaacaagccctagagcaggccccacgggaagctgaacctccacctgtggaggcaatggtccgatgcggcggcgtagagcgatggggggaaagcgatacacgagccagcccctgcgttcatatcctcagctctcactttcagctgacacctgcatcacaaaacgacctcagtgactttagaagcgagccggcactctatttctag

SEQ ID NO: 208039 - DNA, 2136 bp, synthetic construct
  misc_feature 1..2136: note = Description of Artificial Sequence: Synthetic coding sequence
  source 1..2136: mol_type = other DNA
atggccgccctgggccggcccggcagcggcccccgggccgccgtgcccgcttggaagcgggaaattctggagcgaaagcgcgcgaaacttgcggctctgggaggcggcgccggtcctggggccgccgagcccgagcaaagggtgctggctgagtccctcggaccacttagagagaaccccttcatgctgttggaagccgagaggcgcagaggtgggggagccgcaggtgcacgcctactagagagatatcgcagagtgcctggcgtccgcgctctgagagccgactccgtcctcattatcgagactgtgccggggtttcccccagctcccccagctccaggcgctgctcagattagggcggctgaggtactggtttatggagctccacctgggcgcgtgagccggcttctcgaaaggtttgaccctccagccgcacctcggcgcaggggcagccccgagagggctaggcctcctccacctcctcctccacctgctccgcctcgcccgccccctgccgctcccagcccccccgctgctcccggaccccgtggtggtggcgccagtcccggggctcgacggtctgacttcctccagaagaccggcagtaattccttcacagttcatccaagaggacttcataggggggctggagcgagactgctgtctaatggtcattcagccccagagccccgggcagggccagcaaacaggctcgcaggctcccctccagggtcaggccaatggaagccgaaggtagaatccggagatccaagtttgcaccccccaccttctccagggaccccaagcgcaacccctgctagtcctcccgcaagtgccaccccttcacagcgccaatgcgtaagcgccgcaacctcaaccaacgactccttcgaaattagaccagcccccaaacctgtgatggagacaattccgctcggcgatctccaggccagagccctagcgagcctgagagccaacagcagaaacagctttatggtgattcccaaaagcaaagcctcaggtgcccctcctcctgaggggagacagtctgtggaactgcccaagggagatcttggtcccgcctcgcccagtcaggagctggggtcacagcccgttcccggaggagatggagcacctgcgttagggaaatcgccattggaggtggaggcccagtgggcagtcgaggagggcgcctgccccagaacggcgacagctttagctgatagagcaattcgatggcagcgcccgagttctccccccccttttcttcccgccgcctcagaagaggctgagcccgccgaaggactgcgggtgccggggctggccaagaactctagagagtatgtcaggcctggcttacctgtcacctttatcgacgaggtggactctgaagaggccccacaagcggctaagctcccgtacttgccacatcctgccagacctctgcatcctgctcggcccggctgtgttgccgagttgcagcccagaggatccaatacattcactgtggttcccaaacgcaaacctggtacattacaggatcagcatttcagccaggcaaatcgggagcccagacctcgggaggccgaggaagaggaggcatcttgtctgctgggccctacgctgaagaagaggtacccgacagttcacgagattgaggtgattggaggctatttggctctgcagaagtcatgcctcaccaaagctggctccagccggaagaaaatgaagatcagttttaacgacaaaagcctccagaccaccttcgagtacccttccgaatccagtcttgagcaggaagaggaggtggaccagcaagaagaggaagaagaagaggaagaagaggaggaagaggaagaggagggctctggatccgaagaaaagccttttgccctattcctgccaagggcaacgttcgtgagttctgtccgtcccgagagtagtcgcctgcctgaaggatccagcgggctgtctagctatactcccaagcactctgtcgctttcagcaagtggcaggaacaagctcttgagcaggctcctcgtgaagccgagccacctcctgtagaggccatgctgacgcctgcctcccagaatgatctttccgacttccggagtgaacccgccctatacttctag

SEQ ID NO: 208040 - DNA, 4866 bp, synthetic construct
  misc_feature 1..4866: note = Description of Artificial Sequence: Synthetic coding sequence
  source 1..4866: mol_type = other DNA
atggagtgggtgctggccgaggccctgctgagccagagccgggacccaagggccctgctgggagcactctgtcaaggcgaggcctcagcagagagagtggaaaccctccgcttcctcctgcagcgcctcgaagatgaggaagcacggggtagtggcggagcaggcgctttgcctgaagctgcgcgtgaggtggccgcaggctacctggttcccttgctgaggagtttgcgcggccgcccagcagggggccctgatccatcccttcagcccaggcaccgccgcagggtcttgagggccgctggtgcggctcttaggtcttgtgtccgactggctgggagaccacagctggccgctgccttggccgaggaagccttaagagacctcctcgctggctggcgcgctcctggtgccgaagccgctgtggaggtgctggctgccgtcggtccatgcctgcgaccccgggaggacggaccactactcgaacgggtcgcgggtaccgctgtggccctcgccctgggcggtggaggcgacggagatgaggctgggcccgccgaagatgccgcagctttggtcgcgggacgcctcctgcctgtgttggtccagtgtgggggggctgccttgcgggccgtttggggaggcctggctgccccaggtgcatctcttggaagtggcagggtcgaagagaagctactcgtattgtctgcactggctgagaaactccttcccgaaccaggtggggatagggcccgaggagcaagggaagctggacccgatgcacggcgctgctggagattttggaggacggttcaagcaggtttgggacaagctgatgcgctcacccgaaaaagggctagatatttgctgcaaagagccgtggaggtttccgcagagctgggggctgactgcacgtgtggtccgcaagagggcaatggaccttctctcttttggtggagcgagcgtaaaaaagacgaactcctcaagttctgggagaattacatcctcataatggaaacactcgagggcaaccagatccacgtcattaagccagttctgcccaaactgaataacttgtttgagtacgcggtgtcggaggagaacggctgctggctcttccacccatcgtggcatatgtgtatatacaaaaggatgttcgaaagtgagaacaaaattctcagtaaggagggcgtgatccatttcctagaattgtacgaaacaaaaattttgcctttttcacctgagttctcagagttcatcattggtccgttaatggacgcccttagtgaatcgagcctgtacagccggagccctggacagccaattgggagctgttctccactcggcctgaagctgcagaaatttctagtaacatacatatccctgttgcccgaggagataaagagtagctttttacttaaatttatccggaagatgacatcccgccactggtgcgcagtccccattttgttcctgtcaaaggccctagcgaatgtgcctcgtcacaaggcgctagggatcgacggtctgcttgccctccgcgatgtgatccactgcacaatgatcacccatcagattctgctgaggggagcggctcagtgctatctgctacagacggccatgaatctcctggacgtagaaaaggtgtccctgagtgacgtcagtacgttcctgatgtctctcagacaggaagagagccttgggcgaggtacttcgctgtggacagagctctgtgactggctgcgcgtgaacgagtcctacttcaagccaagcccaacatgcagttcaattgggctccacaagacttcattaaacgcctatgtgaagagtatcgttcaggaatatgttaagagttcagcatgggagacaggggagaattgtttcatgccggactggttcgaagccaaacttgtgtcactcatggtcctgctggccgtagatgttgaaggtatgaagactcagtactccggaaagcagaggacggaaaacgtgttgcgcatctttctggaccccttacttgacgtcctgatgaaattcagtacaaatgcctacatgcccttgctgaagacagacagatgtctccagttattgctgaagctcctgaatacatgccgtctgaaagggagtagtgctcaggatgatgaggtctccacggttctgcaaaactttttcatgtcaacaactgaatctatttctgagttcattctgagacgcctaaccatgaatgaacttaattcagtaagtgacttagacaggtgtcacctgtacttaatggtgctcaccgagctgattaatctacacctgaaggtgggttggaaaaggggcaacccaatctggcgcgtgattagcctcctcaaaaacgcctcaattcagcatctccaggaaatggatagtggacaagagccaactgttggctcccagattcagcgggttgtgtctatggctgccctggctatggtgtgcgaggccatcgatcagaagcctgagctacagttggatagtctccatgcagggcctctcgaatcctttctcagtagcctacagctcaaccagaccctgcagaagcctcatgccgaagagcagtcgtcctacgcccatcctctagagtgctcttccgtgctcgaggagtccagcagctcacaaggctgggggaagatcgtagcccagtacatacacgatcagtgggtgtgtctgtccttcctactgaaaaaatatcatactctaataccaacgacaggaagcgaaattctggagccgttcctcccagcagttcagatgccaattcggacgcttcagagtgcactggaggcattgaccgtgctgtcatcagatcaagtgctgcctgtttttcattgccttaaggtgttggtgcccaaattacttacatcaagcgaatctctgtgcatcgagtctttcgatatggcatggaagattatcagttccctaagcaatacccagttgattttctgggccaaccttaaagccttcgttcagttcgtcttcgacaacaaggttctgaccattgccgccaaaatcaagggacaggcctacttcaaaatcaaagagataatgtataagatcatagaaatgagcgctataaaaaccggcgtatttaatactttaatcagctactgctgtcagagctggatcgtgtccgcgagtaacgtctctcaaggcagtctgtcatcagcaaagaactattccgagttgatactagaagcctgtattttcgggactgttttccggcgcgaccagagacttgtgcaagatgttcagacattcattgaaaatctgggccatgattgcgcagctaacatcgtgatggagaataccaagcgggaagaccactacgtgcgtatctgtgctgttaaatttttgtgcctgctagacggtagtaatatgtctcataaactgttcattgaagaccttgcaatcaaactcctggataaggatgaactggtttcaaagtccaagaaaaggtactatgtgaatagccttcagcacagggtgaaaaacagggtctggcaaacactcctggtcctgttcccacggctcgatcagaactttttgaatggtataatagaccgcatctttcaagcgggctttacaaacaatcaagcaagcatcaagtacttcatcgagtggattattatccttatccttcacaagtttcctcagttcctccctaagttctgggactgcttcagctatggagaagaaaatttgaaaacttccatctgcacttttttagctgtgctgtcccatctggacatcattacccagaatataccggaaaaaaaacttatccttaagcaggctctcatcgtcgtcctccagtggtgtttcaaccacaacttctctgtgcgcctgtatgcactcgtggctcttaagaaactctggacagtgtgcaaggtcctctcagttgaggaattcgacgcgctcaccccagtgatcgagtcttctctgcatcaagtcgagagtatgcatggagccggcaacgcaaagaagaattggcagaggattcaggagcacttcttcttcgctacctttcatcctctaaaggactactgtctggaaaccatcttttatattctgcctcggttgagtggactgattgaagatgagtggataacaatagacaaatttactcggttcaccgatgtgccactggccgctggcttccagtggtacttgtcacagactcagctgagcaaacttaagcccggtgattggagccagcaggatattggaacaaatcttgtagaagccgacaaccaggccgagtggactgatgtgcagaaaaagattatcccctggaactcacgcgtctctgacttggatctggagctgctgttccaagaccgcgccgcacggctaggcaagagcatctctcgtcttatcgtcgtggcttctctgatagacaaacccaccaatttgggcgggctgtgccgcacgtgcgaagtcttcggggcttccgtcttggtggtgggaagtctccagtgcatctctgataaacagttccagcatttatcagttagcgcagagcaatggctacctctagttgaagtgaagccccctcaactgatcgactacctgcaacagaagaaaacggaaggttacacaattatcggagtggaacagactgccaaaagcttggatctgactcagtactgctttccagaaaagagccttttgctgctgggcaacgagcgagagggcataccagccaacctgattcagcagctggatgtctgcgtagaaatcccacagcagggcattattcgctccttgaatgttcatgtgagcggcgccttgcttatatgggaatacacccggcagcagttgctctcccacggggatactaaaccctag

SEQ ID NO: 208041 - DNA, 1101 bp, synthetic construct
  misc_feature 1..1101: note = Description of Artificial Sequence: Synthetic coding sequence
  source 1..1101: mol_type = other DNA
atgagcgaggaggagcagggcagcggcaccaccaccggctgcggcctcccaagtattgagcagatgctagctgctaatccaggcaagacgcccatatctctcctccaagagtacggaaccagaatcggaaagacccctgtgtatgatttgctgaaagcagaggggcaggcacatcagcccaactttacctttagagttactgttggggacacaagctgtacaggtcagggaccctccaagaaagcagccaagcacaaggctgccgaggtcgccctgaagcacctgaagggcggttccatgctagagcccgctctggaggattctagctcgttctcaccactcgactcctccctgccagaggacatccctgtgtttaccgcggcagcagctgctacaccggtcccctcagtggtgctgactcgcagcccgcctatggagctacaacctccggtgagtccccagcagtcggagtgtaatcccgttggggccctacaggaactcgtggtgcagaaggggtggcgccttcccgaatatacagtaacacaggagagcgggcctgcacaccgaaaagagtttacaatgacctgccgcgtggaacgctttattgagataggctccggtacttccaagaagctggccaaaaggaacgccgcagctaagatgttactcagagtccatactgtccccctcgacgcaagggatggaaacgaagtagaacctgatgatgaccacttctccatcggcgtggggagcagactggatggcttgaggaatcgcggcccggggtgcacttgggacagcttgagaaactccgtcggggagaagattttaagtctgagatcgtgctcactgggtagcctgggtgccctggggccggcatgttgtcgtgtcctctctgagctgtctgaggaacaagcatttcacgtgtcttatctggatatagaggaactttcattgagtggattgtgtcagtgcctcgtagaactatctacacagcccgctaccgtatgtcatggtagcgccaccactagggaagcggccagaggcgaggcggcaagacgagccctccaatatctcaagattatggccggctcaaaatag

SEQ ID NO: 208042 - DNA, 1038 bp, synthetic construct
  misc_feature 1..1038: note = Description of Artificial Sequence: Synthetic coding sequence
  source 1..1038: mol_type = other DNA
atgctggccgccaaccccggcaagacccccatcagcctgctgcaggagtacggtactcgtattgggaagacacccgtgtacgacttgctgaaggccgagggccaggctcatcaacccaatttcactttccgcgtcaccgttggagatacatcctgcacggggcaaggccccagcaaaaaggctgcgaagcacaaggcggctgaggttgccttgaagcacctgaaagggggttctatgctcgagcccgccctcgaagactcaagtagcttttcccccctcgattcctccctccctgaagacatacctgtgtttaccgcagctgcggcggctacccctgtacccagtgtagtgctgacgaggtccccaccaatggagttacagccccccgttagtccacagcaaagcgagtgtaatcccgtgggagcactgcaggaactggtggtgcagaaaggctggcgcttaccagagtacaccgtcacccaggagtccgggcccgcccatcggaaggaatttactatgacatgccgcgtcgaaaggttcattgagattggcagtggaaccagtaaaaagctggcgaaacgaaacgcggccgcaaagatgctgttgcgggtgcacactgtcccccttgatgcacgcgatgggaacgaggtggaacctgacgatgaccacttctcaatcggcgtcggatctagactcgacggattgagaaatcgagggcccggttgtacctgggattctctgaggaattccgtgggagagaagattctaagcttgagaagctgtagtcttggctctctgggagctctgggccccgcttgttgtagagtcctgtctgaactgagtgaggagcaggccttccacgtcagttacctggacatcgaggaacttagcctcagcggactttgccagtgcttagtggaattgtccacccagccggccaccgtttgccacgggtctgcaactacaagggaggccgctcgtggggaagctgcacggcgagccctccagtacctcaagatcatggcagggtcaaagtag

SEQ ID NO: 208043 - DNA, 1038 bp, synthetic construct
  misc_feature 1..1038: note = Description of Artificial Sequence: Synthetic coding sequence
  source 1..1038: mol_type = other DNA
atgctggccgccaaccccggcaagacccccatcagcctgctgcaggaatatggaactcggataggaaagacaccggtctatgaccttctaaaggcagaaggccaggcccatcagccaaacttcacattccgagtgaccgtgggggacacatcttgcaccggacaggggccatctaagaaggctgccaaacacaaagcagctgaggtggctctgaagcacctaaaaggaggctcgatgttggaaccagctttagaagactcatcctcattctcgcctctcgactccagtctgcccgaggacatccccgtgttcacagcggcagccgccgccactccggtgccttctgttgttttgaccagatccccccccatggagttgcaaccgccagtctctccgcagcaatccgaatgcaaccctgtgggggctctccaggaactcgtggtccagaaaggctggcgcttgcccgaatacacagtcactcaggagagcggtcctgcccatcgcaaggagtttactatgacctgccgagtcgagcgcttcattgaaatcggctctggtacctccaagaagctggccaaacggaatgccgctgctaaaatgctcttgcgtgtgcatacggtgcccttagatgctagagacggaaacgaagtggagcctgatgacgatcacttcagcatcggagtgggctctcgtctggacggtctaagaaatagggggcctggatgcacctgggacagtctccgaaattcggtgggtgagaaaatcctcagcttgagaagctgtagtttgggttccttgggggcattaggccccgcctgctgcagggtcctgagcgaactcagcgaggaacaggccttccacgtgtcttacttggatattgaggaactgtcactcagcgggttgtgccaatgtctagtcgagctcagcacacagcccgccaccgtgtgccatggctctgccaccacgcgggaggccgcacggggtgaggctgcccgaagggcattgcaatacctgaaaattatggccgggtctaagtag

SEQ ID NO: 208044 - DNA, 1245 bp, synthetic construct
  misc_feature 1..1245: note = Description of Artificial Sequence: Synthetic coding sequence
  source 1..1245: mol_type = other DNA
atgagcgagtacatccgggtgaccgaggacgagaacgacgagcccattgaaattccctccgaggacgacggcaccgtactcctgtcaaccgttactgctcaattccctggtgcttgtggtttacgctaccgcaaccctgtatcccagtgcatgaggggggttcgtctggttgaaggcattctccatgcccccgacgcaggctgggggaatctggtctatgttgtcaactacccaaaggacaacaagcgaaagatggacgagaccgatgccagcagtgctgtaaaggttaagagagctgtacaaaaaaccagcgatctgattgtgctgggcctgccttggaaaaccactgaacaagatctgaaagagtactttagcacatttggggaggtcttgatggtccaagtaaagaaggatttgaagacagggcactccaaaggattcggattcgtgcgcttcactgaatacgagactcaagtaaaagtaatgagccagaggcatatgattgacgggcggtggtgcgattgcaagctgccaaacagtaagcagtctcaggatgagcctctgagaagccgaaaagtgttcgtgggtcgatgtaccgaggacatgacagaagacgaactccgcgagttcttcagtcaatatggagatgtgatggacgtgttcattcctaaacccttcagagcttttgccttcgtaacctttgctgatgaccagattgctcagagtttgtgtggggaggacttaataatcaaaggcatatctgtgcacatttcaaacgcagaacctaagcacaacagcaatcggcagttggaacggagcggccgctttggagggaatccaggcggtttcggcaatcaaggaggattcgggaactcccgaggcggaggggccggcctaggcaataatcaaggctctaatatgggtggcggcatgaatttcggggcttttagcatcaacccagccatgatggctgccgcccaggctgcactacagagcagttggggtatgatgggcatgctggcctctcagcaaaatcagtccggccccagcggaaataatcagaatcagggaaacatgcaacgcgaacccaatcaggccttcggctcggggaacaattcctattccggcagcaattccggcgcagcgatcggctgggggtcagcgagtaatgccgggtctggctctggatttaatgggggctttgggtcttcaatggactccaagagctccggttgggggatgtag

SEQ ID NO: 208045 - DNA, 888 bp, synthetic construct
  misc_feature 1..888: note = Description of Artificial Sequence: Synthetic coding sequence
  source 1..888: mol_type = other DNA
atgagcgagtacatccgggtgaccgaggacgagaacgacgagcccatcgagattcccagtgaagatgacggtacggtcctgctctccacggtgaccgctcagtttcccggggcctgtgggctgaggtaccgcaatcctgtgtcacagtgtatgcggggggtacggctcgtggaaggcattctccacgcacccgatgctggctggggaaacctcgtgtatgtggtgaactaccctaaggataacaaacgcaagatggatgaaacggacgcatcgtctgccgtgaaggtgaagcgggcagtgcagaaaacatccgacctcatcgtactaggacttccttggaagactaccgagcaagatctgaaagagtatttttccacctttggcgaggtgctgatggtgcaggttaaaaaggacttaaaaactggtcactccaagggcttcggcttcgtccgatttacagagtacgaaacccaggtaaaggtgatgtcccagagacacatgatagacggccggtggtgtgattgcaaactgccaaatagcaaacaatcccaggatgagcctcttagatcgcgtaaggtgttcgtggggcgttgcacagaggatatgaccgaagacgaattgcgtgaattctttagccaatacggtgatgtgatggacgtttttatcccaaagccgtttcgagccttcgcattcgtaaccttcgctgacgaccagatcgctcaatcactctgtggagaagacttaatcatcaagggaatctcagtccacatatcaaatgccgaacccaaacataattctaacaggcaactggagcgaagcggacgctttggggtccacctcatctcaaatgtatacggccggtcaacctctctgaaagtggtgctctag

SEQ ID NO: 208046 - DNA, 897 bp, synthetic construct
  misc_feature 1..897: note = Description of Artificial Sequence: Synthetic coding sequence
  source 1..897: mol_type = other DNA
atgccccagatgctggccggcgagatctggtgcatgctgagcaccattcaaaaggtgaaaaaagatctaaaaactggtcattccaaaggttttggttttgttcggttcacagagtacgaaacccaggtgaaagtaatgagccagagacacatgatcgacgggagatggtgtgattgtaaactgcctaattcgaagcagagccaggatgaacccttacgatcccgaaaagtctttgtgggtaggtgcaccgaagatatgactgaggatgagctgagagaattcttcagccagtacggggacgtcatggacgtgtttatccccaagcccttccgagccttcgccttcgtgaccttcgccgacgatcagattgcccagtctctgtgtggtgaggaccttattataaaaggcatctctgtccacatttctaatgccgaaccaaaacacaattccaaccgtcagctggaacgatccggcaggttcggcgggaaccccggcggctttggcaatcagggcggcttcggcaacagtcggggggggggggccgggttgggtaacaatcaggggagtaatatggggggggggatgaatttcggggctttttcgatcaaccccgccatgatggctgccgcccaagccgcactgcagagtagctggggcatgatggggatgctcgcctcacaacagaatcagtctgggcccagtggcaataaccagaatcaggggaacatgcaacgggagcctaatcaggcgttcggctcgggtaacaactcctatagcgggtccaattccggagcagccatcggatggggttcagcatccaacgcaggatccggctccggctttaacggtgggttcgggtcaagcatggattctaagtcttctgggtggggaatgtag

SEQ ID NO: 208047 - DNA, 1533 bp, synthetic construct
  misc_feature 1..1533: note = Description of Artificial Sequence: Synthetic coding sequence
  source 1..1533: mol_type = other DNA
atggccgccgacagcgacgacggcgccgtgagcgcccccgccgccagtgacgggggggtcagtaaatcaaccaccagtggggaagagctcgtggtgcaggtgccggtggttgatgtgcaatccaataatttcaaagaaatgtggccgtcattgctcctggctattaagacagccaattttgttgccgtcgatactgagcttagcggcttgggcgaccgcaagtcacttctgaaccagtgtatcgaggagcgatataaggctgtgtgccacgccgctagaactcggtcgattctgtcccttggactggcatgctttaagaggcagccggacaaaggtgagcactcctacttggcgcaggtgttcaatctgaccctgctctgtatggaggaatacgtcatcgagcctaaaagtgtgcagttcctcattcagcatggctttaactttaatcagcagtatgcccaaggaatcccatatcacaaaggcaacgacaagggtgacgagagtcagagccaatccgtcagaacattgtttctcgaacttatcagagccaggagaccgctcgtcttacataatggactgattgaccttgtgtttctgtatcaaaatttttatgcacacctcccagagagcctaggtactttcacagcggatctgtgtgaaatgttccccgctgggatatacgacacaaagtatgccgccgagtttcacgctaggtttgtcgctagctatctggagtacgcgttcagaaagtgcgagagagagaacggcaagcagcgcgcagcaggcagcccgcacctgactttggagttctgtaattatccctcttctatgagagaccatattgattacaggtgctgtctgcctcctgctactcatcgaccccatcctacaagtatctgtgataatttctccgcgtacggttggtgtcctctggggccccagtgcccacaatctcacgatatcgatcttatcatagatacggacgaagccgccgcagaggataaaaggcgccgccggcgtaggcgcgagaaacgaaaaagagcactacttaatctgcctgggacacagaccagtggcgaagccaaggacggcccccctaaaaaacaggtatgcggtgactcaattaagccagaggaaactgaacaggaggtggccgcagacgaaacaaggaatcttcctcatagcaagcagggcaataagaacgacctggagatggggatcaaggctgctagaccggaaattgcggatcgcgccaccagcgaggttccaggcagtcaggcctctccaaaccccgtcccaggtgacggactccaccgtgctgggtttgacgccttcatgacaggctacgtgatggcctatgtggaggttagtcaaggcccacaaccgtgttcaagcgggccctggcttcccgagtgccataacaaagtatacctgtccggaaaggctgtgcccctaactgtggcaaagtcccaattctcgagaagcagcaaagcccacaatcagaaaatgaagttgacatggggctcttcctag

SEQ ID NO: 208048 - DNA, 1293 bp, synthetic construct
  misc_feature 1..1293: note = Description of Artificial Sequence: Synthetic coding sequence
  source 1..1293: mol_type = other DNA
atggccgccgacagcgacgacggcgccgtgagcgcccccgccgcctccgatggcgctgaatgggcctgggggcaggaagaattcgctgaaccaggcgagcactcatacctagcgcaggtattcaatctaaccctcctgtgcatggaggaatacgtgattgaacccaagtccgtgcagttcctcatccaacacggattcaacttcaatcaacagtacgctcaagggataccttatcataagggaaatgacaaaggcgatgagtctcaatcccagagcgtccggaccctatttttggagctcatccgggcgcggcggccactggtcctacataatgggctgattgacctcgtttttctctaccagaacttttatgcacacctcccggagtccctcgggaccttcactgccgatttgtgcgaaatgtttcctgctggcatctacgacactaagtatgcagcagagttccatgcaagattcgtcgccagctatctggagtacgccttccggaagtgtgaacgagagaatggcaaacagcgggccgctggaagcccccatcttactctggagttctgcaattacccatcctcgatgagagaccatattgactatagatgctgcctccctcccgccacgcatcgtcctcacccgacgtctatctgcgacaacttctctgcatatggctggtgcccccttgggcctcagtgtccacagtcacatgacatcgatctgatcattgatacggatgaggccgctgccgaggacaagcgacggagacggcggcgtcgggagaaacggaaacgagcacttctcaacctccccggcacccagacaagcggtgaagctaaagacgggcctcccaagaagcaggtatgcggtgacagtataaagccagaggaaaccgaacaggaggtcgccgcggatgaaacgaggaacctacctcactccaagcaggggaacaaaaatgacctggaaatgggcattaaagctgctagaccagagatagctgatcgggctaccagtgaggtgcctggctcccaggccagtccaaacccagtgccgggggacgggctgcacagggcgggctttgatgctttcatgacgggctacgtgatggcatatgtggaagtgtcacagggccctcagccatgcagcagcggaccctggcttcctgaatgccataataaggtatatctgtctgggaaagctgtaccgctgacggtcgccaagtcacaatttagccgcagttcgaaagcacacaaccagaaaatgaagctgacatggggaagtagttag

SEQ ID NO: 208049 - DNA, 1263 bp, synthetic construct
  misc_feature 1..1263: note = Description of Artificial Sequence: Synthetic coding sequence
  source 1..1263: mol_type = other DNA
atgaccatggagaagggcatgagcagcggcgagggcctgcccagccgctctagccaagttagtgcgggcaagattacagctaaggagctcgagacaaaacaatcttacaaggagaaaaggggcggatttgtgctggtgcacgctggcgctggttatcattccgaatccaaggcaaaagagtacaaacacgtgtgcaaacgggcctgccagaaggcaattgaaaagctgcaggcgggggcacttgccacagacgccgtcactgcggcactcgtagagttggaggactctccctttacaaatgctggcatgggctccaatctgaatctgctcggtgaaattgaatgcgacgcatccatcatggacggtaaatcgctcaattttggggcggtgggcgctctgtctggaattaagaatcctgtgtccgtggccaatcgtctgttatgcgaggggcagaaaggtaaactgtctgccggtcgcatccccccatgtttcctcgtaggagagggcgcctaccggtgggcagtagatcacggaatcccgtcttgtcctccaaacattatgacgacaagattttcactcgcagctttcaaaagaaacaaacgcaagctggagctggctgagagggtggacactgactttatgcaactcaaaaagagaagacagagctcagagaaggagaacgactctggaacactggataccgtgggcgcagttgtggttgatcacgagggcaacgttgccgcagcggtttcctccggggggttagcactaaagcaccccggaagggtcggtcaggccgctctgtatggttgtggatgttgggccgagaacactggtgctcacaacccatattccaccgcagtctcaacatcggggtgtggggagcatctagtgcgaacgattctcgcacgtgaatgtagccacgctctgcaggccgaggacgcacatcaagccctcctggagaccatgcagaataagtttatcagttccccttttctcgcttctgaggatggcgtgctcgggggagtgatagtgctgagatcgtgtcggtgttctgcagaacctgacagttctcagaataagcaaaccctgttggttgagttcttgtggagccacaccaccgagtcgatgtgtgtcggatacatgagtgcccaggacgggaaggcaaagacacacatctcgcgattgcctcctggagctgtggccgggcagagtgtcgccattgaggggggggtgtgccgcttggagtctccggtgaactag

SEQ ID NO: 208050 - DNA, 918 bp, synthetic construct
  misc_feature 1..918: note = Description of Artificial Sequence: Synthetic coding sequence
  source 1..918: mol_type = other DNA
atgaccatggagaagggcatgagcagcggcgagggcctgcccagccggtccagtcaagtttccgccggtaagatcactgcgaaggaactggagactaaacagtcctacaaggagaagaggggggggtttgtactcgttcatgccggcgccggatatcacagcgagtccaaggctaaggaatacaagcacgtctgcaagagggcgtgccagaaagattcacctttcaccaacgccggcatgggctcaaacctgaatctcctgggcgagatcgaatgcgacgcgagcatcatggacggaaagagtcttaactttggagcggtcggagccctgagcgggatcaaaaaccccgtcagcgtggccaaccgattactttgcgagggtcaaaaaggcaaactgagtgcaggccgcatcccgccgtgcttcctggtcggagaaggagcctaccggtgggccgtcgatcatggtatcccatcctgcccacccaatattatgaccacccgcttcagcctagctgccttcaagagaaacaagcggaagctcgagttagccgaacgcgtagatactgatttcatgcagctgaagaaaagacgacagagcagtgagaaagagaatgacagtggcacgctggacaccgttggagccgtggtggttgaccacgaagggaacgtcgccgccgccgtgtcatctggtggcctcgcccttaagcaccctggcagggtcggacaagcggcgctgtacggttgtggatgctgggctgaaaacactggagctcacaacccctatagcacagcagtgtccacctctggatgcggggagcaccttgtaaggacaatcctggccagggaatgtagccatgcgctccaggctgaagacgcccatcaggccctgttagagaccatgcagaacaaattcatctag

SEQ ID NO: 208051 - DNA, 333 bp, synthetic construct
  misc_feature 1..333: note = Description of Artificial Sequence: Synthetic coding sequence
  source 1..333: mol_type = other DNA
tgaaagatcaccgccaaggagctggagaccaagcagagctacaaggaaaaaagaggcggatttgtattagtacatgccggcgccgggtaccactctgagtctaaggccaaggaatataaacacgtttgtaaaagggcctgccagaaagctattgaaaaactacaggcgggggccctggccacagatgctgtgactgccgcattggtagagttagagctcatgtggaagggccagttccaggtgctctgtgtccttacgaatctcttcctggatatcatcaaaaatccgaccaaaacaaagtttaagactattagcaatgttaaagtatattag

SEQ ID NO: 208052 - DNA, 918 bp, synthetic construct
  misc_feature 1..918: note = Description of Artificial Sequence: Synthetic coding sequence
  source 1..918: mol_type = other DNA
atgaccatggagaagggcatgagcagcggcgagggcctgcccagcaggagttctcaagtgagtgcgggaaagataaccgcaaaggagttggaaaccaaacagtcttacaaggagaaaagaggaggattcgtgctcgtgcacgctggcgctggatatcattcggaaagtaaagctaaggaatacaagcatgtgtgtaagcgggcctgccaaaaagactcgcccttcaccaacgcaggaatggggagtaaccttaacctgctcggcgaaatcgaatgcgatgcctcgataatggacggcaagagcttaaatttcggagccgtcggagcattaagtggtatcaaaaaccccgttagcgttgcaaatcgactgctgtgtgagggccagaagggaaaattatctgccggcagaatccctccttgtttcttggtaggcgaaggagcttacaggtgggccgttgaccacggaatccccagctgcccccccaatataatgacaacacgcttctcactggctgcctttaagcgcaacaagcgtaaactcgagcttgccgaaagagtagacactgactttatgcagcttaagaaaagacggcagagctcggaaaaagagaacgactccggcacccttgatacggttggagcagtggtggttgaccacgagggcaatgtggcagctgccgtcagcagtggagggctggccttgaagcaccctggcagggtcggccaggcagctctatatgggtgcgggtgctgggctgagaataccggggcccacaacccgtacagtaccgccgtgagcacttccgggtgcggagaacacctggtcaggactatcctagccagggagtgctcccacgcgttgcaggccgaagacgcacaccaggccctgttagagacaatgcagaacaagttcatctag

SEQ ID NO: 208053 - DNA, 438 bp, synthetic construct
  misc_feature 1..438: note = Description of Artificial Sequence: Synthetic coding sequence
  source 1..438: mol_type = other DNA
atgaccatggagaagggcatgagcagcggcgagggcctgcccagcaggtcttctcaggtttcggccggtaagataactgctaaggagctcgagaccaaacaatcatataaagagaagaggggcggctttgtcttggtccacgctggagctggttaccatagcgagtcaaaggctaaagagtacaaacacgtatgcaaacgggcctgtcagaaagcaatcgaaaaactccaggctggagcactggccacggatgcagtgaccgctgccctagttgaactggaagatgttgaatcaatattatgcgcaccctactggctcgaaaacgtgcatatgctctataaactccgcatgctgactaaaccctgttggagactttgtaagacgagtctctccgtccatctgtcattgcctgttaaaatggcttgcctcgcagagtag

SEQ ID NO: 208054 - DNA, 390 bp, synthetic construct
  misc_feature 1..390: note = Description of Artificial Sequence: Synthetic coding sequence
  source 1..390: mol_type = other DNA
atgaccatggagaagggcatgagcagcggcgagggcctgcccagccggtcctctcaggtatcagcagggaaaatcaccgcaaaagagctggagactaaacagtcgtacaaagaaaaacggggagggttcgtcctggtgcacgcaggcgccgggtaccactctgaatccaaagctaaagaatataagcatgtgtgtaagagggcctgccagaaggcaatcgagaaactgcaggccggagcactagccactgatgctgtgactgccgcactggtcgaattggaagtgtacacacacagttacactagctggagttgcattcaaccaagcatccatgtgctccttgtgaaaaggcaaaggaagtccccactgcctaggatctccactttttag

SEQ ID NO: 208055 - DNA, 1443 bp, synthetic construct
  misc_feature 1..1443: note = Description of Artificial Sequence: Synthetic coding sequence
  source 1..1443: mol_type = other DNA
atgctgctgtgcaccgcccggctggtgggcctgcagctgctgatcagctgttgctgggcgtttgcttgccactcgacggaatcgtctcccgacttcactctccctggcgactatctactggccggtctattcccactccatagcggttgtctccaggtccgccaccgtcccgaggttacgctgtgtgacagaagttgcagctttaatgagcatgggtatcacctgtttcaagccatgcgcctcggtgtggaagaaatcaacaactccactgctctccttcctaacattaccctaggctatcaactctacgatgtgtgctctgactccgcaaacgtgtatgcaaccttgcgagtattaagcctgccaggccaacatcacattgagctgcagggcgacctactgcactatagcccgactgtgctcgccgtgatcggcccggacagcacaaaccgggccgccactactgccgctttactcagtcccttccttgttcccatgatctcctacgctgccagcagcgagaccctgagcgtgaagcgccagtatccttcattcctgaggacaatccctaatgataagtatcaggtcgaaactatggtgctactattgcaaaaatttggatggacgtggatttcactggtcggctcatctgatgactatggacaattaggggttcaggccctggaaaaccaggccacaggacaggggatctgtatagcttttaaggacatcatgccgttcagcgcccaggttggagacgaacgaatgcagtgcctcatgaggcatctggcccaggcaggagcaacagttgttgtggtgttctcctctaggcagctggcgcgggttttctttgaaagcgtcgttctaaccaacctaactggaaaggtatgggtcgcgtccgaagcctgggctctttctcgccatattaccggggtcccagggatccagcggatcgggatggttctaggggttgcgattcagaagagggctgttcccggtctgaaggccttcgaggaggcatatgctagagcagataagaaggctccccgcccatgccacaagggaagctggtgcagtagtaatcagttgtgtagggaatgtcaggcgttcatggctcataccatgccgaagctaaaggctttcagtatgagtagcgcgtataacgcttacagagccgtgtatgctgtggcgcatgggctccaccagcttctcggctgtgcttccggggcctgcagcagaggtcgcgtttatccatggcagacgtctacagacgcttccttagttgggaagaagagcgggcacctgagggaggcacggcccgcatcgcgcgccttatggtgtttttggctgtgcgtgtctactcctttaggttgctgctggcagctgacaagatgttgctgttgttgctgccttggtctgcttgcctgcctgcctggcacctag

SEQ ID NO: 208056 - DNA, 2526 bp, synthetic construct
  misc_feature 1..2526: note = Description of Artificial Sequence: Synthetic coding sequence
  source 1..2526: mol_type = other DNA
atgctgctgtgcaccgcccggctggtgggcctgcagctgctgatctcatgctgttgggcttttgcatgccattccacggagtctagccccgacttcaccctccctggcgattacctgcttgccggcctgtttcctctccactctgggtgtttgcaggtgcgacacaggccagaggtgactttatgtgacagatcctgtagcttcaatgagcatggttatcacctgtttcaggccatgcggctgggcgtagaggaaatcaataattccaccgccttgctccccaatataaccttgggttatcagttatatgatgtctgcagcgactccgcgaatgtctacgctaccctaagagtgctgagccttccaggacagcaccatattgaactgcagggcgatttgcttcactattccccgacagtgctcgcagtgatcgggcctgactccactaatcgtgctgccactacagccgcactcttgagccccttcctggtgcccatgataagttacgctgctagttctgagaccctcagcgtgaagcgacagtacccgtcatttcttcggaccatccctaacgataagtatcaagtggaaacgatggtgcttctgctgcagaaatttggttggacgtggatttctttggttggatcatccgacgactatggtcaacttggggttcaggccctggagaaccaagcaacaggacaaggcatctgcattgcattcaaggatattatgccattttcagcccaagttggggatgaacgtatgcagtgtttgatgcgacatcttgcccaagcgggcgcgacagtggtggtagtgtttagctcacggcagctggccagagtttttttcgaatcagtggtgctcaccaatctcaccgggaaggtctgggtcgcctccgaggcttgggccttaagccgtcacattaccggggtgcctggcattcagcgcatcggaatggtcttgggcgtggcgattcagaagagggcggtaccgggccttaaagccttcgaggaggcgtatgcccgtgctgacaagaaggctcctaggccctgccacaaagggagctggtgcagctctaatcaactttgcagagagtgtcaggcatttatggcccacaccatgcccaagctaaaggcattctctatgtcgtccgcttacaatgcttatagggccgtctatgcagtagctcacggcctacaccaactgcttgggtgtgcttccggcgcatgcagtcgcggcagagtgtatccctggcagctcctggaacagatccacaaggtgcactttttgttgcataaggataccgtcgccttcaacgacaaccgggaccctctttctagctataatatcattgcttgggattggaacggaccaaagtggacgtttacagtcttggggtcctctacctggtcacccgtgcaactcaatattaatgagaccaagattcagtggcacggaaaagataaccaagtccctaagtcagtatgttccagcgactgcctcgagggacaccagagagttgttacgggattccatcattgctgctttgaatgtgtaccttgtggagccggcacattcctcaacaagagtgatctctatcggtgtcagccctgcggtaaggaggagtgggctccagagggctcccaaacatgtttcccacgaactgtcgtgttccttgccctgagggagcacacctcgtgggtgttgctcgctgcgaatactttgcttcttcttctgcttcttggcactgccggtctattcgcctggcatctggacacaccggtggtaagatcggccggagggcgcttgtgttttcttatgcttggctcccttgccgcaggctccggatctctgtacggcttctttggcgagccaacccgccccgcgtgtcttttgcgccaagctctcttcgcgctgggcttcacaatcttcctttcatgcttgacagtaaggtctttccagctgattataatatttaagttttcaactaaagtccccactttctaccacgcatgggttcagaatcacggcgctgggctgttcgtgatgatttcgagcgccgcccaacttctaatctgcctcacatggctcgttgtgtggacgcctttaccagcccgtgaatatcagcggttccctcacctggtcatgcttgaatgtaccgagaccaatagtctgggcttcatactggccttcctctacaatggattgttgtctatctccgcttttgcatgtagctatctgggaaaggacttgcctgaaaactataatgaagctaagtgcgtgaccttctcccttttgtttaacttcgtatcatggatagctttcttcaccaccgcaagcgtgtatgacggtaagtatctgccggcagcaaatatgatggcagggctgtccagcctcagctccggattcggggggtactttttgcccaaatgttatgtcatcctgtgccgccccgacctcaatagcaccgagcacttccaggcttctatccaggactatactaggcgttgcggttctacatag

SEQ ID NO: 208057 - DNA, 1764 bp, synthetic construct
  misc_feature 1..1764: note = Description of Artificial Sequence: Synthetic coding sequence
  source 1..1764: mol_type = other DNA
atgctgctgtgcaccgcccggctggtgggcctgcagctgctgatctcgtgctgttgggctttcgcatgtcactctaccgagagctctcctgatttcacattgcctggtgactacctgctcgccggactgttcccccttcactctggatgccttcaggtgcgtcaccgcccggaagtgacactgtgcgatcggtcatgctcttttaatgaacacggctatcatctgtttcaggctatgcgccttggggtcgaggagatcaacaacagtactgccttgctgcctaacatcacactgggatatcagctctacgatgtgtgcagtgactcagctaacgtgtacgccactctccgcgtattgtccctgcctggacaacaccacattgaactacagggcgatttactgcattattcaccaaccgtgctcgcagttataggaccggattccacaaatcgcgccgcaacaaccgccgccctgttgagtccttttctggttccaatgctgttagaacagattcataaagtgcattttttattgcacaaagatactgtcgcatttaatgacaatagggacccgctatcctcgtacaatataatcgcttgggattggaacggacctaaatggacctttactgtgctggggtccagtacgtggagccctgtgcagctgaatataaacgaaacaaagattcagtggcacgggaaggataatcaggttcccaaatccgtgtgctcctctgattgcctggaaggccatcagcgggtggtgacaggatttcaccattgctgcttcgagtgcgtgccctgcggagcgggcaccttcctgaataagtcggacctgtaccggtgtcagccatgtgggaaagaggagtgggcaccagagggttcccaaacatgcttccctaggaccgtggttttcctggcacttcgggagcatacctcatgggtactgcttgcagccaataccttgctactcttgcttctcctcggtacagccggactcttcgcttggcacctggataccccagtcgtgcgttctgccggcggaagattgtgtttcctcatgctggggagcctcgcagcaggatctggttcactctacgggttcttcggtgagcccaccagacccgcctgtctgctcagacaggccctgtttgccctaggatttacaatctttctgagctgccttacggtgagatcctttcagttaatcattatctttaagttctcaaccaaagtaccgacgttttaccacgcttgggtccagaaccatggggccggactctttgttatgattagcagtgcagcccagctcctgatctgcctgacctggcttgtagtctggacgcctctccccgctagagaataccaaaggttccctcacctagtaatgctggagtgtactgaaaccaattcgctcggcttcatattggcatttctttataatggcctgctctcgatttcagcattcgcatgctcctaccttgggaaggatctgcccgagaactataacgaggcaaagtgcgtgactttctccctgctgttcaactttgttagctggatagccttcttcacgactgcatctgtgtacgatggcaagtacctcccggctgcaaatatgatggccggactgtcatctctttcaagcggcttcggcggttactttctgcccaaatgttacgtgatcctgtgcaggcccgacttgaattctacggagcacttccaagcaagcatccaggactacaccagaaggtgcggttccacgtag

SEQ ID NO: 208058 - DNA, 921 bp, synthetic construct
  misc_feature 1..921: note = Description of Artificial Sequence: Synthetic coding sequence
  source 1..921: mol_type = other DNA
atgcggctgggcgtggaggagatcaacaacagcaccgccctgctgcctaatattactcttggctatcagctctacgatgtgtgtagtgattccgcgaacgtatacgccaccctgagggtgttgagtctgccgggtcagcaccatatcgaactgcagggagatttgctgcactattctcccacagtgctggcggtgatcggaccagacagcactaatagagcggctaccaccgcagctctgctctctccctttctcgtgcccatgctgctggaacaaattcacaaggttcactttcttctgcataaggacactgtagcattcaacgacaatagagacccgctgagcagttataatataatcgcatgggactggaacggacctaagtggacatttaccgtgttgggctcttctacctggtcacccgtacaattaaatatcaacgaaactaaaatacagtggcacgggaaggataaccaggtccctaagtcagtctgcagctccgactgcctggaaggacaccaacgcgtggtcacaggatttcaccactgctgctttgagtgcgtgccctgtggagccggcacatttttgaataaaagcgatctgtacagatgtcagccgtgtggcaaagaagagtgggcacccgaggggtcccagacctgcttcccacgaactgttgtttttctcgccctgagagaacacacgagctgggtgttgttggctgctaacacgttgttgctgctgctacttctggggacagctggattgttcgcatggcatctcgacactcctgtagtccgttccgctgggggtagattatgcttcttgatgcttggcagtctggccgcggggagtggctcgctgtacgggttttttggggagccctctctcccactggtgtcccccagcagctgtcctgcttag

SEQ ID NO: 208059 - DNA, 2520 bp, synthetic construct
  misc_feature 1..2520: note = Description of Artificial Sequence: Synthetic coding sequence
  source 1..2520: mol_type = other DNA
atgggcccccgggccaagaccatcagcagcctgttcttcctgctgtgggttcttgcagaaccagcggaaaactcggacttctatctccccggggactatctgctgggaggcctcttcagcctccacgctaatatgaaaggaattgtgcatttgaattttttgcaggtgcccatgtgcaaggagtatgaggtgaaagtgatcgggtacaatctgatgcaagccatgcgctttgctgtggaggaaattaataatgattcttcgttgctaccaggcgtgctcctggggtacgagattgtggacgtctgctatatcagtaacaacgtgcagccggttctgtacttcctcgctcacgaggacaatttattgccaatccaggaagactacagcaactatatctctcgagttgtggctgtaataggacctgataactccgagagcgtcatgacagtggccaattttctgtcactctttcttttgcctcagatcacctatagtgcaatatccgacgagctgcgggacaaagtgcgttttccagctttacttcggacaactccttctgctgaccatcatatcgaagccatggttcagctgatgcttcattttaggtggaactggattattgtactggttagctccgacacatacggaagggataacgggcagctcctgggcgagcgcgtagcaagaagagacatctgtattgcctttcaggagacccttcctacgctgcaaccaaaccagaacatgactagcgaggaacggcagcggttggtgacaatcgtggataagctccagcagtccaccgctagggtggtagtcgtgttttcgccagaccttactctgtaccacttttttaacgaggtactccggcagaacttcactggcgccgtttggatcgcttctgaatcttgggccattgatcccgtacttcacaacctgactgaacttaggcacttagggacatttctcggcatcacgattcagtccgtgccgattcctggcttctctgaattccgggagtgggggcctcaggccggccctcctcccctatctcgcacctcacaaagctacacatgtaatcaggagtgtgacaattgcctgaacgctacattgtcctttaataccattttaaggctgtccggggaacgtgtggtgtacagcgtttacagcgccgtatacgcggtggcccacgccctccattctctcctagggtgcgacaagagtacttgcactaagcgcgtggtttacccatggcagttgttggaagaaatttggaaagttaatttcacactgctagaccaccaaatctttttcgatccgcagggtgacgttgccctccacctcgagattgtgcagtggcagtgggaccggtcccaaaatccattccagagtgtcgctagttactatcctctgcagaggcagctgaaaaatatacaggatatctcatggcacacaatcaataatacaatccctatgagcatgtgttcaaagaggtgccagtctggacagaagaaaaaacctgtcgggattcacgtgtgttgcttcgagtgcatcgattgcctgcctggtacgttcctgaaccacactgaagacgaatacgaatgccaggcctgtcctaataacgagtggagctaccagagtgaaacctcatgttttaaacgccagctggtgttcctcgaatggcatgaggctcccaccatcgcggtagctctgttagcagccttaggattcctgagcactctcgccatcctggtcatcttttggaggcactttcagactccaattgtgaggtccgccggcggacccatgtgtttcctgatgcttacactcttattggtggcatacatggtggtgccggtctatgttggaccccccaaagtgagcacctgcctttgcaggcaggctctttttccactgtgcttcactatctgcatctcatgtattgcagtgaggtcattccaaattgtctgtgccttcaagatggctagtcggtttccccgggcatactcctattgggtgcgataccagggtccctacgtgagcatggcattcatcacagtgttaaaaatggtgattgtggtgattggcatgcttgctacggggctgagtcctaccactcgaaccgacccggacgaccccaagatcacaatcgtcagttgtaatcccaattaccgaaacagcctgctgtttaacacatccctggacctgcttctctcggtggtggggttttcatttgcctacatgggaaaggagcttcctactaactataacgaagctaaattcattacactatctatgaccttttacttcacatcttccgtgtccctatgcacattcatgtccgcctattccggcgtgcttgtgaccattgtcgacctgctggttacagtgctgaatcttctggcaataagcctgggttattttgggccgaagtgctacatgatactgttttatcctgagcgcaacacacctgcgtacttcaacagcatgatccagggatataccatgaggcgggactag

SEQ ID NO: 208060 - DNA, 2559 bp, synthetic construct
  misc_feature 1..2559: note = Description of Artificial Sequence: Synthetic coding sequence
  source 1..2559: mol_type = other DNA
atgctgggccccgccgtgctgggcctgagcctgtgggccctgctgcatcccgggacaggagcacctctgtgtctgtcacagcagctgcggatgaagggtgattatgtcttgggggggctgttccctctcggcgaagctgaagaggccggcctgagatctaggactcgccccagtagccctgtatgcactcggttctctagtaatggcctgctgtgggcactcgcaatgaaaatggccgtcgaagaaattaataacaaatccgatctactcccagggctcaggctcggatatgatctgtttgatacctgtagcgagccggtggtggccatgaagcctagccttatgtttctggcaaaagccgggagccgggacattgcagcttattgcaattatacccaatatcagcccagggtcctcgccgtgatcggcccccactcaagcgaactggccatggtgactggaaaattcttttctttttttctaatgcctcaggtttcttacggggcctccatggagcttctgagcgccagggaaacctttcctagctttttccggaccgtgccctccgatagggtgcaactcaccgctgctgccgagcttctccaggaattcggctggaactgggtagcggctctcggaagcgatgatgagtatggccgacaggggctgagcatcttctcggctctcgctgcagccaggggcatctgcatcgcgcatgaaggactggtccctctgcctagagccgacgactcccgacttggcaaggttcaagacgtgctccatcaggtcaaccaatcttcagtgcaagtcgtgctcctcttcgcttctgtccacgccgcccacgccctgttcaattactccatttctagccgtctgtcccccaaagtctgggtggcctccgaagcttggctcacaagtgacctggtcatggggctgccagggatggcacagatgggaaccgtcttaggatttctgcagagaggagcccagcttcacgagttccctcagtacgttaagacccacctcgccctggcaactgaccccgctttttgctcggctctgggagaacgggaacagggactcgaagaggacgtcgtcgggcaacgctgccctcagtgtgattgcattaccttacaaaacgtgagtgcggggctgaaccaccatcaaactttttctgtctatgcagctgtttattccgtggcccaggcgctccacaacactcttcagtgcaacgcctctggttgccctgcgcaagaccccgtgaaaccgtggcagctgcttgaaaacatgtacaatctgacttttcacgttggggggctgcccctcagatttgactcctctggcaacgtcgacatggagtatgacctgaagctgtgggtgtggcagggatctgtaccccgcttgcacgatgtcgggagatttaatggatcactgagaacagaacgcctgaagatcaggtggcacacatcggataatcaaaagcccgtctctcggtgcagccgtcagtgtcaggaagggcaggtgcggcgagtaaagggatttcatagctgttgttatgactgcgtagattgcgaagctgggagttatcgccaaaatccagacgacattgcctgcaccttctgtggccaggacgagtggtccccagagaggtctacccgatgtttcaggaggagatcaaggtttctcgcctggggggaaccagctgttcttctgttactgctgctgttgtctttggccctcgggctggtactcgctgccttgggattgttcgtccaccatcgcgatagccccttggtacaggcctccgggggccctctcgcttgcttcggcctagtgtgcctggggctcgtttgcctgagcgtgctgctctttcctggacagccttcccccgctcggtgtctggctcagcagcccctctctcatctccctctgactgggtgcctttcaaccctcttcctacaggctgcagagatcttcgttgagtcggagctgcctctctcttgggctgataggctaagcggctgcctccgcggaccctgggcctggctagtggttttacttgcaatgcttgtggaggtagctctttgcacctggtatcttgtggctttccctccagaggtcgtgactgattggcatatgctcccaactgaggcgctggtccattgccgaaccagatcatgggtttctttcggacttgctcatgctaccaatgctacattggcattcttgtgttttctgggcacctttctcgtcagatctcagcctggctgttacaatcgtgcccggggcctgaccttcgccatgctcgcttattttatcacatgggtgtctttcgtacccctactagcaaacgtgcaagtggtgctccggccggccgtacagatgggagccctgctgctgtgtgttctcggcatcctggccgcctttcacctgccaaggtgctacctactaatgagacaaccagggttgaatacacccgagttctttttggggggtgggccaggtgacgctcagggtcagaacgacggcaatactggaaaccagggaaaacatgaatag

SEQ ID NO: 208061 - DNA, 876 bp, synthetic construct
  misc_feature 1..876: note = Description of Artificial Sequence: Synthetic coding sequence
  source 1..876: mol_type = other DNA
atgatccccatccagctgaccgtgttcttcatgatcatctacgtgctcgagagcctcacgatcattgtgcagtcctctcttatcgtcgctgtgctgggacgggaatggctacaggtgaggcggctgatgcccgttgacatgattctgatctcactaggcataagccgcttctgtctacagtgggcttccatgttgaataatttctgctcgtacttcaacctgaactatgtgctgtgcaacctgacgatcacatgggagttttttaatattctgaccttctggttaaactccctgctaactgtgttctactgcatcaaggtatcatcgttcacccatcacatttttttgtggttgcgctggagaatacttagactattcccctggatactgttaggctctttgatgataacttgcgtcacaatcattcctagtgcaataggcaactacatccaaattcagctgctgaccatggagcacctgccccggaattctacagttacagataaacttgagaacttccatcagtatcaatttcaggctcacaccgttgctctcgtcattccgtttatcctctttttggcatctactatttttttaatggccagcctcactaagcagattcagcaccacagtacaggacattgtaacccttcaatgaaggcccgctttaccgctttgcggtctctggctgtgcttttcattgtgttcacttcatattttctcacaatcctgatcaccattatagggacacttttcgacaagagatgctggttgtgggtctgggaggccttcgtctatgctttcatcttgatgcactccacctccctaatgctgtccagcccaaccctgaagcgcatacttaaagggaaatgttag

SEQ ID NO: 208062 - DNA, 900 bp, synthetic construct
  misc_feature 1..900: note = Description of Artificial Sequence: Synthetic coding sequence
  source 1..900: mol_type = other DNA
atgatgtgcttcctgctgatcatcagcagcatcctggtggtgttcgctttcgtcctcggtaacgtggccaacggcttcattgctctggtcaacgtaattgattgggtgaatacccggaagatctcctccgccgaacaaatcttgactgctctcgtggtctctagaatcgggcttctctgggtcatgttgtttctgtggtacgccaccgtgtttaactccgctctgtacggcctcgaagtcaggatcgtggccagcaacgcttgggcagtcactaatcactttagcatgtggctcgctgcctccctgagcattttctgtttacttaagatcgctaacttctctaaccttataagcctgcacttgaagaagagaataaagagcgtggttctcgtgattctgctggggccactggtatttttgatatgtaatctggcggtcatcacaatggacgaacgggtctggaccaaggaatacgaaggaaacgtgacgtggaagataaaactccggaatgccattcacctgtcctccttaaccgtgactaccttggcaaacctcatcccattcacactgagcctcatctgcttcctgttactcatctgtagtctgtgtaaacatttaaagaaaatgcgattacacagcaaagggtctcaggacccaagcacaaaagtgcatataaaggctctccagaccgtgactagcttcctgatgttgttcgctatctattttctctgcattataacttccacttggaatctgagaacacagcagagcaagttggtgctcctgctgtgtcagactgtggcgatcatgtatccgtcgtttcactcttttatattaatcatggggagccgaaagctcaaacagactttcctgtctgtattgtggcagatgacccgctag

SEQ ID NO: 208063 - DNA, 930 bp, synthetic construct
  misc_feature 1..930: note = Description of Artificial Sequence: Synthetic coding sequence
  source 1..930: mol_type = other DNA
atgatgagcttcctgcacatcgtgttcagcatcctggtggtggtggcatttattctagggaatttcgctaatggattcatcgccctgattaattttatcgcatgggtcaaacggcagaaaataagcagtgcggaccagatcattgccgccttagccgtgagccgcgttggacttttgtgggtgatcctgctccactggtactctacagtcctcaatccaacctcatctaacctgaaagtcataatttttataagtaacgcctgggctgtgactaaccattttagtatctggctggctacaagtctttccattttttatctgttaaagattgtgaacttcagccgtctgattttccaccatctcaaacgcaaggcaaaaagcgtggtgttggtaattgtgctgggaagcctcttcttcctggtctgccacctagtgatgaagcacacatacattaatgtgtggacggaagagtgcgagggaaacgttacctggaagatcaaactgcgaaatgctatgcacctaagcaatctcacggtggctatgcttgctaacctcatcccctttaccctgaccttaatctcattcctgcttctgatctacagcctctgcaagcatttgaagaagatgcagctccatggcaaaggtagccaggatcccagtactaagattcacatcaaagcactgcagacggtgaccagctttctgatccttctggctatttacttcttgtgtctcataatctcattttggaatttcaaaatgagacctaaggaaattgtgctgatgctctgccaagcatttggtatcatttacccctccttccacagtttcatattgatttggggcaacaagaccctgaagcagacttttctttccgtgctttggcaggtgacctgttgggccaagggacagaatcaatcaacaccatag

SEQ ID NO: 208064 - DNA, 951 bp, synthetic construct
  misc_feature 1..951: note = Description of Artificial Sequence: Synthetic coding sequence
  source 1..951: mol_type = other DNA
atgatgggcctgaccgagggcgtgttcctgatcctgagcggcacccagtttactttgggcattttggtgaactgttttatcgagctagtgaacggcagctcttggtttaagactaagcgcatgagcctctccgactttattattacaactctggcccttctgcgtattattctgctatgcatcatcttgacagatagttttctgatagaattcagccccaacacacacgactctggcatcatcatgcagattatcgacgtttcgtggacattcaccaatcatttaagtatctggcttgctacatgcctgggagtgctctactgccttaaaattgcgtcattcagtcatcctacattcctctggctgaaatggcgggtttctagggttatggtatggatgctgctgggagctttgctgttgtcttgcggatccacggcctccctgataaacgaatttaaactatactccgtctttagaggcattgaagccacaagaaacgtgacggagcatttcagaaaaaagcggagcgagtattatttaattcatgtgctgggaacactgtggtacctgcctcctttgattgtcagcctggctagctattcactgttaattttcagcttagggcggcatacacgccaaatgctgcagaacgggacatcttcgcgggacccaaccaccgaggcacacaagagggcaattaggattattctaagcttttttttcctgtttttgctgtatttcttagctttcctgatcgccagctttggcaatttcttgcctaagactaagatggccaagatgataggggaagtgatgactatgttctacccggccggccattcgttcattctgatcctggggaactcaaagctgaagcagactttcgtggtgatgttgcggtgcgagagtggccacctcaaacctgggagtaagggaccaattttctcttag

SEQ ID NO: 208065 - DNA, 960 bp, synthetic construct
  misc_feature 1..960: note = Description of Artificial Sequence: Synthetic coding sequence
  source 1..960: mol_type = other DNA
atgatcaccttcctgcccatcatcttcagcatcctgatcgtggtgatatttgtcatcggcaatttcgccaatggcttcatcgcgctggttaactcaatcgaatgggtgaagaggcagaaaatttccttcgtggatcagatacttaccgctctcgccgtgagcagggttggactcctgtgggtgctgctcctccattggtatgccactcaactgaatcccgccttttacagcgtcgaggtacgaatcacggcctacaacgtgtgggcggtgaccaaccattttagctcttggctggctacgtccttgagcatgttctacctgctgagaatcgccaactttagcaatctcatattcctacgaatcaagcgtcgcgtgaagagcgtggtactcgtaatcctgctcggaccactgctatttctggtgtgccacctgtttgtgatcaatatggatgaaactgtttggactaaggaatacgaggggaacgtgacctggaaaatcaaattacgaagtgctatgtatcattccaacatgactcttacaatgcttgccaacttcgtccctctgacgctcacgcttatctccttcctgttgctaatctgcagtctctgtaaacacctgaaaaagatgcagctgcatggcaagggaagccaagacccttctacaaaggtacacattaaggctcttcagactgttaccagctttctgcttttgtgcgctatctactttctgagcatgataatctccgtctgcaatttcggaagacttgaaaaacaacctgtcttcatgttttgccaagcaatcatcttcagctacccatccacacatccttttatcctcattctcggcaacaagaagctgaaacagatctttctgtctgtcttacgtcatgtccggtattgggtcaaagatagaagcctcagactacatcgattcacaagaggcgctctgtgtgtgttttag

SEQ ID NO: 208066 - DNA, 930 bp, synthetic construct
  misc_feature 1..930: note = Description of Artificial Sequence: Synthetic coding sequence
  source 1..930: mol_type = other DNA
atgaccaccttcatccccatcatcttcagcagcgtggtggtggtgctatttgtgatcggcaattttgcaaacggatttatcgccctggttaattccattgaaagggttaagagacagaaaatctcttttgcagaccagattttgaccgccctagctgtgtctagggtaggactgctgtgggtgctgctgttgaactggtactccactgtttttaatcccgccttctacagtgtggaagtgagaactacggcttacaatgtgtgggcggtgactggccacttctccaattggctcgccacttccctttccatcttttaccttctgaaaatagctaacttctctaatctcattttcctccacctcaaaagaagagtgaaatcggtcattctcgtaatgctcctcggaccattgctgttcctggcgtgtcagttattcgtgatcaatatgaaggagatcgtgcgcaccaaggaatatgaaggaaacctgacatggaaaattaagctgagatctgccgtctacttgagcgatgcaaccgtgactactctcgggaatcttgtcccatttactttgactctattatgcttcctgttgctgatttgtagcctttgtaagcatcttaaaaaaatgcagctccacggaaaaggaagtcaggatccctcaaccaaagttcatattaaggcacttcagaccgtgatcttttttctccttctttgtgctgtgtactttttgtcgattatgatcagcgtgtggagttttgggtcattagaaaataagcctgtcttcatgttctgcaaggccatacggttctcctatcctagcatccatcccttcattttgatatggggcaataaaaagttgaaacagacctttctgtctgtgctacggcaggttaggtattgggtgaagggtgaaaagccgtccagtccctag

SEQ ID NO: 208067 - DNA, 1002 bp, synthetic construct
  misc_feature 1..1002: note = Description of Artificial Sequence: Synthetic coding sequence
  source 1..1002: mol_type = other DNA
atgctgaccctgacccggatccggaccgtgagctacgaggtgcggagcacattcctttttatctccgttctggaatttgcagttggcttcctgacaaacgcgtttgtgtttcttgtcaacttttgggatgtcgtgaagcgccaggctctctcaaactccgactgcgtgctactttgcctcagtatttctcgtctctttctccacggcctgctgttcctctctgctatccagctgactcactttcaaaaactgagcgaacccctgaatcattcataccaggccattattatgctctggatgattgccaaccaggctaatctgtggttggccgcgtgtctatccttgctgtactgtagcaagctcatcagattttctcacacgtttcttatttgcttggcctcatgggtgtcccggaagattagccagatgctgcttgggattatcctctgctcttgtatatgtactgtcctttgtgtttggtgttttttctctcgtccccactttacggtgacgaccgtcctgtttatgaacaataatactaggctgaactggcagataaaggacctgaacctcttctactcgtttttgttctgttatctttggagcgttccccctttccttctcttcctggttagttccgggatgctgacagtgtctctgggacgccatatgagaacaatgaaggtatacacacgaaacagcagggatccatcactggaggcgcacatcaaggcactcaaatcactggttagctttttctgcttcttcgttatttcctcatgcgctgctttcatcagtgtccctcttctcatcctgtggagagataagattggagtaatggtctgcgtgggcataatggccgcctgtcctagtgggcacgccgcaattctcatctcagggaacgctaaactgaggcgagcagttatgacaatccttctttgggcccagtccagtctaaaggtgagggccgaccacaaggctgatagtcggaccttatgctag

SEQ ID NO: 208068 - DNA, 900 bp, synthetic construct
  misc_feature 1..900: note = Description of Artificial Sequence: Synthetic coding sequence
  source 1..900: mol_type = other DNA
atgctgcggctgttctacttcagcgccatcatcgccagcgtgatcctaaattttgtcgggatcattatgaacctgttcatcacagtggtgaactgtaagacatgggtaaaaagtcacagaatcagctcatccgaccgcattctgttcagtctagggattactaggttcctcatgctggggctgttcctggtgaataccatttattttgtctcttccaacaccgagcgctccgtgtatctatctgccttttttgtgctttgtttcatgttcctggacagctcttctgtgtggtttgtgaccctgctcaatattctgtactgcgtcaagataaccaacttccagcattcagtgttcctgctactgaaaaggaacattagtccgaagattccaaggcttctgctggcctgcgtgctgatatccgcatttaccacttgcctgtacataacgctcagccaggcgtccccttttcccgaacttgtgacgactcgaaacaacacctcatttaacatctcggagggtattttgagcctggtggtaagtctcgttttgtcctcttcactacaattcataatcaacgtaacatccgcaagcctactgatccacagcctgagacgccatatccagaaaatgcagaagaatgccaccggtttctggaatccacagactgaggctcacgtaggcgccatgaaactgatggtttactttcttattctctacataccgtatagtgtagctactcttgtgcagtacctgccgttttacgctggaatggatatgggtaccaaatcaatctgtcttatcttcgctaccctatactcaccaggccatagcgtgctcattataatcactcatcccaaactcaagaccacagcaaagaagatcctatgtttcaagaaatag

SEQ ID NO: 208069 - DNA, 972 bp, synthetic construct
  misc_feature 1..972: note = Description of Artificial Sequence: Synthetic coding sequence
  source 1..972: mol_type = other DNA
atggccaccgtgaacaccgacgccaccgacaaggacatcagcaagttcaaggtgaccttcacgctggtggtttcaggaatagagtgcatcacaggaatcttagggtcaggctttattacagcaatctatggagccgagtgggctcgcggcaaaaccctacccacgggcgaccggatcatgctcatgcttagcttctcacgactgctcctccagatatggatgatgttggagaacattttcagtcttctgttccgcattgtatacaaccaaaatagtgtttacatactttttaaagtcataaccgtcttccttaaccattcaaacttatggtttgccgcttggctgaaggtattttactgtctcaggatcgcaaatttcaaccaccccttgttcttcctgatgaaacggaagattatcgtcctgatgccgtggctgctcaggctctccgtcctggtatctcttagtttctcttttcccctgagccgggacgtgtttaatgtatacgttaactcctccatcccgattccatcctctaactctacggaaaaaaagtacttttcagaaacaaacatggtgaatctagtgtttttctacaacatgggcatcttcgtccctctgattatgttcattctggcggccactctgcttatcctgtcgttgaaaagacatacactgcatatgggctccaatgctactggctcaagggacccgagtatgaaggctcatattggggccataaaagctacgagctattttctcatactttatattttcaacgctatagccttatttctctcgacctcaaacatcttcgacacctattcaagttggaatattctctgtaaaattattatggcagcctacccggcgggccattcggtccagttgatactcggcaacccgggactgcgccgagcttggaaacggtttcagcaccaggtgccattgtatctcaaaggccagacactgtag

SEQ ID NO: 208070 - DNA, 924 bp, synthetic construct
  misc_feature 1..924: note = Description of Artificial Sequence: Synthetic coding sequence
  source 1..924: mol_type = other DNA
atgcaggccgccctgaccgccttcttcgtgctgctgttcagcctgctgtctctgctgggaatcgcagcgaacgggttcatcgtacttgtgctcggtagagagtggcttcgttatgggcggctgttgccactagatatgattctgatttcactgggggccagtcgtttctgtcttcagcttgtcggaacagtgcataatttctattacagcgcccagaaggtcgagtatagcggtggacttggccgccagttctttcacctgcactggcacttcctcaatagcgcgactttctggttttgctcttggctatcagttctattctgtgtgaagatcgccaatatcacacacagtaccttcctttggctcaaatggagatttccaggatgggtcccatggctgttgttgggttccgtactaatatcttttattattacactgctctttttttgggtcaattatccggtgtatcaagaattcctgatcagaaaattctcggggaacatgacctacaaatggaatacccgaatcgaaacttattactttccttctctcaagctggtgatttggagtatcccattctcagtgttcctggtaagcataatgctgctgatcaattctctgcggcggcatactcagagaatgcaacacaatggtcactctctgcaggatcctagcacgcaggcacacacacgagcgctgaagtctctgatctccttcctgattttgtatgcactttctttcctgagcctaataatcgatgccgctaagtttattagtatgcagaacgatttttactggccgtggcaaatcgccgtgtatctgtgtatcagtgtgcacccctttattctgatctttagcaatctgaagttacgatctgtgttcagtcagctcctgcttcttgcacgcggtttctgggtagcctag

SEQ ID NO: 208071 - DNA, 945 bp, synthetic construct
  misc_feature 1..945: note = Description of Artificial Sequence: Synthetic coding sequence
  source 1..945: mol_type = other DNA
atggccaccgagctggacaagatcttcctgatcctggccatcgccgagtttatcattagtatgttaggcaatgtcttcattggactggtgaactgttccgagggcattaagaaccagaaagtcttctccgctgatttcattcttacttgcctggcaatctcaacgatcggccaactgttagtgatcctgtttgactcttttctcgttggtctggcctctcacctgtacaccacgtataggctgggcaagactgtgatcatgctttggcacatgaccaaccacttaactacttggcttgcgacatgcctgtccatcttttatttctttaaaattgcccatttcccacactcactgttcttatggttgcgctggcggatgaacggcatgattgtgatgctcctcatcctgtcactttttctgctgattttcgactccttagtgttggagatcttcatcgatattagtctgaacattatagacaagtctaatcttactctttacctcgacgagtcaaaaacattgtatgataaactcagcatcctcaagacgctactctctttgactagctttatccccttcagcctttttctgacaagtctcttattccttttcctatcattagtgagacacacacggaatttgaagctaagttcacttggatctcgggatagttctaccgaagcgcacagacgggccatgaagatggttatgtcgttcctatttctcttcatcgtgcacttcttttctctgcaagtggctaacggaattttttttatgctgtggaacaataaatacatcaaatttgtgatgttggctctgaacgctttccccagttgtcactccttcattcttattcttggcaactctaaactaaggcagactgcagttcgtctgctgtggcatctgcgaaattacacaaaaacccctaacgccctgcccctatag

SEQ ID NO: 208072 - DNA, 930 bp, synthetic construct
  misc_feature 1..930: note = Description of Artificial Sequence: Synthetic coding sequence
  source 1..930: mol_type = other DNA
atgatcaccttcctgcccatcatcttcagcagcctggtggtggtgaccttcgtcattggcaactttgccaatggatttatcgctcttgttaatagtattgaatggtttaaaaggcagaaaatctctttcgctgaccagatcttgaccgccctggccgtttcccgggtggggctactgtgggtgctcttattgaactggtactcaacagtacttaatccagctttcaattcggtggaagtgcggacaactgcctacaatatctgggccgtgattaatcatttttctaactggcttgccacgaccctgagcatcttctacctactgaaaatcgctaacttctcaaattttatctttctccatctcaagaggcgtgtgaagtctgtaatcttagtgatgctcctaggcccccttctttttttggcatgccacttgttcgttattaacatgaacgaaatcgtcaggactaaggagttcgaggggaacatgacgtggaaaatcaagctgaaatcggctatgtactttagcaacatgacagtgaccatggtggccaatctggtcccattcacgctgacccttctcagcttcatgttattgatatgcagcttatgtaagcacctgaagaagatgcagctccatggaaaaggcagccaagatccttcgacaaaggtgcacatcaaggccctccagactgtgataagcttcttactactctgtgctatctacttcttatccattatgatcagcgtgtggagcttcgggtctctggaaaataagccagtttttatgttctgtaaggccatccgcttttcctatccatccatccatccgttcattctgatctggggaaacaagaaactgaagcagacgtttctcagcgttttctggcagatgcggtactgggtcaaaggcgaaaagacctccagcccctag

SEQ ID NO: 208073 - DNA, 930 bp, synthetic construct
  misc_feature 1..930: note = Description of Artificial Sequence: Synthetic coding sequence
  source 1..930: mol_type = other DNA
atgatcaccttcctgcccatcatcttcagcatcctgatcgtggtgacgttcgtgattgggaacttcgctaacggatttattgccctcgtgaattcaatcgaatggtttaagcggcagaagatatccttcgctgatcaaatcttgacagcactcgccgtgtctcgagtcggcctgctgtgggtgttggttttgaactggtacgccacagaactgaacccagcatttaactcaatagaagtcaggatcactgcgtacaacgtgtgggcggtgatcaatcacttcagcaactggctggcaacttctctgtcaatcttctatctgcttaaaatcgcaaattttagcaacctaatcttccttcatctcaagagaagagtcaaaagcgtcgtgctcgtgattttgctggggccactgctctttctggtctgtcatctgtttgtcattaatatgaaccaaatcatctggaccaaggagtacgagggaaacatgacctggaagattaagcttagaagcgctatgtatctgtcaaacaccacggtcactattttagccaaccttgttccttttactctaaccctgatatcctttctgctcctcatatgttcgttgtgtaaacatttaaaaaagatgcagctgcatggcaagggttctcaggatccaagcatgaaagttcacattaaagcgctgcagacagtgacgtcatttttactactttgcgccatatatttcctaagtatcatcatgtcagtctggtctttcgagtccttggagaacaaacctgtatttatgttctgcgaggccatcgcgtttagctacccgtccacccacccctttattctgatatggggtaataaaaaactaaaacagacttttttgtcggtattgtggcacgtccgatattgggtgaagggggaaaaaccgagcagctcttag

SEQ ID NO: 208074 - DNA, 900 bp, synthetic construct
  misc_feature 1..900: note = Description of Artificial Sequence: Synthetic coding sequence
  source 1..900: mol_type = other DNA
atgctgagcgccggcctgggcctgctgatgctggtggccgtggtggagtttttaataggcctgatcggcaacggatctctggtcgtgtggagcttccgagagtggatccgtaagtttaactggagctcttacaatttgatcattctgggcctggccggttgtcgcttcctactgcaatggttaattatacttgacctttccttgttccctctgtttcagtctagtaggtggttgcggtacctttcaatcttttgggtcctcgtatcccaagcttccctgtggttcgcaactttcctctcagtcttttattgcaagaagattaccacatttgataggcctgcatacttatggctcaagcagcgggcctataatctttccctgtggtgcctattgggctatttcatcattaaccttctactcactgtccaaatcggattgacattctaccatcctccacagggaaactcctcgatccggtaccctttcgaaagctggcaatatctgtatgcttttcagctgaattctggctcttatctgccccttgtcgtgtttctcgttagctccggaatgcttatcgtttccttgtatacccaccacaagaaaatgaaggtgcacagtgcaggaaggagagacgtgcgagcaaaggcccacatcaccgccctgaagtctcttggatgcttcctgctcctgcacctggtctacatcatggccagtcccttttcgatcactagtaaaacataccctccggaccttaccagtgtctttatatgggaaacacttatggccgcctatccgtccttacacagtctcatcttaatcatgggcatccctagagttaagcaaacatgtcagaaaatcctgtggaagactgtatgcgccagacgctgttgggggccatag

SEQ ID NO: 208075 - DNA, 900 bp, synthetic construct
  misc_feature 1..900: note = Description of Artificial Sequence: Synthetic coding sequence
  source 1..900: mol_type = other DNA
atgatcaccttcctgtacatcttcttcagcatcctgatcatggtgctgttcgtgctgggtaacttcgctaatggatttattgccctagtcaactttattgactgggtgaagcggaagaaaatctctagcgctgaccagattttgacagcgttggccgtatcccgcatcggcttactgtgggcacttctgctaaactggtacctgaccgtattgaatccagccttctactcagtggagctgcgcattacctcctacaatgcctgggttgttaccaaccacttttctatgtggttagccgccaacctgtctatcttttatcttctgaagatcgctaatttttccaatctccttttcttgcacctgaaaagaagggtccggagcgtgattcttgtgatacttctgggtactctgatctttctggtgtgccatctgcttgtggccaacatggacgaaagcatgtgggcggaggagtacgaggggaatatgaccggcaaaatgaaactccgaaatacagtgcacctgagctatcttacagtgaccacactctggtcattcataccctttacgctctccctaattagttttttgatgttgatctgttcactgtgtaagcaccttaagaagatgcagctacatggcgaaggctcccaggacctaagtaccaaggtgcatatcaaagcgttacagaccctgatctccttcctactgctgtgcgccattttcttcctttttttgatcgtgagcgtttggtctcctcgccggctgcggaacgaccccgttgtaatggtttccaaggctgttggcaatatctaccttgccttcgactcgtttatcctaatctggaggacaaagaaactgaaacacacgttcctcctcattctctgtcagattagatgttag

SEQ ID NO: 208076 - DNA, 957 bp, synthetic construct
  misc_feature 1..957: note = Description of Artificial Sequence: Synthetic coding sequence
  source 1..957: mol_type = other DNA
atgaacggcgaccacatggtgctgggcagcagcgtgaccgacaagaaggctatcatcctggtgaccattcttctgctgcttcgtctggtggcgatagccggcaacggttttattaccgccgccttgggggtggaatgggtgttgaggcgcatgctgttgccatgtgacaagcttctcgtctctcttggggctagcaggttttgtctgcaatccgtcgttatgggcaagacgatctacgtctttctgcatcctatggcttttccttacaacccagtgctgcagttcttggcgttccaatgggattttctgaacgccgccacactttggtccagcacctggttgagcgtattctactgtgtcaagatcgccacgttcacacacccagtcttcttttggcttaagcacaaactgtccggttggctcccctggatgctgttttcctcagtcgggctgtcctctttcacgacaatcctttttttcatcgggaaccaccgcatgtatcagaattacctgcggaaccacctccaaccatggaacgtcaccggagatagtatcagatcatactgtgagaaattttatctgtttcctttgaaaatgatcacttggacaatgcctacggcggtcttctttatctgtatgatactcctgatcacctccctggggcgccaccgaaagaaggccctcttgaccacctccggtttccgcgaaccctccgtgcaggctcatatcaaggcactgctggctctcctttcatttgcgatgctgtttatctcttacttcctgtccctggtttttagtgctgctggtatattccctcccttggattttaaattttgggtttgggagagcgtcatctacctctgcgccgccgtgcatccaatcatccttctgtttagcaactgccgcctgagagctgtgctgaaatcccgcagatcatcaaggtgtggaacaccttag

SEQ ID NO: 208077 - DNA, 1314 bp, synthetic construct
  misc_feature 1..1314: note = Description of Artificial Sequence: Synthetic coding sequence
  source 1..1314: mol_type = other DNA
atgcccaagttcaaggccgcccggggcgtgggcggccaggagaagcatgcacccctcgccgatcagatcctcgccgggaatgccgtgagggcaggagtgagggaaaaacgtagagggaggggtacaggcgaggctgaagaggagtacgtcgggccccgactgtccagaaggattctccagcaggcccgccagcaacaggaagaactggaggcagagcacggaaccggcgacaaacccgctgctccccgcgaacgcacgactcgcttgggtcccaggatgccccaggacggtagcgatgacgaagatgaagaatggcccactctcgaaaaggctgccactatgaccgctgctggacatcacgcagaggtggttgtcgatccagaagatgaaagggcgatcgagatgttcatgaacaagaatccgcctgctaggcgcacgttagctgacattattatggagaagctgactgaaaagcaaacagaagtggagaccgtgatgtccgaggtttccgggtttcctatgccacagttagacccacgcgtgctggaagtatatcgtggagtgagagaggttttgagcaaatacagaagtggaaaacttcccaaggcgttcaaaatcatccctgcgctttcaaactgggaacagattctgtacgtgactgaacccgaggcctggaccgctgccgccatgtatcaagccaccagaatctttgctagcaatcttaaggagaggatggcgcagagattctacaacctggttctactcccacgggtgcgagacgacgtggcagagtataagcgactgaactttcatctctatatggctttgaagaaagcactgtttaagcccggtgcctggttcaaagggattttgatcccactgtgcgagagtggaacatgtacacttagggaggctataatcgttggatctatcatcacaaagtgcagcattcctgttctacacagcagcgccgctatgctgaagatagccgagatggaatattccggcgccaattccatctttcttcgcttgctgctggataagaaatatgcactcccttatagggtgctagacgccctcgtgttccatttcctgggttttcgaactgaaaagagggagctcccagtgctgtggcatcaatgcctgttaaccctggtgcagcgctataaggcggacctcgctactgatcagaaggaggcactgctggagttattgcgcctgcaaccccacccccaacttagcccagagatccgaagagaacttcagagcgccgtccccagagatgttgaagacgttcccattacagtggagtag

SEQ ID NO: 208078 - DNA, 951 bp, synthetic construct
  misc_feature 1..951: note = Description of Artificial Sequence: Synthetic coding sequence
  source 1..951: mol_type = other DNA
atggaccagaacaacagcctgcccccctacgcccagggcctggcctcaccccagggggccatgacacccggcatccctattttcagccctatgatgccctacggaacaggtctgacaccccagcctattcagaatactaactcactctccatactggaagagcaacagcgccagcaacagcagcagcaacagcagcagcagcagcagcagcagcaggccgtcgccgcagcagccgtgcagcagtctacaagccagcaggccacacagggcacttcagggcaagcaccccagctttttcatagccagactcttaccaccgctcctctgcctgggactactccattatacccctcaccaatgacgcccatgacccccatcactcctgccaccccggcctcagaaagctcaggtatcgtcccccagctgcagaacattgtttcaacggtcaatctgggctgtaagctcgacttgaaaacaatcgctcttagggcacgtaacgccgaatataatcccaaacgctttgctgccgtgattatgcgcattcgtgaaccccgaaccacggctctgatcttttcctcagggaagatggtgtgcaccggggctaagagcgaagaacagtctcggcttgccgcccggaagtatgcacgggtcgtgcagaagctgggcttccctgccaaatttctggattttaaaatccaaaacatggtggggagttgtgatgtaaaattccccatccggctcgaggggttggtgctcacacaccagcagttctcaagctatgagcccgaattgtttcccggactgatttatcgcatgattaaaccccgcatcgtgttgctcatttttgtttctggtaaggtagtgctaaccggtgcaaaagtgagggcggaaatttacgaggccttcgagaacatatatcctatcctcaaagggtttaggaaaaccacttag

SEQ ID NO: 208079 - DNA, 1020 bp, synthetic construct
  misc_feature 1..1020: note = Description of Artificial Sequence: Synthetic coding sequence
  source 1..1020: mol_type = other DNA
atggaccagaacaacagcctgcccccctacgcccagggcctggccagtcctcagggggctatgacccccgggatcccaattttctctcccatgatgccatacgggaccggacttactcctcaaccgatacagaacacaaactctctgagcatccttgaggagcagcagaggcaacaacagcaacagcaacaacagcagcaacagcagcaacagcagcaacagcagcagcagcaacagcagcagcagcagcagcagcaacagcaacagcagcagcagcaacagcaggcggtggccgccgcagctgtgcagcagtcaacctctcagcaagctacccagggcacgtcgggacaagccccacaactgttccattcacagactcttacgacagcccccttgcccggcactactcccctataccctagtccaatgactcccatgacccccattaccccggccaccccagcctccgaaagtagcggcatcgtgccacagctgcaaaatattgtgtccaccgtgaatctgggttgtaaactcgacttgaagaccatagcacttagagccagaaatgctgaatacaaccctaaaaggttcgctgcagttatcatgcgaattagagaaccacgcactaccgcgctgatattttccagcggcaaaatggtgtgtaccggcgccaaaagtgaggagcaatcgagactggcggcacgaaaatatgcccgcgtggtgcagaagcttgggttcccagcaaaatttcttgattttaaaatccaaaacatggtgggcagctgcgacgtaaagttcccaattcggctggaggggctggtccttactcaccagcaattctcaagttatgagcctgagctgtttcccggacttatttaccggatgatcaaacctcgcatcgtgctgcttatattcgtctctgggaaagttgtactgactggcgccaaggtcagggctgagatatatgaggcattcgaaaatatctaccctatcctgaagggtttccgaaaaacaacttag

SEQ ID NO: 208080 - DNA, 627 bp, synthetic construct
  misc_feature 1..627: note = Description of Artificial Sequence: Synthetic coding sequence
  source 1..627: mol_type = other DNA
atggaccagaacaacagcctgcccccctacgcccagggcctggcctcaccgcagggggcaatgacccccggaattcccatcttcagccccatgatgccctacggtaccgggctcacaccccagcctattcagaacaccaatagcctcagtatcctggaagaacagcagcgacaacagcagcagcagcaacagcagcaacagcagcagcagcagcagcagcaacagcagcagcagcagcagcaacaacaacagcagcagcaacaacagcaacaacagcagcagcaggcagtagcagctgccgctgtgcagcaatctacctctcagcaggccacccagggcacgagcgggcaagctccccagctgttccactctcagactctcaccacagcaccactcccagggacgacacctctgtacccatcaccgatgactccaatgaccccaattacgccagcgacgcccgcatcggaatcctccggtatcgttccacagcttcagaacatcgtgagtactgtgaatctgggctgtaaactcgacctgaagaccattgcactgagggctcgaaatgccgagtataaccctaagaggtttgcggccgtaattatgagaatacgcgagccacgatag

SEQ ID NO: 208081 - DNA, 456 bp, synthetic construct
  misc_feature 1..456: note = Description of Artificial Sequence: Synthetic coding sequence
  source 1..456: mol_type = other DNA
atggaccagaacaacagcctgcccccctacgcccagggcctggcctccccccagggcgcaatgactcccggcatccccattttcagccctatgatgccatatggcaccggacttaccccacagccaatacagaacacaaattcgttgtccattttggaggagcagcagcggcaacagcaacagcagcagcaacagcagcagcaacagcagcaacagcagcagcagcagcagcagcagcagcagcagcagcagcaacaacagcagcaacagcaacagcagcagcaagcagttgccgctgcagctgtgcagcaatcgacttctcagcaggcaacacagggaacctccggacaggcgccacagctgtttcactcacaaacgctcacaaccgcgcctctgccgggcaccaccccattatatccctcgcctatgacccctatgacgccaattaccccatag

SEQ ID NO: 208082 - DNA, 306 bp, synthetic construct
  misc_feature 1..306: note = Description of Artificial Sequence: Synthetic coding sequence
  source 1..306: mol_type = other DNA
tgagaggagcagagccggctggccgcccggaagtacgcccgggtggtgcaaaagctgggcttccccgctaagtttctggattttaagattcaaaacatggttggctcttgcgacgtcaagtttccgatttcctacgaacccgagctgttccccggactgatctacagaatgatcaaaccccggatcgtcctgctaatttttgtcagcggcaaggtggtgctgaccggagccaaagttcgcgcggaaatttacgaggccttcgagaacatttaccctattctcaaggggtttaggaagacgacttag

SEQ ID NO: 208083 - DNA, 960 bp, synthetic construct
  misc_feature 1..960: note = Description of Artificial Sequence: Synthetic coding sequence
  source 1..960: mol_type = other DNA
atgacccccggcatccccatcttcagccccatgatgccctacggcacaggcctcacaccacaacctattcagaacactaattccttgagtatcctggaggagcagcagcgccagcagcagcagcagcagcagcagcaacagcagcagcagcagcagcaacagcagcagcagcagcagcaacaacaacagcagcaacagcagcagcaacagcagcagcagcagcaggcagtcgccgccgccgccgtccagcaaagcacatctcaacaggctacacaaggcactagtggccaagctccccagctcttccactcacaaaccctaacaaccgctcccctgccgggcacaacacccttgtatccgtcaccaatgacgcccatgacccccataacacccgccacaccagcatccgaatccagcggtatagttccccagctgcaaaatatcgtttcaactgtgaatcttggctgcaaactggacctgaaaaccattgctcttcgggcacggaacgccgagtataatcctaaacgatttgctgcagtcattatgcgcattagggaacctagaacaactgctctgatcttcagctctggcaagatggtctgtactggcgcgaaatcagaggagcagtcacgcctggccgcacggaagtatgcgcgggtcgtccagaagctgggattcccagcaaaattcctggattttaaaatacagaacatggttgggtcctgcgacgttaaatttcccataaggcttgagggcctggtcttaacgcatcagcagttctctagttacgaaccagagctgttcccagggttgatctatcggatgataaaacccagaattgttctgctcatctttgtgagcggaaaagtggtattgacaggtgctaaagtcagggctgaaatctacgaggctttcgaaaatatctatcctattttgaagggattccgcaaaacaacatag

SEQ ID NO: 208084 - DNA, 2610 bp, synthetic construct
  misc_feature 1..2610: note = Description of Artificial Sequence: Synthetic coding sequence
  source 1..2610: mol_type = other DNA
atggacttccccagcagcctgcggcccgccctgttcctgaccggccctctcgggcttagcgacgtcccagacttaagcttcatgtgctcatggcgagatgcgctgaccctgcccgaagctcaacctcaaaactccgaaaatggcgctttacacgttaccaaagacttgctctgggagcctgccacccctggccctttaccaatgctgcctcccctaatcgatccatgggaccctggcctgactgctagggacctgctcttcaggggcggatgccgttaccgaaagaggccacgggtcgtactggatgtgacggagcagatctccagatttctgctcgaccatggggacgtggcgtttgctccgctcggtaagctaatgctggaaaactttaaacttgaaggcgccgggtcaagaacgaagaagaagacagtggtgtcggtgaagaagttgctgcaggatcttggcggacaccaaccatggggatgtccatgggcctatctttcaaatcggcagcggaggttttccattctggggggaccaatccttggcacctccgtggcaagtcatttagcagagctcctgcacgaagaactggtcttgaggtgggagcagctactgttggacgaggcatgtactgggggagcgctggcctgggtgccgggaagaaccccccagtttgggcagttagtatatccagcgggtggtgcccaagacaggttgcacttccaggaggtcgtgttgacgcccggcgacaatcctcagttccttggcaaaccaggcaggatacagttacagggccctgtacgccaagtcgtaacatgtaccgtgcagggcgaatcgaaagccctgatttatacgtttctgccacattggctgacttgctacctgacacctgggccattccatccgagcagcgcactgctcgctgtgcggagcgactaccattgtgccgtgtggaaattcgggaaacagtggcagcctacgttactgcaggcaatgcaggtggagaagggagccactggaatcagcctgagcccgcatctgcccggcgaactcgcaatttgcagccgctccggggctgtgtgcctgtggtcccccgaagatggattgcgccagatttaccgtgaccccgagacactggtgtttcgcgactccagcagctggaggtgggcagactttacggcccaccctcgcgtcctgacagtcggcgaccgaacaggcgtgaaaatgctcgacacacaaggaccacccggttgtggtctgttgctattccgactcggtgccgaggcgtcatgtcagaaaggagaacgggtcctgctgactcaatatctaggtcatagtagcccaaagtgcctcccccccacactgcacctggtgtgcacacagttttccctgtacttagttgacgagcggctgcctctggttcctatgctgaagtggaatcatggcctgcctagccctttactcctggctaggctactcccaccaccgagacctagctgtgtgcagcccctcctcctaggcggacaaggcggccaactccaactactgcaccttgctggggagggcgcttctgtaccgcgattggccggccccccacagagtcttcccagccgtatcgattctctcccagctttccccctgctggagccgaaaatccagtggcgattgcaagagcgtcttaaggcccctaccattggtttagctgctgtggttccgcccttgccatcggcacctacccccggactagttcttttccagctctccgccgcaggggatgtattctaccaacagctgcgtccgcaggtggattctagcctcagaagggacgccggccctcccggcgatactcagcctgactgtcacgccccaaccgcgagctggacgtcccaggacacagctggctgctctcagtggctgaaagccttattgaaggttccactcgccccacccgtctggacagcccccaccttcactcacaggcagatgctgggaagtacagagctgaggcgggaggaggaggagggacaacggctcggagtgttgaggaaagcaatggcgaggggacagctgttgctacaaagagatctgggttccttgccagccgctgagccacctccagccccagaaagcggcctggaagataagctgagtgaaagactcggtgaagcatgggccggtcgcggggcagcctggtgggagcggcagcaaggaagaacctcggagcccggaaggcagacacgccggcctaagcggagaactcagctgagttcaagcttctctctcagcggccatgtggatccttccgaggacaccagtagtcctcactctcccgagtggccccccgctgatgctctgccactacctcccaccactcctccttcccaggaacttactccggacgcatgcgcccaaggtgtgccgtccgaacagcgtcagatgctacgtgattatatggcgaaactgcccccccagcgggacacacccggctgtgccactacccctccacactcccaggcaagtagtgtacgggctactaggagtcagcaacacacacccgtcctctccagctctcagcctttaaggaaaaagcctcggatggggttttag

SEQ ID NO: 208085 - DNA, 1353 bp, synthetic construct
  misc_feature 1..1353: note = Description of Artificial Sequence: Synthetic coding sequence
  source 1..1353: mol_type = other DNA
atgagcgacttcagcgaggagctgaagggccccgtgaccgacgacgaggaggtagagacgtctgtcctgtcgggtgcaggaatgcacttcccctggttgcagacatatgtcgagaccgttgccattggcggtaagagaagaaaggattttgctcaaactacctcagcctgcctgtcctttattcaggaggcattgctgaaacaccagtggcagcaggccgctgaatacatgtatagctacttccaaactctggaggacagcgatagctacaagcgtcaagctgcacccgagataatctggaaactaggatcagagatccttttttatcacccaaaatccaacatggagagttttaacacctttgcgaaccgaatgaagaacattggagtcatgaattacctgaaaatctcattacagcatgcgctctacctcctccaccacggcatgctgaaggacgcgaaaaggaacctgtctgaagcagaaacttggcggcatggcgaaaatacttcaagcagggagattttgattaatctgatccaagcctataagggcttgctgcagtattacacctggagcgagaaaaagatggagctgtctaagctcgataaggacgactatgcatataacgcggtcgctcaggatgtatttaaccactcttggaaaacaagcgccaatataagcgctttgatcaagatcccaggtgtgtgggatccgtttgtaaaatcgtatgttgagatgctagagttctacggagaccgcgacggcgcccaggaagtgttaactaactacgcatacgacgaaaagttcccctccaatcctaacgctcacatttatctatacaactttctgaagcggcagaaagccccacgaagtaagctcatttccgtcctgaagattttgtaccagatagttccgtcccataagctcatgttagagttccacaccttgcttcgaaagtcagagaaagaggagcatcgtaaactgggccttgaggttctgttcggcgtactcgactttgccggatgcacaaaaaatatcacagcatggaaatatctcgctaagtatctcaagaacatcctgatgggcaatcaccttgcatgggtgcaggaagaatggaatagccggaagaactggtggccaggttttcacttctcctacttttgggcaaaaagtgattggaaagaggacaccgctctagcgtgcgagaaagctttcgtggcaggcctgctgctagggaaaggctgtagatattttcgttacatcctgaagcaggatcatcagatcctggggaagaagattaaacgcatgaagcgctcagttaagaaatactctattgtcaaccctcggctgtag

SEQ ID NO: 208086 - DNA, 1353 bp, synthetic construct
  misc_feature 1..1353: note = Description of Artificial Sequence: Synthetic coding sequence
  source 1..1353: mol_type = other DNA
atgagcgacttcagcgaggagctgaagggccccgtgaccgacgacgaggaagtagagacgtccgtattatccggtgccggcatgcatttcccatggctgcagacctatgtggagacagtggcgattggggggaagcgacggaaggatttcgcacagactacgagcgcctgcttgtcctttattcaggaggcacttctaaaacatcagtggcaacaagctgctgagtatatgtactcctactttcagactcttgaggattcggacagctacaagcgccaggccgcccctgagatcatttggaagcttggctctgaaatcctgttttaccatccaaagagcaacatggagtctttcaatactttcgccaacaggatgaaaaatattggggtaatgaactacctgaagatctctcttcagcacgctctgtacttgctgcatcatgggatgttgaaggacgcaaaacggaacctaagcgaggccgagacttggaggcacggagagaacacatcaagccgggagatccttatcaatctgatccaggcatataagggccttctgcagtactatacctggtctgagaaaaaaatggagctttctaaacttgacaaggatgactatgcatacaatgctgttgcacaggacgtgttcaatcactcatggaaaacatccgcgaacatctccgctcttattaagattcctggggtgtgggaccctttcgttaagagctatgtcgaaatgctggagttctatggtgacagggacggagcccaagaggtgttaactaactacgcttacgacgaaaaattcccgagcaatcctaatgcacacatttatctttacaatttcttaaaacggcagaaggcgccacgctccaaattaatcagtgtgctgaaaattctgtatcagatcgtgccatcgcacaagctgatgctggaattccatactttgctgcgtaaatctgagaaagaggagcataggaaactcggactcgaagtcttgttcggagtgttagattttgctgggtgtaccaagaacattacagcttggaaatacttagctaagtatctcaaaaatatcctgatggggaaccacctcgcctgggtgcaagaggagtggaactcgagaaaaaactggtggccaggcttccacttctcatacttctgggctaagtccgattggaaggaggacaccgcccttgcttgtgaaaaggccttcgtggcgggactgctgttagggaaaggctgcaggtacttcagatatatattaaagcaggaccaccagatactgggcaagaaaatcaaacggatgaaaagaagcgtcaaaaaatattcaattgttaacccacggctctag

SEQ ID NO: 208087 - DNA, 1011 bp, synthetic construct
  misc_feature 1..1011: note = Description of Artificial Sequence: Synthetic coding sequence
  source 1..1011: mol_type = other DNA
atggagagcttcaacaccttcgccaaccggatgaagaacatcggcgtgatgaactacctgaaaataagtctgcagcacgccctatatctgctgcatcacggaatgctgaaggacgcgaagaggaatttatcagaagctgaaacatggcggcatggagaaaacactagttcaagagaaattctgataaatttgatccaggcctacaaaggcttactccagtactacacatggagtgaaaaaaaaatggagctgtctaagctggacaaagacgattatgcctataacgccgtcgcccaggacgtgttcaaccattcttggaagacaagtgctaatatttccgccctcatcaaaatacctggggtgtgggatccctttgtgaagtcctatgtggagatgttggaattttacggagacagggacggagctcaggaagtgctgacaaactatgcctatgatgagaaatttccctccaaccctaacgctcatatttatttgtacaactttctgaagaggcaaaaggctcccaggtctaagctgattagtgtccttaagattctgtatcagatcgtcccatctcacaagcttatgttggaattccatacactgctgcggaagagcgaaaaagaggaacataggaagttggggctcgaagtcctgttcggggtgttggatttcgctggatgcacgaaaaatataactgcttggaaataccttgcgaagtacctgaagaacattctgatgggcaaccatctggcgtgggtgcaagaagagtggaactcccgaaaaaactggtggccaggattccacttttcatacttctgggccaagtccgactggaaggaggataccgctctcgcatgtgagaaggcattcgtggctggcctgttgctgggcaagggatgcagatacttccgctatatcttaaaacaggaccatcagatcctgggcaagaaaataaagcgtatgaagcggtctgtgaaaaaatactccatcgtcaaccctcgcttgtag

SEQ ID NO: 208088 - DNA, 1011 bp, synthetic construct
  misc_feature 1..1011: note = Description of Artificial Sequence: Synthetic coding sequence
  source 1..1011: mol_type = other DNA
atggagagcttcaacaccttcgccaaccggatgaagaacatcggcgtcatgaactacctcaaaataagcttacagcacgctctatacctgcttcaccacgggatgctgaaggatgccaaacgcaatctgtctgaggctgagacatggcggcatggcgagaatacttccagcagagagattctgattaatctcatccaggcgtacaaaggcctgttgcaatattacacttggagcgagaagaaaatggaactgtcaaagctggataaggacgattacgcttataacgctgtggcccaggacgtgttcaaccactcatggaaaacgtccgcaaatatatcggcgctgatcaagatcccaggggtatgggacccattcgttaagagctacgtcgaaatgctggagttttacggggacagagatggtgcccaggaggtgctcactaattacgcctacgatgagaaatttccaagtaaccctaatgcccacatctacctgtacaacttcctgaaacggcaaaaagcccctagaagcaaactgatttctgttctgaagatcttatatcagatcgttccatcacacaaattgatgctggagtttcacaccctcctgcggaagagtgagaaggaagagcaccgcaagctggggcttgaagtcctctttggcgtcttggactttgctggctgcacaaagaatattacagcctggaagtacctcgctaagtatttgaagaacatactcatgggtaaccatctggcctgggtgcaggaggaatggaactcacgcaagaactggtggcctggatttcacttctcctatttctgggccaagagcgactggaaggaggacaccgctttggcctgtgagaaggcgtttgttgccggactgctgttggggaagggttgccgatacttccggtacattctgaagcaggaccaccagatccttgggaagaagattaagcgcatgaaacgcagcgtaaagaaatactcaatagtcaaccctcggctatag

SEQ ID NO: 208089 - DNA, 861 bp, synthetic construct
  misc_feature 1..861: note = Description of Artificial Sequence: Synthetic coding sequence
  source 1..861: mol_type = other DNA
atgagcgacttcagcgaggagctgaagggccccgtgaccgacgacgaggaagtcgaaacttcagtcctgtccggtgcaggcatgcattttccttggttacagacatatgtggaaacagtcgcaatcggcggaaagcggaggaaggactttgcacagaccacctcagcttgcctctctttcatccaggaggcactgctgaagcatcagtggcagcaggccgccgagtacatgtattcctatttccaaacattagaggactccgacagctataagcgccaggccgctcccgagattagtctccagcatgcactgtaccttttacatcacgggatgctgaaagacgctaagcgaaatttgagcgaggcagagacttggcgtcatggcgagaatacttcatcacgggagatcttaatcaaccttattcaggcttataaggggctgctgcagtattacacctggtctgaaaagaaaatggaattgtcaaagttagacaaggatgactacgcctataacgctgtagcccaggacgtgttcaatcattcttggaagaccagcgccaatatctcagccctcatcaaaatacccggtgtatgggacccattcgttaagtcttatgtggagatgctggaattttatggcgacagggatggagcccaggaggtgctcacaaattacgcctatgatgagaagttccccagcaatcctaatgcacatatttacctgtacaatttcctcaaacgacagaaggctcctaggtctaaacttatttccgtgctaaaaatcttataccagatcgtgccctcccacaagctgatgctcgaattccacactttgttgagaaagtccgagaaggaagaatag

SEQ ID NO: 208090 - DNA, 849 bp, synthetic construct
  misc_feature 1..849: note = Description of Artificial Sequence: Synthetic coding sequence
  source 1..849: mol_type = other DNA
atgagcgacttcagcgaggagctgaagggccccgtgaccgacgacgaagaggtggagacaagcgtgctgtctggggccggaatgcacttcccctggctgcaaacatatgtcgaaactgtagctatcggtggaaagcggcgcaaggatttcgctcagaccacatccgcttgcctgtccttcatccaagaggctcttttgaaacatcagtggcaacaggcagctgagtatatgtactcttattttcagacactcgaagattctgactcctataaaaggcaggccgcaccagagatttctctgcagcacgctttatacctcctccatcacgggatgctgaaggacgctaagcgcaatctcagcgaggcggagacatggagacatggcgaaaacacaagttcacgggagattctcatcaacctcatccaggcatacaaaggattactgcagtattacacctggtctgaaaagaaaatggagcttagcaaattagataaggatgattatgcctacaatgcggtcgctcaagacgtatttaaccacagctggaagactagcgcaaatattagcgccctgatcaaaattcctggcgtgtgggatccctttgtaaaatcctacgtagaaatgttagaattttatggagacagagatggcgcacaggaagtgcttaccaactatgcatacgacgagaagttcccatctaatcctaacgcccatatctacctctataatttcctgaagcgacagaaagcaccaagatccaagctgatctcggtgctgaagattctgtaccagatcgtgcccagtcacaagctaatgttggagtttcataccctcctgaggaaaagttag

SEQ ID NO: 208091 - DNA, 936 bp, synthetic construct
  misc_feature 1..936: note = Description of Artificial Sequence: Synthetic coding sequence
  source 1..936: mol_type = other DNA
atgagcgacttcagcgaggagctgaagggccccgtgaccgacgacgaagaagtggagaccagcgtcctcagcggagctggaatgcattttccatggctccagacgtatgtggagaccgtggccattggcggaaagcggcgtaaagatttcgcccaaacaacctccgcttgtttgtccttcattcaggaagctctgttaaaacatcaatggcagcaggcagccgaatacatgtattcgtatttccagacactggaggattccgattcctataagcgtcaggccgccccagagatcatttggaagttggggtcagaaatcctgttctatcacccaaagagcaacatggagagctttaatacattcgctaaccggatgaagaacatcggtgtaatgaattacctgaagatatctctccaacatgccctttacttactgcatcacgggatgctcaaagacgccaaacgtaatctcagcgaggcagagacgtggaggcatggagagaatacctccagccgggagatcctgatcaacctgattcaagcctataaagggctgctgcaatattacacctggagcgaaaagaagatggaattgtccaaattagataaggatgattatgcgtacaatgcagtggcccaggacgtgtttaaccatagttggaaaacgagcgctaatataagtgctttaataaaaattccaggtgtgtgggatcccttcgtcaagtcttacgtggagatgctcgagttctatggagaccgcgacggcgcccaagaggtactgacaaactacgcgtacgacgaaaagttcccctcaaatcctaatgcacacatatatttatacaacttcctcaagcggcaaaaagcccctcgttctaagctcatcagcgtgcttaaacacttgcaaaagatctccattatgtactccactctccggtag

SEQ ID NO: 208092 - DNA, 2328 bp, synthetic construct
  misc_feature 1..2328: note = Description of Artificial Sequence: Synthetic coding sequence
  source 1..2328: mol_type = other DNA
atgctgccccccctgatcgacccctgggaccccggcctgaccgcccgtgacctattattccggggcggctgtagatatcgcaaacgccctagagtcgtgcttgatgtgactgagcaaatatctcgatttctcctcgaccatggtgatgtggcctttgcccctcttggaaagctgatgctcgaaaacttcaagcttgaaggtgccggatctagaacaaagaagaagaccgtagtgtctgtgaaaaagctgctccaggacctaggcggtcatcagccttgggggtgtccttgggcttacctctccaatcgccagcggaggttttctatattaggggggcccatactggggacatcagtggcgtcccacttggccgaattgctgcatgaggagctcgtgttgcggtgggaacaactgctgctagatgaagcctgcaccggaggcgccctggcgtgggtgccaggccggacgccgcagttcggacagctggtctatcccgcgggcggcgctcaggatagactgcacttccaagaagtggtgctgacccctggagacaatccccagtttttggggaagcccggccggatccagctccagggaccagtcagacaggtggttacatgtacagtgcaaggtgagactctactggcagtgcgcagtgactatcactgtgcagtctggaaattcggcaaacagtggcagcctaccctgttgcaggctatgcaggtagaaaagggggccactggtatttcgctttctccccatctccctggagagctggctatctgctctcgctccggagcggtctgtctctggagtcctgaagacggactgcgccagatctatcgtgacccagaaactctcgtttttagggactcttcttcctggcgttgggccgactttactgcccatcctcgcgtgctaacggtgggcgatcgaaccggtgtcaaaatgctcgatactcagggtcctcctggttgcggattgctgcttttccggctcggggccgaggcttcctgccagaagggcgaacgtgtgctgctgacccagtaccttggccattcctcccccaaatgcttaccccccaccctgcatctggtttgcacccaattttctttatatctagtcgatgaacgcctgcctctggtcccgatgctaaagtggaaccacggcttgcccagtccgctcctgctggcccggttgctcccaccacctaggccgtcatgcgtgcagcccctgctcttgggaggacaaggcggtcagctgcagctgctgcacctcgcggagggtgcctctgtgccaaggttggcgggaccccctcagtctttaccatcacgaattgatagcctgcctgcatttcccctcctcgaacccaaaatccaatggagactgcaggagcggctcaaagcgcccaccataggactggccgccgtcgtccccccccttccgagtgcaccaacacccggactggtgctgtttcaactttccgccgcaggggacgttttttaccaacagctgagacctcaagtggacagttctctgagacgagacgccggaccacccggcgatacacaacctgactgtcacgcgcccactgcttcctggacatctcaggacaccgcgggatgttcacagtggcttaaggccttgttgaaagtgccactcgcaccccctgtctggactgcaccgacctttacacatagacagatgctcggctccacggagctgagaagagaagaagaagaaggtcagagacttggagtgctgagaaaagccatggcacgtggccagttattgctccaaagggacctaggaagcctacccgccgcagaacctccgcctgcaccagagtctggactcgaagataagctttctgaacggctaggagaggcctgggctggacgtggggcagcctggtgggaaagacagcaaggtagaacctctgaaccgggcagacagacccgccgccctaaacggcgcacacagttgagtagtagcttttccctgtcaggccacgttgatccctccgaggacacctccagcccccactctcccgaatggcctcctgctgacgctctgcctctgccgccaaccaccccgccgagccaagagctgacgccagacgcctgtgcgcagggcgttccctctgaacagcgccagatgcttagagattacatggccaagctgcctccgcagagagacacccccgggtgtgccacaaccccaccgcactctcaggcctctagcgttagggcaacacgttcccagcagcatacgcccgtcctgtcctcctcacaaccgctcagaaaaaaaccccggatgggattctag

SEQ ID NO: 208093 - DNA, 2610 bp, synthetic construct
  misc_feature 1..2610: note = Description of Artificial Sequence: Synthetic coding sequence
  source 1..2610: mol_type = other DNA
atggacttccccagcagcctgcggcccgccctgttcctgaccggccccctgggattgtcggatgtgcccgacttgagcttcatgtgctcttggagggatgccctgacattgccggaagctcagccacaaaattcagagaatggcgcattgcacgttacaaaagacttactctgggaaccggctacgcccggtcctttaccaatgctcccccccctcattgacccctgggatccaggactcactgccagagatttgctcttcagaggcggatgcaggtaccggaagcgcccccgtgtggtcctagacgtgacagagcaaatctcacgctttctgcttgaccatggtgacgtggcctttgcaccactgggaaaactcatgttggaaaattttaagctggagggagctggctctcgcacaaaaaagaaaaccgtcgtgagcgtgaagaagctcctgcaggatctgggcggccatcaaccttggggctgtccctgggcttatttgagtaatcgacagaggcgtttttccattctggggggaccaatcttaggcacaagcgtggcttcccacctggcagaactgctgcacgaggaactggtcctgcgctgggaacagctcctgttggatgaggcctgcactggaggcgcattggcatgggttcctggccgaacaccacagtttggccaacttgtgtacccggctggaggggcacaagacaggctgcacttccaggaggtggtgttaacacccggcgacaatcctcagtttctcggtaagcctgggaggattcaactccaagggcccgtgaggcaagtagtgacgtgcacagtgcagggagaatctaaagctctcatttatacattcttaccacactggctaacatgctacctgacgccgggcccctttcatcccagtagcgccctccttgcagtgcggtccgattaccattgtgcagtttggaagtttggaaaacaatggcaacctactcttctccaggccatgcaagtggagaaaggtgccacagggatcagtctctctccccatctccccggcgagctggcaatttgttcacggtctggagccgtatgtctgtggtcacccgaggacggtcttcggcagatatacagagatccagaaactttggtctttcgcgactcaagcagttggagatgggcagacttcactgcccatcccagagttctgacagtgggagatcgcacgggagtgaagatgttggacacccagggtccccccggctgtggactgctcctgttccgactcggagcagaagccagttgtcagaaaggagaaagggtgttgctcacacagtaccttgggcacagctctcctaagtgtctcccccccactttgcatctggtgtgcactcagttcagcctatacctggtagacgagagactccctctggttccaatgctcaagtggaaccatggcctgcctagtcccctgctcctggctcgcctgctgccaccccccagaccttcttgtgttcagcctctgctgttaggcggccagggcgggcaactccaactgctgcaccttgccggtgagggggcttcggttcccagactggccggccccccacagtcccttccctccaggattgactcacttcccgctttcccactgctcgaaccgaaaatccagtggagactgcaggagcgcttgaaggctcccacgattggcctcgctgcagtggtcccacctctgccctccgcccccacacccggacttgttctgtttcagcttagcgccgctggtgatgttttctatcagcaattaagaccacaggtcgactcttctctgaggcgagatgccggccctcctggtgacacacagccagattgccacgcacctacagccagctggacatcccaggacacagcaggttgcagtcagtggttgaaagcactgctcaaagtgccgttggcaccacccgtgtggactgcccccacctttactcatcgccagatgctgggcagtacggaactgcggcgggaagaagaagaaggccagcggcttggagtccttcggaaagccatggcccgcggacagttactcctgcagcgagatctgggatcattgcccgccgctgaacctccgccagctcctgaatccggccttgaggataagctgagtgaaagattaggtgaggcctgggccggccgcggggcagcttggtgggaacgtcaacaagggagaacctcagaacctgggcggcaaactcgccggcctaaaagacgcactcaactgagttcctcattttcactgtccgggcatgttgatccttctgaagatacttcaagtccgcacagcccagagtggccccctgctgacgccttaccccttcccccaaccactcccccttctcaggaactcaccccagatgcgtgtgcccagggtgtacctagcgagcagcggcagatgctgagagattatatggccaaactaccgccccagagggatacacctggctgcgctacgaccccaccacattcccaggcttctagcgtgcgagccacaaggtctcaacagcatacgcccgtactgtcatcatctcagcctctcaggaagaaaccccggatgggattttag

SEQ ID NO: 208094 - DNA, 1047 bp, synthetic construct
  misc_feature 1..1047: note = Description of Artificial Sequence: Synthetic coding sequence
  source 1..1047: mol_type = other DNA
atggacttccccagcagcctgcggcccgccctgttcctgaccggcccactgggtctgtctgatgtgcctgacctctctttcatgtgcagctggcgcgacgccctaacactccccgaagcccagccccagaatagcgagaatggcgccctgcacgttactaaggatctcctctgggagcctgcaacccctggcccactgcccatgttgcctcccctgattgacccctgggacccaggcctcacggcaagagatctgttattcagaggggggtgcagataccgcaagcggcccagagtcgtcctcgatgttacagagcagatctcccgattcctgctcgatcatggcgatgtcgcttttgcgccgctagggaaattaatgctcgaaaattttaagttggagggagctggatcgcgcaccaagaagaaaaccgtcgtgtctgtgaagaagcttttacaggatcttggtggccaccagccttggggctgcccttgggcctatctgtccaacagacagcgaaggttctccatcctgggcgggccaatccttggtaccagtgtagcctcccatctcgctgagttactgcatgaggagttggtattgagatgggagcagctgttgctggacgaggcttgtaccggcggcgccttggcttgggtgcccggcaggacaccgcagttcggacaactagtgtaccccgccggtggcgctcaagacaggttgcatttccaggaagtcgtcctcacaccaggagataatcctcaatttctcggaaaaccaggcaggattcaattacagggacccgttcgtcaggtcgtgacgtgtacagtccaaggtgagactcttctggctgttcgcagtgactatcactgcgccgtgtggaagtttggaaaacagtggcaacctactctacttcaggcaatgcaggttgaaaaaggcgcaactggtatctcactaagtccccacctgcccggcgaattggccatctgctcaaggtcgggcgcggtgtgtctgtggagccccgaggatggctatcgccgcttcctctag

SEQ ID NO: 208095 - DNA, 2331 bp, synthetic construct
  misc_feature 1..2331: note = Description of Artificial Sequence: Synthetic coding sequence
  source 1..2331: mol_type = other DNA
atgctgccccccctgatcgacccctgggaccccggcctgaccgcccgcgatctgctcttcagaggcgggtgcagatatagaaaacgccccagggtggtgctcgatgtgacagagcagatctctcggttcctgcttgaccacggtgatgttgctttcgcccctcttggtaaactcatgctagaaaatttcaagctcgagggcgccggatcaagaactaaaaaaaagacggtcgtcagtgtaaagaaacttctccaggacctgggtggccaccagccctggggttgtccttgggcttacttgagtaatagacagagaaggttctcaatattgggcggacctatacttgggacatctgtggcctctcacctggccgaattactccatgaagaacttgtgctcaggtgggagcagctgttgctggatgaagcatgtactggaggcgcactcgcatgggtgcccggcagaactccacagtttgggcagcttgtgtaccctgcgggcggagcacaagaccgactacattttcaggaggtcgtgctgacgcctggcgacaatcctcagttcctcgggaaacccggacgaatccagctccaagggccagtacggcaggtggtgacctgtaccgtgcaaggtgaaacactgctcgctgtcagatctgactaccattgtgctgtttggaagttcggaaagcagtggcaaccaacactgctgcaggcaatgcaggttgagaaaggcgctaccggcatatcactgtcaccccaccttcccggcgagcttgccatctgctctaggtcaggggcagtttgcctctggtctccggaggatggactgcgtcagatatacagggacccagagacactggtttttcgagactcttccagctggcgatgggctgatttcacagctcatccccgcgtgcttaccgtaggcgatcgcacaggggttaagatgctggatacacagggccctccaggatgcggtctcctgttatttcggctgggcgccgaagcatcatgtcaaaagggagagcgtgttctcctcacacagtatcttggtcacagctcccccaagtgtttacccccaacattgcacttagtgtgcactcagtttagtttgtacctggttgatgaacgactcccactggtgcccatgttgaagtggaaccacggactgccctcccccctcctgctggcccgtctgctcccgccccctagacctagttgtgttcagccgctactcctgggcggacagggtggccagcttcaactcctgcacctcgccggggaaggcgccagcgtccccaggctggcgggacctccacagtccttaccttcaagaatcgactctctcccggcgtttcctctgttggaaccgaagatccagtggcggttacaagaacgcctgaaggcccctaccatcggtctcgctgcagtagtgcctccactccctagcgctcctacccccggcttggttctttttcagttgtccgcggcaggagatgtattttaccagcagctgagaccccaagtcgattcttctctccgcagggatgcagggccccctggagatacccagccggactgccacgccccaactgctagttggacttcacaagatactgctggctgcagccagtggttgaaagcactactgaaagtgcctctcgccccgccggtgtggacggcacccactttcacacacagacagatgctggggagcaccgaactgcggcgcgaagaagaggagggccagcggttgggcgtcttacgcaaggccatggcgcgcggccagcttctgctccagagagacctgggctcgctccccgccgccgagcctccaccagcccccgagtcaggtttggaagacaagctctctgagcgcctcggtgaggcctgggcgggacgcggagccgcttggtgggagcgacagcagggccgtacctccgaaccaggacgccaaacccggcgacccaagcgccggactcagctgtctagttccttttccttgtccggacatgtcgatccaagtgaggatacatcctctcctcattcgcccgagtggccgccggctgatgccttaccattacctcccacaaccccgcctagccaagagctgacccccgacgcctgtgcacagggcgtgccttcagagcagagacaaatgttgagagactacatggcaaaattgcccccccagcgcgatacaccaggttgcgccacaacgccaccacacagccaggcatcctccgttcgtgccacaagatcacagcagcacacacctgtcctgagcagctcgcaacccctgcggaaaaagccgagaatggggttctag

SEQ ID NO: 208096 - DNA, 1179 bp, synthetic construct
  misc_feature 1..1179: note = Description of Artificial Sequence: Synthetic coding sequence
  source 1..1179: mol_type = other DNA
atgctgaagtggaaccacggcctgcccagccccctgctgctggccaggttgcttccccctccgcgcccatcatgcgtccagccccttttattgggcggccaaggagggcagctccagttgctgcacctcgctgaaggggccagtgttccccgactggcgggacctccacagagtctaccgtctagaatcgactcattgcctgcattccctctcctggagccgaagatccagtggcggttgcaggaacgactgaaggcccctactatcggacttgccgcagtggttcctccactcccgagtgctcccacacctggtcttgtcctgtttcagttatccgccgctggagacgtgttctaccaacagctccgtccccaagtcgacagctcgctgcggcgcgacgccggacctcctggtgatacccagcccgattgtcacgcacctaccgcctcttggacgtcccaagatacagctggctgcagtcagtggctgaaagccctactcaaagtaccactcgccccccctgtgtggacagctccaacgtttactcataggcaaatgctgggttccacggaactgagaagagaggaggaggagggacagagattgggcgtgttgcggaaggcaatggctagggggcagcttctcttgcagcgcgatcttggctccttgcccgccgcagagccccccccggcaccagaatctggccttgaggataagctctcagaaaggctgggggaggcctgggctggccgcggggccgcttggtgggaacgacagcagggacggacaagtgagccgggcaggcagactcgccgccccaaacgccggactcagctcagcagctccttttccctcagcgggcatgtggatccctccgaggacacgtcttccccacacagtcccgaatggccgccagcagatgcactcccgctcccacctaccacgcctccctcacaggagctgactcctgacgcgtgcgctcagggcgtcccaagtgagcaaaggcagatgctgcgggactatatggctaagctgccaccacagcgagatacaccaggctgtgccactacaccaccccacagccaggcatcctccgttagggccaccaggtctcagcaacacaccccagtgctgtcatcctctcagccccttagaaagaagccaagaatgggcttttag

SEQ ID NO: 208097 - DNA, 837 bp, synthetic construct
  misc_feature 1..837: note = Description of Artificial Sequence: Synthetic coding sequence
  source 1..837: mol_type = other DNA
atggacaagagcggcatcgacagcctggaccacgtgaccagcgacgccgtggaactggctaatagaagcgacaatagtagtgacagctcgctgtttaaaacccagtgcattccttactccccaaagggagaaaaacggaatccgatcaggaagttcgtgcgaacccccgagagcgttcacgcgtctgacagttcttcggactccagttttgaaccaattcctctcactatcaaggctatctttgaaagatttaaaaaccgaaagaagaggtacaaaaagaaaaaaaagagacggtaccagccaaccggccgcccaagagggagaccagaaggtcgcagaaatcccatctattccctgatcgataagaagaagcagtttcgctcacgggggtccggatttccattcctggagtctgaaaacgagaaaaacgctccctggagaaagatcctgactttcgagcaagccgtggcaagaggattttttaattatatagagaagctgaaatatgagcaccacctgaaagagtccttaaaacagatgaacgtgggcgaggatttggagaatgaggatttcgattccagacgctacaaattcctggacgacgatgggagcatcagcccgattgaggagtctaccgccgaagacgaggacgccactcatctggaggacaacgagtgcgacatcaaactcgctggggattcatttattgtaagttcagaatttcctgtcaggttatcggtgtatctggaggaggaggatataactgaagaagccgccctgtccaaaaagcgcgccacgaaagcaaaaaacacaggccaaaggggcctgaagatgtag

SEQ ID NO: 208098 - DNA, 837 bp, synthetic construct
  misc_feature 1..837: note = Description of Artificial Sequence: Synthetic coding sequence
  source 1..837: mol_type = other DNA
atggacaagagcggcatcgacagcctggaccacgtgaccagcgacgccgttgaattggccaacaggagcgacaattcatccgattcctccctgttcaaaacacagtgcatcccgtatagcccgaaaggcgagaagaggaaccctattcgaaagttcgtcagaacgcccgagagtgtgcacgcatctgattcctcttcagacagttccttcgaacctattcccctcactatcaaagccatttttgagcgatttaagaataggaagaaacgctacaagaagaagaagaagcgtaggtaccagcctacgggaaggcctcgagggcggccagagggacggcgtaaccccatctactcgctcatagataaaaaaaagcagttccgcagtcgcgggagcggattccccttcctggagagtgaaaacgagaaaaacgctccctggcggaagattctgacatttgaacaggcagtcgcgagagggttcttcaattacatagaaaagcttaaatacgagcaccatctgaaagaatctctgaaacagatgaatgtgggagaagatctggagaacgaagatttcgatagccggcgttacaagttcctggacgatgacgggtccatcagccccatagaggaaagtaccgcggaggacgaggatgccacacatttggaagataacgaatgcgatattaagttagccggcgactctttcattgtgtccagtgagttccctgttcggctgagtgtgtatttggaagaggaagacataactgaggaggccgccctctcaaagaaacgtgctacaaaagccaagaacaccggtcagcgcggtctgaagatgtag

SEQ ID NO: 208099 - DNA, 837 bp, synthetic construct
  misc_feature 1..837: note = Description of Artificial Sequence: Synthetic coding sequence
  source 1..837: mol_type = other DNA
atggacaagagcggcatcgacagcctggaccacgtgaccagcgacgccgtggagctggctaaccgaagcgataactcaagtgacagctctctgttcaaaacacagtgcattccatacagcccaaagggcgaaaaacgaaaccccattcgaaaatttgtgcgcacaccagaatccgtacacgcctcggactccagtagtgacagtagcttcgaacccatcccgcttactattaaagccatttttgagaggtttaaaaacaggaaaaaaagatacaaaaaaaaaaagaagaggagatatcagcccaccggacgccctagggggagaccggaaggaagacgtaatccgatatatagcttaatcgacaagaagaaacagttccggtcaagaggaagcggctttccctttctggaatctgaaaatgagaaaaacgcgccatggcgaaagatacttacgttcgaacaggcagtggcacggggtttcttcaattacatcgagaaactgaaatatgagcaccacctgaaagagtctctgaagcagatgaacgtgggagaagaccttgaaaacgaggatttcgattccaggaggtataagtttctagacgatgacggctcgataagccccattgaagaatccactgccgaggatgaagacgcaacacacttagaagataacgaatgcgatatcaagcttgcgggtgacagctttatagtctcaagcgaattccccgtccgcctttccgtgtatcttgaagaggaagacatcaccgaggaggccgcacttagtaagaagagggccacaaaagccaagaatacggggcagagaggactcaaaatgtag

SEQ ID NO: 208100 - DNA, 27 bp, synthetic construct
  misc_feature 1..27: note = Description of Artificial Sequence: Synthetic coding sequence
  source 1..27: mol_type = other DNA
atggacaagagcggcatcgacagctag

SEQ ID NO: 208101 - DNA, 3030 bp, synthetic construct
  misc_feature 1..3030: note = Description of Artificial Sequence: Synthetic coding sequence
  source 1..3030: mol_type = other DNA
atgagctggttcaacgccagccagctgagcagcttcgccaagcaggctttgtctcaggcccaaaaatccatcgaccgcgttctggatattcaggaggaagagcctagcatctgggcagagaccatcccatatggcgaaccaggaatatcctctcccgtttccggtggatgggacacctccacctgggggttgaagagtaatactgaaccacagtctcctcccattgcgagccctaaggccattaccaagcccgtgagaaggaccgtggtggacgagtccgagaatttcttctctgcttttctatcccccaccgtgtccctcaaggtttccgaatcagtgattgatgtgaaaacaacgatggagtcaatctctaataccagtactcagtctctgactgccgagaccaaggacatagcgctcgaaccaaaggaacaaaaacatgaggaccgtcaaagcaacacaccctcaccgcctgtgtccaccttctcgtcaggcacgtctaccacaagcgatatcgaggttctggatcacgaatctgtcatcagcgagtcctccgcgagcagccggcaggaaacaacggattcaaaaagttcactgcatctgatgcagaccagtttccaacttctgtctgcatctgcctgccccgagtataaccggctcgacgattttcagaaactgactgagtcttgttgttcctcagacgccttcgagcggattgattcctttagcgtgcagagcttggatagccgctccgtgtctgagattaactcagacgacgagctatcaggtaaagggtacgccctggtgcctattattgttaacagcagcaccccgaaatccaagactgtggagtccgcagagggtaagagcgaggaagtaaacgaaacccttgtgattcccacagaggaggcagaaatggaagaatctggacggtccgccacaccagttaattgcgaacagccggatatcttagtttcatcgactccaatcaatgagggtcagaccgtgttagacaaggtggcggagcagtgtgaacccgccgagagccagcctgaagccctctccgaaaaagaggatgtgtgtaaggttactctgacagtcgagtttctgaacgagaagctagaaaaacgggaagcgcagctgctctctctgtccaaggagaaggcattgctggaggaggctttcgacaatttgaaagatgagatgtttcgagtcaaggaagaaagtagtagcatttcctcgctgaaggacgaattcacacagcgcatcgctgaggccgagaaaaaggtccagcttgcctgtaaggagagggatgctgccaagaaggaaatcaaaaacattaaagaggagctggctacccgtctgaactcatccgagaccgcagatcttttaaaagaaaaagacgaacagatccgtggtttgatggaggaaggcgagaaattgtccaaacagcagcttcacaactcaaacatcatcaaaaaactgcgggccaaggataaggaaaatgagaacatggtggccaagttaaataagaaagtcaaagaacttgaagaggagttacagcatctgaagcaggtgctggatggcaaagaggaagtagagaagcagcaccgggagaacatcaagaagcttaattcaatggtcgaacgccaggaaaaggatttgggacgcttgcaggtagacatggacgaattggaggaaaaaaaccggtcaatccaggcggccctggactctgcctacaaggaactaacagacctacataaagcaaatgccgcaaaggactctgaagcacaggaagccgcactctcgcgggagatgaaggccaaggaagagctgtctgccgcacttgaaaaggcacaggaggaagcccgccagcagcaggagaccttagccattcaggtgggggacctgaggctcgccttacagcgcacagaacaggccgcagcaagaaaagaggattacctacgtcacgagattggagagcttcagcagcgccttcaagaggcggaaaacaggaaccaggagctttctcagagcgtgagttctaccacacgccctcttctgcgccagatcgagaacctgcaggccaccctgggaagccaaacttcaagttgggaaaagttggaaaagaacctctctgaccggctgggtgagtcccagacattgttagctgccgccgtggagcgagaaagggcagccacggaggagctgctggccaataagatccagatgagctcgatggaatcccagaattctctcttacgtcaggagaacagtcgcttccaagctcaattggaatccgagaaaaataggttgtgcaaactcgaggatgagaataaccgctaccaggtcgagctcgagaatcttaaagatgaatatgtcagaacgctagaggaaacgcggaaagagaaaacattactgaactctcagctcgaaatggagcgaatgaaggtggagcaggaaaggaaaaaagccatattcacccaggaaacaatcaaggagaaggagagaaagcctttctccgtgagcagtacccctacaatgtcccgcagctcctccatctctggtgttgatatggcaggcctgcaaacttcgtttctaagccaggatgagtctcacgaccattcattcgggcctatgcccattagcgccaacggcagtaatctttacgatgccgtgagaatgggcgctggctcaagcataatcgagaatttgcagtctcaactaaaactgcgcgagggagaaatcacccaccttcagctggaaatcgggaacctcgagaaaacaaggagcatcatggcggaagagctggtcaagcttacaaaccaaaacgacgaactggaagagaaagtcaaagaaattccgaaacttcggacccagctccgtgaccttgatcagcgatacaacactattctgcaaatgtatggagaaaaggccgaggaggccgaggagcttcggttagatctagaggatgtgaagaatatgtataagacacagatcgatgagcttctgcgccagtccctgtcttag

SEQ ID NO: 208102 - DNA, 3282 bp, synthetic construct
  misc_feature 1..3282: note = Description of Artificial Sequence: Synthetic coding sequence
  source 1..3282: mol_type = other DNA
atgagctggttcaacgccagccagctgagcagcttcgccaagcaggccctatcgcaagcacagaagtccatagaccgcgtcttagacatccaagaagaggagccctctatatgggcagagactattccgtatggagagcccggcataagcagccctgtgagcggtggctgggacacctccacatggggtttgaaaagcaatactgaaccccaatcccccccgattgcatctcctaaagcgatcaccaaacccgtgaggaggaccgtagtggatgaaagcgagaatttcttttctgccttcctgtcccccactgacgtccagaccattcagaaaagccccgtggtcagcaaacctccggcgaagtcccaacgtccagaagaggaggtgaagtcctctctgcacgaaagcctgcacattggacagtcacgaacccccgagactacagaaagccaagttaaggattcttcattatgtgtgtcaggcgaaacgctggccgccggaacatcctcccctaagaccgaagggaagcacgaggagactgttaataaggagagcgatatgaaggtaccaacagtgtcactgaaggtgtccgagagcgtcattgacgtcaagacaaccatggagtccatttccaacactagtactcaatcacttaccgcagagacgaaggacattgcgctggaacccaaggaacagaaacacgaggaccggcagtccaatacacctagccccccagtgtcaactttttcatccggcactagtacaacatctgacatagaggtgctggatcatgagtccgttattagcgagtctagcgcttcctctcgacaggagacaacagacagcaaatccagcttgcacctcatgcagacaagctttcagctcctatcggcgagcgcctgtcccgaatataatcggttggacgattttcagaagctgacagagagttgctgttcctcagatgcgtttgaaaggatagatagcttctccgtacagagcctcgattcccgaagcgtgtctgagatcaattccgacgacgaactttccgggaagggctacgctctggtgcctataatcgtcaacagtagcactcccaagtcaaaaactgtggaatcggctgagggcaaatcggaagaggttaacgagacgctggtgatcccgactgaggaagcagaaatggaggagtccgggagatcggcaacacctgtcaactgcgaacaacctgacatcctggtttcgagcacccccattaacgaaggtcagaccgtacttgataaagtggccgaacagtgtgagcccgctgagagccagcccgaggcactatccgagaaggaggacgtgtgcaagacagtcgagttcttaaacgaaaaactggaaaaaagagaagcccagctgttgtcactctccaaggagaaggcactgctggaagaagcatttgacaacctcaaagatgagatgtttcgtgtgaaagaggaaagctccagcatctctagcctcaaagacgagtttacacaacggatcgccgaggccgaaaagaaagtgcagcttgcctgtaaagaaagggacgccgccaaaaaggagatcaagaatattaaagaggagctcgcaactagactgaactcgagtgagacagcagacttacttaaagagaaagacgagcagatacgcgggcttatggaggaaggggagaagctctccaagcagcagcttcacaactcaaacatcattaagaagttgcgcgccaaggataaagagaatgagaatatggtagcaaagctgaacaagaaagtgaaggagctcgaggaggaactgcaacacctgaagcaggtcctggatgggaaagaggaggtagagaaacagcatcgtgagaacatcaaaaagctcaattcaatggtggagaggcaagagaaagacttggggcgtctgcaagtcgatatggatgaactggaagagaagaataggagtattcaggccgcacttgatagtgcatacaaggagctgaccgatctgcacaaggctaatgccgcaaaagattcggaggcgcaggaagctgctttatctagggagatgaaggcaaaagaagagctctctgcagcactggaaaaagcccaagaggaggcgagacaacagcaagaaacccttgctatacaagtgggagatttgaggctggccttacaaagaacggagcaggccgccgccagaaaggaggactatcttcggcacgagattggcgaactgcaacagcgcctgcaagaagctgaaaatcggaatcaggaactctctcagtcagttagcagcacgacacgacctcttcttaggcagatagagaacctgcaagctacactcggatcccagacgtcttcctgggaaaagctcgaaaagaacttaagcgaccgccttggcgaatcacagacccttctcgctgcagccgtggagagggaaagagctgcgactgaagagttactggcaaataaaatacaaatgagctccatggaatcacaaaacagtttactgcgccaggagaactcccggtttcaggctcaactcgagagcgagaaaaatcgattatgtaaattggaagacgagaataatcgttatcaggtggaactcgagaacctgaaagacgagtatgtcaggactttggaggaaacacgcaaggagaagaccttactaaatagccagctggaaatggaacgcatgaaagtcgaacaagagaggaagaaggccatcttcacccaggagacgattaaggaaaaagagagaaagccctttagtgtatccagcactccaactatgtcccgaagttcttcaatctcaggcgtggacatggccggtctacagacgtctttcctcagccaggatgagtcccacgaccattctttcggtcctatgcctatcagcgccaacggcagcaacctgtatgatgcggtccggatgggcgccggctcatccatcattgagaacctccaaagccagctcaagctgcgggaaggcgagatcacccacttacagctggaaatcggtaatctggagaagacaaggagcattatggctgaagagttggtaaagttgacgaatcagaacgatgaattagaagagaaggtcaaagagatccctaagctaagaacccagctgcgggacctagaccaacgctacaatactattctacagatgtatggggagaaagcagaagaggccgaggaactacggttggacctggaggatgttaaaaacatgtataagacacagatcgacgagctccttcgacagagcctaagctag

SEQ ID NO: 208103 - DNA, 1602 bp, synthetic construct
  misc_feature 1..1602: note = Description of Artificial Sequence: Synthetic coding sequence
  source 1..1602: mol_type = other DNA
atgagctggttcaacgccagccagctgagcagcttcgccaagcaggccttaagccaagcacaaaagagtattgacagagtgctggatattcaggaggaggaaccctcgatttgggccgagactatcccctatggtgagcctggcatttcaagtcctgtttcggggggctgggacacctctacctgggggcttaagagcaacactgagccacagtccccgcccattgccagcccgaaggcaatcactaaacctgtcaggagaaccgtggttgatgagagtgagaacttcttttctgccttcctgtcccctactgacgttcagacaatccaaaagagtccagtggtgagcaaaccccccgccaaaagccagaggcctgaagaagaggtgaagtcttctctccatgagtctctacacattgggcagagtcgcacgcctgagaccaccgaaagccaagtaaaggacagcagcctgtgcgtatctggagagactttggccgctggtaccagttctcctaaaactgaggggaagcacgaagaaactgtgaataaagaatccgacatgaaggttccaacagtgtcactgaaggtgtctgaatcagtcattgacgtcaagaccaccatggaatctatatcgaatacaagtacccagagtctaacagccgaaaccaaagacatagcacttgagcctaaggagcagaagcacgaggatagacagtccaacacacctagcccccccgtaagcaccttcagttccgggacaagcactacatctgacatcgaagtgttggaccacgaatcagtcataagcgagtcctctgccagctctcgtcaggaaacgaccgattctaaatcttccttacacttaatgcaaacttcttttcagctgctgtccgccagcgcatgcccagagtacaaccgtctggatgacttccagaagctgacagagtcgtgctgcagttccgatgcatttgagcgaatcgacagcttttctgtgcagagcctggactcaaggtcagtcagtgagataaatagtgatgacgagttaagtggcaaagggtacgcactggtgcctataattgttaatagtagtactcccaagtctaagacagttgagagtgctgagggcaaaagtgaggaggtcaatgagaccttggtgatcccaacagaagaagcagaaatggaggagagtggtcgctcagcaaccccagtgaattgtgagcagcctgatatcttggtgtctagcacaccaataaatgaaggacagacggtattggacaaggtggctgagcagtgtgaaccagccgaaagccaaccagaagcgctcagcgaaaaagaggacgtgtgtaaaactgtcgaatttttaaatgaaaaattagagaaacgcgaggcccagctcctgtcactgtcaaaggagaaggccctcctggaggaagccttcgataacttgaaggatgagatgtttcgagttaaagaagagtcatcctccatctcttccctgaaggatgagtttacacagagaattgccgaggcagaaaaaaaggtccagctggcctgcaaggagagagatgctgcaaagaaagaagtgaaaagaaaaaaacggtag

SEQ ID NO: 208104 - DNA, 3291 bp, synthetic construct
  misc_feature 1..3291: note = Description of Artificial Sequence: Synthetic coding sequence
  source 1..3291: mol_type = other DNA
atgagctggttcaacgccagccagctgagcagcttcgccaagcaggccttgtcacaggctcagaaatccattgatagggtgctcgatattcaggaagaggaaccctctatatgggctgaaacaatcccttacggcgagcctggcatttcctctccggtgagtggggggtgggacactagcacttggggtctgaagtccaacacggaaccccagtccccaccaattgcatcccctaaagcgatcaccaaacccgttcggaggacggtggtggacgagtctgagaacttttttagcgcatttttgagccctactgacgtgcaaaccatacagaagagccccgtggtcagtaaaccccccgccaaaagccaacggcccgaagaggaagtgaaatcatcactccatgagagcctgcacattggccagtctaggactcccgagactactgaaagccaggtgaaagattcttctctgtgcgtgtccggagagaccttggccgccggtacatcaagccccaagactgagggcaagcacgaagaaacagtgaataaggaaagcgatatgaaagtgccaactgtttcacttaaagtatccgaatctgtcatcgatgttaagaccaccatggaatccatctcaaatacctccactcaatctctgacagctgaaactaaagatatcgccctggaacctaaagagcagaagcacgaggacaggcagtcaaacactccctcgcctccggtgtccacattctcttccggcacgtctacaacatcagatattgaggttctagatcatgaatcagttattagcgagtcatcagcttctagccggcaggagacaaccgatagtaaaagtagtctccacctgatgcaaacgagttttcaattactgagcgcatcggcgtgcccggagtataaccgcctggacgatttccagaaactgaccgaaagctgctgtagttctgatgcgttcgaacggatcgacagtttttcggtgcagagtctggatagcaggtctgtgtctgagattaactcagatgacgaactgtctggtaagggctacgcattggtcccaatcatcgtaaattctagcactcctaagtcaaagacagtggaaagtgccgagggcaaaagtgaagaagtgaatgaaacccttgtgatcccaacagaagaggctgagatggaagagagcggacgcagtgcgactcctgtaaattgcgagcagcccgatatcttggtgtcttcgacacccatcaatgaaggtcagacagtgttggacaaggtggccgagcaatgcgaaccggccgagagccagcccgaggcactgagcgagaaagaggatgtgtgcaaggtcactctgaccgtggaattcctgaacgagaagctggagaagcgcgaagcccagctcctgtctctaagtaaggagaaggctctgcttgaggaggcatttgataacctcaaggatgagatgtttcgcgtaaaagaggagagtagctcaattagttctctgaaggacgaattcacgcaacgcatcgctgaggccgagaagaaggtccagcttgcttgcaaagagcgagatgctgcaaaaaaagagattaaaaatataaaagaggagctggctactaggctcaactcaagcgaaacagctgaccttctcaaagagaaggatgagcagattaggggcctgatggaggagggggagaaattaagcaagcagcaactacataattccaacatcataaagaaactgcgggccaaggataaagaaaatgagaacatggttgccaaactgaataaaaaagtcaaagaattagaggaggagcttcagcacttaaagcaggtgctggatggcaaggaggaggttgagaaacaacatagagagaatatcaaaaagttgaacagtatggttgaaagacaggagaaagacctgggacgactgcaggttgacatggatgaactggaggagaaaaatcgatcaatccaggctgccctggactccgcctacaaggagctaaccgacttacacaaggctaacgctgccaaagattctgaggcacaagaagcagcactgagcagggagatgaaagcaaaagaggaactgtccgccgcactggaaaaagcccaagaagaggctaggcagcaacaagaaaccttagcgatacaggtgggagacctaaggctggcattgcagcgaacagagcaggcagcagccagaaaggaggactacctaaggcatgaaattggcgagctgcagcagcgactgcaagaagccgaaaataggaaccaggaactgtcccagagcgttagctctactactcgacctcttctgagacagatcgaaaacctgcaggccaccctgggaagccagacaagctcctgggaaaaactggaaaagaatctcagcgacagacttggagaaagccaaaccttactggcagcagctgtggagagagagagggcggcaactgaagaactgctggccaataagatccagatgtcaagtatggaatcccagaatagcttgcttcggcaggaaaatagtcgcttccaggcccagttggaaagcgagaaaaacagactgtgtaagctagaggatgagaataaccggtaccaggtggaactcgagaacttgaaggacgaatatgtgagaacactggaggagacaagaaaagaaaagactctgctgaacagtcagctggaaatggagcgcatgaaggtggaacaggagaggaagaaggcaattttcacccaggaaacaattaaagagaaggaaagaaaacctttctccgtgagctcaacgccgactatgtcaaggtcatcctcgatctccggcgttgatatggctggtctgcagacatcctttttgagccaggacgagtcgcatgatcattcatttgggccaatgcccatatccgctaatgggagcaacctatatgacgcagtccggatgggcgccggcagttccatcattgagaatctgcaatcacagctgaagctgcgggaaggagaaatcacccatctgcagcttgaaatcggcaatctcgagaaaaccaggagcatcatggccgaggagctggtcaagttaacgaaccaaaacgacgaactcgaggagaaggtaaaggagattccaaaactgcgaactcaactgcgagacttggatcaacgctacaacacaattctgcagatgtatggcgaaaaggctgaagaagcggaagaactgaggctcgatttggaagatgtaaaaaacatgtataagacccaaatcgacgaactcctgcgacaatccctaagctag

SEQ ID NO: 208105 - DNA, 4950 bp, synthetic construct
  misc_feature 1..4950: note = Description of Artificial Sequence: Synthetic coding sequence
  source 1..4950: mol_type = other DNA
atggagagcgtggagaaggactggggctggggcctgtggcggaaccttcgatgtctgggtcatgcgcaccagggtaagtgctgcacagagggtggcatctccagtacaaccaaaacatcaagtgaaaacgggtcatgttgcttcgagaaggctgcgaggaaggaccacgtttgccggttcatcggctgcgggaggaacgatcgcttcaactacgttgttatgcagttgcaaggtagaaacttggctgacctgcgaagatcacagagcaggggaacctttactattagcaccacactgagattaggcaggcagattctggagtctattgagtccattcactcagtggggtttctgcaccgtgatattaagccaagtaattttgccatgggacggtttccatctacatgcaggaagtgttacatgttggatttcggcctagcccgacagtttaccaattcctgtggtgacgtgcgaccaccccgggccgttgctggtttcaggggcacagttcgctatgcaagcatcaatgctcacaggaatagggaaatgggccggcacgacgacttatggagccttttctatatgctggtcgagtttgtagtaggacaactgccttggagaaagattaaagataaagaacaggtcggctctattaaagaacgatacgatcacaggctcatgctcaaacacctacccccggaattctcaattttcctcgatcacatctccagccttgattacttcaccaagcctgactaccagatgagcattagggttacgagaaagagttataaggtgtctacaagcggcccccaagcgttcaacagcctgagctacacaagcggtcccggagcttgtatatcctcttcgtctttcagtaggatggggtctagttcattccgcggcggcctgggagcaggctacggcggcgcctccggcggcatcactaccatcaccgtcaaccaaagcctgctgtcgccactgaacctcgaggtcgacccaaacattcaggcggtaaggacccaggaggagaagcaaatcaagacacttaataacaaattctttagcttcatcgataaagtgagatttctcgagcagcagaacaaaatgctggaaactaagtggagcctagtacagcaacagaaaatggctagatctaacatggacaatatgttcgagagctatattaataatctgaagtggcagctggaaacgctcggccaagaaaagctgaagctcgaagctgagcttggaaatatgcatggtctggtggaagattttcggaataaatacgaagtggagataagcaaatgtacagagatggagaacgagtttgtcctcatcaaagagtacgtggacgaagcatatatgaataaaatggaacttgaatcatctctgaaagagcttaccgcaaaaataagtttcctgagacagttatatgaagaagaaattggcagttgctccccccgttctcgcattcacttatggtgctgctcctggaccaccgcagcttcgtggacttggacggcttcctcgctccgatcacgacctgagggttttcccggtggatgtcatgctgatacagagcaacgaggggagttggcaatcaaagacgcaaatgccaaactgagcgaactggaggccgccctccagttagccagtcaagatatggcacggcagctgagggagtaccaggagctgatgaatgtgaaactggcactggacatcaagatcgcaacctatcggaaactcctggagggggaggaaagctggctggagtccggaatgcagaatatgtcaatacacatgaagacaactagctcttatgcgggggggcagagcctcgcatacggaggactaacttctcctggtttatcatatggcctgggttcttcttttgggagcggaatgggctcttcgtcattctcacatacctcgagctccagggcagtggtgatgaagaagatcgagaccagggatggcaaactcgtctcagaaagctccaatgtccttcccaacctgcgaattacagccaccctcctcacatcagtattcgacaactctatcaaaacttttggtgttattgagtctgaccctttcgattgggaaaaaactggaaatgatggctccctcaccaccactacaaccagtaccacccctcagctccacacacggctgactcccgccgcaatcggaatagcgaacgctacgccaatcccaggggatctgctgcgcgaaaacacagacgaagtgtttcctgatgagcagttgtccgatggcgaaaatggcatccctgtgggcgtcagtccagacaagctccccggatcccttggccaccctcggccgcaggagaaggatgtatgggaggaaatggatgcaaacaagaacaagatcaaactggggatctgtaaagccgcgacagaagaagaaaattcccacgggcaagctaatggtttgctgaacgcacccagtctcggaagtcctatacgagtcaggtcggagattacccagcccgaccgagatatccccctggtgcgcaaacttaggtctattcatagcttcgagttggaaaagcgcttgacactggaacccaagcccgatacagacaagttcctggagacctgtctcgagaaaatgcagaaagacacttctgctggtaaggagagcatcctgccagcccttctccataaaccatgcgtacctgcagtcagcaggaccgatcatatatggcattatgatgaggaatacctacctgatgcgtctaaaccggccagcgccaacacaccggagcaagctgacgggggtgggagcaacggctttatcgccgtcaacctgagttcctgtaaacaggagatagatagtaaggagtgggttatcgtggacaaggagcaggatctgcaagactttagaactaatgaggccgtcgggcataaaactaccggaagtccctccgacgaggagcctgaggtgctgcaggtgcttgaagcctccccgcaagatgagaaactgcaattaggcccgtgggcggagaacgaccacctcaagaaggagaccagcggcgttgtgctggcactgagcgctgagggacctcccaccgcagcgagcgagcaatacacagatcgcttggaattacaaccaggagccgcaagccagtttattgccgccaccccaacttccctaatggaagcccaggcggagggcccacttacagccatcactataccccggccatccgtggcaagcacccagtctacgtcaggttctttccactgcggacagcagcccgaaaagaaggaccttcagcctatggagcctacagtagagctttactccccgcgagagaatttttccggcctcgtggtgactgaaggcgagccaccctcggggggaagcagaaccgatctaggtttgcagattgatcatattggacatgatatgctcccaaacattcgtgaaagtaataagtcccaagatctcggccccaaggaactaccggatcataatcgcctggtcgtgagagagttcgaaaaccttcccggcgagacagaagaaaagagcatcctgttggagagtgacaacgaagacgagaaactgagtcgcggccagcattgcattgagatcagttcactgcccggcgaccttgttattgtcgagaaagatcactcagccactacagaacctttagatgtgacgaaaacccagacattcagcgtggtgccaaatcaggacaaaaataatgagataatgaagctactcacagtgggtacttctgagatttcctcccgagatatcgatccccatgttgaaggccagatcgggcaggtggccgaaatgcagaaaaacaagataagcaaggacgacgacattatgtcagaagacttgccgggccaccagggcgacttgtcgacgttcctgcaccaagaaggaaaacgcgagaagatcacacctagaaatggtgagttgtttcattgcgtaagcgagaatgagcacggtgctcccactaggaaagatatggttcggtctagtttcgtcaccaggcacagccgaatcccagtcctggctcaggagatcgacagtactttggaatcctcatcccccgtgagcgcgaaagaaaagctgcttcaaaaaaaagcttatcaaccagatctcgtcaagctgttagtggagaagagacaatttaaatcatttctgggcgatctcagcagcgcttctgacaaattgctcgaggagaaactcgctaccgtgcctgccccattctgcgaggaagaggtgttaacacctttctcacggctcacagtggatagtcatctctcccgcagcgccgaggattctttcctttctcctatcatctcacaaagcagaaagtccaaaataccccgccctgtgtcctgggtcaatacagatcaagtaaactcatcgacatctagtcaattctttccaagaccaccacccggcaaaccaccaacaaggcctggcgtcgaggcccgactgcgacgctacaaggttttaggctcgtctaacagtgattcggatttgttctccagacttgcacagattctccagaacggttcccagaaacccagatccaccacccagtgtaagagtccaggaagtcctcacaacccaaagactccccccaaaagtcccgtggtacccagacgatcaccttcagcctcacctcggtcaagcagcctgccacgcacctcctcatcgtcacctagtagggctggtaggccacaccacgatcagcgatcttcgtctccacatctcggcagaagtaaatcaccaccttctcattctgggtcgtccagttctagacgtagttgccagcaggagcattgtaagccgtctaaaaatggccttaaaggcagcggcagtctccatcatcatagtgcgtccaccaaaactccgcagggcaagtccaagccagccagcaaactctctcggtag

SEQ ID NO: 208106 - DNA, 3735 bp, synthetic construct
  misc_feature 1..3735: note = Description of Artificial Sequence: Synthetic coding sequence
  source 1..3735: mol_type = other DNA
atgagcggcggcggcgagcagctggacatcctgagcgtgggcatccttgtgaaagaaagatggaaagttctgagaaagatcggaggaggaggctttggagagatatacgatgctctggatatgttaaccagagagaatgtggccctcaaggtcgaaagcgctcaacagccaaagcaagttttgaaaatggaagtcgcagtcttgaagaaactccagggaaaggatcacgtttgtcgtttcattggctgcggcaggaacgatcgcttcaattacgttgtaatgcaactgcaggggagaaatctggcggatctccgaagaagccaaagccggggaaccttcacaatctccacaacactaagattgggccgtcagatcctggagtcaatcgagagtattcactccgtggggtttctgcatagagacattaaaccatcgaactttgctatgggtcgctttccaagcacctgtcgcaaatgttacatgctggatttcgggctggctcggcagttcaccaatagctgtggcgatgtccgacctccccgggccgtcgcagggtttcgaggaactgtgcggtacgctagcatcaatgcacacagaaaccgcgaaatgggccgacatgatgacctgtggagtttgttctacatgctagtagaattcgttgtcggccagctgccgtggagaaaaattaaagacaaggagcaggtcggcagcatcaaggagcgatacgatcataggctgatgctcaagcacctgcctcccgagttttctatctttctggaccatatttcctcactcgactatttcacaaaacctgactaccagttgttgactagcgtttttgacaactctatcaagacattcggcgttatagagtcagacccattcgactgggagaagacgggaaatgatggaagcctcacaacaactaccacaagcactacaccccagttgcacactcgcctcacgcccgccgctatcggcatagctaacgctacccccatacctggcgacctgcttagagaaaacactgatgaggtatttcctgacgaacagctgagtgacggcgagaacgggataccggtgggggtcagcccggacaagctgccagggtcacttgggcatcctaggccccaagagaaggacgtttgggaagaaatggacgcaaacaagaataaaatcaagttggggatttgcaaggccgcaactgaagaagaaaacagtcacgggcaggcaaatggcctgctaaacgccccctcactgggctcaccaatacgggtgcgctccgaaattactcagcccgaccgagatatcccacttgtccgtaagctcaggtcaatccattcattcgaactggaaaagcgactgacactcgaacccaagcctgacacggacaagtttctcgagacctgtcttgagaaaatgcagaaggatacctccgcggggaaggaaagcatactgcctgcgctgcttcacaagccctgcgtgcctgccgtaagccgtacagaccacatatggcactacgacgaggaatacctgccagacgcgagcaagcctgcatcagccaacactccagagcaggctgatgggggcggaagtaatggcttcatagccgtaaacttatcctcttgtaagcaggagatcgactcaaaagaatgggtcattgtggataaggagcaggacttgcaggattttcggactaacgaagcggtgggccacaagacaactggttctccctccgacgaagaaccagaggtgttgcaggtgctcgaggcctctccccaggatgagaagctgcagctcggaccatgggcggagaatgaccatctgaaaaaggagacttctggcgtggtgctggcactctcagctgagggaccgcccaccgcggcaagtgagcagtacaccgacagactcgaactccagcctggtgccgcttctcagtttatagccgctactcctacgagtctgatggaggcccaggccgaagggcccctgaccgcaatcaccatcccgcgcccatccgtagcaagtacccagtccaccagcggctctttccattgtggccaacagcccgagaagaaggatctgcagcccatggagccaactgttgaactctactcgcccagggaaaacttctctgggctcgtggtgaccgaaggcgaaccccccagcgggggaagccgcaccgatctagggctgcaaattgatcacattggccacgacatgctacctaacatcagggagagcaataagagtcaggacctgggccctaaagaactgcccgaccataacaggctggtcgtgcgtgaattcgagaatctccctggtgaaacagaggagaagtctattcttctcgagtcagataatgaggacgagaagctgtcccgcggacaacattgcattgagatctcctccctcccaggcgacttagtgatcgttgaaaaagatcacagcgcgacgaccgagccattggacgtgacaaaaacgcaaactttctccgtcgtcccaaatcaggataagaataacgaaattatgaaactgctcacagttggcacttccgagataagttctcgcgacatcgacccgcatgttgagggccagatcgggcaggttgcggagatgcagaaaaacaagatatcaaaggacgatgatatcatgtctgaagacctgcctggccatcagggcgacctgtcaacctttttacatcaagaaggtaagagggagaagatcacaccccgtaacggggaactattccattgcgtgagcgagaatgagcatggagccccaacaaggaaagacatggttcgaagctccttcgtgaccaggcacagccggattcctgtcctagcacaggagattgactccacgctggagagctcaagcccggtgtccgctaaggagaagctgctgcagaagaaggcctaccagcctgatctggtgaaactgttagtagaaaagcgtcagtttaagtcgtttttgggagatctaagttctgcttcggacaagctgctcgaggaaaagcttgccacagttcctgccccattctgcgaagaggaggtgctgacgcccttcagccgtctgaccgtggacagccacctgagcagatcagcagaggatagcttcttgtcaccgatcatctcgcaaagccgcaagagtaaaataccccggcctgtatcatgggttaacacggatcaagttaattcctcaacctcatcacagttcttccccagaccgccgccaggtaagccccctacccgcccaggggttgaggcccgactgcgaagatataaggtcctgggatcttctaactccgactcagacttgttttcacgcctcgcacaaattcttcaaaacggttctcagaaaccccggagtactacacagtgcaagtcccccgggtcaccacataacccgaagacaccacctaaatcccctgtagttccaagacgcagcccaagtgcaagccccaggtcctcatccctcccgcggacatcctcgtcctctccgagccgtgcagggagacctcatcacgatcagcggtccagtagcccccatcttggccggtccaagagcccgcccagtcacagtggttcctcatcctcaaggagaagctgccagcaagaacactgtaagccttccaaaaacggactcaaggggagtggcagtctccaccaccactcagcatcaaccaagacaccacagggcaagagcaagccagcatccaagctgtcaagatag

SEQ ID NO: 208107 - DNA, 3525 bp, synthetic construct
  misc_feature 1..3525: note = Description of Artificial Sequence: Synthetic coding sequence
  source 1..3525: mol_type = other DNA
gagcccggcaaggaccacgtgtgccggttcatcggctgcggccggaacgacaggttcaattacgtggttatgcagctccagggacgtaacctggcggatctgagaaggagccagtccaggggaactttcacgatttccactaccctgcgtctcgggcggcagattctcgaatccatagagtccattcactcagtcggatttctgcacagggacatcaaaccctccaatttcgcgatgggaagatttccttcgacctgccggaagtgctacatgctcgacttcggcttggccagacagtttaccaattcctgcggcgacgtcaggcccccccgagctgtagcggggtttagaggcacggtgagatacgctagcatcaacgcacatagaaatcgtgagatgggaagacatgatgacttgtggtctctcttttacatgctcgtcgagtttgtggtgggccagctgccttggcggaaaattaaggataaagagcaggtgggatctattaaagagagatacgaccatcgattgatgctgaagcatctcccgcctgaattctcaatttttctggatcacatttcctctctggactattttaccaagcctgactaccagcttctaacttcagtatttgataattctattaagacttttggagtgattgagtcagacccttttgactgggagaagacggggaatgacggaagtctcaccacaactaccacttcaaccacaccccagctacacacgagactgacacccgcggccattggaatagctaacgccacacctattcccggcgatctgctgcgggagaatactgacgaagtgttcccggatgaacagctttccgatggcgagaacgggatacccgtcggggtctcccctgataagctccccggctcactcggtcatccacgccctcaggaaaaggatgtgtgggaggaaatggatgccaataagaataagataaagttagggatatgtaaagctgcaactgaggaagagaactcccacggccaagccaacggcctgttaaatgctccttcactaggatcacccattagggtacgatccgagattactcaacctgatcgtgatattcctttggttcggaaactgaggtcaatacactcttttgagctggaaaagcgccttactctggaacctaagccagataccgacaagtttctggagacatgcctggaaaaaatgcagaaggatacctctgcaggcaaggaaagcattctgcccgccctgctgcacaagccctgcgttccggccgtctccaggactgatcatatctggcattatgacgaagagtacctcccagacgcgagtaagccggccagtgccaatacacctgaacaggcggacggcggtgggagcaacgggttcatagcggtcaaccttagcagctgcaaacaagagatagattccaaagaatgggtgatcgtggataaggagcaagatctgcaagacttccggaccaacgaggctgtcgggcacaagaccacaggaagtccttcggacgaggagcctgaagtgctgcaagttctagaagcaagtccacaggacgagaagcttcaattgggaccctgggctgaaaacgatcatcttaagaaggaaacctccggagttgtgcttgctttgtcggctgagggcccacccactgctgcctcagaacaatacaccgacaggctggaactgcagcccggtgcggcaagtcagtttatagccgccacacctactagcctgatggaagcacaagccgagggaccactcaccgccatcacgattccccgccccagcgttgcaagtacccagagcacctccggaagcttccactgcggtcagcagcccgaaaagaaggatcttcaacctatggagcctacagttgagctgtactcaccacgggagaactttagtgggttagtggtgactgagggagaaccaccatctggtggcagccgcacagatctgggactgcagatcgaccacattgggcacgacatgctcccaaatattcgggagtcgaacaaaagccaagacctgggccccaaagaattaccagaccacaatcggttagtcgtgcgagagtttgagaaccttccaggagagacagaagaaaaatccatcctgctcgaaagcgacaatgaagacgaaaagctctcacggggacagcactgtatcgagatttcatctctgccaggagaccttgttatcgtggaaaaggaccactctgctacgactgaacctttggatgtcacaaaaacacagacgttctctgtcgtacctaatcaagataagaacaatgaaatcatgaaacttctgaccgtggggacctcagagatatcaagtcgcgacatagacccccacgtcgaaggacaaattggtcaggtcgccgagatgcagaagaacaagatctcaaaggacgatgacattatgtccgaagatcttccaggacatcagggggacttgagtacctttctacaccaagagggcaagcgggaaaaaatcactcctaggaatggagaactgttccactgtgttagtgaaaacgagcacggggccccgacccgcaaagatatggtacggagtagcttcgtgacccgccactcccggattcccgtactggcgcaggagatagactccactcttgagagctctagccccgtgagcgctaaggaaaagctgctccaaaagaaggcatatcagcctgatttagtgaagctgctggtcgaaaagcgacagtttaagagtttcctaggggacctgtccagtgcctccgacaagctgctcgaagagaagctagccacagttccagccccattttgtgaagaggaagtcttaacccccttctcacgactgactgtggactcccatcttagtaggagcgcggaggattctttcctgtctccaattatcagccagagcaggaagtccaaaatccccaggcctgtttcttgggttaacaccgaccaggtgaactctagtactagcagtcagttttttccacggcccccccccggcaaaccccccacaaggcccggcgtggaggcccgcctgcgtagatataaggttctgggttcctccaactccgacagcgatcttttttcaagattggcccagattctgcagaacggcagccagaaaccacgaagcaccacacagtgcaagagccctggctctccccataatcctaagactcctcctaaatcgcccgttgtgcctcggcgatcaccgagcgccagccctagatcctccagcctgcctcgcacttcatcctcgtctcccagccgggccggacggccacaccacgatcagaggtcctcatcaccccacttaggcaggtccaaaagccctccatctcacagtgggtcctcatcttctaggcgctcctgccagcaggagcactgtaagccttccaagaatgggctgaaggggagcggctccctgcaccatcatagtgcctccactaaaaccccccagggaaagtctaaacctgcctcaaagctgtcccgttag

SEQ ID NO: 208108 - DNA, 2244 bp, synthetic construct
  misc_feature 1..2244: note = Description of Artificial Sequence: Synthetic coding sequence
  source 1..2244: mol_type = other DNA
atgaccagcttccaggaggtgcccctgcagaccagcaacttcgcccatgtcatctttcagaacgttgccaagtcgtacttaccaaatgcccatctggagtgccattacacattgacaccgtacatccacccacatccaaaagactgggtaggtatctttaaggtggggtggagcaccgcgagagactactatacattcctctggtctccgatgcccgagcactacgtggagggttcaaccgtcaattgcgtgttagcttttcaaggatactatctacccaatgatgacggggagttttatcagttctgttatgtaactcacaagggcgaaataaggggagcttctaccccattccagttccgggcttcaagcccggttgaagagttgctgaccatggaagatgagggaaattcagatatgcttgtcgtcactacaaaggctggccttctcgaactgaagatagaaaaaaccatgaaagaaaaggaggagttactgaaactgattgcagtgctggagaaagagaccgcacagcttcgcgagcaggtgggtcgcatggagcgtgagctaaaccatgagaaggaaaggtgtgatcagctacaggctgaacagaaaggcctgaccgaggtcactcagtcactaaaaatggagaacgaggaattcaagaaaaggttttccgacgctacaagtaaggcccatcagctggaggaggacattgtcagcgtgacccacaaggccattgagaaggaaaccgaactggactcactgaaagacaaacttaagaaagcccagcacgagagggaacagttagagtgtcagctgaagacagaaaaagatgagaaagaactgtacaaggttcatttgaagaacactgaaattgaaaatacaaaactgatgtccgaagtgcagactttaaagaatctcgatgggaacaaggagagcgtcattacgcattttaaagaggaaatcggacgactgcagttgtgcctggcagagaaggagaacctgcagaggactttccttttgacaacctcgtccaaagaggacacgtgctttctcaaggagcaactccggaaagctgaagagcaggtacaggcgacaagacaggaggtcgttttcctggccaaggaactgtccgacgctgtgaatgtccgcgacagaacaatggcagatcttcacacagcccgtctggagaacgaaaaggttaagaagcaattggcggatgcagtggcagaactcaaactgaatgctatgaagaaggaccaggacaagacagacaccttggagcatgagctgagaagagaagtcgaagatttaaagctgcgccttcagatggccgcagatcactacaaggaaaagtttaaggagtgtcagcggctgcagaaacagatcaataagctttccgatcagtcagccaacaacaataacgtgtttaccaaaaaaaccggcaatcaacaaaaggtgaatgatgcctccgtgaacaccgatcccgcgacttccgcctccaccgtcgatgtgaagccttctccatcagcagctgaagcggatttcgacatcgtaactaagggtcaggtgtgcgaaatgaccaaagagatcgcagacaagaccgaaaagtataataagtgcaagcagctgctgcaggacgagaaggccaaatgtaataagtatgcagacgagctagccaaaatggagctaaaatggaaagagcaggtaaagatcgccgaaaacgtaaaattggagctggctgaggtgcaggataattataaagagcttaaaaggtcccttgagaatcccgcggaaagaaaaatggaagacggagctgatggagctttttaccctgacgagattcaacgaccacccgtgcgagttccgtcatgggggctggaggacaatgtggtgtgtagtcagcctgctcgcaatttttccaggcctgacgggctcgaagactccgaggattctaaggaagatgaaaacgtccctactgcccctgaccccccttcgcagcatttacgtgggcacggcacgggcttctgctttgactcgtcattcgacgtgcacaaaaagtgccctctctgtgagctgatgttcccccctaattatgaccagtctaaatttgaggagcacgtcgagtcccattggaaggtgtgccccatgtgttctgagcagtttcctcctgattacgaccagcaagtatttgagcgccatgtacagactcacttcgatcaaaacgtgcttaacttcgactag

SEQ ID NO: 208109 - DNA, 2370 bp, synthetic construct
  misc_feature 1..2370: note = Description of Artificial Sequence: Synthetic coding sequence
  source 1..2370: mol_type = other DNA
atgaccagcttccaggaggtgcccctgcagaccagcaacttcgcccacgtaatctttcagaacgttgccaagagttaccttcctaatgctcatctcgagtgccactacaccctgaccccctacattcatccacaccccaaagattgggtgggaatctttaaggtgggctggtcaaccgctagagactattatacctttttatggtcgccgatgcccgaacattacgtggaaggttctaccgtaaattgcgtgcttgccttccagggctattacttgcctaatgacgacggggagttttatcaattttgttacgtgacccacaagggcgagatccgcggggcttctactccattccagttcagggcctccagtccagtcgaagaactcctgaccatggaagatgaggggaactctgacatgttggtagtgaccacaaaggccggcctgctcgagctaaagatcgaaaaaaccatgaaagagaaggaagagctgttaaaactcattgcagtgctggaaaaagaaaccgcccagttgcgggaacaggtcggacggatggaacgggagctaaatcatgaaaaagaacggtgtgaccagctccaagctgagcagaaggggttgaccgaagtgactcagtcactgaaaatggagaatgaagaattcaaaaagcggttttctgacgccacatcaaaggcccatcagcttgaggaagatattgtatctgtaacccacaaggcgatcgagaaggaaactgagcttgactctttgaaagacaagcttaagaaagcgcagcatgaaagagagcaacttgaatgtcagctgaaaaccgaaaaagatgaaaaagagctatacaaagtgcacctgaaaaacactgagatcgaaaataccaaactaatgagcgaggtccagacacttaaaaatttggatgggaataaggagagcgttattacacacttcaaggaagagattgggaggctgcagctgtgcctagccgaaaaggaaaatctccagagaacctttctgcttacgacttcctctaaagaggatacttgttttcttaaggagcagttgcgcaaagccgaggaacaggtgcaggccacacgtcaagaagtcgtcttcctggctaaagaactgtcagacgcagtaaatgtgcgtgacaggaccatggcagatttacacacagcccgcttggagaatgagaaggtgaagaaacagctggcagacgcagtagccgaactgaagctgaatgccatgaagaaagatcaggacaagaccgatactttggagcacgagctccggagagaggtggaggacctaaagttacgactgcagatggcagcggatcactacaaggagaaatttaaggagtgtcagcggttacaaaagcagattaataaactgtcagaccaatcggctaacaacaacaatgttttcaccaagaaaacaggcaaccagcagaaggtgaacgacgccagtgtgaatactgatcctgctacttcagctagtactgtcgacgtaaagccttcacctagtgcggcagaagcggactttgacattgtcaccaaggggcaagtttgcgaaatgaccaaagagattgcggacaagacagagaaatacaacaagtgcaagcagttgcttcaggacgagaaggctaaatgcaacaaatatgccgacgagttggccaagatggaactcaagtggaaggagcaggtaaaaatagctgagaacgtcaagctggagctcgctgaagtgcaggataactacaaagagctgaagcgtagtctggagaacccggcagaaaggaagatggagggtcagaactcccagtcacctcagtgctttaagacatgtagtgaacagaatggctatgtcttgacattaagcaatgctcagccagtgctgcaatacgggaatccttacgcatcccaagaaaccagagacggtgccgacggggccttctacccagacgaaattcaacgacctccagtaagggttccctcctgggggctcgaggataacgttgtgtgcagccagccggcccggaacttcagccgaccagacggcctggaggacagcgaagatagcaaggaagatgaaaatgtgccaactgcccccgaccctccgtctcagcatttgcgagggcacggaaccggattctgttttgatagctcttttgatgtgcacaagaagtgcccactatgcgagcttatgtttccacccaactacgatcaatccaaatttgaagaacacgtggaaagccactggaaggtttgtccaatgtgctccgaacagtttcctcctgattacgatcagcaggtgtttgagcgacatgtacagacgcattttgatcagaacgtgctaaatttcgattag

SEQ ID NO: 208110 - DNA, 417 bp, synthetic construct
  misc_feature 1..417: note = Description of Artificial Sequence: Synthetic coding sequence
  source 1..417: mol_type = other DNA
atgaccagcttccaggaggtgcccctgcagaccagcaacttcgcccatgtgatcttccaaaacgtggccaagagctacctcccaaacgcgcacttagagtgccactatactctgactccttacattcatccgcaccctaaagattgggtgggcatcttcaaagtgggctggtcaacggcacgggattactacacgttcctgtggagtccaatgccagaacattacgtggagggctctactgtgaattgtgtgctcgcgtttcaggggtattacttgccaaacgatgatggcgagttctaccagttttgctatgtaactcacaagggcgaaatccgaggagcatccaccccatttcaatttagggcctcctcccccgtggaggagctgcttaccatggaggatgagggtaactcctag

SEQ ID NO: 208111 - DNA, 297 bp, synthetic construct
  misc_feature 1..297: note = Description of Artificial Sequence: Synthetic coding sequence
  source 1..297: mol_type = other DNA
atgaccagcttccaggaggtgcccctgcagaccagcaacttcgcccatgtgatattccagaatgtagccaagagctatttgcccaacgcacatctggagtgccactacactctcaccccctacatccatccccatccaaaggactgggtgggcatttttaaagtcggatggtcaactgcgcgggactattacacgttcctgtggtctcccatgccagagcattatgtggagggtagcacggtgaattgcgtgttagctttccagggatattatttgccaaacgacgacggcgaatag

SEQ ID NO: 208112 - DNA, 1773 bp, synthetic construct
  misc_feature 1..1773: note = Description of Artificial Sequence: Synthetic coding sequence
  source 1..1773: mol_type = other DNA
atgaaggagaaggaggagctgctgaagctgatcgccgtgctggagaaggaaactgcccagctgagagagcaggtcggcagaatggagagggaactgaatcatgagaaagagcgttgcgaccagttgcaggcagagcagaaagggctgacagaagtcacacaatctttgaagatggagaacgaagagttcaaaaagagattttccgatgctacttccaaggctcaccaactggaggaggatattgtcagtgtaactcataaggccattgagaaggaaacagagctggatagccttaaagataagctgaagaaagcccagcacgaacgggagcaattggaatgtcaactgaaaactgagaaggacgagaaggagctgtataaggttcaccttaagaatacagagatcgaaaacaccaagcttatgtctgaggtacagaccctcaaaaatctggacggtaacaaggagagcgtaatcactcactttaaagaagaaatcgggcgtctgcaactctgcctggcagaaaaagagaacttacagagaacatttctcctgaccacttcttccaaggaggatacctgtttccttaaagagcagctgaggaaagccgaggagcaggtgcaggccactaggcaggaagtggtgtttctggcgaaagagcttagcgatgccgtgaacgtgagagatagaacaatggcagacctgcacactgcccgcctcgaaaatgaaaaggtgaagaaacaacttgccgacgccgtggctgaactgaaactgaacgccatgaaaaaagatcaagacaagaccgacacactggaacatgagttgcggcgcgaagtggaggatttgaaactaagactgcagatggccgctgaccactacaaggagaagttcaaagagtgccagcgactacagaagcaaattaataaactgtctgaccagtctgcgaacaataacaatgtgttcacaaaaaagaccgggaaccaacagaaggtaaacgatgctagcgtgaatacagacccggcaactagcgctagcacggttgatgtcaagccatctcccagcgcggccgaagccgatttcgatatcgtcactaagggtcaggtgtgtgagatgacgaaggagattgccgataaaacagagaaatacaataagtgtaagcagctcctgcaggacgagaaagcgaagtgcaataaatacgctgacgaactcgccaagatggagttaaagtggaaagagcaagtgaagatcgccgagaatgtcaagctcgaactcgcagaagttcaggataattataaagagctgaagaggtcgctcgaaaaccccgccgagcggaagatggaggacggcgccgatggtgccttttatcccgacgaaattcaacgccccccagtgagagtcccctcttggggtttagaggataatgtagtttgcagtcagccagcaaggaacttcagtcgccctgatgggttggaagactctgaggacagtaaggaggacgagaatgtgccgactgccccggaccctccaagtcagcatctgcgtggccacggtacaggcttttgttttgattccagctttgatgttcataagaaatgcccactgtgtgagctgatgtttccacccaattatgatcaatcgaagttcgaggagcacgtggagtctcattggaaggtctgccccatgtgtagtgaacaattccctcctgactatgaccagcaagtgttcgagcgtcatgttcagacccattttgaccagaacgtactcaatttcgactag

SEQ ID NO: 208113 - DNA, 2244 bp, synthetic construct
  misc_feature 1..2244: note = Description of Artificial Sequence: Synthetic coding sequence
  source 1..2244: mol_type = other DNA
atgaccagcttccaggaggtgcccctgcagaccagcaacttcgcccatgtgatttttcagaacgtggcaaagagctatctccctaatgcgcaccttgagtgtcattacaccctgacgccctatatccatccacaccccaaggactgggtcggcattttcaaggtgggctggtctacggcgcgagactattataccttcttatggtccccaatgccggagcattatgtggaggggagcactgttaattgtgttcttgcattccaggggtattacctgccaaacgatgatggcgagttttaccaattctgttacgtgactcataagggcgaaattaggggggcatctaccccctttcaattccgggcctccagccccgtcgaggagctgcttaccatggaggatgaaggcaacagcgacatgctagttgtgaccacaaaggccggcttactcgaactcaagattgaaaagactatgaaagagaaagaggaactgctgaagctcatcgccgtcctagagaaagagacggcgcagctacgggaacaggtgggtagaatggagcgagagttgaatcatgaaaaggagagatgcgatcagctacaggctgagcagaaaggcctcactgaggtaacgcagtcactaaagatggaaaacgaggaatttaaaaagcgatttagcgacgccacaagcaaggcccaccagttagaagaggacatagtcagtgttactcataaggctatcgagaaggaaacggagctggacagcctcaaggacaaactgaaaaaagcacaacacgaacgagagcagctggaatgtcagttgaaaaccgaaaaagacgagaaagagctgtataaagtccacctgaaaaacacagaaatcgagaacactaaactgatgagcgaagtgcagaccctgaagaacctggatggcaacaaggaatctgtcattactcatttcaaagaagaaatcgggaggctgcaactatgcctggctgagaaggaaaatcttcagaggactttcttacttacaacttcatcaaaagaggatacatgctttctcaaagaacagctgaggaaagccgaggagcaggtgcaggctactcggcaggaggtggtttttctggccaaggagctatcagacgccgtgaacgttagagaccgcacaatggctgacctccatactgcaaggctggagaatgaaaaggtgaaaaagcaactggcagacgcagttgccgagctcaaacttaacgccatgaagaaggatcaggacaagacggacacacttgagcacgaactgcgccgtgaggttgaggatttgaagctccgactccagatggctgcagaccactacaaagagaaatttaaagaatgccagcggctgcagaaacagattaataaactgagcgatcaatccgctaataataataatgttttcactaagaaaactggcaaccaacagaaggtaaatgatgcgagcgtgaataccgaccccgccacctctgcttcgaccgttgacgtcaagccctctccgtccgccgctgaagccgatttcgatatcgtgaccaagggccaggtgtgcgagatgacgaaagaaattgctgacaagactgagaagtacaataaatgcaaacagctgctgcaggacgagaaagcaaagtgcaacaaatacgccgacgagttagctaaaatggagttaaaatggaaagagcaggtgaagattgccgagaacgtgaagctagaactggccgaagttcaggacaattacaaggagcttaagcggagcttagagaaccccgcagagaggaagatggaagacggggccgacggagccttctatcccgacgaaatacaaaggccacccgtcagggtcccctcttgggggttggaagacaacgtagtgtgctcacaacctgcccggaatttttctcggcctgacggcctagaggacagcgaggatagcaaagaagacgaaaatgtccccacggcccctgatcctccatcacaacatctgagaggacatgggacaggattctgtttcgactcaagcttcgacgtgcacaagaaatgtccgctgtgcgagttgatgttccctcccaactacgatcaatcgaaatttgaggaacacgtagaatcacattggaaagtttgccccatgtgctcggaacagttccccccagattatgaccaacaggtgtttgaacgacacgtgcaaacacattttgatcagaatgtcctgaattttgactag

SEQ ID NO: 208114 - DNA, 3480 bp, synthetic construct
  misc_feature 1..3480: note = Description of Artificial Sequence: Synthetic coding sequence
  source 1..3480: mol_type = other DNA
atggagcccatcaccttcaccgcccggaagcacctgctgagcaacgaagtgagtgttgacttcggactgcaactggtggggtcattgccggttcactcacttactaccatgccgatgctcccttgggttgtggccgaggtgcggaggctgagtagacaatcaacccgtaaggaaccagttacaaaacaagtgcggttgtgtgtcagccccagtgggttaagatgtgagccagagccgggtcgtagccaacagtgggacccactgatttactcttccatttttgaatgcaaacctcaacgggtgcacaagctaatacataattcccatgatccctcctatttcgcttgcctcattaaagaggacgccgtgcatcgacagtctatttgctatgtgtttaaggcagacgaccagacaaaagttcccgagattataagcagtattcggcaggcaggtaagatagcccggcaggaggagcttcattgcccaagcgagttcgacgatacattttcgaagaagtttgaggtgttgttttgcgggcgcgtgactgttgctcacaagaaagcaccacctgcacttattgatgaatgtattgaaaaattcaatcacgttagcggatctcgcggctccgagagcccccggcctaatccgccacacgccgccccaaccgggtctcaggagcccgtgagacgaccgatgagaaaatcgttctcccagccaggacttcggagcctggcgttccgtaaggagctgcaagacggcggcttgcggagcagtggctttttctccagttttgaggagagcgacatcgagaaccatctgattagcgggcacaatatagttcagcccacagacatagaggagaacagaaccatgctatttaccattgggcagagtgaagtttatctgatctccccagacaccaagaaaattgctctcgagaagaactttaaggagatatcattttgtagccagggcatccgacacgtagaccacttcggctttatctgtagagagagcagcggcggcgggggattccattttgtgtgctacgtgttccagtgcaccaatgaggcactcgtggacgaaataatgatgactttgaaacaggcttttactgttgccgccgtgcagcagacagccaaggcacccgctcagctgtgtgaaggatgtccccttcagagcctgcataagctgtgtgaaagaattgagggtatgaattccagcaagaccaagctggagctccaaaagcatcttacaacacttaccaatcaagaacaggctactatctttgaggaagtgcagaagctgagaccccgaaatgaacagcgggaaaatgagctgatcatctcattcctcaggtgcttgtacgaggagaagcagaaggagcacattcatatcggtgaaatgaaacagacatcacaaatggccgccgaaaacattggaagcgagctccctcccagcgcaacacgcttcagattggacatgttgaaaaataaagccaaaagaagcctaaccgagagtttagagtccatcctgagtcgtggaaacaaagctagggggctacaggaacacagcatatcagttgacttggacagctccctgtcttctacgttaagtaatacgtcaaaagagcccagtgtatgcgaaaaagaagctctgccaatctcagaaagctcctttaagctgctgggcagctctgaggacctgtcatctgactccgaaagtcacttgcctgaggagccagccccacttagcccacagcaagcctttcggcggagggctaatacgctgtcccattttcccatcgaatgccaagaaccccctcagcctgcaaggggaagcccaggtgtaagtcagcggaaacttatgaggtatcatagcgtctcaaccgagactccccacgagcggaacgtggacccttcgccggtgggcgaaagcaaacacagacccgggcagtcctcagctcccgctcccccccccaggctaaaccctagcgcaagctctcccaacttttttaaatatctgaagcataattcttctggtgaacagtccgggaatgctgttccaaagagtatttcatatcgaaatgcactgcgtaagaaattgcactcatcttcgagtgtgccgaattttctcaagtttctcgccccagtggacgaaaataacacatctgatttcatgaacaccaagagagactttgagtccaaagcaaaccacttgggagactctggcgggactcctgtaaagacccgcaggcactcttggaggcaacagatattcctgcgggtcgccacacctcaaaaggcttgcgacagttcttctcgctatgaagattattcggagctgggagaactgccccccaggagtccattggaacccgtttgcgaagatggccccttcggtccgccacctgaagagaaaaagcgaacatctcgcgaactacgcgagttatggcagaaggcgatcctccaacagatcttgcttttgaggatggaaaaagaaaatcagaagctacaggcctctgagaacgacctgctgaataagcgactgaagctggattatgaggagattacaccatgcttgaaggaggtcacgaccgtctgggagaagatgttatcgacacctggaagatctaagatcaagttcgacatggagaagatgcactcagccgtggggcagggagtgcctcgtcatcatcgcggggaaatttggaagtttctggcagagcagtttcacttaaagcatcagtttcctagtaaacagcagcctaaggatgtaccttacaaagagctgctcaagcagttgacgagtcagcagcacgcaattctgattgacctgggcaggacctttcccacccacccctacttttccgctcagctcggcgccgggcagctatcactgtacaatattcttaaggcttactcactgttggaccaggaggtggggtactgtcaggggctgtccttcgtggccggcattctcctgctgcatatgagtgaagaggaggctttcaaaatgctgaagtttttgatgttcgacatgggcctgcggaaacagtatcgtccagacatgataattctacagatggagaagacaatcaaccaggttttcgagatggatattgctaagcagctccaggcctacgaagtagagtaccatgtgctgcaggaggagctcatcgactcttcacccctgtcagataaccaacggatggataagctcgagaagacgaattcctccttacgcaagcagaatcttgatctcctcgagcagttgcaggtagcaaatggtaggatccaatcactcgaggccactatcgaaaaactgctgtcctccgaatccaagctcaagcaggcaatgctgacgctggaattggagcggtccgctctgctgcaaacggttgaggagttgcgcaggcggagtgccgagcctagcgaccgcgaaccagaatgcacacagccagagccgactggggattag

SEQ ID NO: 208115 - DNA, 3507 bp, synthetic construct
  misc_feature 1..3507: note = Description of Artificial Sequence: Synthetic coding sequence
  source 1..3507: mol_type = other DNA
atggagcccatcaccttcaccgcccggaagcacctgctgagcaacgaggtgtccgtcgattttggattgcagctggttggcagtctgccagtgcacagcctgactaccatgccaatgctcccctgggtggtggccgaggtacgacggctgtcgagacaaagtaccagaaaggagccggtgacaaaacaggtcagactctgtgtatctcctagcggcttaagatgtgaacccgagccgggccggtcacagcaatgggaccctctgatttacagctccatctttgagtgcaagcctcagagagttcacaagttgatacacaactcccacgatcctagttacttcgcatgtctgatcaaagaagatgcagttcaccgccagagtatctgctatgtgtttaaagcagatgatcagaccaaagtgccagagataatttcatccatacggcaggctgggaagattgcaaggcaagaggaactgcactgccctagcgagttcgatgacacgtttagcaagaagtttgaggtgctcttttgcggtagagtcaccgtcgcccacaaaaaggccccccctgcactaatagatgagtgcattgagaagtttaaccacgtgtctggttcacgaggttccgagtcacctagaccgaatcccccccacgctgcacctacgggcagccaagagccagtcagacgtccgatgcgcaagtccttctcccaacctgggctgaggtccctggccttcagaaaggagctgcaagatggaggcctacgctcaagcggattcttcagtagcttcgaagagtctgacatcgagaaccatttgatttcaggccacaatattgtgcagccgaccgacattgaggagaacagaactatgctattcactattggccagtcagaggtatatctgatttcgccggacaccaaaaaaattgccctagagaaaaacttcaaagagatctctttttgcagccagggcatcaggcatgttgatcatttcggattcatatgtcgggagagcagcggcggaggcggatttcacttcgtgtgctacgtcttccagtgtacaaatgaagccctcgtggatgaaattatgatgacgcttaaacaggcgtttacagtcgccgcagtgcaacagactgccaaggcacccgcccagctgtgtgagggatgccccttgcaatcacttcacaagttgtgtgaacgcatcgagggtatgaacagttccaagacaaaactcgaactgcagaagcacttgactactttaacaaaccaagagcaggctacaatatttgaggaagtgcagaagctaaggccgcggaatgaacagagggagaatgaactcattataagtttcttacgatgcctatatgaggagaaacagaaggaacacatacacattggcgagatgaaacagacaagtcaaatggcagccgaaaacatcggctctgagctaccacccagcgccaccaggtttaggctggatatgctcaagaataaagccaagcggtccttgactgagtccctcgaatctatactgagtaggggtaacaaggctcgcggtctgcaggagcatagcatctccgtggacttggattcttccttgagcagcaccctttcaaatactagtaaggagccgtccgtttgtgaaaaagaagcccttcccatatcagagtcttccttcaagctgcttggcagctccgaggatctcagctccgatagcgagagccatttgccagaggagcccgccccgctgtcacctcagcaggcttttcgccggagggccaataccctctcacattttccaatcgagtgtcaggagccgcctcagccggccagaggaagtcccggagtgagccagcgaaagctgatgaggtatcacagcgtttccacagaaaccccacacgagcgaaaggatttcgagtctaaagcaaaccacctgggcgattcaggcggcacacctgtgaaaaccagacggcacagttggagacagcagatcttcctccgtgtcgccacccctcagaaggcctgcgactcctcttcccggtacgaggactacagcgaactgggcgagcttcctcccagatctcctctggaacccgtgtgcgaggacggacccttcggtccgcccccagaagagaagaagcggactagccgggagctcagagagctatggcagaaagctattctccagcaaattctgttgctgagaatggaaaaggagaaccagaaacttcaagccagtgagaacgatctattgaacaagcgccttaagctagactacgaagagattactccctgtcttaaggaagtgactaccgtgtgggaaaagatgctgtccactcctggaagaagtaagatcaaatttgacatggagaaaatgcacagcgcagttggccaaggggtacctcgccaccaccgcggcgaaatctggaaatttctggccgagcaatttcacctgaaacatcagtttcctagcaaacagcagcccaaggacgtaccctacaaagagcttcttaagcagctcacgtctcaacagcacgctattctcatcgatctgggcagaacctttccaactcacccatatttttccgcccagttaggcgccggtcagctgtctctttataacatcctaaaagcatactcccttctcgatcaggaggtgggatactgtcaggggttaagcttcgttgccggaatcctattgctacatatgtccgaggaggaggcattcaagatgctgaagttccttatgtttgacatggggctgcgcaagcaatacagaccagatatgatcatcctgcagatccagatgtaccagctcagtcggcttctgcacgactaccaccgcgacctgtacaaccacctcgaagagcacgagatcggtcccagcctgtatgcagccccgtggtttctcaccatgtttgcctcccagttcccgcttggttttgtggctagagtttttgatatgatcttcctgcaaggtacagaagtgatatttaaagttgcactctccttgctgggatcgcacaaacccctgatactgcaacacgagaacctagagaccatcgtcgattttatcaagagcacactgccaaatctcggcctggtacagatggagaagaccatcaaccaggtgttcgaaatggatattgcaaagcaattgcaggcctacgaggtggagtatcacgtcttacaggaagagcttatcgattccagccctctcagcgataaccagagaatggacaaactggaaaagaccaattcctcccttcgaaaacagaaccttgatttgctggaacagttgcaggtggctaatggacgtatccagagcctggaggctacaatagagaagctgttaagctctgagagcaagctgaaacaggccatgttaactctggagctggagcggagtgccctcttacagactgtcgaagagctacgccggcgatccgctgagccctcggatcgggagccggaatgcacccagcccgaacccacaggagattag

SEQ ID NO: 208116 - DNA, 1299 bp, synthetic construct
  misc_feature 1..1299: note = Description of Artificial Sequence: Synthetic coding sequence
  source 1..1299: mol_type = other DNA
atggagaaggagaaccagaagctgcaggccagcgagaacgacctgctcaataaacggctcaagctagattacgaagagatcacgccatgtctcaaggaagtgaccactgtctgggagaaaatgctatccaccccgggtaggtctaagattaaattcgacatggagaaaatgcattcagctgtgggacagggagtgccaaggcaccaccgtggcgagatctggaaatttctggccgagcagttccatctaaaacatcagtttcctagcaagcagcagccgaaggatgtgccctacaaggaactgctgaagcagttaaccagccagcagcacgctatcttgatcgacctgggccgtacatttcccacacacccctacttctctgcgcaactgggtgccggacagctcagcctgtacaatattctgaaggcatatagtctgctggaccaagaagttggctattgtcagggtctgtcctttgtggcagggatcctgttacttcacatgagcgaggaggaagctttcaaaatgttgaagtttttgatgtttgatatgggactgcgcaaacaatatcgacctgacatgatcatacttcaaattcagatgtaccagctttcgcgcctgcttcacgactatcaccgtgatctgtataatcaccttgaggaacacgagatcggcccctctctgtacgctgccccttggttcttaaccatgttcgccagccaatttccgttggggttcgtagcccgggtgtttgacatgatcttcttgcagggaaccgaggtcatcttcaaagttgctctttctcttctaggttcccacaagccgctgatactacagcatgaaaacctagaaacgatcgtggacttcattaagtccaccctgcccaatctcggcctcgttcagatggagaagaccatcaaccaggtgttcgagatggacatagccaaacagctccaggcatatgaagtcgaataccacgtcttgcaggaggaactgatcgattccagtccgttgagcgacaaccagagaatggataagttggaaaagacaaatagtagccttcggaaacaaaatttggaccttctagagcaactgcaggtcgccaatggccgaatccagtcgctcgaggcaacaattgaaaaactgctcagctcggaatctaagttgaagcaggctatgctgactttggagctggagaggagcgctctcctgcagacagtggaagaactgcgccggcggtccgctgagccttcagaccgggaacctgagtgtacccaacccgaacccaccggggattag

SEQ ID NO: 208117 - DNA, 933 bp, synthetic construct
  misc_feature 1..933: note = Description of Artificial Sequence: Synthetic coding sequence
  source 1..933: mol_type = other DNA
atggcccaggccctgggcgaggacctggtgcagccccccgagctgcaggacgacagcagcagtctgggatcagattcggagttatcagggccagggccttacaggcaggcggatcgatatggctttattgggggtagcagcgctgagcccggcccaggccacccaccagcagacctcattagacaacgcgagatgaaatgggtggaaatgacctcacactgggagaaaacaatgtcacgccggtataagaaggtaaaaatgcaatgccgcaaaggcataccctcggcactgcgagcacggtgctggccgctcttgtgtggtgcgcatgtatgccaaaagaacagccctggtacctaccaggaactggctgaggctccgggcgatcctcagtggatggagaccattggacgagacttgcaccgccagtttcctcttcacgaaatgttcgtatccccgcagggccatggaaggggctcatgtcgctgttcgcgccccaccccttgcatagaccgctctagagcaaccgcgcgcccgcggggtccttggttattatgttgctcgtgcacctgtccacagaggagacccagtggtgcatggtgccgatcagtgcgcagcacttctctgggtacaactggccccacatggtgtcaaagtacagtgccttgcggggcggatactggagccccaggcgccggccattgccgggcagccagggggctaccttggccacctggggataccggctcgccctcgtcccacccccccagggctgctgctgggggcggattgcatgtgacaggggcccagaggggagccgtccgggccggtccggctgcaggggatcaaggtcctgcgggacccgcagcaagattccgagctggcacacccgcaccagctactggtcctcctagacgaggccccagccatctctag

SEQ ID NO: 208118 - DNA, 1662 bp, synthetic construct
  misc_feature 1..1662: note = Description of Artificial Sequence: Synthetic coding sequence
  source 1..1662: mol_type = other DNA
atggacagccccggctacaactgcttcgtggacaaggacaagatggatgccgccattcaggacttggggcctaaagaactctcctgtaccgagctgcaagaactgaaacagctcgcccggcaggggtactgggcccaaagccacgctttgcgtggaaaagtttatcagcggctaattagagacatcccctgcagaaccgtgactcctgacgctagtgtctactctgacatcgtgggcaaaatagtgggcaagcactcatctagctgcctgccactgccggagttcgtggacaatacccaggttcccagctactgcttgaatgccagaggagaaggagcagtccgaaagatacttttgtgtcttgcaaaccagttccctgatatatctttctgtccggccctccctgccgttgtcgccctcctgcttcactattccatcgacgaagctgagtgttttgagaaagcatgtcggatccttgcatgtaatgatcctggacggaggctcatcgaccagtcatttcttgccttcgaatcctcatgtatgacgttcggtgacttggtgaacaaatattgccaggctgcacacaaactgatggtagctgtctccgaagacgtgctgcaggtgtatgcggactggcagcgctggctgttcggcgagttaccactgtgctactttgcaagagtgttcgacgttttcctggtggaaggatataaggtcttatatcgtgtagccctcgctattctcaagttctttcacaaggtgcgcgccggtcagccacttgagtccgacagtgtgaaacaggacatcaggacctttgtgagagatatcgctaaaacggtgagtccagagaaactgctcgagaaggctttcgcgatccggcttttttctcgtaaagaaatccagctcctacagatggctaatgagaaagccctgaagcagaaggggatcactgttaagcagaaacgacagttcgtccatctggccgtgcacgccgaaaacttccgcagcgaaatcgtctccgttcgcgaaatgagggatatctggtcctgggtcccagaacggttcgctctgtgccaacccctgttgttgttcagctcactgcagcacgggtactctttggcacggttctactttcagtgcgaaggacacgaacctacacttttactgatcaaaacaacccagaaagaagtgtgcggcgcatacttaagcaccgactggtctgagaggaacaaattcggcggaaagttggggtttttcggcacgggtgaatgttttgtttttaggctacagccggaggtccagcggtatgagtgggtggtgatcaagcatccagagttgacaaaacctccgccattaatggccgctgagcctaccgcaccattgagccacagtgcctcaagcgaccctgccgaccggctcagccctttcctcgccgctagacattttaatttaccttcaaagactgagtcgatgtttatggcagggggatctgattgccttatcgtcggaggggggggggggcaagccctgtacatagacggtgacctgaacaggggcagaacatcccattgcgacacattcaacaaccagccgttgtgctcggaaaattttctgatcgcagctgtggaggcttgggggtttcaggaccccgacactcagtag

SEQ ID NO: 208119 - DNA, 759 bp, synthetic construct
  misc_feature 1..759: note = Description of Artificial Sequence: Synthetic coding sequence
  source 1..759: mol_type = other DNA
atgggcgtgctgctgacccagcggaccctgctgagcctggtgctggcactcttatttccttccatggcctctatggcagccatcgggagctgtagcaaagaatacagagttttactggggcagctgcaaaaacaaacagatctcatgcaagacacttcccgcctgctagatccgtatattcggatccagggcctcgatgtacctaagctacgggagcactgccgggagaggcccggcgcatttccaagtgaagagaccctccgaggattgggcagacgcggcttcctgcagacactaaacgcgaccttggggtgtgtgcttcaccggttagctgatctggagcagcgcctcccaaaggctcaggatcttgagaggtctggcctcaatattgaagacttggaaaagctccagatggcccgcccaaacatcctcggtctacgaaataatatctactgtatggcacaattacttgacaacagcgacaccgccgagcctaccaaggctggtcggggggctagccaacctccaactcctacacccgcctcagacgcatttcagagaaaactagaagggtgccgctttctccacgggtaccatcgcttcatgcactctgtgggtagagtttttagcaagtggggcgagagtcccaaccgatctagacggcattcaccccaccaagccttgcgcaaaggtgtccgccgcactagaccctctaggaaaggtaaaagactcatgactcgcggacaactgccaagatag

SEQ ID NO: 208120 - DNA, 1263 bp, synthetic construct
  misc_feature 1..1263: note = Description of Artificial Sequence: Synthetic coding sequence
  source 1..1263: mol_type = other DNA
atgctgaacaactgggacaagtggatggccaagaagcacaagaagatacgtctccgctgtcagaaaggcatacccccaagccttaggggcagagcatggcagtatttgtccggggggaaagtaaaattacagcagaacccggggaaatttgatgaactagacatgtccccgggcgacccaaaatggctcgatgtcatcgagcgggatctccacaggcagttccctttccacgagatgttcgtgtccaggggcgggcatgggcagcaagacctgttccgggtactgaaggcctatactctgtacagaccagaggagggctattgccaggctcaggccccaatagcagctgtgcttcttatgcacatgcctgcagaacaggctttctggtgtttggtacagatttgtgaaaagtacttgccgggttattactccgaaaaacttgaagctatccagctggacggagaaatcttgttctctctgctccagaaggtgtcccccgtggcccacaagcacctctctaggcaaaagattgacccactgctgtacatgaccgaatggtttatgtgcgcgttttccagaactctcccctggagtagcgtgctgagggtttgggacatgttcttctgcgagggcgtaaagattatatttcgcgtcggattggttctcctgaaacatgcactggggagcccggagaaagtgaaggcctgtcaaggccagtatgaaacgatagagcggctgaggtccctgtctccaaaaatcatgcaggaagcatttttggtgcaggaggtggttgaactgccagtgaccgaacggcagatcgagagagagcatttaatccaattgaggcgatggcaggagaccaggggggagcttcaatgtagatcccccccaaggctgcacggtgccaaggctatccttgatgctgagcctggccctcgacccgccctccagccttcacccagtatccgcctccccctcgatgccccgctgccaggaagcaaagcgaaacctaaaccacctaagcaggctcagaaagagcagaggaagcaaatgaagggccgcgggcagctggagaaaccacccgccccaaatcaggctatggtggtggccgccgcaggagacgcctgtcccccacagcatgtgcctccaaaagactctgcacctaaagacagcgcaccccaggatcttgctccccaggtcagcgctcatcatagatcgcaggaaagtctaacatcacaggaatcagaggatacctatctgtag

SEQ ID NO: 208121 - DNA, 1548 bp, synthetic construct
  misc_feature 1..1548: note = Description of Artificial Sequence: Synthetic coding sequence
  source 1..1548: mol_type = other DNA
atggccaagagcaacggcgagaacggcccccgggcccccgccgccggcgaaagtctttctgggaccagggagtccttagctcaaggacccgacgctgccacaaccgacgaactaagttccctggggagtgacagcgaagcaaacggctttgctgagcggagaatagacaagtttggctttattgtgggctcacagggcgccgagggtgcaccatgtcctctgctgcatagactggaggaagtgccgttagaagtcctccgtcagagggagtccaagtggctggacatgttgaataactgggacaagtggatggctaagaaacacaaaaaaataaggctgagatgccagaagggtatacctccgtccctcaggggccgggcttggcaatatttgagtggcggaaaagtcaagctgcagcagaatccaggcaagtttgacgaactcgacatgtcccctggggatccaaagtggctggatgtgatcgaaagagatctccatagacaatttccgtttcatgagatgttcgtgagtagaggcggtcacgggcaacaggatcttttccgcgtcttaaaagcgtacaccttgtatcgcccagaagaagggtattgccaagcccaagctccaattgcggcagtcctcctgatgcacatgccggcagagcaagcattctggtgcttggttcagatttgtgaaaagtacctgccaggatactactctgagaagctggaagccattcaactggatggtgaaatactgttctccttgcttcagaaagtaagccccgtcgctcataagcatttgagccggcagaagatcgatccgcttctgtatatgaccgagtggttcatgtgcgcgtttagtcggactctcccatggagcagtgtgctcagagtgtgggatatgtttttttgcgaaggagtcaaaatcatcttccgggtgggtctagtgcttctgaaacacgctttagggtcacccgagaaagtcaaagcatgccaggggcagtacgagacaatagagagactaagatcactttctcctaaaatcatgcaagaggcttttctggtgcaggaggtggtagagctgcctgtgaccgaacgacagatcgaacgcgagcacctgatccagctccgcagatggcaggaaactcgaggggagctgcaatgtcggtcaccgcctcggctgcacggggctaaggctattctggacgccgagccaggtcctcggcctgccctgcagccttctccttcaataagattaccccttgacgcacctttgccaggttccaaggcgaagcctaagccgccaaagcaagcacagaaagaacaaaggaaacagatgaagggacgtggtcaattagagaaaccccccgcacccaatcaggcaatggtggtcgccgctgccggagatgcatgtccaccgcagcacgtcccacccaaggactctgcacctaaagattctgcgccacaggacctcgctcctcaagtctccgcccaccatagatcacaggagtcgctaacctctcaagaatccgaggacacctacctgtag

SEQ ID NO: 208122 - DNA, 2427 bp, synthetic construct
  misc_feature 1..2427: note = Description of Artificial Sequence: Synthetic coding sequence
  source 1..2427: mol_type = other DNA
atggagaccggcaccgcccccctggtggcccccccccggcggcacggagcgcccgctgcaccatcccccccccctcgaggaagccgcgctggaccagtggtagtggtcgcccccggaccacctgttactactgctacatccgccccagtcacactagtggccccaggagaagcaagacctgcctgggtccccggtagtgcggagactagtgctcccgcccctgcccccgctccggcacctgctcccgctgtgaccggatccactgtcgtggtcctgactctggaggcctcccccgaagcacccaagcctcagttacctagtggtcctgaaagccctgaaccagccgctgtggctggcgttgaaacgtcaagggccctggctgcaggggctgactcccctaagaccgaggaagcacgccccagtcccgcccccggccccggcacgccgactggaaccccaactcgaacccccagtcgaacagccccgggcgctctcacagcgaagcctccactagcccccaaaccagggacaactgtcgccagcggggtgaccgctaggagcgcctcaggccaagtgacagggggacacggagctgccgcagccactagcgcttccgcaggtcaagctccagaagacccgtcagggccaggtacaggaccgtccgggacctgtgaggcccccgtggctgtggtgacggtgacaccagcaccagagcctgccgagaacagccaggatctgggctccacttcgagccttgggcccgggatttcaggacctcgcggacaggcaccagacaccctcagctacctcgactcagtgagcctgatgtcaggaaccttggagagcctagctgacgacgtgtcttctatgggaagcgacagcgaaatcaatggactcgcgctccggaagacggacaagtacggcttcctgggtggcagccagtatagcggatcactggagtcgtccataccagtggatgtagctaggcagcgtgaactcaagtggctggatatgttctccaactgggacaaatggctctctcgtaggttccagaaagtcaaactcaggtgtaggaaaggcattcctagctcattaagggccaaagcttggcagtacctatcaaatagcaaggagttgctcgaacaaaaccctggcaaattcgaggagctcgaaagagcgcctggcgatcctaagtggttagacgttatcgagaaagaccttcatcggcaatttccatttcacgaaatgttcgcggcccggggagggcacgggcagcaggacctgtaccggatcctgaaagcttacaccatttataggcccgacgaaggctattgccaggcccaggcccctgttgctgcggtgctgctgatgcatatgcctgccgagcaagccttctggtgtctggtccagatttgtgacaagtacctgcccggctattactccgccggccttgaggccattcagttggatggagagatttttttcgctctgttgaggagggcctcacccctcgcacacaggcatctccgaagacagagaatcgatcccgtcctttacatgacagagtggtttatgtgcattttcgccaggaccctgccttgggcctcagtgctccgggtctgggatatgtttttctgtgagggcgtcaagatcattttcagggtggcactcgtgctgctgcgccacaccctgggcagcgtggaaaaactccgaagctgtcagggcatgtatgagactatggaacagttgcgcaatttgccgcagcaatgcatgcaggaagatttccttgtgcacgaagtgaccaacttacctgtaacagaggcactgattgaaagggagaatgccgctcagctcaaaaaatggagagaaactcgaggcgagctgcagtatcggccttctcggcgacttcatgggtctagagctatccacgaggaaaggagacggcagcagcctccgctgggaccctcaagttccttactgtctcttcctggcctgaagagcagaggttctagagctgcaggaggggccccatcaccaccgccccctgtccggcgagcctcagcaggcccggcccccggccctgtggttaccgccgaaggcttacatccttccctgccaagcccaaccgggaatagtactcccctgggctcgagcaaggagacgaggaaacaggagaaggagcggcaaaagcaggaaaaagagcggcaaaagcaggagaaagagcgagaaaaagaacgccagaagcaggaaaaagaacgcgaaaaacaagagaaagagagagaaaagcaagagaaagaaaggcagaagcaagagaagaaggcccagggtaggaagctgtccctgagacgcaaggccgacgggccacccggacctcacgacggtggcgatcgtcccagtgcagaggcaagacaggacgcctatttctag

SEQ ID NO: 208123 - DNA, 1341 bp, synthetic construct
  misc_feature 1..1341: note = Description of Artificial Sequence: Synthetic coding sequence
  source 1..1341: mol_type = other DNA
atggcccaggccctgggcgaggacctggtgcagccccccgagctgcaggacgactcgagctctcttggttccgatagtgaactgtcaggccccggaccatatcgccaggctgatcggtatggcttcattggagggagctcagccgagccaggacctgggcaccccccagctgatttgattagacaacgtgagatgaaatgggtggagatgacttcccactgggaaaaaacaatgtcacggagatacaaaaaggtaaagatgcagtgtaggaagggaataccctctgctctgcgggcccgctgctggcctctcctgtgcggggcccacgtgtgccaaaagaatagccccggcacgtaccaggagctggccgaagctcctggagacccgcaatggatggagactatcggacgtgatttgcatcgccagttccccttgcacgaaatgtttgtgagtccacaagggcacggacagcagggactgctgcaggtcctgaaggcctatacactttaccgtccagagcagggttattgtcaagctcagggcccggttgccgcggtgctgctgatgcatcttccacccgaagaggccttttggtgtcttgtacagatttgcgaggtgtacctgccaggatattatgggcctcacatggaagccgtgaggctggacgccgaggtgtttatggctcttctccgaagactgctgccacatgtgcacaaacacctgcagcaagtcggggttggtcctctactttatctacccgagtggttcttgtgcctgtttgctcgcagtctgccgttcccaacggtcctcagggtctgggacgcttttctgagcgagggcgcccgggtgttgtttcgggttggcctaactttagtccgcctggccctgggcactgccgagcaacgtggtgcatgccccgggttgcttgaaactttgggcgccctgagagctataccgcccgcccaactccaggaggaagctttcatgtcacaagtgcactctgtggtgttaagcgagagggacctgcagagagagatcaaggcgcagcttgctcagctgcccgatagcgctccaggtccccctcctaggccccaggttcgcctggcaggggcccaggctatctttgaggcccaacagctcgcaggggtgaggcgaggcgccaagcccgaggtgcctcgcatcgtggtgcagccccctgaggaaccaaggccccctcgtcgtaagccccagacacgcggaaagacctttcatggccttctgactcgtgctcggggtcccccaatcgagggcccaccacgcccccagcgcggttctaccagttttctcgacacacgattctag

SEQ ID NO: 208124 - DNA, 1341 bp, synthetic construct
  misc_feature 1..1341: note = Description of Artificial Sequence: Synthetic coding sequence
  source 1..1341: mol_type = other DNA
atggcccaggccctgggcgaggacctggtgcagccccccgagctgcaagatgactcttcttccctgggatccgacagcgagctcagtggtcctggtccttatcgacaggcagatcgttacggatttatcgggggcagctctgcagaacctggcccagggcatccgcccgccgacttgatcagacagagggaaatgaagtgggtggaaatgacctctcactgggagaagactatgtctcgccgatacaaaaaggtaaagatgcagtgccgaaaagggattccttcagcactgagggccagatgttggccactgctttgcggcgcgcatgtctgtcagaaaaattctccgggcacctatcaagaactggcggaagctccgggggacccacagtggatggagactattggaagggaccttcatcggcagttccccctgcacgagatgttcgtgtcgccacaaggccatggccagcaaggtctgctccaagtcctgaaagcatatactttgtaccggccagagcaggggtactgtcaggcccagggcccagttgcggcggttttacttatgcatcttccccccgaggaggcgttttggtgcttagtccaaatctgcgaggtgtatttgcccggctactatgggccacatatggaggcggtgagattagacgccgaggtgtttatggctttactgcgacggctgctgccgcacgtacacaaacatcttcagcaggtcggagtggggcctctgttgtacctgccagaatggtttctctgcctcttcgctaggtcgctgcctttcccaaccgtgctgcgggtctgggacgcttttctgtctgagggggccagggtgttgtttagggttggcttaacccttgtacggctggccctcggcacggccgagcagcgcggcgcctgcccaggactcctagaaaccctcggggcccttagagccatcccccctgcccagttgcaggaagaagcttttatgtcacaggtgcactctgtggtcctgagcgaacgcgaccttcagagggagataaaggcacagttggcccagcttcctgacagtgcacccgggccgccacctaggcctcaggtccgcctggctggagcccaggccattttcgaggcccagcagctggctggggtcagaaggggtgccaagcctgaggtgccccgtatcgttgtacagcccccagaagagccccgaccaccaagaaggaaacctcagaccagaggcaagactttccacggactcctgacgcgtgctagagggccccccatcgaagggccccctcggccgcagcgcggatctacctcctttcttgataccagattttag

SEQ ID NO: 208125 - DNA, 2049 bp, synthetic construct
  misc_feature 1..2049: note = Description of Artificial Sequence: Synthetic coding sequence
  source 1..2049: mol_type = other DNA
atgtgccccggcctgtacccctacagcagcctgctggagtacggccgaagtatgatcatctatgagcaggagggcgtgtacattcattcttcgtgtgggaaaactaacgatcaggatggcctgattagtggaattttgagggtactggagaaagacgccgaagtcatcgtggattggaggcctttggacgacgctttagactcgagtagtattctgtatgctaggaaggacagctcaagtgtagtggaatggacccaagcacccaaggaaaggggccaccggggttccgagcacctgaacagctacgaagctgaatgggatatggtgaatacagtctcctttaaacgaaaaccccacactaatggtgatgccccgtcccaccgtaatggcaaaagtaagtggtcgttcctcttcagcctgacagatttaaaaagtataaagcagaacaaggagggtatgggttggagctatttagttttctgcctcaaagacgatgtagtgctgccggccttacacttccaccagggggacagcaaactactgatcgaatccttggagaagtacgttgtcctgtgcgagtccccccaggataagcgcactctgctcgtgaactgtcagaacaaatcattgtcacagtcgtttgagaacttgctcgatgagccagcctacgggcttatccagaagattaaaaaagacccctacaccgcaaccatgatcggctttagtaaggtaaccaattacatatttgatagtctgaggggctcagacccaagtacccaccagcggcctcctagcgagatggcagacttcttgtctgatgctattccaggattgaaaattaatcagcaagaggagccgggttttgaggtgataacgagaatcgatctaggtgagagaccagtggtgcagcggcgcgaacctgtatctctggaggaatggaccaaaaacatcgattccgagggtagaatcctaaatgtcgataacatgaagcagatgatatttagaggcggcctgagtcacgccctgagaaagcaggcttggaaattcttgctgggctattttccctgggacagcaccaaggaagaaagaactcagctgcagaaacagaagacagatgaatacttccgaatgaagctccagtggaaatcaattagccaagaacaggagaaaagaaactcacgtttgcgcgattaccgaagccttattgaaaaggacgtgaatcgtaccgaccgaacaaacaagttttatgaggggcaggataacccggggttgatcctgttgcacgacatcctgatgacttattgtatgtatgacttcgacctcggatatgtccaagggatgagcgaccttctctctccccttctatacgtgatggaaaatgaagtcgatgccttctggtgcttcgcctcctacatggatcagatgcaccagaactttgaggagcagatgcaaggaatgaagacccaattaattcagctctcgacgctgctgaggctcctcgatagtggcttctgttcttacctcgagagccaggatagtggatatctgtacttctgcttccgatggttgctgatcagatttaagagggagtttagcttcctggacatcttgcgtctctgggaggtgatgtggactgagttgccttgcacaaattttcatctcctactgtgttgcgcaattctggaatccgaaaaacagcagatcatggagaaacattatggctttaatgagatcctgaagcacattaatgagctgtctatgaagatcgatgtggaggacatcttgtgcaaagccgaagccatctcgctgcagatggtcaagtgtaaggagctgccccaggccgtgtgtgaaatccttggcttacagggctccgaagtgaccacgccggatagtgacgtgggagaggacgaaaatgtcgtcatgacaccatgccctacaagtgcattccagtcaaatgcccttcccactcttagcgcatccggggcgaggaatgacagtccgacccagattcctgtttcgagcgatgtgtgccgtctgacaccagcctag

SEQ ID NO: 208126 - DNA, 1338 bp, synthetic construct
  misc_feature 1..1338: note = Description of Artificial Sequence: Synthetic coding sequence
  source 1..1338: mol_type = other DNA
atgatcggcttcagcaaggtgaccaactacatcttcgacagcctgagagggagcgacccaagtacccatcagagacccccctctgaaatggccgacttcctgagcgacgcaatcccaggtctgaagattaaccaacaggaagaacccggtttcgaagtgatcacgagaattgatctgggcgaacgccccgtagtgcagcgccgggagcccgtgagtctggaagaatggacgaagaacatcgactcagaaggacggattttaaatgtggataatatgaaacagatgatttttcgtggcggcctgagccacgcacttcgcaagcaggcctggaagttcctgctcgggtatttcccctgggactctactaaggaggagaggacgcagctccaaaaacagaaaaccgatgaatactttaggatgaagctgcaatggaagagcatatcccaggagcaggagaagaggaatagtaggctgagagattacaggagtttgatcgagaaagacgtaaacagaacagaccggacaaataagttctatgaagggcaggacaaccccggcctgatcctgctgcacgatatcctaatgacctattgcatgtatgatttcgaccttggttacgtgcaggggatgagcgacctcctaagtccgctactatacgtgatggaaaacgaagtggatgctttttggtgcttcgcttcttacatggatcagatgcaccagaacttcgaggaacagatgcagggaatgaaaacacagctgatccagctgagtacacttttgagactacttgacagcgggttctgttcctatttggagagtcaggattctggttacttgtacttttgtttcaggtggctcctgatacgctttaaacgcgagttttctttcctagatatcctcagactgtgggaggtaatgtggacggaacttccctgcactaacttccacctgctgttatgttgcgccatacttgagtcggaaaaacagcagattatggagaagcattatgggtttaacgaaatcctgaaacacatcaatgaattgtcaatgaagattgacgtcgaggatatcctctgcaaagcagaagcgattagcctgcaaatggtgaagtgtaaggagctgccccaggcagtttgcgaaattctgggattgcagggctcggaagtaacaacccccgactccgacgtgggggaggatgaaaacgtagtgatgaccccctgcccaacctccgcatttcagtcgaacgcccttcctacactgagcgcaagcggcgccaggaacgattctccaacacagatccctgtatccagtgacgtgtgccggttaacgcctgcatag

SEQ ID NO: 208127 - DNA, 2025 bp, synthetic construct
  misc_feature 1..2025: note = Description of Artificial Sequence: Synthetic coding sequence
  source 1..2025: mol_type = other DNA
atggccgccgccggcgtggtgagcggcaagatcatctacgagcaggagggagtgtacattcacagctcttgcggaaagaccaacgaccaagacggactgattagcggtatactccgggttctggagaaggacgccgaagtgatagttgactggcgtccattggatgatgcattggacagttcaagcatattatacgcgcgaaaagattccagtagcgtggtcgagtggactcaggcccctaaggagaggggtcaccgcgggagcgagcacctcaattcgtacgaagccgaatgggatatggtaaacacagtgagctttaaaagaaaacctcataccaatggtgacgcaccgagtcaccgaaatgggaagtctaagtggtcattcctgttttctttgaccgacctcaagtctatcaagcagaacaaggaaggcatgggttggagctatcttgttttctgtctgaaggacgacgttgtcttgcctgctttgcatttccaccagggagactcgaagttgctaatcgaatctctggagaaatacgtcgtgctctgtgaaagccctcaagataaaagaacactgctggtgaactgccagaacaagtcactgtcgcagtcgttcgaaaatcttctggacgaacctgcttacggcttaatccagaagatcaagaaagacccttatacagccacgatgatcggcttctcaaaggtcacaaactatatttttgatagcctgagggggtctgacccaagcacccatcagcggcctcccagtgaaatggctgacttcttgtctgatgcaattcccggcctcaaaattaatcaacaagaggaaccaggcttcgaagttatcacccgtatagatctcggggagcggcctgtggtccaacgccgtgaacctgtgagccttgaggagtggaccaagaatatcgactctgagggcaggatcctgaatgttgacaatatgaaacagatgatattccgtggtggtctcagtcatgctctgcgcaaacaggcgtggaaatttctcttaggctactttccctgggactccacaaaggaagaaaggacgcagctgcagaagcagaaaacagatgagtactttcgcatgaagctgcaatggaaatcgattagccaggagcaggaaaagaggaactcacggttgcgcgattatcgctcactgatcgagaaagacgtaaacaggactgatcgtacaaataagttttacgagggtcaggacaatcctggtctcatcttgttacacgacattcttatgacttattgcatgtatgactttgacctaggctatgtccaggggatgagcgacctgctttcccctctactttatgtcatggaaaacgaggtggacgctttctggtgttttgctagctatatggaccagatgcatcagaactttgaagaacagatgcagggtatgaaaacccagttaattcagctctctacattgctgcggctcctggactcaggtttttgttcttacctggaaagccaagacagcggttacctatatttttgctttaggtggttgctcattagattcaagagggagtttagcttcctcgacattctgcggctgtgggaggtcatgtggacagagctgccatgcactaacttccatctgctgctatgctgtgctatcttggagtctgagaagcagcaaattatggaaaagcattatgggtttaacgaaatcctgaagcatatcaatgagttgagcatgaagatagacgtggaggatatcctatgcaaagcggaggcaatttcccttcagatggtgaagtgtaaagaattaccccaggccgtgtgtgaaatcttggggcttcagggatctgaagttacaacaccagactccgatgtcggtgaggacgaaaacgtcgtcatgacgccctgtccaacctccgcctttcagtctaacgccctgccaactctctctgccagcggcgccagaaatgattcacctacgcagattccggttagcagtgacgtgtgccggctgacacctgcatag

SEQ ID NO: 208128 - DNA, 2076 bp, synthetic construct
  misc_feature 1..2076: note = Description of Artificial Sequence: Synthetic coding sequence
  source 1..2076: mol_type = other DNA
atggccgccgccggcgtggtgagcggcaagatcatctacgagcaggagggcgtgtacatacactcgagttgcggcaagaccaacgaccaggacggcctcatatccgggattcttcgcgtcctcgagaaagatgctgaggttatcgtggattggagaccattggacgatgcactcgacagcagttcaatcctctacgctagaaaggattctagctcagtcgtagagtggacccaggcacctaaggaaagaggccatagaggatctgaacatctcaacagttacgaggcggagtgggacatggtgaacaccgtgtcatttaagagaaaaccacacacgaacggagacgccccctcgcataggaatggtaaatctaagtggtccttcttgttctcactgacggatctcaagtctatcaagcagaacaaggaggggatggggtggagttacctggtattttgtttgaaggatgatgtagtgctaccagccctgcattttcaccaaggggattccaagctactgatcgagtctcttgaaaagtacgtagtattgtgcgagtccccacaggataaaaggacactcttagtcaactgtcagaacaagtcgctaagccaatcttttgagaatctattggacgagcccgcgtacggactgattcaggccggattactggatcgacggaaactactctgggcgattcaccactggaagaaaataaaaaaggatccctacacagccactatgatcgggttcagcaaggtgaccaactatatattcgatagtttaaggggctctgatccctctactcatcagcgtcccccgagcgagatggcagattttctgtctgatgcaatccccggtctgaaaataaaccagcaagaggagcctggcttcgaggtcattaccaggatcgacctgggagagcgaccagtggtgcagcgcagggagcctgttagtctggaggagtggactaaaaatatagactcagagggtagaattctgaacgtggacaacatgaagcagatgattttccgcggaggccttagccatgccctgaggaaacaagcctggaagtttctgctgggctatttcccctgggattccacaaaggaagagagaactcagcttcagaagcagaagaccgatgagtactttcgaatgaaactgcagtggaagagcatctcccaagagcaggaaaaaagaaattctcgcctacgggactatcggtcccttattgagaaagacgtaaaccgtactgaccggacaaataagttttatgaaggacaggataatcctggactcatactgttacacgacattctgatgacctattgcatgtacgactttgacttgggatacgtgcagggcatgtccgatttgctcagtccactgctgtacgtgatggagaacgaagtggacgcgttttggtgtttcgcttcctacatggatcagatgcaccagaatttcgaggagcagatgcaaggaatgaaaactcagctaatccagctgagcaccttgctgaggcttctggacagcggcttctgctcgtatctggaaagtcaagactcaggatatctctacttttgcttccgctggttgttgattcggttcaaacgcgaattttcatttcttgacattctgagactttgggaggtgatgtggaccgagttgccttgcactaactttcatctgctactgtgttgcgccatactggagtctgagaaacagcagatcatggaaaagcactacggttttaatgaaatactgaaacacatcaatgaactgtcaatgaagatcgacgtggaagatatcctgtgtaaggctgaggcaatttccttacaaatggttaagtgtaaggagctgccccaagctgtctgcgaaattttaggactgcaggggtctgaagtcaccaccccagacagcgatgtaggagaggacgagaacgtggttatgactccctgccctacgtccgctttccagtctaatgccctgcccaccttatcagcttcaggtgctcgaaatgattctcccacccagatccccgtgagtagcgacgtttgtaggctgacccctgcctag

SEQ ID NO: 208129 - DNA, 2133 bp, synthetic construct
  misc_feature 1..2133: note = Description of Artificial Sequence: Synthetic coding sequence
  source 1..2133: mol_type = other DNA
atgcacaacatccggggcaacaagcaggcccagggcaccggccacgaacctccaggagaagattctccccaatccggggaaccccagcgggaagaacagccattggcttccgatgcaagtaccccaggaagggagcccgaggactcacctaaacctgcaccaaagcccagccttactatatcctttgcgcagaaggccaagcgacagaacaacaccttcccattcttctccgaaggtatcacacgtaatagaactgctcaggaaaaggtagcggcccttgagcagcaggttttaatgctgaccaaggagctaaaaagtcaaaaagaactggtgaagatactgcacaaagcgttggaagcagcccagcaggaaaagagagcctcttcagcataccttgctgcagccgaggataaagatcgcctcgagctggtccggcataaggtgagacaaatagccgaactgggaaggcgggttgaggctctggaacaagaacgtgaaagcctggcccatacagcaagtctcagagaacagcaggtgcaggaacttcagcaacatgtgcagttactgatggacaagaaccatgccaaacagcaggtgatctgcaaactatctgagaaagtaacccaggacttcacccaccctcccgatcagtctccactgcgccccgatgcagcaaaccgagatttcttatcccagcagggcaagatcgaacacttgaaagacgacatggaggcatacaggacacaaaattgtttcctgaattcagagatccaccaggtgacaaaaatctggcgcaaggtggctgagaaggaaaaggctctcttgaccaaatgtgcatatcttcaggcccggaactgccaggtggagtcgaagtatctggccggactccgccgtttgcaagaagccctgggagatgaggcatcagaatgttcagagctgttgcgccagttagtgcaggaagcattacagtgggaagccggcgaagcctcatccgacagcatcgagttgtcccccatcagtaagtatgacgagtacgggtttctgacagtccctgactatgaggttgaagaccttaaactcctggccaaaatacaggcccttgagagccggtcacatcacttgttgggactggaggccgttgatagacctctgagggaaagatgggctgccctcggcgacctcgttccgtctgccgagctgaagcagcttctgagggccggagttcctcgggagcaccggccccgtgtatggcgctggctagttcatcttcgcgtacaacacttacacactcctggctgctatcaggagctgttaagccgtggacaggcaagggagcatccagccgcacgccagatcgagttagatctgaataggacgttcccaaataacaagcatttcacttgtccgacatcctccttccctgacaagctgcgacgggtgctgttggccttctcctggcagaaccccacaattggatactgtcaaggtctgaatcggctggccgcgatcgcactgctggtgctcgaagaggaagaatctgcattctggtgtttggtcgcgatcgtggaaacaatcatgcctgctgattactactgtaatacgttgacagcctcccaggtcgaccaaagagtgctgcaagacctcctgtcagaaaagctgcctagacttatggcccacctggggcagcaccatgtcgacttgagtctggttaccttcaactggttcttggtcgtgtttgcagattctcttatttcaaacatcctactacgggtgtgggacgccttcttatacgaaggaaccaaggtagtgtttcggtacgccctggccatctttaaatacaacgagaaagagatcttaaggctgcagaatggcctagaaatctatcagtacctgcgcttcttcactaaaacaatttctaacagtagaaagctcatgaatatcgccttcaatgatatgaatccatttcggatgaagcagcttagacagctgcgaatggtccacagggaacgtttggaagcggagctgcgcgaactcgagcagctaaaggcggaatatttggagcgcagggcctcacgcagacgcgccgtgtccgaaggatgtgcttccgaggatgaagtcgaaggagaggcatag

SEQ ID NO: 208130 - DNA, 1407 bp, synthetic construct
  misc_feature 1..1407: note = Description of Artificial Sequence: Synthetic coding sequence
  source 1..1407: mol_type = other DNA
atggaggcctaccggacccagaactgcttcctgaacagcgagatccatcaggtcacgaagatctggagaaaagtagctgagaaggagaaagcccttctgacaaagtgcgcttacctgcaggcacgcaattgtcaggttgagagcaagtaccttgccggattgcgaaggctgcaggaagcattgggagacgaggcttctgaatgttccgaattacttcgccagcttgtacaggaagctctgcagtgggaggctggggaagcatcttcagactccattgagttgtcacccataagcaaatatgatgaatacggatttcttaccgttcctgactacgaggtggaagatcttaagctgctggccaaaatccaagcactcgagtcaaggtcacatcatctgctgggtctcgaggccgtggataggccacttagggagagatgggccgccctgggtgacctggtgccatctgccgagctgaagcagttgctccgcgccggcgtgcctcgggaacaccgtccccgggtgtggaggtggctcgtccaccttcgggtgcagcacttgcataccccagggtgttatcaagagttgctgagtcgcggccaggctcgggagcatccagccgcccgccagatcgagctcgacctgaacagaacctttccgaacaataagcacttcacatgcccgaccagctcatttccggacaaattgcgtcgggttttgctcgcctttagttggcagaatcctacaattgggtactgtcaaggcctcaacaggctggccgctatagctctgttggtccttgaagaggaggaatctgctttctggtgccttgtggcgattgtggaaactattatgccggccgattactattgtaacacacttacagcctctcaggtggatcaaagagtactgcaggaccttctgtccgaaaagctcccccggcttatggcacatctgggtcagcaccatgttgacttgtccttggttacttttaactggttcctggtggtgttcgctgactctctaatttcgaacatccttttgcgcgtttgggatgccttcctctatgagggtaccaaggtcgtcttccgttatgcactagccattttcaaatacaacgagaaagagatcctgagattgcaaaatgggctggagatttaccagtatctccggtttttcacgaaaaccattagtaactcacgaaagctgatgaacatagcattcaatgacatgaatccgttcaggatgaagcagcttcgccagttacgaatggtgcatagggagcgcctagaagccgaactacgggagttagagcaactcaaagcagagtatcttgagcgccgggccagtcgcaggagagcagtatctgaaggttgcgcctccgaggatgaggttgagggagaggcttag

SEQ ID NO: 208131 - DNA, 2583 bp, synthetic construct
  misc_feature 1..2583: note = Description of Artificial Sequence: Synthetic coding sequence
  source 1..2583: mol_type = other DNA
atggagggcgccggcgagaacgcccccgagagcagcagcagcgcccccggcagcgaggagtctgcccgtgacccccaagtgccacccccggaagaggaaagcggggactgcgcccgtagccttgaggccgtgcctaagaaactctgcggttacctgagcaaattcggcgggaaggggcctattcgggggtggaagagtagatggttcttctacgatgaaagaaagtgccagctgtactattcacggactgcacaggatgccaatcccttggactcaattgacttgtctagcgccgtattcgactgcaaggcagacgcggaggagggcatattcgagattaaaacccccagcagggtcatcacactcaaagccgccactaagcaagcgatgctgtactggttgcaacagttacagatgaaaagatgggagttccataactctccaccagctcctccagcgacacctgacgccgcactcgctgggaacgggcccgtgctgcatctggaacttggtcaagaagaagcggagctggaggagttcctatgtccagtgaaaaccccgccgggccttgtgggcgtggctgctgccttacaaccattcccagctctacaaaacatctccctgaagcatctagggacagagatacagaataccatgcataacattagaggaaacaagcaagctcaaggcaccgggcacgaacccccaggggaggactcgcctcagtcaggagagccacagagggaggagcagcctctcgcttccgatgcgtccaccccaggccgggagccagaagactccccaaagcctgctccaaaaccaagtctcacaatctcctttgcccaaaaagccaagcgccagaacaacactttccccttcttttccgaaggcatcacccgtaaccggactgcgcaggaaaaggtggcggccctagagcagcaggtgctgatgctgaccaaagaattgaagagccagaaagaactggtcaaaatcctgcataaggcattagaggccgcccagcaggagaaaagagcctccagtgcctatcttgcagccgcagaagacaaggaccggctggagctggttagacacaaggtccggcaaatcgccgaactggggagacgagttgaggccttagagcaggagagggagagcttggcgcacacggccagcctcagggagcagcaagttcaggagctccagcagcatgttcagctgttgatggataagaaccacgctaagcagcaggtgatctgcaagctgtcagagaaagtgacacaagactttacccacccgccagatcagtcacccctccggccggatgcagctaacagagactttttaagccagcagggtaagatcgagcacctgaaggatgatatggaagcctaccgtactcagaattgctttctcaacagcgaaatccatcaagtgacaaagatttggagaaaagtggccgaaaaagagaaagccctcttgaccaaatgcgcttatctacaggcacggaattgccaggtggagtctaagtacctcgccggtctccggagacttcaagaggccctgggcgatgaagcttctgagtgtagcgaactgctacggcagcttgtacaggaagccttgcaatgggaagcaggggaagctagcagcgattccattgagctgtctcccattagtaagtacgacgagtacgggttcttgacagtcccagattacgaggtggaggacttaaagctactggccaaaatccaggcacttgaatcacgatcacaccacttgctgggcttagaagctgtcgacagacccctgcgcgaaaggtgggctgccctgggcgatttagttccatctgccgagttaaagcagctgctgagagccggggtaccgagggaacaccgcccgcgggtctggcgctggctggtgcatttgcgggtgcagcacctgcacacgcccgggtgctaccaggagctgttgagcaggggccaggccagagaacacccagccgctagacaaatcgaattagacttgaacagaacgtttccaaacaacaagcactttacatgccctaccagttcatttcccgataagctgaggcgtgttttactcgccttttcttggcagaaccccaccattggctattgccaggggctgaataggctagccgcgatagccctgctggtgctcgaggaggaggagagcgcattctggtgcttagtggctatcgtagagacaatcatgccagctgactattactgcaatacactgactgctagccaggtcgatcagcgggtcctgcaggacttgctctcagagaagttgccccgtttaatggcgcatctaggacaacatcatgtggaccttagcctcgtgacatttaactggttcctggttgtgttcgcggatagtctgattagcaacatcctgttacgggtatgggatgccttcctgtacgagggtaccaaggtcgtctttagatatgcactggccatcttcaagtataatgagaaagaaatcctgcggctgcagaacggtctggagatttaccaatatctgcgcttctttactaaaaccatctccaactcaaggtag

SEQ ID NO: 208132 - DNA, 2754 bp, synthetic construct
  misc_feature 1..2754: note = Description of Artificial Sequence: Synthetic coding sequence
  source 1..2754: mol_type = other DNA
atggagggcgccggcgagaacgcccccgagagcagcagcagcgcccctggctctgaagaatccgcaagggacccacaagtacctcctcccgaggaagaaagcggtgattgtgctcgcagtttagaggcagtgccaaagaagctgtgcgggtacctttctaaattcggagggaaaggtccaatccgcggctggaagtcgcgctggttcttttacgacgaacgcaagtgccaactgtactatagccggaccgcccaggacgcaaaccctctcgattctatcgatctctctagtgccgtctttgattgtaaggcagatgccgaggaggggatcttcgagattaagaccccatccagagtgataacccttaaggccgctactaaacaggctatgctgtactggcttcagcagttacagatgaaacgatgggaatttcacaattcccccccagctccacctgctactcccgatgcagcactcgctggcaacggaccagttctgcacctcgagttgggccaggaggaagccgagctggaggagttcctctgccctgtcaagaccccacccgggttggtgggcgtcgcagcggctcttcagccatttccagcactccagaacatttccttaaaacacctgggcacagagatccagaacacaatgcacaatattcggggcaacaaacaggcccagggtaccggacatgaaccaccaggtgaagactccccacaatcaggggagcctcagcgggaggagcaacccctggctagcgatgccagcacacccggcagagagcccgaagatagccctaagcctgcacccaagccatctttaaccatctcctttgcccagaaagcaaaacggcaaaataataccttccccttcttcagtgaggggataactcggaatcggacagcccaggaaaaagtggccgcccttgagcagcaggtgctcatgctcacaaaggagctgaaaagccagaaggagctagtcaaaatactgcataaggccctagaggccgcgcagcaggagaaacgggcgtcgtccgcttaccttgcagctgcagaggacaaggaccggttggaattggtgcgccataaggtgaggcagatcgctgaactcggaaggcgcgtcgaggcactggaacaggagcgcgaatcccttgctcacacggcttccttacgggagcagcaggtccaagaattacagcagcatgtccaacttcttatggacaaaaatcatgcaaagcagcaggtgatttgcaagctcagcgagaaggttacacaggattttacacaccctcctgatcagtctcccctgcgcccagatgctgcaaatcgcgactttctgagtcagcaaggaaagatagagcatttgaaagacgatatggaagcttaccgcactcagaattgttttcttaatagcgaaattcaccaggtcacaaaaatctggcggaaagttgccgaaaaggagaaggcattgctgaccaaatgcgcttatctccaggcccgaaactgccaggttgagagcaagtacttagcgggattgcgacgcttacaggaagctctgggcgacgaagcctctgaatgttcagaattgcttcgccagctcgtacaggaggctctccaatgggaagccggggaggcaagtagtgactccatcgagctgtcccctatttccaagtacgatgagtatggcttcctgaccgtgcctgattacgaggtggaagatctgaagctcctggccaagatccaggctttggagtctcggagccatcatctcctaggcttagaagccgtcgatcggccacttagggagaggtgggcggcgctgggagatttggtccctagcgctgagctaaaacagcttctccgagcgggagtgccccgcgaacatagaccacgcgtgtggaggtggttggtacacctacgggtccagcatttgcacacaccaggttgttatcaggagttgcttagccggggtcaggcccgcgagcatccagcagctaggcagattgagctggacttaaatcggacatttccgaacaataagcattttacctgtccaacctcatcgtttcctgataaattgcgcagggtgcttctcgccttctcctggcagaatcctaccatcggctattgccagggactaaaccgcctcgctgcaatcgccctacttgtcctcgaagaagaagagagcgcgttctggtgcctggtagccatcgtggagaccatcatgcctgctgactattattgtaatactctgaccgcctcacaggtagaccagagggtgctgcaagacctcctctctgaaaagctgcccagactgatggcccaccttggccagcaccacgtggacctgtccttggtgaccttcaattggtttctggtggtgtttgccgatagcctcatttccaatatcttactgagagtctgggatgcttttttatatgaaggaacaaagtacaatgagaaagaaatactgcgcctgcaaaacgggcttgaaatctatcagtatctgcggttcttcactaaaaccatcagcaattcacgaaagctgatgaacattgcgttcaacgatatgaatcccttcaggatgaagcagctgcggcagctccgaatggtgcaccgggaacggcttgaagccgaactgcgggagctcgagcagcttaaggcggagtacctagaacgtcgagcttctaggaggcgggctgtctcggagggttgtgcctctgaagacgaggttgaaggagaagcatag

SEQ ID NO: 208133 - DNA, 1287 bp, synthetic construct
  misc_feature 1..1287: note = Description of Artificial Sequence: Synthetic coding sequence
  source 1..1287: mol_type = other DNA
atgcccagcggctgctacgtgccccggagcgagccccggctgctgcccgccccccccccggctggcgcacgcgtgggcgccctccggagtgcgcagggtgacgggcccacaagcggacattgggacggcggcgcagagaaggccgattttaatgccaagcgcaaaaagaaggtggccgaaatccaccaggcacttaattctgaccctaccgatgtggccgctctgaggcgaatggcgatcagtgaaggcggacttcttacagacgagattagaagaaaggtctggccaaaattgttgaatgtcaatgcgaatgaccctccacctattagcggcaagaacctaaggcagatgtctaaggattatcagcaggtcttgctcgacgtccgccgaagcctgaggagattccctcctggtatgccggaggaacagagggagggcctccaggaagagctgatcgatataatcttgttgatcctggaacggaacccacaacttcattactaccagggctaccacgacatcgtggtgaccttcctactggtagttggagagcgtctggccacatctttggttgagaagctgtcaactcaccacttacgagacttcatggacccaacaatggataataccaaacacatcttaaattaccttatgcctataatagatcaggttaatcccgaattacacgatttcatgcagtccgctgaagtcggtactatatttgcattaagctggctgatcacatggttcgggcatgttctctctgacttcagacacgttgtgcggctttatgattttttcttggcgtgccaccctctgatgcccatctactttgccgctgtcattgttctgtacagggagcaggaagtcctggattgcgactgcgatatggcttccgttcaccaccttctgtcccagataccacaagatcttccctatgaaaccttgattagccgggcgggcgacctatttgttcaatttcctcccagcgagctggcacgggaggccgctgcccagcaacaggctgagcgcaccgccgcgagcactttcaaggacttcgaattggcctccgcccagcagcgacctgacatggtgctcagacagcgctttagaggtctgctacgccccgaggatagaactaaggacgtcttaaccaagccacgaaccaataggttcgtgaagctcgccgtgatgggactaaccgtggctttgggtgccgctgcactagctgtcgtgaagtcggctctagagtgggcgcccaagttccaactacagctctttccctag

SEQ ID NO: 208134 - DNA, 1212 bp, synthetic construct
  misc_feature 1..1212: note = Description of Artificial Sequence: Synthetic coding sequence
  source 1..1212: mol_type = other DNA
atggccctgcggagcgcccagggcgacggccccaccagcggccactgggacggaggcgctgaaaaagcagattttaatgctaaacggaagaagaaggtggccgagatccaccaagctctcaattccgatcccaccgatgtggctgcactccgtcggatggcgattagcgaagggggtttacttacagatgagataaggcgaaaggtatggccgaaacttttaaacgtgaacgccaacgatccgcctcccatttctggcaaaaatttgcgccagatgtcaaaggactaccagcaggtgttgcttgatgttcggcgttcgctccggaggtttccccctggaatgccagaggagcagagagagggtcttcaggaagaactgatcgacatcattttactgattctcgagaggaaccctcaactacactactaccagggctatcacgacattgttgtgactttcctcctggtggttggcgagaggctggcgacaagccttgttgaaaaactgagcacccatcacctgagggattttatggaccccaccatggacaacactaaacacatcctcaattaccttatgccgattatagatcaggtcaaccccgaattacatgatttcatgcagagcgctgaagtagggactatattcgcccttagttggttaatcacttggttcggacacgttctgagcgatttccggcatgtggtgcgcctgtacgatttttttctggcatgccatccattaatgccgatatacttcgcagccgtgattgtgttgtatcgcgagcaggaagttctggactgcgactgcgacatggcgtccgttcaccatctgctaagccagataccacaggacttgccatatgagaccctgatctctcgggcgggagacctatttgttcagttccccccatctgagctcgcgagggaggccgctgcccaacaacaggccgagcggactgcagcgagcacgtttaaagacttcgagctggcctcggcacagcagcggcctgatatggtgcttcggcaacgttttagggggctacttcgccctgaggatcggacaaaggacgtgcttacaaaaccacgaacgaaccgatttgtgaaattagctgtgatgggcctgacggtagccttaggcgcggctgccctggcagtggtcaagagtgccctggaatgggcaccgaaattccagcttcagctgtttccatag

SEQ ID NO: 208135 - DNA, 1212 bp, synthetic construct
  misc_feature 1..1212: note = Description of Artificial Sequence: Synthetic coding sequence
  source 1..1212: mol_type = other DNA
atggccctgcggagcgcccagggcgacggccccaccagcggccactgggacgggggtgcagagaaagcggacttcaacgcgaagcggaaaaaaaaggtcgccgagattcaccaggccctcaatagcgaccccacagatgttgccgctcttagacgaatggctatctccgaggggggactgttgactgacgaaataagacgcaaggtgtggcccaaactcctgaacgtgaatgcaaatgacccacctccaatatccggtaaaaatctgcgacagatgagcaaggactaccagcaagtgctgttagatgttagacgaagtctgaggagatttccccccgggatgcccgaagaacaacgtgagggcctacaggaggagcttatcgatattattcttctgatactcgaacgaaacccccaactgcactattatcaaggctaccatgatattgtcgtcaccttcctgctggttgtgggcgaacggctcgcaacgtctttagtcgagaagttaagtacccaccacctgcgggatttcatggatccgaccatggacaataccaaacatatcttgaactacctaatgcctattatcgaccaggtgaaccccgagctgcacgactttatgcagagcgcagaggttggaacaatcttcgccttgtcctggcttatcacctggtttggccacgtgctctctgactttaggcatgtggtgcgactttatgacttctttttggcatgtcatccactgatgcccatatacttcgccgccgtgattgtcctttatagagagcaagaagtcctggattgcgactgcgacatggccagtgtccatcacctcttaagtcagattcctcaagatttgccctacgaaacgctgatcagcagagcaggtgatctgtttgtccagtttccccctagcgagctggcaagggaagcggccgcacagcagcaggctgagagaacagcagccagcacttttaaagactttgagctggccagcgcacaacagcgcccagacatggtccttcggcagagattcagagggctgctcaggccagaggaccgaacaaaagatgtgctgaccaaacctagaacgaaccgctttgtcaaactggccgtcatgggactgaccgtcgcactcggagcggccgccctggccgtggtgaaatccgcgctggagtgggccccaaaattccagctccagttattcccctag

SEQ ID NO: 208136 - DNA, 1662 bp, synthetic construct
  misc_feature 1..1662: note = Description of Artificial Sequence: Synthetic coding sequence
  source 1..1662: mol_type = other DNA
atggacagccccggctacaactgcttcgtggacaaggacaagatggatgccgccattcaagacctgggacccaaagagctaagctgtacagagctgcaggaactgaagcagctggcgcgccaaggatattgggcacaaagccacgccctgcgcggtaaggtataccagagattaattagggacattccctgtaggacggtgacgccagacgcctcggtgtatagtgatattgtgggaaaaattgtcggaaagcacagcagctcttgcctaccactgcccgagttcgtcgacaatacccaggtcccctcgtactgcttgaacgccagaggggagggagccgtgaggaagatccttctgtgtcttgctaatcaatttccagatatcagcttttgtccagccctccctgccgtggtggcactgttactgcattactcaattgacgaagccgaatgcttcgagaaggcatgcagaatcctggcatgtaatgatcctggccggcgactcatcgaccaatcatttttggcattcgagtcctcatgtatgacctttggagacctggtgaataaatattgccaggccgcgcacaagctgatggtagccgtgtccgaagacgttctccaggtctacgcagactggcagcgatggttgttcggagaacttcctctgtgttacttcgcccgcgttttcgatgtttttctggttgaggggtataaagtgttgtaccgcgtggccttggccattcttaagttttttcacaaagtgagggccggccagcctctggaaagcgattccgttaagcaagatattcgtacctttgtacgagatattgccaaaacggttagtccagaaaagctcctcgaaaaagccttcgccattaggctgttctctaggaaagaaatccagctactgcaaatggcaaacgagaaagctttgaaacagaagggcataaccgtgaagcagaaaaggcagttcgtgcatttggccgtgcatgccgaaaatttccgtagcgagattgtttctgtgcgagaaatgcgtgatatttggtcttgggtccctgagcgtttcgcgctctgtcaaccactcctcctgtttagtagcctacaacatggctatagtcttgcccggttttactttcagtgcgagggacatgaaccgacccttctcttgattaaaaccactcagaaggaggtctgcggcgcttacctgtctaccgattggagcgagcgcaacaagttcggcggcaagctgggctttttcggaacaggagaatgctttgtgttcaggcttcaacctgaggtacagagatacgagtgggtggtgatcaaacatcccgagctgaccaagcctccaccactgatggccgcggagccaactgctcctctgagtcactcagcttcgtctgacccagcagaccggctgtccccatttctggcagctcgccacttcaacttgcctagcaagactgagtccatgttcatggctgggggatcggactgtctgatagtaggcggcgggggcgggcaggctctctacatagacggggatcttaatcgcggccgcacctcacattgcgacaccttcaacaaccagcccctgtgttctgaaaatttcctgatcgccgccgtggaagcttggggttttcaagaccctgatacccagtag

SEQ ID NO: 208137 - DNA, 1680 bp, synthetic construct
  misc_feature 1..1680: note = Description of Artificial Sequence: Synthetic coding sequence
  source 1..1680: mol_type = other DNA
atggacagccccggctacaactgcttcgtggacaaggacaagatggacgctgccatacaggatctgggccccaaggagctgtcgtgtactgagctgcaggaactgaagcaacttgccaggcagggatactgggcccagtcgcacgcgttacgaggtaaagtctaccagaggctcattcgagatatcccttgccgcactgtaaccccagatgcaagcgtgtacagtgatatcgtgggaaaaatcgttggtaagcactcaagtagttgtcttccgctgcccgagttcgtggacaacactcaagtgcccagctactgcctcaacgcaaggggcgagggtgctgtgcggaagatcctgctatgcctggccaatcagttccctgacataagcttctgtcccgcgctcccggccgttgtcgcactactcttgcactactctatcgacgaggccgagtgttttgagaaagcctgtcggattctggcctgcaatgatccaggacggaggctcatcgaccagagcttcctggcattcgagtcttcatgtatgaccttcggcgacttggtgaataaatactgccaggccgcgcataaactaatggtagcagtatccgaagacgtcttacaggtatacgccgattggcagagatggttatttggggaattaccgctttgctacttcgctcgggtctttgacgtctttctggttgagggctataaagtgctctatcgagttgccctcgcaattctcaagttctttcataaagtgcgcgcaggccagcccctagagtctgacagcgttaagcaagatataagaacctttgttagggacatcgccaagaccgtttcccccgaaaagcttctcgaaaaagctttcgcaattagactcttttctcgtaaagagattcagctcctccaaatggcaaatgaaaaggcgctgaaacagaaaggaattaccgtcaagcaaaaatccgtgtccctgtcgaagaggcagttcgtgcacttggcagtccatgccgagaatttccgaagtgagatcgtctccgtgagggaaatgagagacatatggtcttgggtccccgagcgcttcgctctctgtcaaccgctacttctctttagctctctccaacacggctatagcctcgcccgattctacttccagtgcgaggggcatgagcctactctgctactaatcaagacgacgcagaaggaagtgtgcggggcttacttatccacagactggtctgaacggaataagttcggagggaagcttggttttttcgggactggtgagtgctttgtatttcgtctgcagccggaggtacaaagatacgagtgggttgtgatcaaacacccggagctgacaaagcctcccccattgatggcagcggaacctaccgcacccctatcgcactcagcctccagcgacccagcggatagactgagcccctttctcgcggcccgccattttaacctgccatccaaaaccgagtcaatgtttatggcaggtgggagcgattgcctcattgtggggggcggggggggtcaggcgctctacattgacggggatttaaatcggggccgaacctctcattgtgatacgtttaacaatcagcccttgtgcagcgaaaacttcctcattgccgcagttgaggcctggggattccaagaccccgatacacagtag

SEQ ID NO: 208138 - DNA, 2067 bp, synthetic construct
  misc_feature 1..2067: note = Description of Artificial Sequence: Synthetic coding sequence
  source 1..2067: mol_type = other DNA
atggccaccgccagcggcgccagcgacctgagcggcagcggcgcccctccccccggcgttggcgcccaggctgccgccgctgccgaggaagaggagcgggaggtggtgcgtgtacgggttaagaagtgtgaatcattcttgccccctgaatttcgctcctttgccgtggacccgcagattacatccctcgatgtcttacaacacatcttgattcgcgctttcgacttaagcggcaagaaaaatttcggaataagttacctcgggcgcgataggctgggccaggaagtgtacctgagcctcctttctgactgggacctatcaacagcctttgccactgcgtcaaaaccctatctccagctgagggttgacatcagacctagtgaagattcccccctcttggaggactgggatataatcagcccaaaagacgtgattgggtcagacgtgctcctggccgaaaagagatcatccctcacaaccgcagccttgccttttacacagtcaatcctgacacaggttggccgtaccctttccaaagtgcagcaagttctgagctggtcatacggtgaggacgtgaagccttttaagccccctctctccgacgcagagtttcacacttatctgaaccatgagggacagcttagcagacctgaggagttgagacttcgcatttatcacggcggcgtcgaacctagcctgcggaaggtggtgtggaggtacctgctaaacgtttaccctgacgggcttacgggaagagagaggatggattatatgaaacgcaaaagccgtgagtatgagcaactgaaatctgaatgggcccaaagagctaatccagaggacttggaatttattaggtccaccgtgttgaaggatgtgctgagaaccgatcgcgctcacccctattacgccgggcctgaggatggaccccatctacgggcactgcacgatctgttaactacgtacgctgtgactcacccccaggtgagttattgccagggaatgtcagacctggccagcccaatactggccgtgatggaccacgagggacacgcgtttgtctgcttttgcggcataatgaagcgactggccgccaattttcaccctgacggacgcgcaatggccaccaagttcgctcacctgaaattactactccgccacgctgaccctgatttttatcagtacctgcaggaagcgggagccgatgatcttttcttttgttaccgatggctgttgttggagctaaagcgggaatttgctttcgacgatgctctccgaatgctggaggtcacttggagctccctgccacccgaccctcccgaacacgaagtggagttggtgggtccaccttcccaagtggctgacgcgggctttggaggccatcgtgggtggccagtacgccagcgccacatgctgcggcctgcgggcggcgggggttccactttcgaagatgctgttgaccacttggccacagcctcgcaggggcccggaggcggtgggaggcttctgagacaagctagcctcgatggtctacagcagcttcgggataacatgggctctcggagagacccactggtgcagttaccacatcctgccgcccttatcagctcaaaatcactgtctgagcccctgcttaactctccggacccactgctctctagtttctctcatccggattcccctagttcttccagccccccgtctacacaggaagcgtcacccacaggagacatggctgtcgggtccccactgatgcaggaggtgggatctccgaaggaccccggtaaaagtctgccccctgttcctccaatgggacttccaccacctcaggaatttggacgcgggaacccattcatgttatttctgtgcctcgccattttgctcgagcacagagatcatattatgcggaatggattggactataacgagctggcaatgcattttgaccgtctcgtgagaaaacaccatctcggccgcgtcctccggcgggctagggctctcttcgctgattacctccagtcagaggtatgggattcagaggagggcgcagaggccaccgccgcttcctag

SEQ ID NO: 208139 - DNA, 693 bp, synthetic construct
  misc_feature 1..693: note = Description of Artificial Sequence: Synthetic coding sequence
  source 1..693: mol_type = other DNA
atggccaccgccagcggcgccagcgacctgagcggcagcggcgccccaccccccggcgtaggcgcacaagcagccgcagctgccgaggaagaagagagggaagttgtgagagtgagagttaagcacggtgacggagcgcctggaggattgccacatgtgttcagcccccaaaaatgcgaatccttcttgcctcctgaatttagaagtttcgctgttgaccctcaaatcacatcccttgacgttcttcagcacattctaatccgcgcatttgatttgagcggaaaaaagaattttggaatctcatatcttggccgggatcgactgggacaagaagtgtacctctctctcctgagcgactgggacctaagcacagccttcgctaccgcaagcaagccttaccttcagttgcgggtcgatattcgtccttccgaagattccccattgctggaggattgggatattattagccccaaagacgtgatcggctctgatgtgcttctcgctgaaaaaagaagctctctgacgaccgcagcactgcccttcacccagtcgatactgacacaagtgggcaggactctgtctaaagtgcagcaggtgctgtcctggtcttacggcgaggacgttaagccctttaagccccccttgagcgatgccgaattccacacttacctcaatcacgagggacagctttag

SEQ ID NO: 208140 - DNA, 303 bp, synthetic construct
  misc_feature 1..303: note = Description of Artificial Sequence: Synthetic coding sequence
  source 1..303: mol_type = other DNA
atggccaccgccagcggcgccagcgacctgagcggcagcggcgcccccccaccaggcgttggcgcgcaggctgccgcggctgccgaggaagaggaacgagaagtagtgagagtgagggtaaaaaagtgtgagagcttcctgccgcccgagtttcgaagctttgcagttgatccgcagattacttctctggacgtgctgcagcatatccttatacgcgcgttcgacttgtcagggcccatcgcccgccggctcggccacaaccagcctcagcgctgtcattggcttcggcgtgtggcaggatag

SEQ ID NO: 208141 - DNA, 1305 bp, synthetic construct
  misc_feature 1..1305: note = Description of Artificial Sequence: Synthetic coding sequence
  source 1..1305: mol_type = other DNA
atggactacatgaagcggaagagccgggagtacgagcagctgaagagtgagtgggcacagagagccaaccctgaggacctcgaatttatccggtcaactgtcttgaaggatgtgttaagaacagatcgggctcacccttactacgcaggcccagaggacggaccacacctgagggcccttcacgatctcctgacaacatatgctgtgacccatccccaggtttcatattgtcagggcatgtctgacctggcgagtccaatccttgcggtgatggatcatgaaggacacgcgttcgtctgcttttgtgggatcatgaagcgcttggccgccaacttccaccctgacgggagagcgatggccacaaaattcgcccacctgaaacttctgctgcgccatgccgacccagatttttatcagtatctgcaggaggctggtgctgacgatctgttcttttgttaccgctggctattactagagttgaagcgcgaattcgcttttgatgatgccctgcggatgctagaggtgacctggtcttctctgccgcctgaccccccagaacacgaggtggaactggtcggccccccctcacaggtggccgatgctggattcggtggtcataggggctggcctgtgcggcaacgtcacatgctgaggcctgctggtgggggcggatccacatttgaggacgccgtggatcacttggccacggccagccaaggtccaggtggggggggcaggctgctcaggcaggcctctctggacggcctacagcagctgcgagacaacatgggcagccggcgcgaccccttggtgcagctccctcatccagccgctttgataagttccaagtctctcagcgaacccctcctcaactcacccgaccccttgctgtcgagcttcagccatcccgatagccccagttcatccagcccccctagcacgcaagaagccagcccaacaggcgatatggctgtgggctctcccctgatgcaagaggtggggtccccgaaggacccaggtaaatcactgccacctgtgcccccaatgggtctgccacctccacaagagttcggaagggggaatccttttatgctgttcttgtgccttgctatccttttggagcatagagaccatattatgcgcaacgggttggactacaacgaacttgcgatgcactttgacagacttgttcggaaacaccacctcggtcgcgttctccgaagagcccgagccctctttgccgactacctgcagagtgaagtttgggactccgaagaaggcgccgaagccaccgctgcctcatag

SEQ ID NO: 208142 - DNA, 876 bp, synthetic construct
  misc_feature 1..876: note = Description of Artificial Sequence: Synthetic coding sequence
  source 1..876: mol_type = other DNA
atggacgtggtggaggtggccggcagctggtgggcccaggagcgggaggacatcatcatgaagtacgagaaaggccatcgggcaggtctgccagaagataaaggtcctaagcccttccggagttataataacaacgtagatcacctcgggatcgtacatgagacagagttaccaccattgaccgcacgcgaagcgaagcagattagacgcgagatttctcggaaatcgaagtgggtagacatgcttggtgattgggagaagtataagagttccaggaagctgatcgaccgcgcctataagggtatgcccatgaacattcggggtccgatgtggagcgtgttgcttaatatagaagagatgaagttgaagaacccaggacgataccaaatcatgaaggaaaaaggaaagcggtccagcgagcatatacagcgcatcgatcgcgacgttagcgggactctgagaaaacatatcttttttcgggataggtacggtacaaagcagagagagcttctccatatcctgctggcctacgaagagtacaaccccgaggtgggttattgtcgcgatctgtctcacatagccgccctcttcctcttatatcttccagaggaggacgccttctgggcccttgtgcagctcctggcgtctgaaaggcacagcctccagggctttcatagtcccaacggaggtacagtgcagggcctgcaggaccagcaggaacatgtggtcgctacttcacagccgaaaacaatggggcaccagagcgcctcccgccggagacccggagttgcacgaggacacgttttcgcgaccggtagcctgatccccggacctggaatgcggacactgtgttctagcatcctgggacctctgtag

SEQ ID NO: 208143 - DNA, 1650 bp, synthetic construct
  misc_feature 1..1650: note = Description of Artificial Sequence: Synthetic coding sequence
  source 1..1650: mol_type = other DNA
atggacgtggtggaggtggccggcagctggtgggcccaggagcgggaagacatcatcatgaaatacgagaaaggacatcgcgccgggctccccgaagataaaggccctaagcccttcagatcttacaacaacaacgtggaccacctagggatcgttcacgagaccgaactcccccctctcacagcaagagaagccaagcaaatccgacgcgaaatctcgcgaaagagcaagtgggttgatatgctcggagattgggagaagtataagtcgagccgcaaattaattgaccgggcttataagggcatgcccatgaacattcggggacccatgtggagcgtcctgctcaatattgaggaaatgaagctgaaaaatcccggccgataccagatcatgaaggaaaaggggaaaaggtcgtctgagcacatacaaaggatcgaccgcgatgtgtctggaactttgaggaaacacatcttttttcgggacaggtacggaacaaagcagcgcgaactgttgcatattcttctggcttatgaggagtacaatccagaagtgggatactgcagagatctctcccacatcgccgcgctgtttctgctgtatctgccggaagaggatgccttttgggcactagttcagctattggccagcgagcgtcactccttgcaggggtttcatagtccgaatggggggacagtccagggcctccaggaccaacaggagcacgttgtggcgactagtcagcccaaaaccatgggtcatcaggacaagaaagatttgtgtggacagtgtagcccccttggctgtctgatccgcattttgattgatggcatctcacttggactcactctaagactctgggatgtctatctggtggagggagaacaggctttgatgccaattacacggatcgcgtttaaggtccagcagaagaggctgacaaagaccagcaggtgtgggccgtgggcacgattctgcaacagatttgttgatacttgggccagggacgaagacaccgtgctcaagcacctgcgagcgtcgatgaagaaacttacgcgtaagcagggagacctcccaccccccgctaagccggagcaaggtagttcggcttcccgcccggtgccggcaagccgtggcggaaagactctatgtaagggtgacaggcaggctccccccggaccaccagcccgatttccacgacctatctggtcagcatcccctccaagggccccccgaagcagtaccccatgtcctggcggagcggtccgggaggatacctatcccgtgggaactcagggtgttccgtctcccgccctggcccaaggtggccctcagggatcttggcggttcctgcaatggaactcaatgccaaggcttcctacagacctggacgtcgagggcccatggtttaggcattatgactttcggcaaagctgctgggttcgggctatatcccaggaggatcaactggcaccttgttggcaggcggaacatccagcagaacgcgtgcggtccgcattcgcggccccatccacagacagcgaccagggcacacctttcagggcaagagatgagcagccttgtgcacctacctctgggccatgtctgtgtggccttcacctggagagctcgcaattcccgcctggcttttag

SEQ ID NO: 208144 - DNA, 900 bp, synthetic construct
  misc_feature 1..900: note = Description of Artificial Sequence: Synthetic coding sequence
  source 1..900: mol_type = other DNA
atgggccaccaggacaagaaggacctgtgcggccagtgcagccccttgggatgtctgattaggatcctgatcgacggtatatcactggggctgacccttagactgtgggacgtgtaccttgttgaaggagaacaggccctgatgccaattaccaggatcgccttcaaggtgcagcaaaaacggctcaccaaaacatcgcgttgtggaccttgggcccggttctgtaatagattcgttgatacgtgggcgcgcgacgaggatacagtcttgaaacacttaagggcatcgatgaagaagctgacacgaaaacaaggtgatctgcccccccctgctaagccagagcaagggagctctgccagtcggccggtacccgcctcaaggggaggaaagacactgtgtaaaggggaccgccaggcaccacccggacctcccgccaggtttccaagaccaatttggtctgccagtccaccgagggctccaagaagttcgaccccttgccccggcggggccgtgagagaggatacgtacccagtaggcactcagggggttccatccccagcgctagcacagggtgggccccaaggcagttggaggtttctccagtggaattccatgccacggctgcccacagacctcgatgtcgagggcccctggtttcgacactacgacttccgccagtcgtgttgggtgcgggcgatttcacaggaggaccaactggccccgtgctggcaagcggaacacccggccgaacgcgtgcgctcagccttcgcagctccgagtaccgattccgaccaaggcacgccctttagggcgagggatgaacagccctgcgctccaacgtcgggcccctgcctctgtggattgcacttagaaagcagccagttcccacctggattttag

SEQ ID NO: 208145 - DNA, 1584 bp, synthetic construct
  misc_feature 1..1584: note = Description of Artificial Sequence: Synthetic coding sequence
  source 1..1584: mol_type = other DNA
atggacgtggtggaggtggccggcagctggtgggcccaggagcgggaggacataatcatgaagtatgagaaaggacatcgcgcaggactgcccgaagacaaaggccccaaaccttttcggtcttacaacaacaacgtcgatcatctgggaattgttcatgagacagaacttccaccgctgacggctcgggaagccaagcagattcgccgggaaatttctagaaagtccaagtgggtagacatgttgggagactgggaaaagtacaagagttctaggaagctgatcgacagggcgtacaagggaatgccaatgaatatccgcggacctatgtggtctgtgctgctcaacatcgaggaaatgaaactgaaaaaccccggacggtatcagatcatgaaagagaagggaaagagatcatcagagcatattcagagaattgatagagacgttagcggtactcttcgtaaacatattttctttcgcgatcggtatgggacaaagcaacgtgagctcctgcatattctgctcgcgtacgaggaatacaatcctgaagtgggatactgtcgtgacttgagccacatcgcagccctgtttctcctctatctcccagaggaggatgccttctgggccctggtccagttactcgccagcgaaaggcattctctacaggggttccattcacctaatgggggcacggttcagggactacaagatcagcaggagcacgtggtagctactagccagccaaagacaatgggacaccaaatctccctcggactcacgttgcgtctgtgggacgtgtatctggtggaaggggaacaggccttgatgcccatcacacgcatcgcctttaaagtccagcaaaaacggctcacaaagacctcacggtgtggcccctgggcaagattttgcaataggtttgtggacacctgggcccgagatgaggataccgttctcaaacacttaagagcttccatgaagaagctcacgcggaagcagggcgacttacctccaccagccaagccagaacagggctcttctgcgtcgaggccagtgcctgcgagtaggggggggaagaccctctgcaagggtgaccgccaggctccccccgggcctccagcccgctttcctcggccgatttggtcagcttccccacccagggcgccacgtagttctactccttgtcccggaggtgctgtcagagaggatacatacccggtagggactcagggggtacccagtccggccctggcccagggagggccgcagggatcatggagattcttacagtggaactccatgccaaggctgcccactgacctagacgttgagggcccttggttccgccactacgactttcgccagtcatgctgggtaagagcgattagccaggaagaccagttagccccctgttggcaagccgagcatccggcagaacgggtgcgttctgcgtttgctgcgcctagtacagacagtgatcagggaactccctttagggcgagagatgagcagccatgtgcgcctacctcgggaccttgcctgtgtggcctccacctcgagtctagccagttcccaccgggcttctag

SEQ ID NO: 208146 - DNA, 1650 bp, synthetic construct
  misc_feature 1..1650: note = Description of Artificial Sequence: Synthetic coding sequence
  source 1..1650: mol_type = other DNA
atggacgtggtggaggtggccggcagctggtgggcccaggagcgggaagacataatcatgaagtacgaaaagggacatagggcaggactgcccgaggataaggggcctaagccttttcggtcatacaacaataacgtggaccaccttggaatcgtgcatgagactgaattgccccctctgacggcccgggaagctaagcagatccggagggagatttcacggaagtctaaatgggttgatatgctgggagattgggagaaatataaaagcagtcgtaagctgatagaccgagcgtataaggggatgcctatgaatatccggggccctatgtggtccgtcttgctgaacatcgaggagatgaaactaaagaaccccggaaggtaccagatcatgaaagagaaaggcaagagatctagtgaacacattcagcgcatcgatagagatgtcagtggaacgctgcgtaagcatatattcttccgcgaccgctacggtacaaagcaacgggagctgttgcatatcctgctagcatacgaagaatacaaccccgaagtcggttattgccgagatctgagccacatagctgctctgttcctgctgtatttgcccgaggaggacgccttctgggcacttgttcagctcctggcttccgaaagacatagtctgcagggcttccacagccccaacggcggcaccgtgcaaggccttcaagaccaacaggaacacgtcgtagcaacatcccaacctaagactatgggacaccaggataaaaaggacctatgtggccaatgctccccattaggttgtttgataagaatcctgatcgatgggatttccctggggctgaccctccgcctgtgggacgtgtatctcgtcgaaggcgagcaagctctcatgccaatcacgaggatcgctttcaaagttcagcagaaaaggcttaccaagacctcacgctgtggaccatgggcacgcttctgcaacaggtttgtggacacatgggcccgcgatgaggatactgtactaaagcacctgcgcgcttccatgaagaaattaacccggaaacagggggatcttccgccacccgccaaaccagaacagggtagtagcgcttctcgccctgtccccgcttccagggggggaaagaccctctgtaagggagacaggcaggctccccccggcccaccagctagattccctcgaccaatctggtcagctagccccccaagggcacccaggagcagcaccccttgtccaggcggagctgtcagagaagacacctatccagtagggactcagggcgtcccttcccctgctctggcacaaggggggccacaggggtcgtggcggtttctgcaatggaattccatgcccaggctgcctacagatctggatgtggaagggccatggttccgacactacgactttcgacagagctgctgggtgagggcaatctctcaggaagatcagctggccccttgttggcaggcggaacaccctgccgagcgggtccgttcagctttcgccgctccaagcactgactctgaccagggaactcctttccgtgcacgagatgagcaaccgtgtgcccctactagcggcccatgtctgtgcggattgcaccttgaatcatcccagttccccccagggttttag

SEQ ID NO: 208147 - DNA, 1584 bp, synthetic construct
  misc_feature 1..1584: note = Description of Artificial Sequence: Synthetic coding sequence
  source 1..1584: mol_type = other DNA
atggacgtggtggaggtggccggcagctggtgggcccaggagcgggaagacatcatcatgaagtacgaaaaaggccacagggcaggactgccagaggataaggggccgaagccctttaggtcctacaacaataatgtggatcacctaggtattgttcacgagactgaactgcccccactaaccgcccgcgaagcgaaacaaatccggagagaaatttcaagaaaatctaagtgggtcgacatgctaggagactgggagaaatataagagttctcgcaagctgatcgatcgcgcctataagggcatgccaatgaatatcagaggacctatgtggagtgtgttgctcaacatagaagagatgaagctcaagaacccagggcgatatcagattatgaaagaaaagggaaaaaggtcctctgaacatattcaacgtatcgaccgggacatctctggaaccctgcgaaagcatatgttttttcgagatagatatggtactaaacagcgcgagctgctgcacattttgctcgcctatgaggaatacaaccccgaagttggttactgccgcgacttgtctcatatcgccgccctgtttttgctgtactttccggaagaagatgctttctgggctctcgttcaacttctggcgtccgagagacatagcctgcaaggctttcactcacccaatggcggcacagtgcaaggcctccaggaccagcaggaacatgttgttgcgacaagccagagtaagacgatgggccaccagatcagcctgggcctcaccctgcgcctgtgggacgtttaccttgtggaaggagagcaagcactgatgcctattacacgcatagccttcaaagtccagcagaaacgactcacaaagactagcaggtgtggtccatgggctcggttttgcaaccgcttcgtagatacatgggcccgtgacgaggatacggtgctgaaacaccttcgggcctccatgaagaaattgacgcggaaacagggggacctgcctccgccagcaaagccagagcagggctcctcggcgagcaggcccgtgcctgcatctaggggaggaaagaccctgtgtaagggtgatcgccaggcacctcccgggcctccagctaggtttccccggccgatctggtctgcaagcccaccacgcgcccccaggtcgtctactccttgcccaggcggcgcagtccgagaagacacctatcctgttggcacgcagggtgttccaagtccagccctggctcagggtgggccgcagggtagctggaggtttcttcagtggaactcaatgcctaggctgcccacggatctcgatgttgagggtccctggttccggcactacgattttcgccagtcatgctgggtacgcgcaatctctcaagaagaccagctggctccctgttggcaggctgagcaccccgcagagcgcgtgcgcagtgccttcgccgctcccagtaccgactctgaccaagggactccttttagggccagggatgaacagcaatatgcccccacctcaggcccctgcctttgtgggctgcatctcgagtcttctcagtttcctcctggcttctag

SEQ ID NO: 208148 - DNA, 1650 bp, synthetic construct
  misc_feature 1..1650: note = Description of Artificial Sequence: Synthetic coding sequence
  source 1..1650: mol_type = other DNA
atggacgtggtggaggtggccggcagctggtgggcccaggagcgggaggacattatcatgaagtacgagaagggacacagggctggccttcccgaggacaagggccctaaacccttcagatcttataacaacaacgtggaccacttgggtattgtacacgaaacggaactgccaccgctgacagcccgcgaggctaaacaaattcgccgggagatatccaggaagtccaagtgggttgatatgctcggagactgggagaagtataagagttctaggaagctgattgatagagcatacaaaggaatgcctatgaatattaggggccccatgtggagcgtgcttctgaacatcgaggagatgaagctcaagaaccccggtagataccagataatgaaggagaagggcaaaaggagcagtgagcacatccagcggattgaccgcgatatttcggggacattgcgcaaacacatgttcttcagagatcgttacgggacaaagcagcgagaattattgcatatcctcctcgcctacgaggagtacaaccccgaagtgggttactgccgggatctctcacatatagcagcacttttcctcttgtattttccagaagaggacgccttctgggccttggtgcagttattggccagcgagagacatagcctgcagggcttccactcgcctaacggcggaacagttcagggattgcaagatcaacaggagcacgtggtcgcaacttcacagagcaagacgatggggcatcaggataagaaagatctgtgcgggcaatgttccccactcgggtgcctgatcaggattctcatcgacggaataagcctgggcttaaccctgagactgtgggatgtctatttggtggaaggagagcaagcccttatgcctatcactaggattgcatttaaggttcaacagaagaggctgaccaaaacgtctcgctgcggcccatgggcgcggttctgcaaccgcttcgtcgatacctgggctagagatgaggataccgtattgaaacacctgcgggcttctatgaaaaagttgaccagaaaacagggcgatctgcctccccccgcaaaaccagagcaaggaagtagcgcatcccgtccggtccctgcaagcagaggtggcaagactttgtgtaaaggagatcgccaggccccgcccggcccgcccgcgcgctttcctcgtcctatttggtctgccagtccacctagggcccccagatcttccactccatgtcctgggggtgccgtccgggaggatacatatcccgtggggacccagggtgttccttctcccgcactcgcccaaggtgggccccagggctcttggcgcttcctgcagtggaactctatgcccagactgccaaccgacctggatgtcgagggaccctggtttaggcactatgatttccggcaaagctgttgggtccgcgccatctcacaggaggaccagctggctccatgctggcaggccgaacaccctgcagaacgcgttcgcagcgcttttgcagccccgtccactgactctgaccagggaactcctttccgcgccagggacgagcaacagtacgcacctaccagcggaccatgtctgtgtggacttcacttggagagcagtcaattccctcccggattctag

SEQ ID NO: 208149 - DNA, 1650 bp, synthetic construct
  misc_feature 1..1650: note = Description of Artificial Sequence: Synthetic coding sequence
  source 1..1650: mol_type = other DNA
atggacgtggtggaggtggccggcagctggtgggcccaggagcgggaggatatcatcatgaagtacgaaaaaggtcaccgggctggcttgcccgaagacaaaggaccaaaaccatttagaagttacaataacaacgtagaccatcttgggatcgttcacgaaacagagctgccaccactgacagcaagggaagcgaagcaaatccggcgtgaaatctcaaggaagtcaaagtgggtcgacatgctgggcgactgggagaagtacaaatctagccgtaagctgatcgacagagcctataagggcatgcctatgaacattagggggcctatgtggtcagtgctcttgaacatcgaagaaatgaagctcaaaaacccagggcgctatcagattatgaaggagaagggaaaaaggtcttcagagcacattcaacggatcgatagagacatctcaggcacgctgcgtaaacacatgttctttcgagatcgttatggcaccaaacagagggagttgctgcatatattacttgcgtatgaagagtataaccccgaggtaggctattgtcgggacctaagccatatcgcagccctgtttctgctatatttccccgaggaagatgccttttgggctcttgtgcagctgctggcttccgaaaggcactctctccagggctttcactcgcctaatggtggaactgtacagggcctccaggaccagcaggaacacgtggtggctaccagccagtcaaagactatggggcatcaagataagaaggatctgtgcgggcagtgctctccattggggtgtcttattcggattctcattgatggcatatccctaggacttacgctgcgactctgggacgtgtacctcgtggagggtgagcaggcactgatgcccatcacacggatcgcctttaaagtccaacagaagcggcttactaaaacctccagatgcggaccgtgggcgaggttctgtaatcgattcgtagacacttgggctcgggacgaagatacagtccttaaacatctcagagcttctatgaaaaagctcaccaggaagcaaggcgacttgcctccacccgctaagcccgagcaggggtctagtgcgtctagaccagtcccagctagcagaggaggcaagaccctttgcaagggcgaccgccaggccccgcccggaccacccgccaggtttcctcggcctatttggtctgcctcccctccacgcgctcctcggtcaagcacaccttgtcctggtggagccgtccgagaagatacctatcctgtcggcacccagggagtgcccagccctgcactggctcagggaggccctcagggctcctggcgctttctgcagtggaattccatgcccagactgccaacagacttggatgttgaaggtccttggtttcgccactatgacttccgccagtcatgttgggtcagggccatctcccaggaggaccagctcgctccttgttggcaggcagaacatccagcagagagggtccgttccgctttcgctgccccgagtacagatagcgaccagggaacgcctttccgggcccgagacgaacaacagtatgctcctacctccggaccatgtttatgcggtctgcatctggagtcctcacagttcccccctgggttttag

SEQ ID NO: 208150 - DNA, 1650 bp, synthetic construct
  misc_feature 1..1650: note = Description of Artificial Sequence: Synthetic coding sequence
  source 1..1650: mol_type = other DNA
atggacgtggtggaggtggccggcagctggtgggcccaggagcgggaggacataattatgaagtatgagaaaggacatcgagccggactgccagaagataaaggtcccaaaccatttaggtcttataataacaacgtcgatcatttgggtatcgtccacgaaacggagctcccgcccctgacggcccgcgaagctaaacagataagacgagagatatcgcgcaagagtaaatgggtggacatgttgggagactgggagaagtacaaatcgagtcgcaagctgatcgaccgagcctacaagggaatgcccatgaacattcggggccctatgtggagtgttctgcttaatatagaagaaatgaaactgaaaaacccaggccgttaccagatcatgaaggagaaagggaaacgaagctccgaacatatccagcgcattgatagggacatctccggaactttacgtaaacacatgttctttcgcgacagatacggaacgaagcaaagagaactactgcacatcctgctagcatatgaggaatataatcctgaagtggggtactgtagggacctctcacacattgcggcactcttcctcctatacctgcccgaagaggatgcattttgggcactggtccaactgctcgcatctgaacggcactcactccagggtttccactcaccaaacggagggactgtccagggcctccaggaccaacaggaacacgtggtggctacaagccagagcaaaacaatgggtcatcaagacaaaaaagacctctgtggccagtgttctccactcgggtgtcttatccgcatcctgattgacggtataagcctgggcctgactctcagattgtgggacgtctacttggtcgaaggagaacaggcactgatgccaatcacacggatcgcctttaaagtccagcagaaacggctgacaaagacctccagatgtggcccctgggccaggttttgcaatagattcgtagatacatgggcccgagacgaagacacggttctgaaacacctgcgtgccagcatgaagaagcttaccagaaaacaaggcgacctccctccgcctgcaaaaccagagcagggctcctccgcctcgcgtccagtgccagcatcacgaggggggaaaaccctgtgcaagggcgacagacaggctccacccggacccccagcctggttcccccggcctatctggtccgcttccccgcccagggccccaagatcctccactccttgccctgggggcgcagttcgagaagacacctacccggtgggtactcagggagttcctagtcccgcattggcccaaggaggcccacaaggcagctggcgatttctgcaatggaactccatgccaaggttgcctaccgatctggatgtggagggtccctggttcaggcactacgatttccggcagagctgttgggtccgcgccatttcccaagaagatcaactggctccctgctggcaggccgagcatcctgctgagcgagtacggtctgctttcgccgccccatctaccgactcagatcaaggcaccccttttagagccagggatgaacagcaatgcgcacccacctccgggccctgtttgtgtggtctgcaccttgagtcgtctcaatttccaccaggcttttag

SEQ ID NO: 208151 - DNA, 1584 bp, synthetic construct
  misc_feature 1..1584: note = Description of Artificial Sequence: Synthetic coding sequence
  source 1..1584: mol_type = other DNA
atggacgtggtggaggtggccggcagctggtgggcccaggagcgggaagatatcattatgaagtacgagaagggtcaccgcgccggactgccagaagacaaagggcccaagccttttaggtcctacaacaataatgtggaccacttgggaattgtgcatgagaccgaacttccacccctaacggcccgggaggcgaagcagataagaagagagattagcagaaagtctaaatgggtggatatgctgggagattgggagaagtataagagttccagaaagcttatcgatcgcgcctacaaaggcatgccaatgaatataaggggacctatgtggagcgtgctccttaacattgaagaaatgaagcttaaaaatcctggccgctaccagatcatgaaggaaaagggcaagcggagtagtgaacatatccagcgaattgaccgcgatatcagtggcactctgagaaagcatatgtttttccgcgataggtatggcactaaacaacgagaactgctgcatattctgctcgcgtacgaagagtacaaccctgaggttggatattgtcgagatttatcgcacatcgccgcattgttcctcctgtaccttcctgaagaagacgccttttgggccctcgtgcagctgctagcctcagagaggcactcattgcagggatttcatagccccaacggcggaacagtccagggactgcaggatcaacaagagcacgtcgtagcaacgagccagagtaaaacgatgggccaccagatttcactcggcctgaccctgaggctgtgggatgtctatttggtagaaggtgagcaggccttgatgcccatcacccggatagcattcaaagtgcaacagaaaaggctgactaagacgtctcgttgtggaccctgggcacggttctgcaatagattcgtagacacgtgggctcgagacgaggacaccgtcctgaagcatttgagggccagcatgaaaaagttaactcggaagcagggggatctgccaccacccgccaagccggagcaggggtcttcggcttccagaccggttcctgcatcacggggaggcaagacactctgtaagggtgatcgccaggccccccctggtccgcccgcatggttcccccgccccatatggagcgccagtccaccgcgggccccgcgctcatctacaccatgtccaggcggtgctgtcagagaggacacatatcccgtgggcacgcagggagtgcccagccctgcactagctcagggaggcccacaagggtcctggcggtttctgcagtggaacagtatgcccagactcccaaccgatctggatgtagagggtccttggtttagacactatgatttcagacagtcttgttgggtccgcgcgatctcacaggaggatcagctggccccatgctggcaagcagagcaccccgcagaacgcgtgaggtccgcattcgccgccccttcaactgatagcgatcagggaacaccatttagagcaagggacgaacagcagtgcgcacccacgagcgggccatgcctgtgtggcctccacctggaatcatcccaatttccacccggattctag

SEQ ID NO: 208152 - DNA, 1650 bp, synthetic construct
  misc_feature 1..1650: note = Description of Artificial Sequence: Synthetic coding sequence
  source 1..1650: mol_type = other DNA
atggacgtggtggaggtggccggcagctggtgggcccaggagcgggaggacatcattatgaagtacgagaagggccaccgagccggcctgcctgaggacaaaggccccaaaccattcaggagctacaacaacaacgttgaccacctgggcatagtgcatgagacggaactgccccccctgacagcgcgggaggctaagcagatccgcagagagatatcacgtaaaagcaagtgggtggacatgctcggggattgggagaagtacaagagcagtcgaaagctgatcgatagagcctacaagggcatgcctatgaatatcaggggccctatgtggtctgttctcctgaatatcgaggagatgaagctgaaaaacccgggccgatatcagatcatgaaagagaaggggaaaaggtcaagcgagcacattcagcgaattgaccgcgacatctctggtacactgcgaaaacacatgttcttcagagatcgctatggcaccaagcagcgggagctgttgcacattctgcttgcctacgaggagtataatccagaggttggctactgcagggatttgtcccacatagcagccttgttcttattgtaccttcccgaggaggacgccttttgggctctggtgcagctgctggcctcggaacggcatagcctgcagggattccattccccaaacggcggaacagtgcagggtctccaggatcaacaggagcacgtcgttgcaaccagccaatctaagaccatgggtcatcaggacaaaaaggatctgtgtggccaatgcagccccctgggttgcctgataaggatcctcattgatggcatttctttaggccttaccctcagattatgggacgtgtatctggtcgagggtgagcaggccttgatgcctattacccgcatcgcctttaaggtgcagcagaaacggctcaccaaaactagcagatgtgggccctgggctagattctgtaatcgattcgtggatacttgggcaagggacgaggataccgttctgaagcacttgcgcgcctccatgaagaagctgactcggaagcagggtgatcttccccctcccgccaagcccgagcagggtagctctgcctcgcgcccagttccagcatcccgcggagggaaaaccctctgtaaaggggatcggcaagccccgcctgggccacccgcgtggtttcctagaccgatttggagcgcctccccgccacgagctcctcggtcctctaccccatgcccggggggagctgtgcgagaggacacctaccctgttggtacacagggggttccctcaccggctctggcccaaggcggtcctcagggatcatggagattcctgcaatggaatagtatgccccggctgccaactgacctggatgtggaggggccatggtttaggcactacgacttccgccagtcatgctgggtgagggcgatctcgcaagaggatcagctggccccctgctggcaggctgagcaccccgccgagagggtgcgcagcgccttcgctgcaccgtccaccgattctgaccaagggacacctttccgggctcgtgatgagcagcaatgcgcacctaccagtggaccctgcctgtgtgggctgcatctggaaagttcgcagttcccccccggattttag

SEQ ID NO: 208153 - DNA, 1650 bp, synthetic construct
  misc_feature 1..1650: note = Description of Artificial Sequence: Synthetic coding sequence
  source 1..1650: mol_type = other DNA
atggacgtggtggaggtggccggcagctggtgggcccaggagcgggaagatattattatgaaatacgagaagggccaccgcgccggcctgccggaggataagggccccaagcctttccgttcatacaataataatgttgaccacctcggcatagtgcacgagacggaactgccccctctgaccgccagggaggccaagcaaattcggcgcgagatctctagaaagtctaaatgggtcgacatgctgggtgattgggagaaatataagtcaagccggaagcttattgatagggcctacaagggaatgcccatgaacatacggggcccaatgtggagtgtgctcctcaataccgaggaaatgaagctgaaaaatcctggtcggtaccaaattatgaaggagaaaggtaaacgatccagcgagcacatccagcggattgaccgcgacgtgagtggcacgctccggaaacacatttttttcagagaccgctacggcaccaagcagagggagctgctgcatatactgttggcatacgaggagtacaatccagaagtggggtactgtcgagatctctcgcatattgccgctttatttttgctgtatttgcccgaggaggatgctttctgggcgctggtccagctcttggcatctgagcgtcacagccttcaaggctttcacagccctaatggcggcacagtccaggggctccaggaccagcaggaacacgttgtggccacctcccagcccaaaaccatgggccatcaggacaagaaagatctttgcggtcagtgcagcccactgggatgccttataaggatcctgatagatggtatctccctcggtctgacgttgagactgtgggacgtgtacctggtcgaaggggagcaggcgctgatgcctattaccagaattgcctttaaagtgcagcagaaaaggcttaccaaaacatccaggtgcggtccttgggcccgcttttgcaaccgctttgtggacacttgggccagagacgaggacactgtcctcaagcacctccgcgcttctatgaaaaagctgacacggaagcagggagacctgccgcctcctgccaaaccagaacaaggctctagtgctagcaggccggtgccagcctcccggggcggcaagaccctctgtaagggcgaccggcaggcccctcccggacctcctgctcgctttcctcgtccaatctggtctgcaagtccaccccgcgctccccgatcaagcaccccttgccctggtggcgccgtgcgcgaagatacataccctgtagggacacagggagtccctagccctgctctggcccaaggcgggccccagggctcttggcggttcttacaatggaattctatgcctcggcttcccactgacttggacgtggaggggccatggttcagacactacgacttccggcaatcatgttgggtacgggctataagtcaagaggaccagctggcaccatgctggcaagccgaacaccctgcagaaagagtccgctccgctttcgctgctccaagcacggactccgatcagggtaccccgttccgcgcgcgggacgagcaaccatgtgctccaactagcggaccctgtctttgtggcctccatctggaatcttctcagttcccacccggcttctag

SEQ ID NO: 208154 - DNA, 876 bp, synthetic construct
  misc_feature 1..876: note = Description of Artificial Sequence: Synthetic coding sequence
  source 1..876: mol_type = other DNA
atggacgtggtggaggtggccggcagctggtgggcccaggagcgggaggatataataatgaagtacgagaaggggcatcgggctggtcttcccgaagataaaggccccaagccctttagatcgtataataacaacgttgatcatctaggcattgtacatgagaccgagcttcctccattgaccgctcgggaagctaagcagatcaggcgggaaatcagcaggaaaagcaaatgggttgatatgctgggggattgggaaaaatataagtcgagccgtaaactgatcgacagagcttataaggggatgcccatgaatattaggggacctatgtggtccgtcttgttgaatactgaagaaatgaaattgaaaaaccctggccgctaccagataatgaaagaaaagggtaagagatcaagtgagcacatccagaggatcgatagggacgttagcggcacattgcggaagcatatattttttagagatagatacggcacaaaacagcgcgaacttctgcacattttactcgcgtatgaggaatacaacccggaggtaggttattgccgcgacctgtcccacatcgcagctctcttcctgttatacctacctgaggaggatgctttttgggcgctcgtgcaactgcttgcaagcgagcggcattctcttcagggcttccacagccccaacgggggcactgtacaaggtttgcaggaccaacaggaacacgtggtagccacgtcacagccgaagaccatggggcatcagagcgccagtaggaggcgccccggggtcgctcgcggccacgtgttcgccacaggctccctgatccccggacccggaatgagaaccttgtgctcctccatcttggggcccctatag

SEQ ID NO: 208155 - DNA, 900 bp, synthetic construct
  misc_feature 1..900: note = Description of Artificial Sequence: Synthetic coding sequence
  source 1..900: mol_type = other DNA
atgggccaccaggacaagaaggacctgtgcggccagtgcagccccctgggatgcttaattcgaatcctcatcgacggcattagcttaggcctaacgttgcgactttgggatgtgtacctggtggaaggagagcaggcattaatgcccatcacaaggattgcctttaaagtacaacaaaaacggttgaccaaaactagccgatgcggcccttgggcacggttctgcaaccgattcgtggacacgtgggcacgcgacgaggacaccgttcttaagcatttgagggcaagcatgaagaaacttacacgtaaacaaggcgacttgcccccgcctgcaaaaccggaacaaggatcttctgcaagtcgaccagtgcccgcctccagaggtggtaaaacactctgcaagggagacagacaggccccgcctgggccaccagcaaggttccctagacctatttggagcgcttccccacctagggcccctagaagctctaccccttgcccagggggggccgtcagggaagatacataccctgtgggcacacaaggcgtgccatcccccgccctcgcccagggcgggccccaggggagctggcggtttttgcagtggaacagcatgcctcgactgcctacagatctcgacgtggagggaccctggtttagacactatgattttagacaatcgtgctgggtgagggctatatctcaagaggaccagttggctccatgctggcaagcagaacaccctgccgagcgcgtcaggagtgcctttgcagctccctccaccgattcagaccagggtaccccttttcgcgctcgggacgaacaaccatgcgcacctacttccggtccgtgtctgtgcggtctccatctggagtcctctcaattccctccaggcttttag

SEQ ID NO: 208156 - DNA, 1410 bp, synthetic construct
  misc_feature 1..1410: note = Description of Artificial Sequence: Synthetic coding sequence
  source 1..1410: mol_type = other DNA
atgctgggcgactgggagaagtacaagagcagccggaagctgatcgacagagcatataaaggaatgcctatgaatatcagaggaccaatgtggagcgttctgctgaacacagaggaaatgaaactgaagaaccccggacgataccagataatgaaggaaaagggaaaacgcagttccgaacacatccagcggatcgaccgcgacgtctccggaactctgcgcaaacatattttcttccgggatagatacggcaccaagcagagagaactcttgcatatcctcctagcatacgaagagtacaatcccgaagtgggatactgtcgggatctctctcacatcgctgccctgttccttctatacctccctgaagaagatgctttctgggccctcgtgcagttactcgccagtgaacgacactccctgcaaggcttccattctcctaacggaggaaccgtgcagggactgcaggaccagcaggaacacgtggtggccacatcccagccgaaaaccatggggcaccaggacaagaaggacctatgcgggcagtgcagtcccctcggatgtttaatccgcatcctgatcgacggaattagcctcgggcttactctgcggctctgggatgtctatctggttgaaggtgagcaggccctgatgcccataaccaggatagcctttaaggtgcagcagaagcggctcaccaagacgagccgctgtggtccctgggccagattttgtaatagattcgtggatacatgggcacgtgacgaggacacggtgctgaagcatttacgggcatccatgaaaaagctcaccaggaagcagggagatctgcctccacccgccaagccagagcagggctcatccgcttcacggcccgtgcctgcgagtaggggcgggaaaacgttgtgtaaaggggaccgccaggcaccccccgggccccctgctcgattcccgcggcccatttggtctgcatctcctccccgagctcctcgcagcagcaccccttgtccaggcggcgctgtccgggaagacacctaccctgtgggtacacagggcgtgccgtcccctgcattagcccagggcggaccccagggttcctggcgattcctgcaatggaacagcatgccgaggttacctacggatctggatgtggagggtccatggttcaggcactacgacttccggcaaagctgctgggtccgggcaattagccaagaggatcagttggccccgtgctggcaggccgaacatcctgcggagcgcgtccgaagcgccttcgctgcccccagcaccgactcagatcaggggaccccatttagggctcgggacgagcaaccctgtgccccaacaagcgggccatgtctatgtggcctgcacctcgaatcctcacagtttccaccaggtttctag

SEQ ID NO: 208157 - DNA, 1650 bp, synthetic construct
  misc_feature 1..1650: note = Description of Artificial Sequence: Synthetic coding sequence
  source 1..1650: mol_type = other DNA
atggacgtggtggaggtggccggcagctggtgggcccaggagcgggaagacatcattatgaaatacgaaaaaggccacagagccggattgcctgaggacaaaggaccgaagccctttagaagctataataacaatgtcgatcacctcggaatcgttcacgaaaccgagctcccaccattaaccgcgcgtgaagcaaagcagataaggcgggagatttctcgcaagagcaagtgggtagacatgctgggggactgggagaaatataaaagttcccgtaaattgattgaccgggcgtacaagggaatgcctatgaacatccgaggacccatgtggtccgtattgctgaacatagaggagatgaaattgaagaaccctggaagataccaaatcatgaaagagaaaggcaagaggtcttcagaacacatccagagaatagacagggacatctctgggacattgagaaagcacatgttctttagagatcgatacggtaccaagcagagagagctcctacatattctccttgcctatgaagagtacaatcctgaggtgggatattgcagagacctgtcacacattgcagctttattcctgctgtacttgccagaagaggatgcgttttgggccttagtgcagcttttggcctccgagcgtcacagcctccaaggattccattctccaaacgggggaactgtgcagggcttacaggatcagcaagagcatgttgtggccaccagccagcccaaaacgatgggacaccaagataagaaggatctctgcggccagtgtagccctctgggctgcctgattcgaatactcatcgatggcatttccctgggtctcacccttagactatgggatgtttacttggtcgagggagaacaggccttaatgcccatcacacgaatcgcattcaaagtccaacagaaacgactgactaagactagccggtgtggaccttgggccagattctgtaatcgattcgtagacacctgggcccgggacgaggacacggttctcaagcatctgcgcgcctccatgaagaaacttacacggaaacagggtgacctgccaccaccggcgaaacctgaacaggggagttctgctagccgcccggtgcccgcaagtcgagggggcaagacactgtgtaaaggggaccgacaggcacctcctggcccgccggcccggttccccaggcccatctggtctgcctcccctcctcgcgcacctcgtagttctaccccgtgcccaggcggcgctgttagggaagacacgtatcccgtgggcacccagggggtccccagccccgctttggcgcagggcggccctcagggaagctggagattcctgcagtggaattctatgcctcgcctgccaacagacctcgacgtggagggtccctggtttagacactacgactttaggcaatcttgttgggtgagagcaatctctcaggaggaccaactcgctccatgctggcaggccgagcacccggccgagagagtacgcagcgcttttgctgctcccagcaccgactcggaccagggtacgccattcagggccagagatgagcagcagtgcgctcctaccagtggcccatgtctgtgcggcctgcacttggaatcgtcccagttcccaccaggtttctag

SEQ ID NO: 208158 - DNA, 1650 bp, synthetic construct
  misc_feature 1..1650: note = Description of Artificial Sequence: Synthetic coding sequence
  source 1..1650: mol_type = other DNA
atggacgtggtggaggtggccggcagctggtgggcccaggagcgggaggatatcatcatgaaatatgaaaagggacacagagccggactgccggaggataaggggcctaaacccttccgttcttacaacaataacgtggaccacttaggcattgtgcacgagacggagctgccccctctcacagccagggaagctaaacagataaggagggaaattagccgcaaatccaagtgggttgacatgctgggggactgggaaaagtataaaagctctcgaaagctgattgatcgggcatataaggggatgccaatgaacatacgcggccccatgtggagcgtgttgcttaacatcgaggagatgaagctcaaaaacccagggagatatcagataatgaaagagaagggaaagcggtcatctgaacatattcagcggatcgacagggacattagcggcacccttaggaagcacatgtttttcagggatcggtatggtactaaacagcgggagctcctgcacatcttactcgcctatgaggaatataaccctgaggtggggtattgccgtgacctcagtcacatcgctgctctgtttcttctgtatcttcccgaagaagacgccttctgggcactcgtgcaactgctcgcttcagaacgacacagccttcagggatttcattcccctaatggcggcacagtacagggcctgcaggatcagcaagagcacgtcgttgctactagtcagcctaagaccatgggtcaccaggacaagaaggatctgtgcgggcaatgttcacctctcggatgcctgattcgtatcttgattgacggaatatcgctgggtttgaccctgagactgtgggacgtttacctggttgagggtgagcaagctctcatgcctatcactcgtatcgctttcaaggtgcaacaaaaacgtctgacgaaaacatctcgatgtggcccttgggctagattctgtaatcgattcgtagatacatgggcgcgggatgaagacactgttctgaagcacttgagggcctcaatgaagaagctgacccgcaaacagggcgatttacctcctcctgccaagcctgaacagggctcctccgccagtagaccggtccccgcttcccggggcgggaagacgctgtgcaagggcgatcgccaagcacccccaggccctccagccagattcccgcgccccatctggagtgcatcacctccccgggcacccagatcctcaaccccatgccccgggggagccgtgagagaggacacctaccccgtggggacgcagggagtaccttctccagcattagcccagggaggaccacagggtagctggcggttcttgcagtggaattctatgccgcggcttccaacagacttggatgttgaaggtccttggttcagacactacgacttccgccaatcctgttgggtgcgcgctatctcacaggaggaccaactcgccccatgctggcaggctgaacatcctgcggagcgcgtgagaagtgcctttgccgccccatctactgattccgaccagggtacaccgtttagggctagagatgagcagcaatgcgcgcccactagcggtccttgcctctgcgggctgcatctggagagtagtcaatttcccccgggattttag

SEQ ID NO: 208159 - DNA, 1584 bp, synthetic construct
  misc_feature 1..1584: note = Description of Artificial Sequence: Synthetic coding sequence
  source 1..1584: mol_type = other DNA
atggacgtggtggaggtggccggcagctggtgggcccaggagcgggaagacatcataatgaagtacgagaaaggccatcgcgctggactgccagaggacaagggtccgaagccgtttaggtcatacaataataatgtggatcacttgggcatcgtgcatgaaacagagctgcctccactcactgcccgcgaggcgaaacagattcgccgggagattagccgcaagtcaaaatgggtggatatgctgggcgactgggagaaatataaatcgtcacgaaaactcattgaccgggcctacaagggcatgcccatgaacatccgtggcccgatgtggtcggtcttactgaacattgaggaaatgaagctcaagaaccctggaaggtaccagatcatgaaagaaaagggaaagagatcctcggagcatatacagagaatcgatagagatatctccggaactttaagaaagcacatgttcttccgggatcgctatggcaccaaacaacgcgaactgcttcacatactgctggcctacgaggagtacaatccggaggtcggctattgtagagacttgagccacatcgctgctctttttctgctgtacctgccagaggaggatgcattttgggccctggtgcagctcctggcctctgaacgccactcactgcaaggctttcactcccccaacgggggaactgttcagggattgcaggaccagcaggaacacgtagtagctactagccaacccaagactatgggccatcaaatctctcttggacttactctccgtctgtgggatgtgtacctcgtcgagggagaacaggcccttatgcctataacgaggatcgcctttaaagtccaacagaagagactgacaaaaacttcgcggtgcggaccatgggcccgcttttgcaataggttcgtcgacacctgggccagagacgaggatactgttttaaaacatctccgcgcttctatgaagaagctgaccaggaagcagggcgacctgcctccacctgccaaacctgagcaggggtcctcggctagccggcctgtccctgccagtaggggagggaaaaccctctgcaaaggtgaccgccaagctcctccaggtccaccagcccgttttccccggcccatttggtccgcttctcccccccgcgccccaaggagctccaccccatgccctggcggcgctgtgagagaagatacctatcctgtgggtacacaaggcgtgccctctccagccctagcgcaaggtgggccacaggggtcctggaggttcttacaatggaattctatgccacggctgcccactgacttagacgtcgaaggtccttggtttcgacactacgatttccgacaaagttgttgggtgcgagccatcagccaggaagatcaacttgcaccgtgctggcaagctgagcaccctgctgagagggtgagatcggcattcgccgctcctagcacggacagcgaccaggggacaccctttagagctcgcgatgagcagcagtgcgctcccacctccggcccttgtctatgtggacttcacttggaatcctcacagttcccacccggcttttag

SEQ ID NO: 208160 - DNA, 1584 bp, synthetic construct
  misc_feature 1..1584: note = Description of Artificial Sequence: Synthetic coding sequence
  source 1..1584: mol_type = other DNA
atggacgtggtggaggtggccggcagctggtgggcccaggagcgggaagatatcattatgaaatatgaaaaaggccacagagctggcctgccagaagacaagggaccaaagcccttcaggagttacaacaataatgttgatcatctaggcattgtccatgagaccgaacttcccccgctgaccgcacgggaagccaagcagatcagacgcgagatctcacgcaagtccaaatgggtggacatgttgggcgattgggagaaatacaagagcagccgtaagctcattgatcgcgcatataaaggaatgcccatgaacattcgggggcctatgtggagcgtccttctgaatatcgaggaaatgaaactcaaaaaccccggacggtatcaaatcatgaaagagaagggtaagaggtcttccgagcatattcagaggattgacagggacatctctggtacactccgaaaacatatgttcttccgtgatagatatggtactaaacagagagagcttctacacatactactggcatacgaggaatacaatcccgaggtggggtactgtagggatctgtcacacatcgctgctttatttcttttatatctccccgaagaagatgctttctgggcccttgtgcagctactggcctcagaaagacattctttgcaggggttccactcaccaaacgggggcacagtacagggactccaggaccaacaggaacacgtcgtggcgacctcgcagcctaaaactatgggccatcagataagtctaggactgacgttgcggctgtgggatgtttatttggttgagggcgagcaagccctcatgcccattactcgtatagcttttaaagtgcagcagaaaagacttaccaagaccagtcgctgcgggccttgggcccgcttctgtaatcggtttgtagatacatgggctcgtgacgaagacactgtgctgaagcatttgagggcaagtatgaagaaactcactagaaaacagggcgatctgccacctccagcgaagcccgagcaggggtcaagcgctagccgaccggtgcccgcgtcacgcggaggcaagacactctgtaagggggaccggcaggcacctccaggacccccagctaggttcccacgaccaatctggtcagccagcccccctcgtgccccaagatcatccacaccctgcccaggtggagccgtgagagaagacacttatcccgtaggcacacagggtgtcccttctcctgcccttgcgcaaggcgggcctcagggctcctggcggttcctgcaatggaattctatgcctaggctcccaaccgatctggacgtcgagggaccatggtttcggcattacgatttccgtcaaagttgctgggttagagctatttctcaagaagaccagctcgcaccatgctggcaagctgagcatccagctgaacgcgtcaggtcagcatttgccgcgcctagtacagactcggaccagggcacaccattccgggcgagagatgaacagcagtgcgcccctacatctggtccatgcttatgtggcctgcaccttgagtcctctcagtttccacctggcttctag

SEQ ID NO: 208161 - DNA, 1410 bp, synthetic construct
  misc_feature 1..1410: note = Description of Artificial Sequence: Synthetic coding sequence
  source 1..1410: mol_type = other DNA
atgctgggcgactgggagaagtacaagagcagccggaagctgatcgaccgggcctataaagggatgccaatgaacatcagggggcccatgtggtcggtgctgttgaatatcgaagagatgaagctcaagaacccagggcggtaccagattatgaaggagaagggaaagagatctagtgagcatatccagcgtatcgatagagatatctctggcacattgcggaagcatatgttctttcgggaccgatatggcaccaagcagcgcgaactgctgcacatcttgctcgcctacgaggaatataaccctgaagtggggtattgtcgagacctctcccacatcgcggcactgttcttattgtatctgcctgaggaagacgccttctgggccctggtgcagctgctcgcatctgaacgccacagtctacagggatttcattctcctaatggagggacggtgcaagggctacaggatcaacaggaacacgtggtggccaccagtcaaccgaagaccatgggacaccaggataagaaggatctgtgcggccagtgctcccccttgggatgtctaataaggattcttatcgatgggatatctctgggtttgaccctgcgactatgggacgtgtatttggtggagggtgagcaggctctgatgcccattaccagaatcgcattcaaggtccagcagaagaggctgacaaaaaccagcaggtgtggaccctgggctagattctgcaatcgcttcgtcgatacctgggcccgcgatgaggatacggtgctaaagcacctgcgagcatccatgaaaaaactgacaagaaagcaaggtgatctgccgcctcccgctaagcccgagcagggctcctcagcatcacggcctgtgccagcctcgcgcggtggcaagacgctctgtaagggggataggcaggccccacctggccccccagcccgcttccctcgacccatatggagcgcctctccaccaagagcacctcgctcgtctaccccatgccctggtggcgcggtgcgcgaagatacatatcccgtgggaactcaaggtgtgccctcccctgccctagcacaggggggtccccaaggctcatggcggttcctgcagtggaatagcatgccccggctgccgacagacctcgatgtcgaggggccctggttccgccactatgattttaggcagtcttgttgggtgagggccatttcacaggaagatcagctggccccctgttggcaggcagagcacccagctgagagggtgaggtccgcattcgctgccccctccacagactccgaccagggaacaccttttcgcgcgcgagatgaacaacagtgcgcccctacaagcgggccgtgtctgtgtgggctgcaccttgaaagctctcaattcccccctgggttttag

SEQ ID NO: 208162 - DNA, 1410 bp, synthetic construct
  misc_feature 1..1410: note = Description of Artificial Sequence: Synthetic coding sequence
  source 1..1410: mol_type = other DNA
atgctgggcgactgggagaagtacaagagcagccggaagctgatcgatcgggcctataagggaatgccgatgaatattcgcggacccatgtggagtgtgttgctgaacattgaggaaatgaaactcaagaaccccgggaggtaccagatcatgaaagagaaaggaaaacggagctcagagcacatacaaagaatcgaccgagacattagtggcactctgaggaagcatatgttctttagagataggtacggcaccaaacagcgcgaacttctccatatccttctagcatacgaggagtataaccccgaggtcggttactgccgagatctcagccacattgcggctttgtttctgctgtatctgcccgaagaggatgcgttctgggccctcgtacagctgcttgccagtgagaggcacagtctacagggattccattcccctaatggaggaactgtgcaggggcttcaggatcagcaggagcacgtggtggccacgtcccagcccaagacaatgggacatcaggacaagaaagatctgtgcggccagtgcagccccctcggctgcctaattcgaatcctcattgacggcattagcctggggctgaccctgcgcctgtgggacgtatatttagtcgagggcgagcaggctcttatgcccatcaccagaatcgcgttcaaagtgcagcagaaacggcttacaaaaacgagccgctgcggcccatgggcccggttctgcaataggtttgtcgacacatgggcgcgggatgaagatacagtcctcaagcatttgagagcaagcatgaagaaactgaccagaaaacagggagatctgccacccccggccaagccagaacagggatccagtgcgtcacggcccgttcctgccagccgcgggggcaagacactttgtaagggagatcggcaggccccaccaggacccccggcttggtttcctaggcccatttggtcggcaagtcctccgcgagccccgagatcgagtactccatgtcctggaggagcagttagagaagacacttatccagtaggcacccagggcgtcccatcaccggccctggctcaggggggaccacagggatcttggcgatttcttcagtggaattccatgccacgcttaccgaccgatctagatgtggagggaccctggtttcgtcactacgatttccggcagtcctgctgggtgcgcgctatctcacaggaagatcagctcgctccttgttggcaggctgagcatcccgcggaacgcgtccggtccgcattcgctgcccctagcactgattcagaccagggtactcctttccgcgctcgtgatgaacagcaatgcgcacctaccagcggaccatgcctgtgtggtttgcacctggagtcaagtcaattcccaccagggttctag

SEQ ID NO: 208163 - DNA, 1650 bp, synthetic construct
  misc_feature 1..1650: note = Description of Artificial Sequence: Synthetic coding sequence
  source 1..1650: mol_type = other DNA
atggacgtggtggaggtggccggcagctggtgggcccaggagcgggaagatatcattatgaagtatgagaaaggacaccaggctgggctgccagaagataagggaccaaaaccattccggagctacaacaataatgtggatcatctgggcatcgtccacgagaccgagctgcccccgctgactgccagggaagccaagcaaatccggagggaaatttctcggaaatccaagtgggtggatatgttgggggattgggagaaatacaagagctccagaaaactgatagatagggcttacaaaggcatgcccatgaacattagaggcccaatgtggtcagtcctcctgaatattgaggagatgaaactgaaaaaccccggacgctatcagataatgaaggagaaagggaagagatcgagcgagcacatacaacggatcgacagagacatatccggtacgctgcgcaagcatatgttctttcgggataggtatggtacaaaacagcgcgaattgctgcacattctgttggcctacgaagagtataacccggaggttggttactgccgcgatctgtcccacattgccgctttgttcctcctctatttgccagaggaagatgctttctgggcactcgtgcaactgctggccagcgagcggcattctttacaaggctttcattcaccaaatgggggcacagttcagggcctccaagaccagcaggagcacgtggtcgccacctcccaacctaaaaccatgggacaccaagacaagaaagacctgtgtggacagtgctctccccttggctgcttaatccgcattcttatcgacggcatctctttaggcctcacactcagactgtgggacgtctaccttgtcgagggcgagcaagcactgatgcctattacacgcatcgcgtttaaagtgcagcagaagagattaacgaagacctctaggtgcggcccttgggcgaggttctgtaataggtttgtcgacacctgggcccgcgacgaggacacagtgctgaagcatctacgcgccagtatgaagaaattgaccagaaagcagggcgatttgccaccacccgcaaagcctgagcaggggtcttccgcaagccgcccagtgcccgcatctcgcggcgggaagaccctgtgcaagggcgataggcaggccccgccaggccctccggccaggtttccacgtccgatttggagtgcctccccaccaagagctcctcggtcatccacaccttgccccggaggggcggtgcgcgaggatacatatccggtagggactcaaggagtcccatctcccgcgctcgcccaaggagggccgcagggctcatggaggttccttcaatggaactccatgccaaggctccccacagatctggacgtcgagggcccctggtttaggcattacgactttaggcaaagctgctgggtgcgggctatttctcaggaggaccagctggcgccgtgttggcaggctgaacatcctgccgaaagagtacggtcagcctttgcggcccccagcaccgatagcgatcaggggacgcccttccgggcccgggacgagcagcagtgtgccccaacctccggcccgtgcttatgcgggctacacctggagtcctctcagttccctccgggattttag

SEQ ID NO: 208164 - DNA, 1410 bp, synthetic construct
  misc_feature 1..1410: note = Description of Artificial Sequence: Synthetic coding sequence
  source 1..1410: mol_type = other DNA
atgctgggcgactgggagaagtacaagagcagccggaagctgatcgatagggcgtacaagggcatgcccatgaatatccgtgggccgatgtggtccgtcctgttgaatatagaagagatgaagctcaagaatccaggcaggtaccagatcatgaaggagaagggtaagagatcgtcagagcatattcagcgaattgaccgggatatcagtggcactttgcgcaaacacatgtttttccgggatagatacgggacaaagcaacgggagctgttgcatattctgctggcgtacgaggagtataatccagaggtgggatattgcagggatctcagccacatagcagctctgtttctgctgtacttgccagaagaggatgccttctgggcgctagtgcaactcctcgcatcagagcgccactcattacaggggttccatagcccgaatggaggaaccgtacaggggctgcaagatcagcaggaacatgtcgttgccacttcacagcccaaaaccatgggacatcaagacaaaaaagacctgtgcggtcagtgttctcctctcgggtgcctaatccggattctgattgacggtatatccctggggcttactctgagactctgggatgtctatctcgtggaaggggaacaggccctgatgcccatcacccgtatcgcgtttaaggtacagcagaaacgtttgacgaagacatcacgctgcgggccctgggctcggttctgcaatcggtttgtcgacacctgggcccgcgatgaggacaccgtgcttaaacatctgcgggcgtcaatgaagaaactgacacgaaagcaaggggacctcccaccccctgccaagccagagcagggatcaagtgccagccgccctgtccccgcctcgagaggcggcaagaccctgtgcaagggagataggcaggcaccgcccggcccgcccgcctggttccctaggccaatctggtccgcaagcccgcctagagcccccagatcctctaccccatgtcccggaggggctgtgcgggaagacacctacccagtgggtacccagggggtgccgtccccggcgttggctcagggcggaccacagggctcttggcggttcctgcagtggaactctatgccacggctgcccaccgatctggatgtggaaggtccctggttcagacactatgactttcggcagtcatgttgggtgcgcgccatatctcaggaggaccaactggccccttgttggcaggcggaacacccggccgaaagagtgcgcagcgcctttgccgctccctcaaccgactccgatcagggtacaccttttcgggccagggatgagcaacagtgcgcgccaacgagtggtccatgcttatgtggacttcatctcgaatcctcgcagtttcccccagggttctag

SEQ ID NO: 208165 - DNA, 3708 bp, synthetic construct
  misc_feature 1..3708: note = Description of Artificial Sequence: Synthetic coding sequence
  source 1..3708: mol_type = other DNA
atggagccccccagctgcatccaggacgagcccttcccccaccccttggagccagaaccaggcgtatcagcccagcctggacccggcaaaccatcggataagcgctttcgattgtggtatgtcggcgggagttgtctagaccataggactacgctccccatgctgccatggctcatggcagagatccggcgtagatctcaaaagccagaggccggtggatgcggcgctccagccgctagagaggtcatcctggtactgtctgccccattccttagatgcgtgcccgctccaggtgcaggcgcatctggaggtacgtcaccatccgcgactcaacccaaccctgccgtgttcatattcgaacacaaagcccagcatatttccaggttcatacacaactctcacgatctgacctatttcgcgtatctcataaaggcccaaccagacgatccagaatcgcagatggcctgccacgtctttagagctactgatccaagtcaggtgcccgatgtaatcagtagcatcaggcagttaagtaaggccgctatgaaagaagacgccaaacccagcaaggataacgaggatgccttttacaattcccagaagtttgaggttttgtactgcggcaaggtaacagtaactcacaagaaagcgcctagttcactgatcgacgactgcatggagaaattttctctccatgagcagcaaaggctcaaaattcagggagaacagcggggacccgatcccggcgaggatctcgctgacctcgaagttgtcgtacccggctctcccggcgactgcctcccagaggaagcagatggtacggacactcatctgggactgcctgctggcgcatcccagccagccctcacctcatcaagagtatgtttcccagagcgaatcctcgaagatagtggattcgatgagcagcaggaattccgctcacgatgctcatctgtgacgggcgttcagaggcgagtgcacgagggcagtcagaaaagccagccacgccgtagacacgctagcgccccgtcccacgtacaaccaagcgactccgaaaagaatcgcacaatgctgtttcaggtcggaagattcgagattaatctgatttcccccgacactaagagcgtagtgttggagaagaacttcaaggacatctcctcttgcagccagggcattaagcacgtagaccattttggcttcatctgccgggaaagccctgaacccgggctcagccagtacatctgctacgtgttccagtgcgcctctgagtccctcgtggatgaggtgatgctgaccttgaagcaggccttttcaaccgccgcagccctgcaatccgcaaagacccaaatcaagctctgtgaggcctgcccgatgcactccctgcataagctgtgtgaaagaatcgaaggtctgtatcccccacgggccaaactggtaatacagcggcacctttcgtcactgaccgacaatgaacaagccgatatctttgagagagttcagaaaatgaagccagtctcagatcaggaggaaaatgaactcgttattctgcacctgaggcagctctgcgaggccaagcagaagacacacgtgcacattggcgaaggcccgtctactatctcaaactccaccataccagaaaacgctacgtccagcggtaggttcaagctggatattttaaaaaacaaggccaaacgttctctgacctcaagccttgaaaatattttcagccgaggcgccaaccgcatgcggggccggcttggcagcgtagactcgtttgagcggtccaactcactggccagcgaaaaagattactcccccggcgactctcccccgggcacaccacccgcatccccccccagtagcgcctggcaaaccttcccagaggaagatagtgattcgcctcagtttagaagaagagcccatactttttcccaccctccctcctccacaaaacgcaaacttaatctacaggacggcagggcccagggcgtcaggagtccgctcctgcgacagagtagcagcgagcagtgctctgacggcgaaggtcgcaagaggaccagctccacctgcagcaacgaatccctctcagtgggcgggacaagtgtgactcctcgcagaattagctggcggcaacgtatattcttgcgggttgcatctcctatgaacaagagtccatctgctatgcagcaacaggatggcctagataggaacgagcttcttccgctgtcacctttgagccccacgatggaagaagagccacttgttgtgtttctctccggcgaagatgacccagaaaagatcgaggagcgcaagaagtcaaaagaactgcgtagtctgtggcgtaaggccatacatcagcagatcctcctcctgagaatggaaaaggagaaccagaaattagaggcaagtcgcgatgaactgcaatcccgtaaagtgaaactcgattacgaagaagtgggggcttgccagaaggaggtgctgatcacctgggataaaaaactccttaattgtcgcgctaagattcgctgcgatatggaagacattcacacgctgctgaaggagggtgtccctaaaagcaggaggggcgagatttggcagtttttggccctgcagtaccgtctgcgccaccgactccctaataaacagcaacccccagatattagttacaaggagctcttgaagcagctgactgcccaacagcatgcaattcttgtggacctgggtagaacttttcctacacacccatattttagcgtgcagctgggcccgggtcagttgtccctctttaacttgctgaaggcctatagccttctggataaagaggttgggtactgccaaggcatttcgtttgttgccggggtcctccttctgcatatgtcggaggagcaggcttttgagatgctgaaatttttgatgtatgatctgggctttcgcaagcagtacaggcctgacatgatgtcactccagatacagatgtaccagttgtctcgattattgcacgactaccacagagatctttataaccatctagaagagaacgagatctccccgagcctatacgctgcgccatggttcctaacccttttcgcgtctcaattctcgctgggctttgtggctcgagtcttcgatatcatctttctccaaggaacagaggtgatatttaaagtggccctgtcactgctttctagccaggaaaccctcatcatggagtgtgaatccttcgaaaacattgtggagttcttaaagaatacactgcctgatatgaacaccagcgaaatggaaaagatcatcacacaggttttcgaaatggatatcagcaaacagctgcacgcttatgaggtcgagtatcatgtgttgcaggatgagctgcaggagtccagttattcttgtgaggactccgagacattggagaaactcgagcgggccaactcccagctaaagcggcagaacatggacctgctcgaaaagttgcaggtggcacatactaagatccaggctttagaaagtaatctcgagaatttactgacccgagaaaccaagatgaaatcactgattcgcaccttggagcaggagaaaatggcctaccagaaaactgtcgagcagctcagaaagctcctccccgcagacgcgctggtgaactgtgatctcttgctgcgagatctgaactgcaacccaaacaacaaggccaagatcggcaacaaaccttag

SEQ ID NO: 208166 - DNA, 3897 bp, synthetic construct
  misc_feature 1..3897: note = Description of Artificial Sequence: Synthetic coding sequence
  source 1..3897: mol_type = other DNA
atggagccccccagctgcatccaggacgagcccttcccccaccccctggagccagagccaggggtctcagcacagccaggccctggtaaaccgtcagacaagaggtttcgcctgtggtacgttggagggtcttgcttggaccacagaaccactttgccgatgctcccttggttaatggcagagattcggaggagaagccagaagcccgaggctggcgggtgtggtgctcctgcggctcgcgaggtcatcctcgtgttatctgcacccttcctgcggtgtgtgcccgcaccaggcgccggtgctagcgggggtacaagtcctagcgctacccagcccaatccagccgttttcattttcgagcacaaggctcagcacatcagccgcttcattcacaatagtcacgacctgacatacttcgcttacctgatcaaggctcaacccgatgatccagaatctcaaatggcctgtcatgtgtttcgtgccactgacccctcccaagtacccgatgttattagctctatcagacagttgtcgaaggcagccatgaaggaggatgccaagcccagtaaagacaacgaagacgccttctacaattcccagaaattcgaagttctgtactgtggcaaagtcacagtgacgcacaaaaaggcccctagctcacttattgatgattgcatggaaaagttcagtctgcacgaacagcagcgattaaaaattcagggagagcaacggggtccagaccctggtgaggacctggcagatttggaagtggttgttcccggatctccaggtgattgtctgcctgaagaggcagacgggactgatacccatcttggcttgccggctggtgcatctcaacctgcactgacttcctcgcgtgtgtgtttccctgaacgcatcctggaggactctggatttgatgaacagcaggaattccggtccaggtgcagttcagtgacaggcgtgcagaggcgggtgcacgagggctcacagaaaagtcaaccacgacggagacacgcgagtgccccttcccatgtccagcccagcgacagcgagaaaaaccggacaatgctatttcaggtggggcgtttcgaaattaacctgataagtccggacactaaatctgtggttttggagaaaaatttcaaggacatttccagctgttcacaaggaatcaagcatgtggatcacttcggattcatttgtcgtgagtcacctgagcccggcttgagtcagtacatttgctatgtattccagtgcgctagcgaaagcttggtggacgaggtgatgctgacgctgaagcaagcattctccactgcagctgccctgcagagtgccaagactcagattaaactttgtgaagcgtgcccaatgcactccctacataagctgtgtgagcgcatcgagggactctatccacctagagcaaagctcgtgattcagagacacctgagttcactaactgacaatgaacaggcagatatttttgagagagtgcaaaaaatgaagccagtttcggaccaggaggagaacgaattggtcatcttgcacctgaggcagctgtgtgaggcaaaacagaagacgcacgtccacattggcgagggccctagtacaatcagcaatagcacaatccctgaaaacgccacatcatctggacgtttcaaactggatatcttgaagaataaggccaaaagaagcctgacttcttcacttgaaaacatttttagtcggggagctaacagaatgcgtggtcgcctgggcagcgtggacagttttgaacgctcaaattctctggcgtctgagaaagattattcccctggggactcaccccccggaacaccaccagcaagcccacctagttcagcctggcagacgtttcctgaggaagattctgattcaccacagttccggcggagagcacacaccttcagccacccgccgtccagtacaaagaggaagttgaatcttcaggatggacgtgcccagggggtgcgcagccctctcctacgtcagagctcgagcgagcagtgtagtaacttgtccagcgtgcgccgcatgtataaagagtccaattccagcagctccttacccagcttacacacttccttcagcgcccccagctttacagcccctagtttcctgaagagtttttatcaaaacagcggcaggctttcccctcagtacgaaaacgagatcagacaagacaccgcctctgaaagcagtgatggagaagggcgcaagagaacctcctccacctgcagcaacgagtctcttagcgtgggtggcacaagcgtgacaccacgtcgcatctcttggcgccagagaatcttcctcagggtggcctctcccatgaacaagtccccgtccgccatgcagcagcaggatggcctggataggaacgagttgctcccactgtctcctctaagcccaactatggaggaggagcccctggtggtgtttctgagcggagaagatgatcctgaaaagatcgaggagcgcaagaaatcaaaagaactccggagcctttggagaaaggccatccaccaacagattctactgcttaggatggaaaaggagaaccaaaaactggaagcaagtcgtgatgagctacagtctaggaaggtgaagctcgactatgaagaggtcggcgcctgtcagaaggaggtgctgattacctgggacaagaagctgttaaactgccgcgctaagatcagatgcgacatggaggacattcataccttactgaaggagggagtgcctaagagtcgcagaggagagatctggcagtttctcgctttgcagtacaggctcaggcacagacttccaaataaacagcaaccgcctgacatcagctacaaggaactgctgaagcagctgacggcacagcaacatgcgattctggtggacctggggaggaccttccccacacatccatactttagcgtccagctcggccctgggcagctgagcttgttcaacttgctgaaagcctactcgttactggacaaagaggtcgggtattgccaagggatctcctttgtcgccggggtactgctgctgcacatgagcgaggaacaagcattcgagatgctgaagttcttaatgtatgaccttggctttcgaaaacagtatagacccgacatgatgagcttgcagatacaaatgtatcagctctcaagacttttacacgattaccatcgggacctctacaaccacctggaggaaaacgagatttcaccctccctctatgctgctccttggttccttactctttttgccagtcagttttcgctcggcttcgtggccagagtttttgacatcatcttcctacaggggaccgaggtgatattcaaagtcgctctgagccttctgagtagccaggaaacacttataatggaatgtgaatcttttgagaatatcgtggaattcctgaagaacaccttgcctgatatgaacacttccgaaatggaaaagattatcactcaggttttcgaaatggacattagcaaacagttacacgcgtacgaggtggagtaccacgtcttacaggatgagctgcaagagagctcttactcatgtgaagactcagagactctggaaaaactggaacgcgccaattcacagctgaagagacaaaatatggacctgctggagaaactccaagtagcccacactaagattcaggccctggaatccaacctcgaaaacctgcttacccgcgagacaaagatgaaaagtctgatccgcacactggaacaggaaaaaatggcgtaccaaaaaacagttgaacagctgcggaagctccttcccgcggacgcccttgtgaattgcgatctcttactgcgcgacctcaattgtaatcccaacaataaagctaaaatcggaaataaaccgtag

SEQ ID NO: 208167 - DNA, 849 bp, synthetic construct
  misc_feature 1..849: note = Description of Artificial Sequence: Synthetic coding sequence
  source 1..849: mol_type = other DNA
gacaacgagcaggccgacatcttcgagcgggtgcagaagatgaagcccgtctctgatcaagaagaaaatgagcttgtgatcctacacctgcggcagctgtgcgaggctaagcagaagacacatgtgcatattggggaaggcccatccactatctcaaatagtaccatacctgaaaatgcgacctcctcaggacgctttaagctggatattttaaaaaataaggcgaagcgttccctgacctcttcactggagaatatattcagtcggggggctaatcgtatgcggggtcgactgggtagcgtcgattcatttgaacgaagcaattcgctggcctctgaaaaggattactcacctggtgatagtccccccgggacacctcctgccagcccccctagcagcgcttggcagacctttcccgaagaagactctgatagtccgcagttcaggcgccgggcccatacgttctcccatccaccatcttctacaaagcggaagttgaaccttcaggacgggagagcgcagggagtgagatccccactgcttcgccagtcctcaagtgagcagtgctcagatggtgaaggcaggaagaggacttctagtacatgctccaacgagagcctttctgtgggtgggacctccgttacccccagacgtatatcatggcggcaacggattttcctgcgcgttgcaagtcccatgaacaagagcccttctgctatgcaacagcaggacggcctggaccgaaacgagcttctaccactgtcccccttgtccccgactatggaggaggagccactggtggtattcttgagtggcgaggatgaccccgagaaaattgaggagcgatag

SEQ ID NO: 208168 - DNA, 1389 bp, synthetic construct
  misc_feature 1..1389: note = Description of Artificial Sequence: Synthetic coding sequence
  source 1..1389: mol_type = other DNA
atgaacaagagccccagcgccatgcagcagcaggacggcctggacagaaatgagctgcttcccttgtcacctctcagccctaccatggaagaggaaccccttgtggtgttcctttcaggggaagacgaccccgagaaaattgaggaacgcaagaaatctaaggagttgcggagtctgtggcggaaggctattcaccagcagatcctgttactccggatggagaaagagaatcagaagctggaaggagtgccaaagtcccgaagaggtgaaatctggcagttcctcgcgctccaatatcgcttaaggcaccggttacccaataagcagcaacctccggatatctcctataaggagttgctgaagcagctgacagcacagcagcacgccatcctcgtcgacttgggacgcacatttcccactcacccgtatttttccgtgcagctcggacccgggcaactgagtcttttcaacctgctgaaggcgtactcactcctggacaaagaagtcggctactgtcagggaattagtttcgtcgccggagtgctgctccttcacatgtctgaggagcaggcatttgaaatgcttaaatttctgatgtacgatctagggttccggaagcagtatcgccccgacatgatgagcctccagatccaaatgtatcagttaagtagactgctgcacgattaccaccgagacctatacaatcacttggaggagaatgagatatcgccctcactatatgctgccccttggtttctgacactatttgcctcgcagttctcactgggattcgtcgccagggttttcgatatcatcttccttcagggaacagaagtgatttttaaagttgcgctgtcactgctgagcagccaggagactctaatcatggagtgtgaatcattcgaaaacatcgtggagttcctgaagaacacgctccctgacatgaatacatccgagatggaaaaaatcatcacccaggtgttcgagatggatatctctaagcagctgcacgcctacgaggtggaataccacgtgctgcaggacgaacttcaggagtccagctacagctgcgaggattctgagactctcgaaaaactggaacgagctaacagccagctgaaacggcagaatatggatctgctagagaaacttcaggtagcccacaccaaaattcaggccttggaatcaaatctggagaacctattaacaagggaaacgaagatgaagtctctgattcgcactctcgagcaggagaaaatggcctaccaaaaaactgttgaacagctgagaaagctactgcccgccgacgcacttgttaactgcgacctcctgctcagagatttgaattgcaaccccaataacaaggcaaaaattggcaacaagccttag

SEQ ID NO: 208169 - DNA, 3873 bp, synthetic construct
  misc_feature 1..3873: note = Description of Artificial Sequence: Synthetic coding sequence
  source 1..3873: mol_type = other DNA
atggagccccccagctgcatccaggacgagcccttcccccaccccttagagccagagccgggagtatccgcccagcctgggcccggcaagccctctgacaaacgatttcgtctgtggtacgttggcgggtcctgtctggaccacagaaccaccttgccaatgctgccatggctaatggccgagattagaaggcgctcacagaagccggaggccggaggatgcggagcccccgcagctcgcgaggtcatcttggtgctgtcagcaccctttctgcgctgcgtgccagctcccggtgccggcgcaagtggcggcacaagccctagtgccacccagcccaatccagccgtgtttatctttgagcataaggcgcaacacatctcccgtttcattcacaactctcacgacctcacctactttgcctatctaattaaagcacagcctgacgacccggagtcgcagatggcttgccacgtctttcgcgcgacagatccctcccaggttccggatgtgatttcaagtatccggcagctgagcaaggcggctatgaaagaagacgccaagccttccaaagataacgaagatgccttctataactctcagaagttcgaagttctgtattgtgggaaagtcaccgtaactcataaaaaagcgccgtcctcgctgatagacgactgcatggaaaagttctcccttcatgaacagcaacgactaaaaattcagggggaacagcgcggaccagatccaggggaggacctggccgacctcgaggtagtggtgccggggtctcctggagactgcttgcctgaggaagctgatgggactgacacacacctagggctgcccgcaggtgcatcacagcctgctttaacctcctctcgtgtgtgttttccagagaggattctggaggatagcggtttcgacgaacagcaggaatttcgaagcaggtgttcctcagttactggtgtacagagaagggtgcatgaaggcagtcagaagagtcagcccaggagacgtcacgctagtgcacctagccacgtacaaccaagcgactcagagaagaataggactatgctgttccaggtcggacgcttcgaaatcaatctgatatcccctgacactaagagcgtggtactggagaaaaactttaaggatatatcttcatgttcacagggtatcaaacacgtcgaccactttggttttatatgcagagaaagtcctgagcctggcctgtcccaatatatctgttacgtgtttcagtgtgcaagcgaaagtctcgtggatgaggtgatgctcaccctcaagcaggccttttcgaccgctgcagctttacaatcagctaagactcagatcaagctgtgcgaggcctgtcccatgcatagcctccacaaactctgcgaaagaatagagggattgtacccgccacgcgctaaacttgtgatccagaggcatctatctagcttaacagacaatgaacaggctgacatttttgaacgagtgcagaagatgaaacccgtctcagatcaggaggaaaacgaattggtaatattgcacctacgccaattatgcgaagctaaacagaaaacccatgttcacatcggagagggaccaagcaccattagcaacagcacaattcctgagaacgccacctcgtcaggtcgctttaaactggacattctcaaaaataaagccaaacgcagcttaactagtagcctggaaaacatcttctcgcgtggtgccaatcgtatgcgcggccgactgggctcggtggattctttcgaaagatccaactctctggcttcagaaaaagattattcaccgggagactcacccccagggaccccgcccgcttctccgcctagctcggcctggcagacctttcctgaagaggactcggactccccacagtttcggcgccgggcccatacctttagccatccacccagcagcaccaagcgcaagctcaatctccaagatgggcgcgctcagggcgttcgctccccacttcttagacagtcatcatcagagcaatgctctaacctctcttccgtccggcgaatgtataaagaatcaaatagttcttcatccctgccatccttgcacacttctttctcagctccttcatttacagccccgtcctttttgaagagcttctaccagaattctgggcggttatctcctcagtacgagaatgaaatctctgatggcgaaggaagaaaacgcactagttctacatgctccaatgagagcctgagtgtggggggaacctcagttaccccgaggcggataagctggcgacagagaatctttttgagggtggcgagcccgatgaataagtcaccctctgctatgcaacaacaggatgggctcgatcggaacgagcttctgcccctatcccccctgagtcctaccatggaagaagagccattggttgtcttcctgtcaggcgaggatgaccctgaaaaaatcgaggaacggaaaaagagcaaagaactgcggtcactatggagaaaggctattcatcagcagatactcctgctgaggatggagaaagagaaccagaaactcgaagcgagccgggacgagctgcagagccgcaaggtcaagttagactacgaagaggtgggagcgtgtcaaaaagaggtcctcatcacatgggataagaagcttctaaactgcagagcgaaaattcgatgtgatatggaggatatccacacactactaaaagagggcgtgcctaagagccggaggggagaaatttggcagtttttagcccttcaatatcggcttcgccacaggctgccaaacaagcaacaacctcccgatattagctacaaagaactcctcaaacagctgacggcccagcagcacgccatcctagtggatttgggtagaacctttccaacacacccatacttttctgtacagctgggccccggccaactaagcctgttcaatttacttaaagcatactctctgctggataaagaggtgggctactgtcagggtatctccttcgtcgcgggagtccttttacttcacatgtccgaagaacaagccttcgagatgctgaagtttctgatgtatgacctgggctttagaaagcagtaccggcctgatatgatgagcctccagattcaaatgtaccagcttagtcgcctgcttcacgattaccaccgggacctttataaccacctagaagaaaacgagatctcaccaagcctgtatgccgctccatggtttctgacattgttcgcatctcagttcagccttggatttgtggctcgggtgttcgacatcatctttctgcagggaacagaagtaatattcaaagtggcattatctttattaagtagccaggagaccctcatcatggaatgtgagagcttcgagaacatcgtcgagttcttgaagaacacgctccccgacatgaacacatcggagatggagaagatcatcactcaggtattcgagatggacatttctaaacagttgcatgcttacgaggtggaatatcacgtcctgcaagacgagcttcaagaatcttcctacagctgcgaagatagcgagacgctagaaaaactggaacgggctaatagccagttgaagcgccagaatatggacctgctggaaaaacttcaggtagctcacactaaaattcaagctctggagagcaaccttgagaatcttctgacaagggagacaaagatgaaatcgctaattagaactctggagcaggaaaaaatggcttaccagaagacagtggaacagctgcgaaagctgctgcccgctgacgctctcgtgaattgcgacctccttcttagggatctgaattgcaaccctaacaataaggctaagattggaaataaaccatag

SEQ ID NO: 208170 - DNA, 1197 bp, synthetic construct
  misc_feature 1..1197: note = Description of Artificial Sequence: Synthetic coding sequence
  source 1..1197: mol_type = other DNA
atgcacttcagcaccgtgacccgggacatggaggccttcaccgcctccagcctatcctcccttggggctgccgggggctttcccggggcggccagccctggcgcggacccgtatggaccccgcgaaccgcctcctcctccgcctcggtacgacccttgtgcggccgcagctccaggcgccccaggtccccctcctcccccccatgcatatccattcgcaccagctgccggcgcagccacgtccgcggctgcagaacccgagggacctggggcaagttgcgcagccgctgccaaagccccagttaaaaagaatgctaaggtcgccggcgtgtcggtgcaactggagatgaaggctttatgggacgagtttaaccagctcgggacggaaatgattgttacaaaagcgggcagacgtatgtttcctacatttcaagttaagctctttggaatggacccgatggctgactatatgctactaatggattttgtccctgtagatgacaagcgataccggtatgccttccacagctcttcctggcttgtagccggaaaggcagatccagcaacccccggtcgcgttcattatcaccccgatagtccggcaaagggtgcgcagtggatgaagcaaatagtttcctttgataagcttaagttgacgaataacctgctggatgacaacggccacattatcctgaacagcatgcatcgctaccagccgcgcttccacgtggtctacgttgacccaagaaaggattcagagaaatacgcggaggagaactttaagactttcgtgttcgaggaaacaagatttaccgccgtaacggcgtaccagaatcaccggataacgcagctcaaaatcgctagcaatccgttcgccaaaggttttcgggattgtgacccggaagattggcctaggaatcacagacccggcgccctgccactcatgtctgctttcgcaagaagtcggaaccctgttgcttcacctacacagccctcgggtacagaaaagggcggccatgtgctgaaagataaagaagttaaagcagagacaagtcgaaacacacccgaacgagaggttgagctgctgcgggacgcaggcggctgcgtgaatctggggctgccgtgtccagccgaatgccaaccctttaacacacagggcctagtcgccgggaggaccgccggcgatcgtctgtgttag

SEQ ID NO: 208171 - DNA, 1488 bp, synthetic construct
  misc_feature 1..1488: note = Description of Artificial Sequence: Synthetic coding sequence
  source 1..1488: mol_type = other DNA
atgcacttcagcaccgtgacccgggacatggaggccttcaccgcctcaagcctgagctctctgggcgccgcaggtggatttccaggcgcggcctctccaggcgcagacccctacgggccaagagagccgcctccgcctccgcccagatatgatccatgcgccgcagccgctcccggagcccctggaccaccaccgcccccccatgcgtacccctttgccccagccgccggagctgccacttctgcagccgccgagcctgagggccctggggcatcatgtgccgccgctgcaaaagctcccgttaaaaaaaatgctaaggtggcaggagtttccgtgcaattggagatgaaggccctttgggatgagttcaaccagctgggaaccgagatgatcgtgacgaaagcgggacggcgtatgttcccgacattccaggtgaagctgtttggaatggaccccatggcagattacatgttattaatggatttcgtgccagtcgatgacaagagatatcggtatgcattccactcatcaagctggctggttgctggtaaagcggaccccgccacaccaggtcgggttcattaccacccagactccccagctaagggggcacagtggatgaagcagattgtatcttttgataagctgaagctcacgaataacctcctggacgacaatggccacatcatcctcaactccatgcataggtaccaacctcgttttcacgtcgtctatgtagaccccagaaaggactctgagaaatatgctgaggaaaacttcaaaacatttgtgttcgaggagacaaggtttacagctgtcactgcgtatcagaaccatcgcatcacacagttgaagattgcgtcgaaccctttcgctaaagggttccgagactgcgaccctgaagactggccccgaaatcaccgccccggagcgctccccctgatgagcgcatttgcacgctcccgcaatccggttgcgtctcctactcagccatctggcactgagaaagacgctgcagaggccaggcgggagtttcagcgtgatgctggcggtccagctgtcttaggagacccagctcatccgccccagctgctggcacgcgtgctgtcgcctagtttgccaggagcaggcggcgccggcgggttagtgcccctccctggagcccctggaggccggcccagccctccaaaccccgagctaagacttgaggctccaggcgcctcagaaccactacaccaccatccgtacaagtatccagcagccgcttacgatcactacttaggagccaaatcgaggcccgccccttaccctctccctgggctgcgggggcacggttatcacccgcatgcccacccccaccatcatcaccaccctgttagtcctgccgcagccgctgcagctgccgctgccgccgctgcagcagcagcaaacatgtatagtagcgctggagctgccccgcccggatcctatgactactgtccacgctag

SEQ ID NO: 208172 - DNA, 1119 bp, synthetic construct
  misc_feature 1..1119: note = Description of Artificial Sequence: Synthetic coding sequence
  source 1..1119: mol_type = other DNA
atgcacttcagcaccgtgacccgggacatggaggccttcaccgccagtagcttgagctcacttggagccgccggaggattccctggagcagcgagtccaggcgcagatccatacggaccccgtgagcctccacccccgccgccccgctacgacccatgtgcagccgcagcgcccggggcacccgggccacctcccccgcctcatgcctatcccttcgcaccagcagctggggcagctacatcagctgccgcagagccggaaggaccaggagcaagctgtgctgccgccgcaaaggcccccgtcaagaagaacgccaaagtcgcgggcgtcagcgtgcaactggagatgaaggctctgtgggacgagttcaaccagctaggaaccgaaatgatcgtaaccaaggcaggaagaagaatgttccctaccttccaagtgaaactgtttggaatggatcccatggcagattatatgcttttaatggactttgtgccagttgatgataaacgctaccggtatgcctttcactccagctcttggttagtcgcaggtaaagccgaccccgcaactccgggccgtgtccactatcaccccgactcacccgctaagggagcccagtggatgaaacagattgtatccttcgataaattgaaactgactaataatttgctggatgacaacggccacataatcttgaattctatgcaccgataccagcctcgctttcatgtcgtttacgtggacccacggaaagatagcgagaagtatgccgaggagaactttaagaccttcgtgtttgaggaaacacgttttacggcagtaaccgcatatcaaaaccacaggattacacagcttaagatcgccagtaaccctttcgctaagggtttcagagactgcgaccctgaagattggccacggaaccaccggccaggagccctgcccctcatgagtgccttcgcacgctctaggaatccagtagcatccccaacacagccctcaggcactgaaaagggcctggttacagaaggatctggtcttcagccaggactgctggatgtgctattgaagccaccctctaaaaaaagcgagagtttaagacctccgcactgtaaagacacgtag

SEQ ID NO: 208173 - DNA, 1158 bp, synthetic construct
  misc_feature 1..1158: note = Description of Artificial Sequence: Synthetic coding sequence
  source 1..1158: mol_type = other DNA
atggccgccttcctgagcgccggcctgggcatcctggcccccagcgaaacttaccctctgcctacaacgtcttctgggtgggagcccaggttgggtagcccgttccccagcggcccctgtacctcttccaccggggctcaggctgtcgctgaacccactggtcagggtcctaagaacccccgggtcagccgggtgacggtccagctagaaatgaaaccgctgtgggaagaattcaaccagctgggcaccgaaatgatcgtgaccaaagctggaagacgaatgttccctccttttcaggtcaaaattctgggcatggactctcttgctgattatgcccttctgatggatttcatcccccttgatgataaaagataccgatatgcctttcattcttctgcctggcttgtggccggcaaagctgatcccgccacaccaggtcgagtgcattttcatcccgatagtccagccaaaggagctcagtggatgcgacagattgtctctttcgataagttaaagctgacgaataatttgttagacgacaatggacacatcatcctgaattccatgcaccggtatcagcctagatttcacgttgtgttcgtggatcctcgcaaagactcagaacggtatgcccaagagaactttaaatcgttcatcttcacagagactcagtttaccgctgtcacagcctaccagaaccaccgtatcacgcagctgaagattgcgagtaacccttttgccaaaggtttccgagaaagcgatctggactcatggccagttgccccccgccccctgctgtccgtgcccgcccgctcccacagttccctgtcaccttgcgtgctgaagggcgccaccgacagggaaaaggatcctaacaaggcctcagcatctacctctaaaaccccagcttggctgcatcatcagctgttgccacctcctgaggtgctcctggcccccgccacatacagacccgttacgtatcagtctttgtactccggggctccttcccatctgggaatacctcgcacacggcctgccccgtaccctctgcctaacatcagggctgatcgggatcagggagggttaccgctgcctgctgggctgggattgctgagccctacggtagtctgtctgggtccaggccaggactcacagtag

SEQ ID NO: 208174 - DNA, 2454 bp, synthetic construct
  misc_feature 1..2454: note = Description of Artificial Sequence: Synthetic coding sequence
  source 1..2454: mol_type = other DNA
atgatggacggcccccggagcgacgtgggccggtggggcggcaaccccttacagcctcccacaactccctcccctgagcctgagcccgagcctgacgggcggtcacgtcgcggaggcggcaggtccttttgggctcgctgttgtggctgctgttcgtgccggaatgccgccgacgatgattggggcccagaaccttccgacagtaggggaaggggctcgtcaagcggaactcgacgtccagggagtagaggctcagattcgcggagacctgtgtcacggggcagcggcgttaatgctgccggcgatggaacaatcagagagggcatgttggtggtgaacggcgtggacttactttcctccagatccgaccaaaatcggcgtgagcaccacacggatgagtacgagtacgatgaactgatcgtgagacgcgggcagcctttccatatgttgcttcttctgtcccgaacctacgaatcttccgacagaattactcttgaattgctgattggcaacaaccccgaagtcggcaagggtacccacgtgatcatcccggttggcaagggaggatcaggcggctggaaagcgcaagtagtaaaagcaagtgggcagaatctgaacctgcgggtccatacctcacctaacgctataatcggcaagtttcaatttacggtccgcacccaaagtgacgctggggagtttcagctcccttttgaccccagaaatgaaatttatatactttttaacccttggtgccctgaggacatcgtgtacgtggaccacgaggattggcgacaggagtatgtgctaaacgagagcggccgcatctattatggaaccgaagcccagatcggcgagaggacctggaattatggacagttcgatcatggcgtgcttgacgcatgcctctatatcctggacagaaggggtatgccctatggtggacggggggatccagttaatgtgagccgtgtaatctcagcaatggttaactccctggatgataatggcgtgctgatagggaattggagtggcgattatagtcgcggaacaaacccttcggcttgggtaggaagcgtcgagatactgctctcttatctgcggaccggttatagtgttccttacggtcagtgctgggtcttcgctggagtaaccactaccgtgctgcggtgtttaggactggccacgagaacagtcacgaactttaactcagcacacgatacagatacaagcctcaccatggatatttatttcgatgagaacatgaagcccctcgagcatctgaatcacgattccgtctggaactttcacgtgtggaacgactgttggatgaaaagacccgacctcccgtcggggttcgatggatggcaggttgtcgacgcaactccgcaggaaacctcctctggtattttttgctgcggaccttgcagtgttgaaagcatcaagaacggcctcgtctacatgaaatacgataccccatttatctttgccgaagtgaatagtgacaaggtgtactggcagagacaggacgatggcagcttcaagattgtgtatgtcgaagagaaggcgataggaaccctcatagtaactaaggcgattagtagcaacatgcgggaggacatcacttatctctacaaacacccggaaggatctgacgccgagaggaaagccgtggaaaccgctgctgctcatggatccaagcccaacgtgtatgcaaacagagggagtgcagaggatgtcgctatgcaggtggaggcgcaggatgccgttatggggcaggacttgatggtttctgtgatgctcatcaaccacagcagcagccgccgaactgttaagcttcacctttacctgtccgtgacattctatacaggagtatccggcacaatatttaaagagacgaaaaaagaggttgagcttgcaccaggcgccagtgatagagtgacaatgcccgtagcatataaggagtaccgccctcaccttgttgaccaaggagcaatgttactcaacgtctccggccatgtgaaagaaagcggacaagtcttggcaaagcagcatacatttagacttagaacaccagacctgagtctgacgctgctgggcgcagcagtggtcggtcaggagtgtgaggtgcagattgtgttcaagaatcctcttccggttacgctcacgaacgtggtgtttagactggaagggtcagggctgcaaaggcctaaaattttaaacgtgggcgacatagggggaaacgaaactgtcacattgagacagtcctttgtgccagtgaggcccggccctcgacagctgatagcaagcctggactcgccccagctatcacaggtgcatggtgtcatccaggtggacgtggcacccgcccccggggacgggggattctttagtgacgccggaggagacagccatctaggggagacaattcctatggcatctaggggcggggcctag

SEQ ID NO: 208175 - DNA, 1200 bp, synthetic construct
  misc_feature 1..1200: note = Description of Artificial Sequence: Synthetic coding sequence
  source 1..1200: mol_type = other DNA
atgcacaagtaccagccccgggtgcacgtgatccggaaggacttctccagtgatttaagtcctactaaacctgtgccggtaggtgatggcgtgaagacctttaatttcccggagaccgtcttcactaccgtgacagcgtatcaaaatcaacagattactaggctaaaaatcgatagaaaccctttcgccaagggttttagggacagtggaagaaataggaccggcttagaagcaattatggagacctacgcgttctggcggcctcctgtgcggactttgaccttcgaagactttaccaccatgcagaaacaacaagcgtccaagaagactagtcagggttacaccgttaatcagcacagttccgagacagacgctatcgagctctatgaacggcgcgtgtggcttatggagcggagaggcagcactggcacctcaccaaccacctcatcaacagggaccccatcaccgagcgccagctcccacctgctcagcccatcatgttctccccccacgttccatttggcccctaatactttcaacgtcggttgccgggagtctcagctctgtaatctgaatttgtccgactatccaccttgcgctaggtctaacatggctgccttacagagttaccctggcctatctgattccggctataacagattacagtctgggactactagtgctactcagccatcagagacattcatgccccagagaactcctagcctgatcagcggcattccgactccgccctcacttcctggcaactcaaagatggaagcttatggcggccagctcggaagctttcctacatctcagtttcagtatgtgatgcaggccggcaatgcagcaagctcctcttcgtcgccgcacatgttcggcggaagccacatgcagcagagtagctacaacgccttctcactgcataatccctacaatctgtatgggtacaactttcctacaagccctcggctggccgcgtcccctgagaagctttccgcttctcagtctactctgttgtgttctagtccttccaacggggccttcggggagcggcagtatctcccatccggaatggaacatagtatgcatatgatttccccatcccccaataaccagcaagctacgaacacctgcgacgggagacagtatggcgcagtgcccggttcttcctctcagatgtctgtgcatatggtttag

SEQ ID NO: 208176 - DNA, 1809 bp, synthetic construct
  misc_feature 1..1809: note = Description of Artificial Sequence: Synthetic coding sequence
  source 1..1809: mol_type = other DNA
atgagcgagcggcggcggagcgccgtggccctgagcagccgggcccatgccttcagcgtcgaagctttgatcggcagcaataaaaaaaggaagctccgtgactgggaggaaaaagggctagacctctcaatggaagccttgagcccagctggacctctgggcgacacagaggacgctgctgctcacggccttgagccccaccctgatagcgagcagtctacaggctcggactctgaggtcctgactgagagaacctcctgttccttctccacacacaccgacctcgcctctggagcagcaggaccagttccagccgccatgtccagcatggaggagattcaagtagagctgcagtgtgccgacctgtggaaacggttccacgacatagggacagagatgatcataactaaggctggtcgcaggatgtttcctgcaatgagagttaagatcaccggactggatcctcatcaacagtactatatcgccatggatatcgtgccagttgataacaaaagataccgatatgtctatcactctagcaagtggatggtggctggcaacgctgatagcccagtgccccccagagtatatatccatcctgactccctggcgtctggggatacatggatgcgtcaggtggtctcctttgataagctgaagttgacgaataatgagctagatgatcaaggacatatcattctgcattccatgcacaagtatcagccgagggttcacgtcattagaaaggactttagctcagacttgagtcccacaaaacccgtgcctgttggagatggtgttaagacattcaattttcctgagacagtgtttacaacagtgactgcgtaccagaatcagcagattacccggctcaaaatcgaccgcaaccccttcgctaaagggttccgcgacagcggaaggaacaggacgggactggaagcgattatggagacttatgctttctggagaccccccgtaagaactctgactttcgaagacttcaccacaatgcaaaaacagcagggaggcagtaccgggacgtctccaaccacatcctccacagggactccaagtccatccgcctcatctcatctgctgagtccctcttgtagcccccccacgtttcatctggcccccaacacctttaatgtaggctgtagagagtcccaactttgcaatctgaacctctccgattaccctccctgtgccaggtcaaacatggcggcactgcaatcataccctggcctaagtgacagcggatataacagactgcaaagtggaacaacaagcgcaactcagccgagtgaaacgttcatgcctcagcgaacccctagtttgatctccgggattccgacaccccccagcttgcctggaaattccaaaatggaagcctacggcggacaactcggttcatttcccacctctcagtttcagtatgttatgcaggccggaaatgccgcatctagttccagttctcctcatatgttcggcgggtcccacatgcaacagtcgtcttacaatgctttctcacttcacaacccttataacctgtatggatacaacttcccaacgagcccgagacttgcagcgagccctgagaagctcagcgcctcccaaagtacactcttgtgctcttccccatccaatggggcttttggagagagacagtatttgccctcaggcatggagcacagtatgcacatgatatccccaagccccaacaaccaacaagccacgaacacctgcgatgggcgtcagtacggtgctgtcccagggagctccagtcagatgagtgttcacatggtgtag

SEQ ID NO: 208177 - DNA, 762 bp, synthetic construct
  misc_feature 1..762: note = Description of Artificial Sequence: Synthetic coding sequence
  source 1..762: mol_type = other DNA
cgggtgcggaccggcctggaggccatcatggagacctacgccttctggagacccccagtgcggactcttacatttgaggacttcaccaccatgcagaaacaacaggccagtaaaaagacctctcagggttacaccgtgaaccagcattctagtgagacagacgccattgagttgtacgagaggcgcgtgtggttaatggaacggcgagggagtactggtacttcccctacaactagttctactggcacaccttctcctagcgcatctagccacttactttctccaagctgcagtcctccaacatttcacctggcaccaaatacatttaacgtgggctgccgagaaagtcagctgtgcaatctaaatcttagtgattatcccccctgcgcaaggagtaatatggccgccttgcagtcttatccaggcctgagcgactcgggttacaatcgactgcagagtggaacaacaagcgcgacgcaaccctctgaaacgttcatgccccagcgcactccctcccttataagcggcattcctactcctcccagcctccctacagctcggtggaagccgaccgtcgctagctggggaccctttccactcccaagtttttcgatgtcctgtcgccaggctatgctcccgcccgctccccaccatcacacctgctcgggcgccgctacgtgttctcgggcccctacaatgccatccccttttactaccttgactacctgcatggacaccataagccccctacccctaggttag

SEQ ID NO: 208178 - DNA, 993 bp, synthetic construct
  misc_feature 1..993: note = Description of Artificial Sequence: Synthetic coding sequence
  source 1..993: mol_type = other DNA
ggccggaaccggaccggcctggaggccatcatggagacctacgccttctggcgtcctccagtgcgtacattgacttttgaagattttaccaccatgcagaaacagcaggcaagcaagaagacatcacagggctacacagtgaaccaacactcatccgagacagacgcaatcgagctttacgagagacgggtttggctcatggaaagacgtggcagcacaggaacttcgcctaccacctcctctactggaactcctagcccttccgcctcctctcaccttctcagccctagctgcagcccaccaactttccatctggcacctaacacctttaatgttgggtgtcgagaaagccaactgtgcaacctcaacctcagcgactatcctccctgcgcgcggtctaacatggccgccctccagtcctatcccggactcagcgacagtggctacaacagactccagtccggtaccacaagcgctacgcagccttccgaaaccttcatgccacagaggacccctagccttatctcaggaatccctacccccccttcactgcctggcaactccaagatggaagcttatggcggccagctgggcagtttccccacatctcagttccaatatgtcatgcaagctggtaatgccgcatccagcagctcatccccccatatgttcggcggaagccacatgcagcagtcttcctataacgcattctcattacacaatccttataacctatacggttacaactttccgacttcgccgcgcctagccgcgtcccctgagaaactatccgccagccagagtaccttactctgcagttcacccagtaatggcgcatttggagagagacagtatttgccttccgggatggagcacagcatgcatatgatatccccttcccccaataatcagcaggctaccaacacgtgcgacggaaggcaatacggggccgtgccaggctcaagttcacagatgtccgtccatatggtctag

SEQ ID NO: 208179 - DNA, 1347 bp, synthetic construct
  misc_feature 1..1347: note = Description of Artificial Sequence: Synthetic coding sequence
  source 1..1347: mol_type = other DNA
atggccatgagcgagctgggcacccggaagcccagcgacggcaccgtcagccatctgctaaatgtcgttgaatcagaattgcaggccggccgagaaaaaggagaccccaccgaaaagcagttacaaatcattctcgaggatgctccgctgtggcagcgttttaaggaagtcaccaatgaaatgatcgtgactaagaacggccgtaggatgtttccagtgctgaaaataagcgtaacggggctggaccccaacgcaatgtattctctgctcctggacttcgtacccactgactcacatagatggaaatatgtgaatggagaatgggtccctgctggcaaacctgaagttagctcccattcatgcgtgtatatccaccccgactcgcccaattttggagctcactggatgaaagccccgatctccttttcaaaagttaagttgaccaataaactgaatggtggtggtcagatcatgctgaactccctgcacaagtatgaaccacaggtgcacatcgtaagggttggcagcgctcacagaatggtgacaaactgctcgtttcctgaaacacagtttatagctgtgaccgcttatcagaatgaggagattacagcactcaaaataaaatacaatcctttcgcaaaagccttcctcgatgcaaaagagcggaaccaccttagggacgtgccagaagcaatctcagagtcccaacatgtgacatatagtcacctggggggctggattttttccaacccagacggggtgtgtaccgccggtaactctaattaccagtacgccgctccactgccacttccggccccacatactcaccatggctgcgaacattactccggcctgcgggggcatcggcaggccccctacccttcagcttacatgcaccggaatcatagcccttcggttaatttaatagaatcctctagcaataatttgcaggtgttttctggtcctgattcttggacatccctgtcgtccacacctcatgccagcatcctgtctgtgccacataccaacgggcccatcaacccgggaccttccccgtacccttgtctgtggactatctctaatggcgcgggtggcccatccggacccggaccagaggtacatgcctcaacccccggcgcctttcttctggggaatcctgcggtcaccagcccaccatccgttctgtcaacgcaggccccaacatcagccggtgtggaagtgcttggtgagccgagcttgactagtatcgctgtgtccacctggacagctgtagcatctcacccctttgctggatgggggggtcctggtgctggcgggcatcatagtccttctagcctggacggttag

SEQ ID NO: 208180 - DNA, 978 bp, synthetic construct
  misc_feature 1..978: note = Description of Artificial Sequence: Synthetic coding sequence
  source 1..978: mol_type = other DNA
atgatcgtgaccaagaacggccggcggatgttccccgtgctgaagatctccgtaaccggactggacccaaatgcaatgtatagcttattgctggactttgtcccaactgactctcaccgctggaagtatgttaatggggaatgggtgccagccggaaaacccgaggttagcagtcatagctgcgtgtacatacatcccgattcgcccaacttcggagcacattggatgaaggcacccatttccttctctaaggtgaagttgacgaataagttgaacggtgggggacagatcatgctgaacagtttgcacaaatatgaaccgcaggtacatatagtacgtgtgggctccgctcataggatggtcactaactgttcttttcccgaaacccagtttatagccgtaaccgcttatcagaacgaagagattaccgctctgaagatcaagtataatcccttcgccaaggcattcctggacgccaaagagcgcaatcacttgagggacgtgccagaagccatcagtgagagccagcacgtaacgtattcccatcttaatttgatcgaaagctctagtaacaatcttcaggtgttcagcggccctgattcttggacttctctgtcctcaaccccacacgcctcaatccttagcgtccctcacaccaacggcccaattaaccccggccctagtccctatccatgtctgtggacgataagcaacggagccggcggtccgtctgggccgggacctgaggtccatgccagtacgccaggagcctttctcttgggcaacccagctgtgacaagccccccatctgtcttgagcacccaagcaccaacttcagctggtgtggaagtgctaggcgagccatcgctgacaagtatcgcagtgtccacctggactgctgtcgcatctcatccatttgctggctggggtggtcctggagctggcggacatcacagcccctccagcctggacgggtag

SEQ ID NO: 208181 - DNA, 957 bp, synthetic construct
  misc_feature 1..957: note = Description of Artificial Sequence: Synthetic coding sequence
  source 1..957: mol_type = other DNA
tgacggatgttccccgtgctgaagatcagcgtgaccggcctggacccaaacgcgatgtactctcttctgttggacttcgtgcccaccgactcccacagatggaagtacgtgaatggtgaatgggtccccgcggggaagcccgaggtctcatctcacagttgcgtgtacatacatccagattcccccaacttcggcgctcactggatgaaggcaccaatttctttctctaaggtcaagctgacaaacaaactgaatggaggtgggcagataatgctgaatagtttgcataagtatgagccccaggtgcacatcgtgcgggttggttccgcgcatcgcatggtgactaattgtagctttcctgaaacccagtttatcgctgtcactgcataccaaaacgaagagattaccgcactgaaaataaagtataaccccttcgccaaagcgttcctcgacgccaaggagcgaaaccatctgcgtgatgtgcctgaagctataagcgagtctcagcacgtgacatatagtcacctgaacttgatcgagtcatccagtaacaacttacaggtgttctcgggaccagattcatggaccagcctcagttcaaccccccacgcaagtattctgagtgtcccacacactaatgggccaatcaatcctgggccttccccttacccatgtctttggaccatatccaacggtgctggtggaccgagcgggccggggcctgaagtgcacgctagtactcccggtgctttcctccttgggaatcccgcagtaacctctccaccgtctgtgctgtccacccaggctccaacgtcggctggcgtcgaagttctgggtgagccatccctgacatctattgccgtatccacatggacagctgtggcctcacaccccttcgccggatggggaggccctggtgctggtggacaccactcaccatcttccctggatggatag

SEQ ID NO: 208182 - DNA, 846 bp, synthetic construct
  misc_feature 1..846: note = Description of Artificial Sequence: Synthetic coding sequence
  source 1..846: mol_type = other DNA
tgaaaggagcgggagctgaactggttctaccggcggcagcgggtgctgttcgcgcacgtgtacccgacatttactaacacatcctgcctctgtaagtgcaagattaccgccctcaagatcaaatacaaccccttcgctaaggctttcctggacgctaaagagcggaatcatttgcgtgatgtacccgaggccatctcagaatcacagcatgtgacttatagccatctgggggggtggatcttctctaacccagatggcgtatgcaccgccgggaacagcaactatcagtatgctgccccgttaccacttcctgctcctcacacacaccacggctgcgaacattactctgggcttaggggccaccggcaggcgccctacccgtccgcgtatatgcataggaatcacagcccttcggttaaccttatagagagctcctctaataacttgcaggtttttagtgggcctgactcctggacgtcgctctcctctacaccccacgctagtatattgtctgtgccacacaccaacggacctatcaacccggggccttctccctatccatgtttatggacaattagtaacggagctggcgggccctcagggccaggacccgaagtgcatgccagtacgccaggggcctttctattgggtaaccctgccgtcacaagtcccccgtcagttctcagcacacaggcccccacctctgcgggcgtggaagtcttgggtgagcccagcttaacttcaattgccgttagcacctggaccgccgtggcctcgcacccttttgccggatggggggggccaggggcaggaggccatcattcccccagttctctggatggctag

SEQ ID NO: 208183 - DNA, 1344 bp, synthetic construct
  misc_feature 1..1344: note = Description of Artificial Sequence: Synthetic coding sequence
  source 1..1344: mol_type = other DNA
atggagttcaccgccagccccaagccccagctgagcagccgggccaacgccttctccattgccgccctcatgtcatctggaggctccaaagagaaagaggccaccgaaaacactattaagcctctggaacagttcgtagagaaatcctcttgtgcacagccccttggtgagttgacctccctagacgcacacggggagtttggaggtggttcaggtagttccccaagttcctctagcttgtgcactgagccactcattcctacaactcccattatcccaagcgaggagatggctaagatagcatgtagcctcgagaccaaagagctgtgggataaattccatgagctgggcactgagatgatcattaccaaaagcggcagaagaatgtttcctacgatcagggtgtcattctccggcgtggacccagaagcaaaatatatcgtactgatggatatcgtcccagtcgataacaagaggtaccgttatgcctaccatcgcagctcatggcttgtggctggcaaggccgacccgccgctgcctgccaggttatacgtccacccggatagtcccttcaccggagagcagttactcaaacagatggtttcatttgagaaggtcaagcttaccaataacgaactggaccagcacggtcacattatcctcaatagcatgcacaaataccagccccgggtccacataatcaaaaagaaggaccatactgccagcctgctaaacctcaagtctgaggagttccgaactttcatcttccctgagactgtgtttaccgccgtgacggcctatcagaaccagttgataaccaagttgaaaatcgattccaatccatttgctaagggattccgggattccagccgccttaccgacatcgaacgggagagcgttgaatcccttatccagaagcacagctatgccagatcccctataagaacttacggaggtgaggaagacgtccttggcgacgaatcccagactacaccgaacagaggtagtgcttttacaactagtgataacctttcactgagttcttgggtgagctccagcagtagcttccccggctttcagcacccacagagccttactgctctgggcaccagcactgcttccatcgcgacacctataccacatcccattcaggggtctttgcctccatattcccgcctaggaatgccactcactccttctgccatcgccagttcaatgcagggcagtggtcctacattcccctccttccatatgcctcgatatcaccattatttccagcaagggccttacgcggccattcaaggtctaagacattcgtctgcagtgatgacccccttcgtgtag

SEQ ID NO: 208184 - DNA, 1608 bp, synthetic construct
  misc_feature 1..1608: note = Description of Artificial Sequence: Synthetic coding sequence
  source 1..1608: mol_type = other DNA
atgggcatcgtggagcccggctgcggcgacatgctgaccggcaccgagccgatgcccgggtcggacgaaggaagggcaccaggcgctgatcctcagcaccgctacttctaccccgagccaggggcccaggatgcagatgagcggagaggcggaggctccctcggatccccctaccctgggggagccctggttcctgcaccaccctcgagattcctaggagcatacgcttatccacctcgaccacaggccgcagggttccctggcgcgggcgaatcttttccaccccccgcagacgcggaggggtatcagcctggtgaagggtacgccgcccctgacccccgcgccgggctgtatcccggccccagagaagactatgctctgcctgccggtcttgaagttagtggcaagctgcgagttgccttgaacaaccacctactctggtcgaagttcaatcagcaccagaccgaaatgattattacaaaacaaggccgcagaatgttccctttcctaagttttactgttgccggacttgagcccacaagtcattatcggatgtttgtggatgtagtgctggtcgatcagcatcactggcggtaccagagtggtaagtgggtccagtgtgggaaggcagaaggctctatgcctgggaaccgcctctatgtgcatccagacagtccaaacacgggggcacactggatgaggcaggaagtctcattcggcaaactgaagctgaccaataacaagggagcctccaacaatgttacacagatgatagtgctgcagtccttgcataagtaccagccaagactgcatattgtggaggtaaacgacggcgaacccgaagctgcttgcaatgcgagtaatacacacatcttcacctttcaagagactcagtttattgctgtgacggcctatcagaacgccgagatcacccagctaaaaatcgataacaacccctttgccaaagggttccgggaaaattttgaatccatgtatacaagcgtggacacgagcatcccctcaccgcccggacccaattgtcagtttctagggggagatcactattcgccgctcctgccaaatcagtacccggtcccatctcgattttaccccgatctgccaggacaggctaaggacgtcgttccccaggcctattggttaggcgccccaagagatcactcctatgaagctgaatttcgagccgtttctatgaaaccggccttccttcctagcgcccccggacctactatgtcgtactaccgtggccaggaggtactggcccctggtgcgggctggcccgtggccccacaatatccccctaagatggggcccgctagctggttccggcccatgcgaaccctccccatggagcctggtccgggaggaagcgagggacgcgggcctgaggatcagggcccccccctggtttggaccgaaatcgcccccatcagacccgaatccagcgatagtggtttaggggaaggtgattcaaaaagacgccgggtctccccatacccttcatcgggggacagctctagtcctgccggagcaccttcacctttcgacaaagaggccgaaggccagttctacaattactttccaaactag

SEQ ID NO: 208185 - DNA, 1203 bp, synthetic construct
  misc_feature 1..1203: note = Description of Artificial Sequence: Synthetic coding sequence
  source 1..1203: mol_type = other DNA
atgttccccagcgtgcgggtgaaggtgaagggcctggaccccggcaaacagtaccacgttgctatcgacgtagtgcccgtggatagtaagcgctacaggtatgtgtatcactcgtctcagtggatggtcgcaggaaacaccgatcatttgtgcattatacctaggttctacgttcaccccgatagtccctgttctggagaaacatggatgcggcagattatcagttttgatcgcatgaagctaactaataacgaaatggacgacaagggccatatcatcctgcaatctatgcataaatacaaacctcgggtgcacgtgatcgaacagggctcatccgtggatttaagccaaatacagagtttgccgaccgagggcgtaaagacatttagctttaaagagactgaatttacaaccgtgacggcctaccagaatcagcaaatcacgaagctgaagatcgaaagaaatcccttcgccaagggctttcgcgacacagggcgcaacaggggcgtgctcgatggattgctcgagacctatccctggcggcctagcttcactctggactttaagacttttggggcagacactcaatctggctcaagcggatcaagcccagtaaccagttccgggggtgccccatctccactaaattcgcttctgtctccactgtgcttcagccccatgttccatcttccaaccagctcactgggaatgccctgcccagaagcctatctcccaaacgtgaacttacctctgtgctataagatttgcccgacgaatttctggcaacaacaacccctcgtcctcccggcccccgagagactggcttcttccaattcgagccagtccctagcacctctaatgatggaagtgcccatgcttagctccctgggtgttacgaatagtaaatctggctcatcagaagactccagcgaccagtacctacaggccccaaattcgacaaatcagatgctctatggcttgcagagtcctgggaatatctttttacccaactcaatcacacctgaagccctttcctgtagttttcatccttcatacgatttctatcgctataatttttccatgccttcccgcttgatatctggatctaatcatctcaaagtcaatgatgatagccaagtcagttttggagaaggaaagtgcaatcacgttcactggtaccctgccatcaatcattacctatag

SEQ ID NO: 208186 - DNA, 1563 bp, synthetic construct
  misc_feature 1..1563: note = Description of Artificial Sequence: Synthetic coding sequence
  source 1..1563: mol_type = other DNA
atggccctgagcagccgggcccgggccttcagcgtggaggccctggtcggacgacccagcaagcgtaagcttcaagaccctatacaggcggagcaaccagagctgagggaaaagaaaggaggggaagaagaagaggagcgtcgctctagcgctgcaggaaagagcgagcctttagaaaagcagcccaagacagagcctagcacctctgcatccagtggttgtggcagtgactcgggctacggcaactcttctgaatctctggaagagaaagatattcagatggagcttcaggggtccgagctgtggaagaggtttcacgatataggcactgaaatgattatcaccaaagccggacgacgcatgtttcctagcgtgcgagtaaaagttaagggcttagatccaggcaaacagtaccacgttgccattgacgtggtgccagtggatagcaaacggtaccgttacgtgtatcacagctctcaatggatggtcgctggcaacaccgaccatctgtgtataatcccacgtttttacgttcatccagatagcccgtgttcaggcgagacttggatgcgccagataatttctttcgacagaatgaagttgactaacaatgaaatggacgataaggggcacattattctgcagagcatgcacaagtacaagccgcgtgtgcacgtgatagaacagggcagcagcgtggatttatcacagatccaatctctccctacggaaggggttaaaacattctcttttaaggaaaccgaattcacaactgtgactgcttatcagaaccagcagataacaaagctgaagatcgaaagaaaccccttcgcaaaggggtttagagacaccggacgaaataggggagtgcttgatggcctgctggaaacctacccatggcggccttcttttaccttagatttcaaaacgttcggcgctgatacccagagcggcagctccggatcttctcccgtgacgtcttccggcggggccccatcccctctcaacagcttactcagcccattgtgcttcagcccaatgtttcacttgcctacgtccagtctcggtatgccctgtcccgaggcctacttgcccaatgtcaaccttcctctgtgttataaaatttgtcctactaacttttggcaacagcagcccctcgtgctacctgcacctgagagactggcatcatccaattccagtcaaagcctggctccgctgatgatggaagttcctatgcttagcagcctaggcgtcactaatagcaaatccgggtcgtcagaggattctagcgaccagtacttgcaggctcctaactcaacaaatcagatgttatacggactgcagtcgcctgggaatatctttctgcctaactccattacgccagaggcactctcttgctccttccacccctcttacgatttttatcgctacaatttcagtatgccatctagacttatcagcggcagtaaccatctgaaggtcaatgatgattcccaagtttctttcggtgaagggaaatgcaatcacgttcactggtaccctgctatcaaccactacttgtag

SEQ ID NO: 208187 - DNA, 1563 bp, synthetic construct
  misc_feature 1..1563: note = Description of Artificial Sequence: Synthetic coding sequence
  source 1..1563: mol_type = other DNA
atggccctgagcagccgggcccgggccttcagcgtggaggccctggtgggacgtccctctaagaggaaactgcaggaccccatccaggctgaacagcccgaactgcgagagaagaaaggcggggaggaggaagaggagcggcgcagtagcgctgcaggaaagtcagaacccctggaaaagcagcccaaaacagagccaagcacaagcgcgagctctgggtgtgggtccgatagcggttatggaaattctagcgagtccttggaggaaaaagatatccagatggagttacaaggttccgaactgtggaaaagattccacgatatcggaactgaaatgatcataactaaggcaggccgaaggatgttcccttcagtgcgcgtgaaagttaaaggcctcgacccgggaaagcagtatcacgtggcaatcgacgtggtcccagtggatagcaagagatatcgctatgtctatcactcaagccagtggatggtggctggaaacacagatcatctttgcatcattccacgattctatgttcaccctgacagtccatgctccggagagacgtggatgcgccagataatctctttcgaccgtatgaagttgactaacaacgagatggatgacaaaggtcacattatcctccagagcatgcataaatacaaacccagagtgcacgtcatcgagcagggctcgtctgtggatcttagtcagatccaatcactccccaccgagggggttaagactttcagtttcaaagaaacagaatttactacagtgactgcctaccagaaccagcagattacaaaattgaagatcgagcgaaaccccttcgctaaagggttcagggatacaggtagaaatcgcggtgtgctagacgggctgcttgaaacctacccctggcggccttcatttaccttggacttcaagacgtttggggcggacacccagtccgggagctctggttcttcccctgtgacaagcagtggtggtgcgccctcacctcttaattctctgctgagcccgttgtgcttttcacctatgtttcatctgcccaccagtagcctcgggatgccatgtccagaggcctaccttcctaacgtaaacctgccgttatgttataaaatttgccctaccaatttctggcagcaacagcccctggtcctacctgcacctgagagacttgccagttcaaacagctcacagtccctggcaccattgatgatggaggtgcctatgctgtcctccctgggcgtcacaaattcgaagagtggcagctccgaagacagcagtgaccagtatctgcaggcacccaactccaccaaccagatgctctacggactccaatcccccggtaatatttttctgcccaacagcatcacccctgaagccttgtcttgcagcttccatccatcatacgacttctataggtacaactttagcatgccaagtaggctgattagcggcagcaaccatttaaaggtcaacgacgacagccaggtgtccttcggcgaagggaaatgtaaccacgtccactggtaccccgccattaaccactatctctag

SEQ ID NO: 208188 - DNA, 1203 bp, synthetic construct
  misc_feature 1..1203: note = Description of Artificial Sequence: Synthetic coding sequence
  source 1..1203: mol_type = other DNA
atgttccccagcgtgcgggtgaaggtgaagggcctggaccccggcaagcagtatcacgtggccatcgacgtggtgccagtggattcaaaaagatataggtatgtctatcactctagccagtggatggtagccggaaacaccgaccatctgtgtatcattccacgtttctacgtccaccctgactccccttgtagcggggagacatggatgagacagatcatcagctttgataggatgaaactgaccaacaacgaaatggacgacaaagggcacatcatactgcagagcatgcataagtataagcctcgggtccacgtgattgagcagggctcaagcgttgacctgtcgcagattcagtcccttccaacagagggggtgaaaaccttcagcttcaaggagaccgaattcactacagtgaccgcgtatcaaaaccagcagatcaccaagttaaagatcgaacggaatccctttgccaaaggattcagagacacgggcaggaaccgaggggtgttagacggcctcttggaaacttatccctggcgccctagcttcacccttgattttaagacctttggcgcggatacacaatccggaagctcaggctcaagccctgtcacatcctcaggtggggcgccatcacctctaaattcactgcttagtcctctgtgcttttccccgatgtttcacctgcccacgagcagtcttggcatgccttgtccagaagcctacctgcccaatgtgaatctacccctctgctacaaaatctgtcctaccaacttttggcagcagcagccacttgtgcttccagcacccgagagactcgccagttccaatagtagccaatccctggccccactaatgatggaggttcccatgcttagcagtcttggggtaactaattcaaaatccgggtcgagtgaggactcatcagaccagtatctccaggcgcctaattccacgaatcagatgctgtatgggcttcagtcacccgggaacatttttcttccaaactcaattaccccggaggctctcagttgttcattccatccctcctacgatttttataggtataacttctccatgccttcccggctgattagcgggagtaaccacctgaaggttaacgacgattcacaggtcagctttggagaaggtaaatgcaatcacgtgcactggtaccctgcaattaaccactatctatag

SEQ ID NO: 208189 - DNA, 2232 bp, synthetic construct
  misc_feature 1..2232: note = Description of Artificial Sequence: Synthetic coding sequence
  source 1..2232: mol_type = other DNA
atgagcctgagcatgcgggaccccgtgatccccggcaccagcatggcctaccatccgtttctgccccatcgcgcaccagacttcgcgatgagcgccgttctgggccaccagcctcccttctttccagcactcaccctcccgcctaatggggcagccgcattgagcttgcctggcgcccttgctaagcccattatggatcaactggtgggcgcagcggagacaggcattccattttccagtctgggtccacaggctcacctgcgccctttgaagactatggagcccgaagaggaggtggaggatgaccctaaagtacaccttgaggcaaaggagctttgggatcagttccacaaaaggggcaccgaaatggtgattactaaatcagggcgacgcatgttccccccgtttaaagtccgctgctctggattggataagaaggccaaatatatactgctgatggatatcatcgctgccgatgactgtagatacaaatttcacaactctcgttggatggtggctggaaaggctgatcccgagatgcccaaacgaatgtacatccatcccgacagcccggcaacgggagagcagtggatgagtaaggtcgtcacttttcacaagctgaagctcacaaataacatctcagacaagcacggattcaccttggccttcccttctgatcacgctacttggcagggaaattacagcttcggaactcagactattctcaactccatgcacaagtatcaacccagatttcacatcgtgcgtgctaatgacattctcaagctcccctatagcaccttccggacatacctgtttccagagaccgaattcatcgcagtcacagcctaccaaaacgacaaaatcacacagctgaaaatagacaacaacccctttgcaaagggtttccgggacaccggaaatgggcgccgcgaaaagcggaagcagttaactctgcagtctatgagggtcttcgacgaaaggcataaaaaggagaacgggacttctgacgaaagcagttccgaacaggcagccttcaattgcttcgcacaggcgagctctcctgcagcctcaaccgtgggaaccagtaatctgaaagatctgtgtcccagcgagggcgagtctgatgccgaggccgaatcaaaggaggagcatggcccagaggcttgtgacgctgccaaaatcagcactacaacgagcgaggagccttgtcgggataaaggctcacccgcagtgaaggcacaccttttcgcggcagaacgacctagagatagtggccgcctggacaaggcttcacctgactctcgccacagccctgcaacaatctcttcctctaccagagggctgggcgcagaggagaggaggtcacccgtgagggaggggaccgctcccgcaaaagtggaggaggcacgggcattaccggggaaagaggcctttgcacccctgaccgtacagacagatgctgctgcagcccacctcgcccagggacccttgccagggctcggattcgccccaggtctggccggacagcagttcttcaatgggcatcctctgttcctgcatcccagccaattcgccatgggaggagcattcagctcaatggctgccgccggtatgggacccctactcgccacagtcagtggggcctccaccggtgttagcggcctcgactcaactgcaatggcctctgctgcagccgctcagggtttgtccggtgcctcagccgctaccctgccgtttcacctgcagcaacacgttctcgcgagtcaaggcctggcgatgtccccctttggaagccttttcccatacccctacacctatatggccgcagccgcagcagcatcgagtgctgccgcctcttcgtcagtgcacagacacccttttctgaacttaaataccatgaggccgagacttagatactccccgtattctattcctgtgccggtgcctgacggcagttcattgttgaccacagctctcccgtcaatggccgccgcagcaggaccccttgatgggaaagtcgccgccctggccgcttcacccgcctccgtggccgtggacagcgggtctgagcttaatagtaggtcctcgaccttatccagcagttccatgagcctcagtccgaagttatgcgcggagaaggaagcggcaacgtctgagcttcagagtatccagaggctggtgtcgggactggaagcaaaacctgatcgttctcgatctgccagtccctag

SEQ ID NO: 208190 - DNA, 2172 bp, synthetic construct
  misc_feature 1..2172: note = Description of Artificial Sequence: Synthetic coding sequence
  source 1..2172: mol_type = other DNA
atgagcctgagcatgcgggaccccgtgatccccggcaccagcatggcttatcacccattccttcctcatcgcgcgcctgactttgccatgtcagccgtgctagggcaccagccccccttttttcccgccctaactttacccccaaacggggcggctgctctttctctgccaggagcactggcaaaaccaatcatggaccagctggtcggtgcggccgaaaccggaatcccattttccagcctcggaccccaggctcacttgcgcccactgaaaaccatggaacctgaggaggaggtggaggatgatcccaaagtgcacctggaagctaaggaactctgggatcagttccataagcggggcacagagatggttattacaaagtccggcaggcggatgttcccacccttcaaggtcagatgctcgggcctggataagaaagccaagtacatccttttaatggacatcatcgccgctgatgattgtcgctataagttccataatagccgttggatggttgccggtaaggcagatcccgagatgccaaaacggatgtatattcaccctgacagtcctgcaaccggggagcagtggatgtctaaagtggtcacctttcataaactaaaactaactaacaacatcagcgacaagcacggctttaccatactgaattctatgcataaatatcaaccacgcttccacattgtaagagccaatgatattcttaagcttccatacagcaccttccgaacttatctgttccccgaaaccgagtttatcgccgttacggcttatcaaaatgataaaatcactcaactaaaaattgacaacaacccctttgctaagggtttcagggacacaggtaacggaaggagggagaaaaggaagcagctcacactgcagtccatgcgtgtgttcgacgagaggcacaagaaggagaatggcacatcagatgaatcctcttcagagcaggctgccttcaattgcttcgcccaggccagttctccggccgcctctactgtaggcacaagcaacctgaaagatctgtgcccctccgagggtgaatctgatgcggaagcagagagcaaagaagagcatggtccagaagcatgcgatgcagcgaagatcagcaccacaacttctgaagaaccatgccgggacaagggatccccggccgtcaaagcccacctgttcgcagcggagaggccacgggatagtggacgattggacaaagcaagtccagactctagacactctcctgcaacgatcagcagctcgactaggggcctgggtgctgaggaacgccgttcccccgtgagggagggtacagcccccgcgaaagtggaagaggctagggccctgcctggaaaggaagcattcgctcctttgacagtgcagaccgatgcagcggcggctcacctcgcacagggtcccctgcccggtctggggttcgccccaggcctggccggtcaacagtttttcaacggccacccgctgttcctgcacccctcacagttcgccatgggaggtgccttttctagtatggcagccgctggtatggggcctttgctggcgaccgtctctggcgctagcacgggagtttccggtctcgactctaccgcaatggctagtgctgccgccgcacaggggctctctggagcttccgccgctacattaccattccatctacaacagcacgtgctggccagtcagggactagccatgtctccctttggatctctcttcccctatccatacacctatatggcagcggccgcggcagcctccagcgctgccgcaagttcgagcgttcacaggcacccttttctgaatctgaataccatgaggcccaggttaagatattctccatattcaattccggtgccggtgccagatggctcctccctcctgacaacagcacttccatccatggccgccgctgcaggacccctggatggcaaggttgcggccctggcagcttcgcctgcttccgtggcagtggattccggctcagagctcaacagtagatcatccaccctgtccagcagcagcatgtcattgagcccaaagttatgcgccgagaaggaggcggccacgtccgagctgcagtcaatccagcggctggtctccggccttgaggcaaaacctgaccgctctaggtccgccagcccctag

SEQ ID NO: 208191 - DNA, 1803 bp, synthetic construct
  misc_feature 1..1803: note = Description of Artificial Sequence: Synthetic coding sequence
  source 1..1803: mol_type = other DNA
atgagcctgagcatgcgggaccccgtgatccccggcaccagcatggcctatcacccctttctgcctcacagggcccccgatttcgcaatgtccgctgtgctgggccaccaaccaccgtttttccccgccttgacacttcccccaaacggggctgccgcactgtccctgccgggtgcgttggcgaagccaattatggaccagctggtgggtgccgccgagaccggaatccctttctccagcctcggccctcaggcccacttgcgacccttaaagaccatggagccagaggaggaagtggaggacgaccctaaagtacacctggaagccaaagaactatgggatcagttccacaaacgaggcacagagatggtgattactaaatccggtcgaagaatgttccccccttttaaagtgcgctgttccgggctagacaagaaggctaaatacattctgctaatggacataatcgctgctgatgactgccgttacaaattccacaactcacgttggatggtcgctggaaaggccgacccagagatgccgaaacggatgtacatccacccagacagcccggccactggagaacagtggatgagcaaggtcgtgacctttcataagcttaagcttacaaataacatcagtgataaacacggctttaccctggcatttccttccgaccacgctacttggcaggggaactactccttcggaactcagacaattttgaactccatgcacaaataccagccccggttccatatcgtgagggccaatgacatccttaagctgccatattcaacctttcgaacctaccttttcccagaaacagagtttatcgcagttacagcttaccagaatgataagatcactcagttgaagattgataacaacccttttgccaagggtttccgcgatactggcaacgggcggcgcgaaaagcgaaagcaattaactctgcagagcatgcgagtcttcgacgagcggcacaagaaagagaacggaacctccgacgaaagcagctccgagcaggccgccttcaattgtttcgctcaagcatccagccctgcagctagcacagtcggcacatcaaacctgaaggatttatgtccaagcgaaggggagagcgatgcagaagccgaaagtaaggaggagcatgggcccgaagcctgtgacgctgccaagattagcacgaccacatcggaagaaccttgccgggacaagggctcacccgccgtgaaagctcacctatttgctgcagaaaggccaagggactcaggaagactggacaaggcttcacccgacagtaggcattccccggctacaatctcatcgagcactcggggattgggcgcggaggaacgtaggtcccccgtccgagagggcactgcgccggctaaagtcgaggaggcgagagccctccccggcaaagaagccttcgcacccctgacagtccaaacggatgcggctgcggctgcagcttcatcttctgtgcacaggcatccgttccttaacctgaataccatgcggccccggcttcggtattcaccttattctattcccgtacccgtgccagacggctccagcctgcttaccacagcccttgccgcttcaccggcctccgtggctgtcgatagcggaagtgaactcaactccagatcctctacactgagcagctcatccatgagcctgtctcccaagttgtgcgcagagaaagaagcagccacaagcgaattacagagtattcagcgcctagtgtctgggctggaagctaagcctgatcgcagtcggtccgcatctccttag

SEQ ID NO: 208192 - DNA, 1638 bp, synthetic construct
  misc_feature 1..1638: note = Description of Artificial Sequence: Synthetic coding sequence
  source 1..1638: mol_type = other DNA
atgctgcaggacaagggcctgagcgagagcgaggaggccttccgggcacctgggcccgccctcggagaagccagtgctgcgaacgcaccagagcccgctctagctgcaccaggcctgagtggggccgccctgggatcccccccaggacctggtgccgacgtggtggccgcagccgccgcagagcagacgattgaaaacatcaaggtgggtttacatgagaaggagctttggaaaaagtttcacgaggcaggcacagagatgatcattacgaaagccggcagacggatgtttccaagttataaagtgaaagttacaggtatgaatccaaaaacaaaatacatcctgctcatagatatcgttcctgctgatgatcatcgatataaattctgtgacaataagtggatggtcgctggcaaggccgagcccgcaatgccaggaaggttgtacgtgcatcccgattccccggccaccggggctcactggatgcgacagcttgtctcctttcagaaattaaaattgaccaataaccacttagatcccttcggacacatcattctaaacagcatgcacaagtaccagccaagattgcacattgtcaaggcagacgagaataatgcatttggttcgaagaatactgcattttgcacacatgttttccccgagacctcctttatctcggtgacttcatatcagaaccataagattacacagctgaagattgaaaacaatccattcgccaagggcttcaggggctctgacgattccgaccttagggttgctcgcttacagtctaaggaatatcccgtgattagcaagagtatcatgagacaaaggctgatctcccctcagcttagcgccaccccggatgttgggcctctgcttggcacccatcaggccctgcagcactaccagcacgaaaatggtgcacactctcagttagccgagccccaagatctgccactgtccacgtttccaacgcagcgcgacagcagcctcttctaccattgccttaaaaggcgagatggcacccggcacctggatctgccatgtaaacgaagttacctggaagccccttccagcgttggcgaagatcattacttcagatccccccctccctacgaccagcagatgctatcaccaagctattgctcggaagtaacccctcgggaagcttgcatgtactctggcagcggacctgaaattgcaggagtgtctggagttgacgatctgccgccaccgccactttcatgcaacatgtggacctccgtatctccatacacgtcctatagtgtgcagacgatggagacggtgccctatcagcctttcccaacacatttcactgccaccaccatgatgccccggcttcccacactgagcgctcagtccagccagcccccaggtaatgcccactttagcgtgtacaaccaactttctcaaagccaggtccgcgaaagaggtccatcagcgagctttcctcgcgaacgcgggcttccacagggatgcgagcgaaagccaccctcgcctcatctgaacgctgcaaacgagttcctgtacagtcagaccttttctttgtcccgggagagctctttgcagtatcattctggcatgggcaccgtggaaaattggaccgacggttag

SEQ ID NO: 208193 - DNA, 1641 bp, synthetic construct
  misc_feature 1..1641: note = Description of Artificial Sequence: Synthetic coding sequence
  source 1..1641: mol_type = other DNA
atgctgcaggacaagggcctgagcgagagcgaggaggccttccgggcacccgggcccgcgttaggtgaggccagtgcagctaacgccccagagcccgccttagccgcacccggcttaagcggcgctgcactgggctcccccccaggtcctggggccgatgtggttgcagcggctgccgcagaacaaaccatcgagaacattaaggttggccttcatgaaaaagagctctggaagaagttccatgaagctgggacagagatgattattacaaaagcaggccgccggatgttccctagttacaaagtcaaggttacaggtatgaatcctaagactaaatacatcctactgatcgacatcgtccctgccgacgaccaccggtacaaattctgtgacaacaagtggatggtggctgggaaagctgagcctgcgatgccgggacgcttgtacgtgcaccctgacagcccagccactggagcacattggatgcgtcagctcgtgagtttccagaaacttaagttgactaacaatcaccttgatccctttggtcatatcatactaaatagcatgcacaagtatcaacccagacttcacatcgtgaaggcagatgagaacaacgcctttggttctaaaaacactgccttttgcactcacgttttccccgagacttcattcatatccgtgacttcctatcaaaatcataaaataacccagctcaagattgagaataatcctttcgccaagggattccgaggatcagatgactccgatttgagagtggcccggttacagtctaaggaatacccggtcattagcaaatctatcatgaggcagcgtcttatttcgccgcagctgagtgcaacccccgatgtaggacccctgctgggcacccatcaggcactccaacattatcagcatgagaatggggcacactcacagctggcagagccgcaggatcttcccctcagcacgttccctacccagagagattcttccctcttttaccattgcttgaagagacgtgcagacggaacacgccacctggacctaccatgcaagcggagctacctagaggcaccgtcaagcgttggtgaggaccattactttaggtcaccaccaccgtacgatcaacagatgctgagcccgtcgtattgtagcgaagttactcctcgcgaggcctgcatgtattccgggtcagggcccgagatcgcaggagtgtctggggtagatgacttgcctcctccgcccctctcatgcaatatgtggacgtctgtttctccctacactagctattccgtacagactatggagactgtaccctatcagcctttcccgacacactttaccgccaccacgatgatgccaagactcccaaccctaagcgcgcagagctctcagcccccaggtaacgcccactttagcgtgtacaatcagctctctcagagtcaggtgcgggagaggggcccaagcgctagtttccccagagagaggggcctgcctcaggggtgtgagaggaagcccccatccccccaccttaacgccgccaacgagtttctgtactcccaaaccttttctttgtctcgggagtccagtctgcaatatcatagcggcatgggcacagtcgagaactggacggacggttag

SEQ ID NO: 208194 - DNA, 1557 bp, synthetic construct
  misc_feature 1..1557: note = Description of Artificial Sequence: Synthetic coding sequence
  source 1..1557: mol_type = other DNA
atggccgacgccgacgagggcttcggcctggcccacacccccctggaaccggatgccaaggacctgccttgcgacagcaagccagaaagcgcccttggtgccccgtcgaagtctccctccagcccccaggcagccttcacacaacaaggcatggagggtatcaaggtgttcctgcatgagcgggaactctggctaaagtttcacgaggtcggaacagagatgattataacaaaagccggtagacgtatgtttccttcatataaagtgaaggtgaccggcctaaatcccaagactaagtatatattgctaatggacatagtgccagccgacgatcaccggtataagttcgccgacaataagtggtccgtgacaggaaaagctgagcctgcgatgccaggcaggttgtacgtgcacccggattctccagccactggagcacattggatgaggcaacttgtgagctttcaaaaattaaaactgactaataatcacctagacccattcgggcacattatcctgaacagcatgcacaagtaccagccaagattacacattgtgaaagctgatgagaacaatgggttcgggtctaaaaacaccgccttctgtacccatgtctttcctgagacagcgttcattgccgtgaccagctaccaaaaccacaagattacacaacttaagatcgagaacaacccgtttgccaaaggattccggggatcagacgacatggaacttcatcgcatgagccgtatgcagtctaaggagtatcccgtcgttcccagatctaccgtaagacagaaagttgcatcaaaccatagtccatttagcagtgaaagccgcgccttgtctacttctagtaatctgggaagtcagtaccaatgcgagaatggcgtgtcaggcccttctcaggaccttttacctccgccaaacccttaccctctgccccaggaacactcccaaatctaccactgtacaaagaggaaggaagaggaatgctctactaccgatcacccttacaaaaaaccctacatggagacctccccatcagaggaggatagtttttatcgatccagttatcctcagcagcaaggattaggcgctagctacaggaccgagtccgcccaacgccaggcgtgcatgtacgcctcctcggctcctcctagtgagccagtgccctccctggaagacatttcatgtaacacctggccttctatgccttcatattcatcatgcactgtaaccacagttcagcccatggaccgactgccctaccaacacttctctgcccactttacatctggccctctggtaccacggcttgccggcatggcgaaccacgggtcaccccagcttggagagggcatgtttcagcatcagacgtccgtggctcaccaacctgtggtgcgccagtgcggtccccagaccggactgcaaagtcccggaacacttcaaccaccggaattcctctacagccacggagtccctagaaccctttcacctcaccagtaccattcagtccatggggtgggaatggtgcccgagtggagcgacaactcttag

SEQ ID NO: 208195 - DNA, 1407 bp, synthetic construct
  misc_feature 1..1407: note = Description of Artificial Sequence: Synthetic coding sequence
  source 1..1407: mol_type = other DNA
atggagggcatcaaggtgttcctgcacgagcgggagctgtggctgaagtttcatgaagtagggaccgagatgataattacaaaggccggcaggaggatgtttcctagttacaaagttaaggtgaccggtctgaaccctaagactaagtacatccttcttatggacattgtgccggctgacgatcacagatataaattcgccgataacaaatggtctgtgactggcaaagctgaaccagcaatgcccggccggttatatgtacatcccgattcccctgccaccggggcccactggatgcgccagctggttagttttcagaagctaaagcttactaacaatcaccttgacccctttgggcatattattttgaacagtatgcacaaataccaaccccgccttcacatcgtgaaggctgacgagaacaacggatttggttctaaaaacaccgccttctgtacgcacgtcttccctgagactgctttcatagccgtcacctcttatcaaaatcacaagatcacacagctgaaaatcgagaacaaccctttcgccaaaggttttcgtgggagcgatgatatggaattacaccgcatgtcacgtatgcagagtaaagagtatcctgtcgtgcctcggagcacagtcaggcagaaagttgcttctaatcatagcccattttcgagtgaatcgcgtgccttgtccacatcttctaatttggggtcccagtaccagtgcgagaacggcgtgtccggccccagtcaggacttactaccgccacccaacccgtatccattgccccaggaacacagccaaatctaccactgtactaagagaaaggaggaagaatgcagcaccacagatcacccgtacaagaagccctacatggagaccagcccttcagaagaggactcgttttaccgcagctcctacccgcagcagcagggtcttggcgcctcttaccggacggaaagcgcacaacgccaggcatgcatgtacgcttcaagcgcccccccctccgagccagtgccttctctggaagatatcagctgtaatacttggccgagcatgccatcttattctagttgcacagtgactaccgttcaaccgatggacagattaccatatcagcatttctcagctcacttcacctccggtcccttggtgccgcggcttgcaggcatggccaatcacggatcgcctcagctgggggaagggatgtttcagcatcaaaccagcgtggcgcatcagcctgtcgttcgacagtgtgggccccagaccggactgcagagtcctggcaccctgcagcctcccgagtttttgtattctcacggagtgcctaggaccctctccccccaccagtaccattcagttcatggtgtgggtatggtgcctgagtggtccgacaattcttag

SEQ ID NO: 208196 - DNA, 1557 bp, synthetic construct
  misc_feature 1..1557: note = Description of Artificial Sequence: Synthetic coding sequence
  source 1..1557: mol_type = other DNA
atggccgacgccgacgagggcttcggcctggcccacacccccctggagccggacgccaaagacttgccatgtgactctaagcctgaaagcgcgcttggcgctccctcgaagtcaccaagtagcccacaagccgcctttacgcaacagggtatggaaggcataaaggtgttcttacatgaaagggagctctggctgaaattccacgaagtgggaactgagatgattataactaaagccgggaggagaatgttcccctcctacaaagttaaggtgaccgggctgaacccaaagaccaagtacatcctcctaatggatatcgtgcctgctgatgaccacagatacaaatttgctgataataaatggagcgtgacgggtaaggcagaacctgccatgcccgggcgtttgtacgtgcacccagattcaccagctaccggggcacattggatgagacagctggttagtttccaaaagctgaagctaactaataatcatctggatccattcggacacatcatcctcaattccatgcataagtaccagcctaggctgcacatcgtgaaagccgatgaaaataacggctttggcagtaagaatacagctttctgcacacacgttttcccagaaacggcttttatcgctgtgacatcgtatcagaatcacaaaatcacacagcttaagatcgagaataaccccttcgcaaaaggcttcaggggctccgacgacatggagctccacaggatgtctcgaatgcaatccaaggaatacccagtggtcccaagaagcactgtgcggcagaaggttgcctccaaccatagtccattttctagtgagtcccgggccctgagtacatcatcgaatctcggcagccagtaccagtgcgagaatggtgtgagcgggccatcacaggacttgttgccaccccccaacccatatccacttccacaggaacactctcagatctaccattgtacaaagcgaaaggaggaggagtgctccaccacagaccacccttataagaagccatacatggagacttcaccatctgaagaagatagcttttatagatcctcctacccacagcagcagggattgggcgcctcatataggactgaaagcgcacagaggcaggcatgtatgtatgccagtagcgcgcccccatcggaaccggttccatcacttgaagacatttcctgtaacacttggcccagcatgcccagttacagttcctgcaccgtaaccactgtgcaaccaatggatcgactgccgtaccagcacttcagtgcacactttactagcggtccgctcgtcccccgcttagccggtatggcaaatcacggtagcccacaactgggagagggtatgttccagcaccagacctcagtcgcccatcaacctgtcgttcgacagtgcggaccccaaactggcctacagtcccccggcactctccagccccccgaatttctgtattctcatggcgttccccgcaccctgagccctcaccagtatcattcagttcacggagtgggtatggtacctgaatggtccgataattcatag

SEQ ID NO: 208197 - DNA, 1269 bp, synthetic construct
  misc_feature 1..1269: note = Description of Artificial Sequence: Synthetic coding sequence
  source 1..1269: mol_type = other DNA
atggacatcgtgcccgccgacgaccaccggtacaagttcgccgacaacaaatggtcagtaaccggaaaagccgagccagctatgcctggacgtctgtacgtacatccagacagccctgcgacgggagcccactggatgcgacagctggtgagctttcagaagctcaaacttaccaacaaccacttggatcctttcggccacatcattctgaactccatgcataaatatcagccccgcctgcacatagtgaaggccgatgagaataatggttttggctccaagaataccgcattctgtacgcacgtgttcccagaaactgccttcattgccgtgacatcatatcagaatcataagatcactcagcttaagattgagaacaatccctttgccaaggggtttcgcgggtcagacgatatggagttgcaccggatgtcccggatgcagagcaaagaatatcccgtggtgccgcgtagtaccgtgagacagaaggtggcctctaaccattcaccgttctcctcagaatcaagggcgctctctacaagtagcaacttaggcagtcagtaccaatgcgaaaacggcgttagcgggccatcacaggatctgttgcccccgccaaacccctatccactcccccaagaacatagccagatttaccactgcacaaagcgcaaagaagaggaatgttctacaactgatcacccgtacaaaaaaccatacatggagacgagccctagtgaagaagatagcttctacaggtctagttacccacagcagcagggactgggcgccagttatcgaactgaatccgctcaacgccaggcatgtatgtatgcttctagcgcccccccttctgaaccagttccaagtctggaggatatcagctgcaatacctggccctcaatgcccagctactcctcgtgcacagtcactacagttcaacccatggaccggctcccctatcagcacttttctgcccactttacaagtggacctctcgtgcctagattggcaggcatggctaaccacggaagcccacaactgggcgagggtatgttccagcaccagaccagtgtcgcacatcagcctgtggtacggcagtgcggccctcagactggactgctccacaataggcatttcctcgaaaaggaacgggaacggggagagagagagaggcgccgggaaacagtagccaaaagaaccccacgcacacgctttttcatctcaccaaatgtacacatctgtacacaggggcggtggatgcttatttag

SEQ ID NO: 208198 - DNA, 1050 bp, synthetic construct
  misc_feature 1..1050: note = Description of Artificial Sequence: Synthetic coding sequence
  source 1..1050: mol_type = other DNA
atggccgacgccgacgagggcttcggcctggcccacacccccctggagccagatgctaaggatctgccatgcgactcaaaacctgaatcagcactcggcgcccctagcaagtcaccttccagcccgcaggctgcctttacccagcagggaatggagggtatcaaggtttttctgcacgagcgtgaactctggctgaaatttcatgaggtgggcaccgaaatgatcattaccaaggctggccgaagaatgtttccaagctataaagtgaaggtgacaggtctcaaccctaagacaaagtacatcttgctcatggacattgtccctgcagacgaccaccgttacaaattcgctgataacaagtggagcgttacaggtaaggctgagccagccatgccgggtcgcctgtacgttcacccggacagtcctgccaccggcgcccactggatgaggcaactggttagtttccaaaaactgaaacttactaataaccatcttgacccgttcggtcacatcatcctcaattctatgcacaaatatcagccgaggctgcacatcgttaaggctgacgagaataatgggtttggttcaaagaatactgccttctgcacgcatgtgttcccagaaaccgcatttatcgcagtgacctcctaccagaaccacaagattacccaactgaagatcgaaaataatcccttcgcgaaaggctttagggggagtgacgatatggaattgcaccggatgagcaggatgcagagcaaagagtatccagtggtgcctcgcagtactgtcagacagaaagtggcgagtaaccattccccattctcctctgagtctcgagctctcagcacctcctctaatctgggtagtcagtatcagtgtgagaatggggtttctggcccctcacaggaccttcttccaccacccaatccctacccccttccacaggagcacagccaaatctatcactgcacaaagagaaagggggaatgtgaccatccctggagcatctgctttctttcctacctgttcctgtctctcgggtggggctag

SEQ ID NO: 208199 - DNA, 1311 bp, synthetic construct
  misc_feature 1..1311: note = Description of Artificial Sequence: Synthetic coding sequence
  source 1..1311: mol_type = other DNA
atgtaccacccccgggagctgtaccccagcctgggcgccggctacagactggggcccgcccagcccggggccgacagttccttcccacccgccctggccgagggataccgataccccgagttagacactcccaaacttgactgttttttatccggaatggaggcagcccccagaacgctggctgcgcacccaccgttgccactcctgcctcctgccatgggcacggagccagctccatctgcccctgaagctctgcattctctgccaggtgtgagcctgtccctggaaaaccgggaattgtggaaggagttctcttccgtcgggaccgagatgataatcacaaaagccgggagacggatgtttccggcatgcagagtctccgtcaccggactggatccagaagccagatacctgttcctactggatgtgataccggttgacggcgcaagatatcgttggcagggccgcagatgggaaccgtctggaaaagcagagccgcgtctgccagacagggtgtatattcaccccgactccccagccactggggcacactggatgagacaaccggtctctttccaccgcgttaaactaacaaactccacgctggacccccatggacacctgatcctgcattccatgcataagtaccagccccgtatccatctcgtgagggcggcccaactgtgttcacagcactggggaggcatggcgagctttcggtttccagagacaacgtttatttccgtgactgcctatcaaaatccccaaatcacccagctgaagatcgcggcaaacccatttgccaagggttttcgcgagaatggtcgaaactgcaagcgcgaacgcgacgcgcgggttaaaaggaagttgcgaggccctgaaccagctgccaccgaagcctacggctcgggcgataccccaggcggtccttgcgattctactctcggtggggatataagggagtcagacccagagcaagccccggcccctggggaagctacagccgctccagcccctctgtgcggcggacccagtgctgaagcttatcttctccatccagccgctttccacggagctccttctcatttgcctacaaggagcccatcattcccagaggcccctgactctgggagatcggcaccctattccgccgcctttctggagctgccacacggctctggaggaagtggataccctgccgccccgcccgccgtgccttttgctccacactttctccaagggggtccctttccactcccatacactgctcccggtggatacctggatgttggaagcaaaccaatgtactag

SEQ ID NO: 208200 - DNA, 1311 bp, synthetic construct
  misc_feature 1..1311: note = Description of Artificial Sequence: Synthetic coding sequence
  source 1..1311: mol_type = other DNA
atgtaccacccccgggagctgtaccccagcctgggcgccggctaccgtcttggtcctgcccagccaggcgctgatagcagctttcctccggctttggccgaggggtaccggtaccctgagctcgacacccccaaactggactgttttctttccggaatggaggctgcccctagaacacttgcagcccacccccctctaccactcctgcctcctgccatgggcacagagccggcacctagtgcccccgaggcccttcatagtctaccaggcgtgtcgctcagtctagagaatcgcgaactgtggaaggagttcagcagcgtgggcaccgagatgatcatcaccaaggccggcaggagaatgttcccagcctgcagagtcagcgtgaccggcctggacccagaagctagatatttgtttctgcttgacgtgattccagttgacggagcacggtatcgatggcagggcaggagatgggagccaagcggaaaagccgagccacgcctgccggatcgcgtatatatacatcccgactcgccagctacgggagcccactggatgcggcagcccgtgtcttttcaccgggttaagcttacaaattccactctggatccgcatgggcatttaattttgcattctatgcacaagtaccagcctagaattcacctggttagagccgcccagttatgttcacagcattggggggggatggccagcttcagattcccagaaacgacgtttatctccgtcaccgcctaccagaatccgcagatcacccagttaaagattgccgccaacccctttgcaaaggggttccgtgaaaacggccggaactgtaagagagagagagatgcgagagtaaagcgtaaactgcgaggacccgaaccggctgctactgaagcctacgggtctggggacacaccaggcggaccatgcgactccactctcggtggagacattagggagagtgaccccgaacaagcaccggcccctggagaggccacggccgcaccagcaccgctgtgtggaggcccatctgctgaagcgtacctactgcacccagctgcatttcacggtgccccctcccacctgccaacaagatctccaagcttccccgaggcaccggactcagggcgaagcgctccttactcagccgcctttcttgagcttcctcacgggtccgggggatcagggtaccccgccgcccctcctgcagtgcccttcgcgccacacttcctgcaaggcggaccattccccctgccctataccgctcccgggggttacctggacgtgggatcgaaacctatgtattag

SEQ ID NO: 208201 - DNA, 888 bp, synthetic construct
  misc_feature 1..888: note = Description of Artificial Sequence: Synthetic coding sequence
  source 1..888: mol_type = other DNA
atgtaccacccccgggagctgtaccccagcctgggcgccggctaccggttgggtccggcacagcccggcgccgatagctcttttccccctgcgctagcggaagggtaccgctaccccgagttagacactcctaagctggattgctttttgagcgggatggaggccgccccaaggactttagccgcgcaccccccactgccactgctgcctcccgctatgggcacggagcctgctccttccgcccccgaggcactacacagccttccgggcgtgagtctgtcacttgaaaaccgggaattgtggaaagagttcagctcagtggggaccgaaatgatcataaccaaagctggccggcgtatgtttccagcttgccgcgtgagcgttaccggactcgatcccgaggcacgatatctgtttctgttggacgtgattccagtagatggggcaaggtaccgttggcagggccgaagatgggaaccctctgggaaggcagagccaagactgcctgatagagtgtacatccacccagattcccctgccaccggggcgcactggatgaggcaaccagtttccttccatagggtcaaactgacgaatagtaccctagacccgcatggtcacctaatcctgcatagtatgcacaaataccagcctcggatccacctggtgagggcagctcagctctgcagccagcattggggggggatggcctcttttcgctttccagagacaacttttatctcagttacggcgtatcagaacccacagatcacccagttaaagatcgctgctaacccatttgcaaaaggattccgggagaacggcaggaattgtaagcggtgggagctgttcatccacttattcatgcatagcacgaatgtttattag

SEQ ID NO: 208202 - DNA, 1974 bp, synthetic construct
  misc_feature 1..1974: note = Description of Artificial Sequence: Synthetic coding sequence
  source 1..1974: mol_type = other DNA
atggagatggagaccaccgagcccgagcccgactgcgtggtgcagccacctagtcccccggacgacttctcctgccagatgagattgagcgagaaaattacacctctgaaaacttgctttaagaagaaggatcagaagaggctaggaaccggaaccttgcgctcgttacgtcctattttgaatacactcctggagagtggaagtctggacggggtgtttcgctcacggaaccagtccaccgacgagaatagtttgcacgagccaatgatgaagaaggccatggaaatcaacagctcatgtcccccagcggaaaataatatgagtgtgctcatccccgatcgcacgaacgtgggcgaccaaatcccagaggctcatccgtctacagaggctcccgaacgggtggttcctattcaagatcatagcttcccttccgaaactctgtcggggactgtggccgacagcaccccagctcattttcagacagacctattgcatcccgtctcctcagacgttccgacaagtcctgattgcctggataaagtgatcgactacgttccgggcatctttcaggagaatagttttacaatccaatacattctcgacacgagcgataaattatccactgaactcttccaagacaagtccgaggaggcctctctggatctggtgttcgagctcgtgaatcagctccagtaccatacccaccaggaaaatggaatcgaaatatgcatggacttcttacaaggaacctgtatctacggtcgagactgtctgaagcatcacactgtgctgccctaccactggcagatcaaacgcacaaccacacagaaatggcagtctgtcttcaatgactcccaggaacacctagaaagattttattgcaaccctgaaaatgacagaatgcgcatgaagtatggcggacaggaattttgggccgatctcaacgccatgaacgtctacgaaaccacagagttcgaccagctcaggcgactttccaccccaccatcctcaaatgtgaacagtatctaccacacagtctggaagttcttctgtcgcgaccatttcggctggcgcgagtatccagaaagcgttatccggctcattgaagaagccaatagtcgcgggctgaaagaggtgaggtttatgatgtggaacaaccattatatcctacacaactcattctttaggcgcgagatcaaacggagacccctgtttcgatcctgctttatcctgctcccatatctgcaaaccttaggaggggtccccacccaagctcccccacccctagaagcaacaagttccagtcaaatcatttgtcccgacggagtcacttccgcaaatttctaccccgaaacttgggtctacatgcatccatctcaggatttcatacaggtcccagtttcagctgaggataaaagttacagaatcatctataacctgtttcataaaactgttcctgaatttaagtaccgcatacttcagatcttgagagtccagaatcagtttctgtgggaaaagtataaacgcaagaaagagtacatgaaccgcaagatgtttgggcgggataggattatcaatgagcgccacctgtttcacggcaccagtcaagatgttgtcgacggaatttgtaagcataactttgacccccgcgtctgtggaaagcacgcaaccatgtttggacaaggttcttacttcgctaaaaaagcctcctacagtcacaacttttcaaaaaaatcaagcaagggcgtgcactttatgttcctggctaaggtgctgacagggcgatacacaatgggcagtcacggcatgagacgccctcccccagtgaaccccggatctgttacgtcagacctctacgacagctgtgtagataattttttcgaaccccagatctttgtgatttttaatgacgaccaatcttacccctattttgtcattcagtacgaagaggtatccaacaccgtgtcaatttag

SEQ ID NO: 208203 - DNA, 1974 bp, synthetic construct
  misc_feature 1..1974: note = Description of Artificial Sequence: Synthetic coding sequence
  source 1..1974: mol_type = other DNA
atggagatggagaccaccgagcccgagcccgactgcgtggtgcagcctccgagccctcctgacgacttttcgtgtcaaatgcggttgtctgagaagattactcccctgaaaacctgctttaagaagaaggatcagaagaggctgggaaccgggactctgaggtccttgagaccaatcctgaatacactgttagagagtggttccctggatggcgtgttcaggagtcggaatcaaagcacagacgaaaactctttgcacgaacccatgatgaaaaaggctatggagatcaacagttcctgtccccccgctgagaataatatgtccgtgttgatacccgacaggaccaatgtgggcgaccagatccctgaggctcatccttctaccgaagctccagagcgggttgtacctatccaggaccactccttcccttccgagacactatccgggacagtggccgacagtaccccagcacacttccagactgacctgctccacccagtttctagcgatgtgcccaccagtcccgattgcttggataaagtgatcgactacgtgcccggtatcttccaggagaacagcttcacgatccagtatatcctagatacatcggataagctcagtacggaactcttccaggataagtccgaagaagccagcctggatttggtgtttgagctcgtgaatcagttgcaatatcacacacaccaagagaacggcatcgaaatttgcatggacttcctgcagggaacttgtatctacgggagagattgcctgaagcatcacaccgtcctgccgtatcactggcaaattaagcggaccactacccagaaatggcagagcgtctttaacgacagtcaggaacatctcgagcgcttttattgcaatcccgagaacgacagaatgcgaatgaagtacggtggacaggagttctgggctgacttgaatgctatgaacgtgtacgaaacaaccgagtttgatcagctgcgacgcctcagtacacccccttctagcaatgtgaactccatctaccatacggtctggaagtttttctgcagagaccacttcggctggagggagtaccctgagtcagtgatacggctgatagaagaggccaattctcgggggctgaaagaggtgcggtttatgatgtggaataatcattacatcctgcacaattccttcttccgtagggaaatcaaaaggcggcccctcttccgttcctgttttattctgttgccttacctccagaccctgggcggggtgcccacccaggcccctcctccactggaagccacgtcgtcctcccaaatcatttgccctgacggggtgacaagcgccaacttttatccagaaacctgggtatatatgcatcccagccaggattttatccaggtgccggtatccgctgaagacaaatcctaccgcatcatctataatctgtttcacaagaccgtgcccgaatttaaataccgaatcttgcaaattctgcgggtgcaaaatcaattcctctgggagaaatataagcgcaagaaggagtacatgaaccgaaagatgttcggccgcgatcgcatcatcaacgagaggcaccttttccacggtacgtctcaggacgtggtggacgggatttgtaaacacaacttcgacccccgggtgtgcggtaaacatgccacgatgtttgggcaaggctcttatttcgcgaagaaagcctcctactctcataactttagtaagaagtcatcaaagggggttcattttatgtttctggctaaggttttaaccgggcgctacactatgggcagtcacggaatgcgacgcccaccacctgttaaccctgggagtgttacgtctgatctctacgactcctgtgtggataatttcttcgagcctcagattttcgtgatttttaacgatgaccagtcatatccttacttcgtcatccaatacgaggaggtgagcaacacagtgtctatatag

SEQ ID NO: 208204 - DNA, 1521 bp, synthetic construct
  misc_feature 1..1521: note = Description of Artificial Sequence: Synthetic coding sequence
  source 1..1521: mol_type = other DNA
atggagatggagaccaccgagcccgagcccgactgcgtggtgcagcccccaagccctcctgacgacttctcctgtcagatgagacttagcgagaagattaccccgttgaaaacatgttttaagaaaaaggatcaaaaaagactagggaccggaactctgaggagtctgaggcccattctgaataccctgctggaaagtggatccctggatggggtgttccgatcaagaaatcagagcactgatgagaacagccttcacgagccaatgatgaaaaaggccatggagatcaatagcagctgtcctccagccgagaacaacatgagtgttctcattcccgaccggactaacgtgggcgaccaaatccccgaggctcatcccagcactgaagccccagagcgcgtggtgcctatccaagaccactcattccccagcgagaccctgtcaggtaccgtcgcagactcaaccccagcccacttccagaccgatctactgcacccggtaagctcagatgtcccgaccagccctgactgtcttgacaaagtgattgactacgtcccaggcatctttcaggagaactcattcacgattcaatacatactggacaccagcgataagctttccaccgaattgttccaggataaatctgaggaagcgagcttggatctggtgttcgaactggtcaaccagctgcagtatcacacacatcaggagaatgggattgaaatctgcatggacttcctccagggaacctgcatatacggccgggattgtcttaagcaccacacagtgctgccttatcattggcagataaagcggactacaactcagaagtggcagagtgtcttcaatgatagccaggagcacctggagcgcttttactgcaatcccgagaacgataggatgagaatgaagtacggcggacaggaattttgggcagacctaaatgccatgaatgtctacgagaccactgagtttgaccaattacggcgtctgtcaacgccgccatcttctaatgtgaattcaatataccacaccgtctggaagttcttctgccgtgaccactttggctggcgcgaataccctgaaagcgtgattcgcctgattgaagaggcaaattctcgcggactgaaagaagttcgctttatgatgtggaataaccattacatcctgcataattcgttctttcggcgggagattaaacgtcgcccgcttttccgctcgtgtttcattctgttgccctacctacagaccctgggcggggttcccacccaggctcctccgcctctggaagccactagctcaagtcagattatctgtcccgacggggtcacatccgccaacttttatcccgaaacatgggtgtatatgcacccctcccaagacttcatacaggttcccgtaagtgcggaggacaaatcatacagaattatatacaatcttttccataaaactgttcccgaattcaaatatcgtatcttgcagatcctgcgggtgcagaaccagtttctgtgggagaaatag

SEQ ID NO: 208205 - DNA, 1965 bp, synthetic construct
  misc_feature 1..1965: note = Description of Artificial Sequence: Synthetic coding sequence
  source 1..1965: mol_type = other DNA
atggagatggagaccaccgagcccgagcccgactgcgtggtgcagccgccatccccccctgacgatttctcctgccagatgagactgtcagagaagatcacccctctgaagacatgcttcaagaaaaaggatcagaagcgtttgggtaccggcactctgcgcagcctcaggcccatcctgaacacgctcttggagtccggctccctggacggggtgttccgatctagaaatcaatcaaccgatgagaactccctgcacgagcctatgatgaagaaggcaatggaaataaatagtagctgtcccccagcagagaataacatgtctgtgttaattcctgatcgtaccaacgtaggcgaccagattcccgaggcccacccttctactgaggctcccgagagagtcgtacccatccaagaccatagctttcctagcgaaactctgagcggcaccgtggcagattcaaccccagctcatttccaaaccgacctcctccaccctgttagttccgatgtccccacgtctcctgactgtttggacaaagtgatcgattatgtgcctggcatcttccaggagaattcattcacgatccagtatatcctagacacttcggataaactgagcactgaactctttcaggataagtccgaggaggccagtctggacctggtcttcgagctggtgaatcagctacaatatcatacccaccaagaaaacgggattgaaatttgcatggacttcctccagggcacatgcatttacggccgagactgcctcaagcaccataccgtgctgccttaccattggcagatcaagcgcaccacaacacaaaagtggcaatccgtcttcaacgatagtcaggaacacctggagcgcttttattgtaaccctgaaaatgacagaatgcggatgaagtacgggggacaggaattctgggcagatttgaacgccatgaacgtatacgagaccacagagttcgaccagctgaggcggttaagcactccacctagttctaacgtaaactcaatatatcacacagtctggaaatttttctgccgagaccactttggctggagagaatatcctgaatcagtgattcggctaattgaagaagccaatagtagaggcctgaaggaggttaggtttatgatgtggaataatcattacattttacataatagcttcttcaggcgggagattaaacgccgccccctgttccggtcctgcttcattttgctcccatatctccagacattagggggagtcccaacccaggctcctcctccgctagaagcaacatccagctcacagattatttgcccagatggtgtcacatcagcaaacttctatcctgagacttgggtatatatgcacccttcacaggatttcatccaggttcctgttagcgcggaagataagtcgtaccgcataatttataatctgttccacaagaccgtgccagaatttaagtacaggatactgcaaatcctgagggtgcagaaccagttcctttgggaaaaatacaaaagaaaaaaggaatacatgaataggaagatgttcggacgcgatcgcatcatcaacgagagacatttatttcacggaacctctcaggatgtggtggatgggatatgtaaacacaactttgacccccgagtgtgtggcaagcacgcaaccatgttcggccagggcagttatttcgccaaaaaagcttcatactcacataacttcagcaaaaagagcagtaagggggtgcatttcatgttcctggctaaggtgctgaccggccgctacactatggggtcccatggaatgcggcgccccccaccagtcaaccctgggagcgtaacaagcgatttgtacgactcttgtgtcgataacttctttgagcctcaaatctttgttatctttaatgacgaccagtcatacccatactttgttattcagtacgaggaggtatcaaatacttag

SEQ ID NO: 208206 - DNA, 1974 bp, synthetic construct
  misc_feature 1..1974: note = Description of Artificial Sequence: Synthetic coding sequence
  source 1..1974: mol_type = other DNA
atggagatggagaccaccgagcccgagcccgactgcgtggtgcagcctccttcacctcccgatgacttctcctgtcagatgcgcctctccgagaaaatcaccccacttaagacctgtttcaagaagaaagaccagaaacgattaggaacagggacgttacgcagccttcgcccgatactcaacactctgctggagtcaggctcgctggatggagtgtttcgatccagaaatcaatccactgacgaaaacagccttcacgaaccaatgatgaagaaagccatggagataaactccagttgcccccccgcagagaataatatgagtgttctcatcccagacagaacaaatgttggcgaccaaatcccagaagcccacccgagtacggaggctcctgagcgagtagtaccaattcaggaccactcgtttccttctgaaacactgtctggcaccgtggcagatagcacccccgcacatttccagaccgatctactgcaccctgtctcgagtgatgtgcccacttctccggactgcctcgacaaggtgatagattacgttcctggtattttccaggagaactccttcactatccaatacattttggacacttctgacaagctctctacagagttgttccaggacaaatcagaagaggctagtttggacctcgtgtttgaactcgtgaatcagctccaataccatactcatcaggagaatgggatagaaatctgtatggactttctgcaggggacatgtatttacgggagagactgcctcaagcatcacaccgtgcttccataccattggcaaatcaagcgaacgactacgcagaagtggcagagtgtgttcaatgacagccaggagcatctcgaacgtttctattgcaatccagaaaacgatcggatgaggatgaagtacggcggacaggagttctgggccgatcttaatgccatgaatgtctacgagacgaccgaattcgaccagctgaggcgcctgtccactcctccctcttccaatgtgaacagtatctatcatactgtttggaagttcttctgtagagaccattttgggtggagggagtaccctgaaagcgttattagacttattgaagaagcaaactctcgcggtctgaaagaagtgcgcttcatgatgtggaataaccactatatactgcataactccttttttcggcgagagatcaaaagaaggccactctttcgtagctgtttcatcctcctgccatacctccaaactttaggcggcgtgccgactcaggcacctccacctctggaggccacaagcagcagccagatcatttgtcctgatggcgtgacaagcgcaaacttctatccagagacctgggtgtatatgcacccctcgcaggatttcattcaagtgcccgtttctgctgaggataagtcgtacagaatcatctacaatctgttccataaaactgtcccagaatttaagtatcgcatcctccaaatcttaagggttcaaaaccagtttctttgggagaaatacaaacgaaagaaggaatatatgaatcgaaaaatgtttggcagggacaggatcataaacgagcggcatctctttcacggtacatcccaggatgtagttgatgggatatgcaagcacaacttcgacccacgcgtttgcggcaagcatgcaaccatgtttggccaggggtcttacttcgcgaagaaggcgtcatactcccacaactttagcaagaaaagctcgaagggcgtacactttatgttcttggcgaaagtattaacagggaggtatacaatgggctctcacggcatgcgaaggccaccacccgtcaacccagggtctgtaactagtgacttgtacgattcatgcgttgataacttcttcgagccccagattttcgtgatttttaatgacgatcagagttacccatacttcgttatccagtacgaggaagtatcaaacacggttagcatttag

SEQ ID NO: 208207 - DNA, 1974 bp, synthetic construct
  misc_feature 1..1974: note = Description of Artificial Sequence: Synthetic coding sequence
  source 1..1974: mol_type = other DNA
atggagatggagaccaccgagcccgagcccgactgcgtggtgcagcccccatctccaccagatgatttcagttgtcagatgaggctttctgagaagataacgccgctgaagacctgcttcaaaaagaaggaccagaaaagattgggcaccggcactcttagatccctgaggccgatactgaacactttgctggaatccggaagcctggacggcgtgtttagatccagaaaccaatctactgatgagaattccctgcatgaaccaatgatgaagaaggccatggaaattaattcgtcatgtcctccggctgaaaacaacatgtctgtcttgataccggatcggacaaacgttggagaccagatcccggaggcccacccctccactgaggcgcctgagcgtgttgtgcccatccaggatcattctttccctagcgagacactttctggcaccgtggcggacagcacaccagcgcacttccagaccgacctactgcaccctgtttcgtccgacgtgccgacaagccctgactgtcttgacaaggtaattgattacgtgcctgggatctttcaagagaacagcttcacaattcaatacatcttggatactagcgacaaactatctactgagctctttcaggataagtcagaggaggcctcactggatctggtttttgagttggtgaaccagctgcagtaccatacccatcaagagaatgggatcgaaatctgtatggacttcctgcagggaacatgcatctacggcagggactgcctgaaacaccatacagtgctgccataccactggcaaataaagcgaaccacgacacagaagtggcaaagtgtattcaacgactcacaggagcacctggaaagattctattgtaatcctgagaatgatcgcatgcggatgaaatacggcgggcaggagttctgggctgacctgaatgcaatgaacgtgtatgaaacaaccgagtttgaccagctcagacgactctctacacccccttcttctaacgtgaattctatctaccataccgtttggaagtttttttgcagggaccacttcggctggcgtgaatatccggagagcgtgattaggctcattgaggaggccaacagccgagggctgaaagaggtgagattcatgatgtggaacaaccactacatactgcacaacagcttctttagacgcgagatcaagaggcggcctctgttccgctcctgtttcatcctgctaccgtacttacagaccttggggggagtgcccactcaagcacccccccctcttgaagctacatcttctagtcagatcatttgccccgatggagttacaagcgccaacttttacccagagacctgggtctacatgcatccctcacaggacttcatccaagttccagtgtccgcggaagacaagtcttaccgaataatctacaacctctttcataaaaccgtgccggaatttaagtatagaattttgcagatattgcgtgtgcagaaccagttcctctgggagaaatataaaaggaagaaagagtacatgaaccgcaagatgttcgggcgcgataggattatcaacgagagacatctgtttcacggcacctcacaggacgtcgtagatggtatttgcaaacacaacttcgatccccgggtgtgcgggaaacacgcaactatgttcggccagggaagctactttgccaagaaggcgtcatacagtcataacttttcgaagaaaagctctaagggcgtgcacttcatgtttctcgcaaaggtgttgaccggcagatacacgatgggcagtcatggaatgaggaggccccctccggtgaaccccggttccgtaacctccgatttatatgacagttgtgtggataacttttttgaaccacagatctttgtgatcttcaacgatgaccagtcctacccatacttcgtgattcagtacgaggaggtatcaaacactgtttctatctag

SEQ ID NO: 208208 - DNA, 1662 bp, synthetic construct
  misc_feature 1..1662: note = Description of Artificial Sequence: Synthetic coding sequence
  source 1..1662: mol_type = other DNA
atgggcgccctggagatgcaggacgaggaggaccggatcgaggccctcaaacaggttgctgacaagcttcctagacctaatctattgctgctgaagcaccttgtgtacgtcctgcacctcatttcaaagaacagcgaagtcaatcgcatggactcatctaatctggcaatctgtattggtcctaacatgctgacactggaaaacgaccagagcttgtcatttgaggcacagaaggatctgaataacaaggtgaaaaccctagtggagttcctgatcgacaattgctttgaaatctttggtgagaatatcccggtacatagctctatcacctctgatgactccctcgagcataccgatagcagcgacgtgagcactctgcagaatgatagcgcttatgacagcaacgaccccgacgtagagagtaatagttctagtggcatctcttcaccctccagacaaccccaggtgcccatggccacagctgccggccttgattcagctggaccccaggatgccagagaagtgtctcccgaacctatagtttctacggtggcccggttgaaatcctccctggcgcaacccgatcggcggtattcagaaccaagcatgccttccagtcaggaatgcctggagtccagagtgaccaaccagactctcactaagtctgaaggcgactttccagtgccccgggtcgggtctcgactggagtccgaagaggccgaagatcccttccctgaggaggtatttccagccgtgcagggtaagacaaaacgacctgtggacctgaagattaagaatctggcccccgggtcggtgttgcccagggcactggttttaaaagcattcagtagttccagccttgacgccagttctgattcttcccccgtcgcctccccctcctccccaaagaggaactttttttcccggcatcagagctttacaacgaaaaccgagaaggggaaacctagcagggagattaagaagcactcgatgtcctttacctttgcgccccataaaaaggtcctgaccaaaaacttgtccgcagggagcggcaaatctcaggactttactcgggatcatgtgcccaggggcgtgcggaaggagtctcagttggcaggtagaattgtccaggagaatgggtgtgaaacccataaccagaccgccagggggttctgcctgcgcccacatgcactcagcgtagatgatgtttttcagggcgcggactgggagcgccccggatcccctccttcttacgaggaggccatgcagggcccagctgctaggctagtggcgtcagagagccagaccgtcgggtccatgactgtgggcagcatgcgggctcgcatgctcgaggcacattgtcttctgccacctctgccaccggctcaccacgtcgaagattcccgccataggggtagcaaagagccactgccggggcacggactcagcccgctgcccgaacgctggaagcaatcgaggaccgtgcatgccagcggggactctctcggccacgtgtccgggccagggcgtcccgaattgctaccattgaggactgttagcgagtccgtccagagaaataaacgagactgcctggttcggcgatgttcccagcccgtgtttgaggccgaccagttccaatatgctaaagagtcctacatctag

SEQ ID NO: 208209 - DNA, 801 bp, synthetic construct
  misc_feature 1..801: note = Description of Artificial Sequence: Synthetic coding sequence
  source 1..801: mol_type = other DNA
atgaagctgcggagcagccacaacgccagcaagaccctgaacgccaacaatatggaaacactgatcgaatgccagtctgagggagatatcaaggagcatcccctcttagctagttgtgagtccgaggattcaatttgtcagttgattgaagtgaaaaagcgcaagaaagttctttcctggccattcctcatgcgtaggctgagtccagcctcagatttcagcggcgcactcgaaacagacttaaaggcttcactctttgatcagcctttgtctattatctgtggcgattccgatacgctccctaggccaatacaggacattcttacaatcctctgcctcaaggggccttccactgagggtattttcagaagggccgccaacgagaaagcccgaaaagagctcaaggaagaactgaacagcggggacgccgtcgacctggaacgcctgccagtccacctcctggcggtggtgtttaaggacttcctgaggagcatcccccgcaagctgctgagttccgacctgtttgaagaatggatgggcgcgctggaaatgcaggacgaggaagatcgtatagaggctttaaaacaggtagccgacaagcttccgcgccctaatctgttgctactgaaacaccttgtttatgtcctacatctgattagcaaaaacagcgaagtgaacaggatggattcttccaatttagctatctgcatcggccccaacatgctgacattggaaaatgaccagtctctgagttttgaagcacagaaagaccttaacaacaaagtgtgctctgcctattag

SEQ ID NO: 208210 - DNA, 2196 bp, synthetic construct
  misc_feature 1..2196: note = Description of Artificial Sequence: Synthetic coding sequence
  source 1..2196: mol_type = other DNA
atgaagctgcggagcagccacaacgccagcaagaccctgaacgccaataacatggaaacactgatcgagtgccagtccgaaggcgacattaaagagcatcctctgctcgcttcttgtgagtcggaagacagcatatgccagctgatcgaggtcaagaagcggaaaaaagtgctatcctggcctttccttatgcgaagactgtcccctgcaagcgattttagtggcgccctcgaaacagacctcaaggctagcctgtttgatcaaccgctgagcataatatgcggggattcagacacactgcccaggcctattcaggatattctgactatcttgtgcctgaagggcccatccactgaggggattttccgccgcgctgccaatgaaaaggccagaaaggaactcaaagaggagttaaatagtggtgatgctgtggacctggagaggctgcccgtgcacctcctggccgtcgtctttaaagatttcctgcggagtatccccaggaaactgctatctagtgatctgtttgaagagtggatgggagctttggagatgcaggatgaagaagaccgcatagaagccctgaagcaggtcgccgacaagctgccgcgccccaatctcttacttctgaagcaccttgtttacgtgctgcatctgatcagcaagaactccgaggttaatcgaatggactcaagtaacttggctatatgtataggtcccaatatgcttaccctcgagaatgaccagagcttaagcttcgaggcccagaaggatctgaacaataaagttaagactctggttgaatttctgatcgataactgcttcgagatcttcggcgagaacatacccgttcatagctctattacaagcgatgactcccttgaacacaccgattccagcgacgtttccactttgcagaacgattccgcgtatgatagcaacgatcctgacgtggaaagtaattctagttcgggcatcagtagcccttcgaggcaaccacaggtgccgatggccaccgctgccggactggattctgccggaccacaagatgcacgggaggtgtcacccgagccaattgtcagtactgttgctcgcctgaaatcttccttggctcaaccagaccggcggtacagtgagccatccatgccgagttcccaggagtgtctggaatcaagagtgaccaaccaaaccctgactaaatctgagggggattttcctgtaccgagggtgggatcgagactggaaagtgaggaagccgaagacccatttccagaagaagtgtttcccgcagtccaaggtaagaccaaacggcctgtggaccttaagattaaaaatctagctcctgggtctgtgttgcctcgtgcccttgtgcttaaggctttcagcagtagctcactggatgctagctcagacagctctcccgtggcttctccctcaagtcccaagcgcaacttcttctctcggcaccagtcctttacgacaaaaacagagaaggggaagcctagtagggagatcaaaaagcattccatgagctttaccttcgccccccacaagaaggtgctcaccaagaacctctccgccggatcaggaaagtcccaggattttacacgagaccatgtgccacgcggagtgcgcaaagagtcacagctggcgggaaggattgtgcaggagaacggctgcgaaacccacaaccagacagccagaggcttttgcctccggccccatgccctgtcagtggatgacgtgttccaaggtgccgattgggagagacccggctcaccgccttcttatgaggaggccatgcagggtcccgcagcacgtctggtggcaagcgagtcccaaacagtcgggtcaatgaccgtaggctccatgagggccaggatgcttgaggcacactgcctgctgccaccacttcctcctgcacatcatgtggaagactcgcgccacagggggtctaaggaacctcttcctggacacggtctgtctccacttcccgaaagatggaagcagagcaggaccgtgcacgctagtggcgactccttaggccacgtgagtgggccggggcgtcctgagttactgcctctgcggacagtgtcagagagcgtacagaggaacaaacgggactgcctagttagacgctgcagccagcctgttttcgaggccgaccagtttcagtatgccaaggaatcctatatctag

SEQ ID NO: 208211 - DNA, 828 bp, synthetic construct
  misc_feature 1..828: note = Description of Artificial Sequence: Synthetic coding sequence
  source 1..828: mol_type = other DNA
atggccaccgccgccggcctggacagcgccggcccccaggacgcccgggaagtttctcccgagcctattgtgagcacagtggccagattgaaaagctccctggcccagccagataggaggtatagtgagcctagtatgccttcctctcaggagtgcctagagtcccgagttaccaatcaaacattaacaaagtcagaaggagactttcccgtccccagagtgggttctcggctagagagcgaggaagccgaagacccattccccgaggaagtttttcccgctgtacagggcaaaacgaagcgacctgtcgatctgaagatcaaaaatctggcgcccggtagtgtactgcctagagcactggtcctgaaagcttttagctcgtcgtccttggatgcctcatccgactcatcacccgtggcctcacccagtagcccaaaaagaaacttcttcagcagacatcaatccttcactaccaaaaccgagaaggggaagcccagcagagagatcaagaagcactccatgtcctttacattcgccccccacaagaaggtgctcacaaaaaacctctctgctgggtcaggcaagtcccaagacttcacacgggaccatgtgccacgaggggtgcgaaaggaaagtcagctggctggtaggattgtgcaggagaatggttgcgaaacacacaatcagaccgctcggggtttttgtcttcgacctcatgcactgagtgtggatgatgtcttccaaggggccgactgggagaggccggggtcccccccctcttatgaggaggccatgcaggggccagccgctagaccttggggggcttag

SEQ ID NO: 208212 - DNA, 327 bp, synthetic construct
  misc_feature 1..327: note = Description of Artificial Sequence: Synthetic coding sequence
  source 1..327: mol_type = other DNA
atgacccggaagatcttcaccaacacccgggagcggtggcggcagcaaaacgtgaactccgcctttgcgaaactgcgtaagctcatccctacccacccaccagacaaaaagttaagcaagaacgagactctaaggcttgctatgcgctatatcaattttctcgtaaaagttctgggcgagcagtctctgcagcagacaggcgttgccgcacagggcaatattcttggactgtttccccagggccctcatcttcctggtctcgaggatagaaccctgctggagaactaccaagtgccgagtccaggcccctcccatcacattccatag

SEQ ID NO: 208213 - DNA, 780 bp, synthetic construct
  misc_feature 1..780: note = Description of Artificial Sequence: Synthetic coding sequence
  source 1..780: mol_type = other DNA
atggccagcccccagggcggccagatcgccatcgccatgcggctgaggaaccagcttcagtcagtttataagatggatcccctgcggaatgaagaggaggtgcgtgtgaaaattaaggatctgaacgagcacatcgtctgctgcctctgcgccggctactttgtggacgccacgacgatcactgagtgtctgcacactttttgcaagtcatgcatcgtgaagtatctgcagaccagcaagtattgccctatgtgcaatataaagatccatgaaacgcagccactgctgaatttaaaactcgaccgagtaatgcaggatattgtgtacaaactcgtacccggcctgcaggacagcgaagagaaaaggatccgggagttttaccaaagccgaggcctggatagagttacgcagcctacaggggaggaaccagccttatccaatcttggcctccctttcagtagttttgaccattctaaggcacactactatcgctacgacgaacagctgaatctgtgcctggaaagactgagctctggtaaggataagaataagagcgtgctccagaataaatatgtgagatgctcggtacgggccgaggtgcgtcacctgaggagggttctctgtcataggctaatgctaaatcctcagcacgtgcaactcctcttcgacaacgaggtcttgccggaccacatgaccatgaagcagatttggctatccaggtggtttgggaaacccagcccactgctgctgcaatactccgtgaaagagaaacggcggtag

SEQ ID NO: 208214 - DNA, 876 bp, synthetic construct
  misc_feature 1..876: note = Description of Artificial Sequence: Synthetic coding sequence
  source 1..876: mol_type = other DNA
atggaggcccccgccagcgcccagaccccccacccccacgagcccatatcgtttggaatcgatcagattctgaactcacctgaccaggatagcgcccctgccccccgtgggccagacggcgcctcctaccttgggggacccccagggggtcggcccggggccacctacccctcacttcccgcaagtttcgccggattaggagcaccattcgaggacgcaggcagctacagcgtcaatctgagcctcgctccagctggcgtgatccgggtgccagcacatcgcccactgcccggcgccgtcccgcccccgttaccctcagctttgcctgccatgccaagcgtgccgaccgtgagttcattggggggactcaactttccttggatggaatcctctcgacgtttcgtgaaggacagattcaccgctgccgcagcgctgacaccttttactgtgacccggcggatcggtcacccctaccaaaatagaaccccccccaagcggaaaaagcctagaaccagcttttcccgggtgcagatctgcgagctggagaaacgcttccatcggcagaagtacctggcctcagccgaacgtgccgccctggctaagagcctcaagatgacggacgctcaggtcaaaacttggttccagaacaggcgaacaaagtggcgtagacaaaccgctgaggaaagagaagccgaacggcagcaggctagccgcctcatgttacagttgcagcatgacgctttccagaaaagtctgaatgactcaatacagccggaccccctttgtttgcacaactcttccttgttcgcattgcagaacttgcaaccatgggaagaggactcctccaaggtgccagcggtgacaagcttggtgtag

SEQ ID NO: 208215 - DNA, 312 bp, synthetic construct
  misc_feature 1..312: note = Description of Artificial Sequence: Synthetic coding sequence
  source 1..312: mol_type = other DNA
atggccgagagctggagcggccaggccctgcaggccctgcccgccaccgtgctgggcgccctgggcagcgaatttctgagagagtgggaagcccaggatatgagagtgacactgttcaagctcctgttgctgtggttagtgctctccctgctgggtatccagttggcttggggcttttacggtaataccgttacaggactgtatcatcgcccaggattgggcggacagaacggctctaccccagacggatccacccacttcccaagttgggaaatggccgccaatgagcctctaaagactcaccgcgagtag

SEQ ID NO: 208216 - DNA, 387 bp, synthetic construct
  misc_feature 1..387: note = Description of Artificial Sequence: Synthetic coding sequence
  source 1..387: mol_type = other DNA
atggccagcgaggccagcgtgcggctgggcgtgccccccggccggctgtggattcaacggcccggcatttacgaggatgaagaaggacgcacgtgggtaaccgtggttgtaagatttaacccttcacgacgggaatgggcacgagcctctcagggaagccgatatgagccgagcattacagtgcacttatggcagatggctgtgcacacccgggaactattgtcatccggacagatgcccttctcacagctgccagcagtctggcagctgtacccgggcaggaagtaccgggctgcggattcttcattctgggaaatcgctgaccatggccaaattgacagcatggagcagctggttctgacgtatcagcctgaacgtaaagattag

SEQ ID NO: 208217 - DNA, 387 bp, synthetic construct
  misc_feature 1..387: note = Description of Artificial Sequence: Synthetic coding sequence
  source 1..387: mol_type = other DNA
atggccagcgaggccagcgtgcggctgggcgtgccccccggccggctgtggattcagaggcccgggatatacgaggacgaagaaggaaggacttgggtgacagtcgtggtgcggttcaaccccagtcgtcgagagtgggccagagcttcccaggggagtcgatacgagcctagcattaccgtgcacttatggcagatggcggtgcacacacgggaattactgtccagtggtcaaatgcctttcagccagctgcccgctgtgtggcaactctacccgggaaggaagtatagggccgccgattcatcattttgggaaatcgccgaccacgggcagatcgattccatggaacagctggtgttgacgtaccaacctgaaagaaaagactag

SEQ ID NO: 208218 - DNA, 4776 bp, synthetic construct
  misc_feature 1..4776: note = Description of Artificial Sequence: Synthetic coding sequence
  source 1..4776: mol_type = other DNA
atgggcaacgccgagagccagcacgtggagcacgagttctacggcgagaagcatgcttcgctgggcagaaaacacacatcccgatctctgcgtttgtcgcacaagaccaggcggactagacatgcatcctctggaaaggtcatacacagaaatagtgaagtcagtacccgctcaagcagcacacccagcatcccccagagtctggcagagaatgggctcgagcctttctcacaggatggcacgctggaagactttggatcccctatctgggtagacagagtggatatggggctccgtccggtgagttacaccgactcttctgtgacaccttccgtagatagttcaatcgtgctcaccgcagcgagtgtccagtccatgcctgacactgaggagtctagattatacggcgatgatgctacctacctggccgaaggcggccgcagacagcactcttacacctctaacgggcctacctttatggaaaccgcatccttcaaaaagaaaagaagtaagtcggcggacatctggcgggaagattctctggaattctccttaagcgacctgtctcaggagcacctaacaagcaatgaagagattttgggttccgctgaagaaaaagattgtgaggaggcccgtggcatggaaacaagagccagccccagacagctgtccacttgtcaaagagctaatagtctaggcgacttatacgcccagaagaactctggtgtcaccgccaacggcgggccagggtccaaatttgcagggtactgccgaaaccttgtgtccgatattccgaacctggctaatcacaagatgccccctgcagccgcagaggaaacgcctccttatagcaactataataccctgccctgtcgcaaaagccattgcctctcagaaggagccaccaacccccagatttctcactcaaactcgatgcaaggccgacgcgcaaaaactacccaggatgtgaatgctggcgagggtagtgaattcgccgacagtggcatagagggagcaaccacagacaccgacctgctcagtcggcgaagcaacgcaaccaatagctcctactcaccaactactggaagggcgtttgtgggatctgatagtggttctagttctaccggcgacgctgcgagacaaggagtgtatgaaaacttccgccgggagctggaaatgtccaccactaactccgaatcactcgaagaggctgggagcgcacactccgatgaacaatcatccggtacgctgtcatccccaggccaatcagacatcctcctgaccgctgcacaggggaccgtgcgcaaggcgggggcgctggccgttaagaatttcctggtgcataagaaaaacaagaaagtcgaaagcgccaccagacgaaaatggaagcattattgggtaagcctcaagggatgtaccttattcttctacgagagtgacggaaggagtgggattgatcacaattccatcccgaagcatgccgtgtgggtcgagaactccatcgtccaggctgtgccagaacaccctaagaaggatttcgtgttttgtctgtcaaacagtcttggagatgcatttttgtttcaaaccacatcgcagaccgagttggaaaactggatcaccgccattcactccgcgtgcgccactgccgtcgcgcgtcatcaccacaaggaggacacgcttaggctgctgaaatcagagatcaagaaactcgagcaaaaaatcgatatggacgagaagatgaagaagatgggggagatgcagctttcgtccgtaaccgatagtaagaagaagaagacgattttagatcagatctttgtgtgggagcagaacctggagcagttccaaatggacctgtttcgcttcaggtgttatctagcctccctgcaaggcggcgagttgccgaaccctaagcgcctcttagcattcgcctctcgtccgaccaaggtggcgatgggcagactcggcatcttttctgtttctagctttcacgctctggtggcagcacgcaccggcgagaccggggtacggagacgaacccaggccatgagtagatccgcatctaagagacgtagcaggttctcatcactctggggccttgataccacatcgaagaaaaaacaggggaggccgagtattaaccaagtattcggggaaggaactgaggccgttaagaagtccttggagggcatctttgatgatatcgttcccgatggcaaaagagaaaaagaggtggtgttgccaaatgtgcaccaacacaatccagactgcgatatctgggtgcatgagtattttacacccagttggttctgtttgccaaacaaccaacccgctttgaccgtagtgcggcccggcgacaccgctcgcgatacactcgaactgatatgcaaaacccaccagttggaccactccgcacattatttgcgtctgaagttcttaatcgaaaacaagatgcagctgtatgtgcctcagccagaggaagatatttacgaactattgtataaagagatcgagatttgcccaaaagtgactcagtcaattcacatagagaaatctgacaccgcggctgatacctacggcttttcgctcagtagcgtggaggaagatggcatcagacgtctctacgtaaactccgttaaggagacaggattagccagcaaaaagggtctgaaggcgggggacgaaatcctggagatcaataaccgggccgcggatgctctgaactcttccatgctgaaggactttttatcgcagcccagtctaggactgctggtcaggacttaccctgaactagaggagggagttgagctgctcgagtcacctccgcatcgcgtggatggtccagccgacctcggagaatctcccctggcatttctgacaagtaatccaggccatagtctatgctcagagcaaggatctagcgcagagacggctccggaggagactgaaggccccgacctggaaagctcagatgaaacagatcacagctctaaatcaactgagcaggtggccgcgttctgccgatcattacatgaaatgaatcccagtgaccagagtccgtcgccccaggatagcaccggcccccagttggccacaatgaggcagctgtccgacgctgacaaactaaggaaagtcatctgcgagctactggaaacggagagaacatacgtgaaagatttgaactgtctgatggaacgctacctgaagccgcttcagaaagaaacatttctcacacaggatgagctagatgtgctcttcggcaatctaactgagatggtggaatttcaggttgagttcttaaagacactggaggacggagtgcggctagtgccagatcttgagaaattggagaaggtggaccaatttaagaaagtactgttctcactcgggggaagcttcctctactatgcagatagattcaagttgtatagtgctttttgcgcctctcatacgaaggtgcccaaggtactggtgaaggctaagaccgataccgcttttaaagcctttctcgacgcccagaaccccaaacagcagcatagttctaccctcgagagttacttaattaagcccatccagcggatcctgaaatatccccttctgctgcgagagctgtttgccctgacggacgctgaatccgaggagcattaccatttggatgtggccattaaaaccatgaataaggtcgcctcacacattaacgaaatgcagaagatccacgaggagtttggcgccgttttcgaccaactgatcgcagagcagactggagaaaaaaaggaggttgccgatctctctatgggcgacctcctcttgcacaccaccgtaatttggctcaacccgcccgcatccctaggaaagtggaagaaagaacctgagctggcagcgttcgtgttcaaaacagcagttgtgttggtctataaagatggttccaagcagaagaaaaaattggtgggatcccatcgtctgtccatctacgaggactgggatccatttcggtttagacatatgatacctacagaagccttacaggtacgggctctcgctagcgccgatgccgaagctaatgctgtctgcgaaatcgtgcatgtgaaatccgaatctgaggggcgccctgaacgggtatttcacttatgttgttcatcacccgaaagtcgcaaagactttcttaaggctgtacattctatcctgagggataagcacaggagacagctgttgaagaccgagtcattacccagctctcagcaatatgtcccgtttgggggtaagcgactgtgtgctctcaagggggcccggccagccatgagcagagccgtgtcagctccaagtaaatccctgggcaggaggcgacgtagactggcacggaaccgcttcacgattgattccgatgcggtcagcgcctctagccctgaaaaggagtctcagcaaccgcccggtgggggagatacagaccgctgggtcgaggagcagttcgacctggcccagtacgaggaacaggacgatattaaggagaccgatatcctctcagacgacgacgaattttgtgaatcagtcaaaggtgcctcggttgaccgggatttgcaggagcgcctgcaggcaactagtatctcccagagagagcgcgggcgcaagacactcgacagccacgcttctaggatggctcaacttaagaaacaggctgctctgtctggaatcaacgggggcttggaaagtgcttcagaagaggtgatttgggtgcggcgagaagatttcgcccccagtaggaaactgaacacggaaatttag

SEQ ID NO: 208219 - DNA, 3216 bp, synthetic construct
  misc_feature 1..3216: note = Description of Artificial Sequence: Synthetic coding sequence
  source 1..3216: mol_type = other DNA
atggagaccgccagcttcaagaagaagcggagcaagagcgccgacatttggcgtgaagactccctcgagttctcactgtcagatctgagccaggagcatcttacgtcaaatgaagagattttgggtagtgctgaagaaaaagactgcgaggaagcaagagggatggagacacgtgcatcaccgagacagctgtcgacttgtcagcgcgctaacagcctgggagatctgtacgctcaaaaaaattccggagtaactgctaacggaggcccaggaagtaagtttgccggttactgcaggaacttggtaagcgacatccctaatctggctaaccacaagatgcctcccgccgcagctgaggagacacccccatactctaactataataccctcccgtgtagaaagagtcactgtctgagcgagggggctacaaacccccagattagccactccaactcgatgcaaggacggcgggccaagacgacacaggacgtcaacgctggggaaggtagtgagttcgccgattccggcattgaaggcgctaccacagacacagatctgctctcacgaagatctaacgccaccaattcttcctatagtcctaccacaggccgcgccttcgtggggtccgatagcggcagcagctcgaccggcgacgcagcccgccagggtgtctatgagaactttcggcgggagctcgagatgtcaaccacaaattctgagagtcttgaagaagccggctctgcgcacagcgacgagcagagctctggcactctttccagccctggacagagcgatattcttttgacggcagcccaaggcacggttagaaaagctggagcgctggcggtgaagaattttttagtgcataagaaaaataagaaggtggagtctgccaccagaaggaagtggaagcactattgggtgagtcttaagggctgtacactcttcttttatgagtccgacggacggagtggaatagaccataacagtattcccaagcatgcagtgtgggtggagaacagtatcgtacaggccgtaccagagcatcccaagaaggacttcgtattttgcctgtcaaattcactgggagacgcatttctgttccaaaccacttcacaaaccgagctggagaattggatcacggccattcactccgcatgtgctacagcagtcgcccgacatcaccataaagaggacacgttgagactgctgaagagtgaaataaaaaagctagagcagaaaattgacatggacgaaaaaatgaagaaaatgggagaaatgcagttatcctctgtcactgactcaaaaaagaagaagacaatactggaccagatctttgtatgggagcagaatctggaacaattccagatggacctgttccgttttaggtgctacctggcgagtctgcagggcggagagctgcccaatcctaaacggttactggccttcgcctcccggcctacaaaagtggctatggggcggttaggaattttctctgtgtctagctttcacgccctagtggccgctcgcactggggagactggggtgagaaggaggacgcaagccatgagtcgctcagctagcaagcgtcggagtagatttagcagtctgtggggccttgacacaacaagcaagaagaagcaaggacggccttcaattaatcaggtgtttggcgaggggacagaggctgtgaagaagtccctcgagggaatcttcgacgacattgtgcccgacggcaaacgagagaaggaagtcgtgctgcctaatgtacaccagcacaaccccgactgcgatatctgggtccatgagtacttcacgccttcctggttttgtctgccaaataaccagcctgcactgacagtggtgcgtcctggagatacggcgagggatacactggaactgatttgtaaaactcatcagctggatcatagcgctcactatctgcgcctgaaattcttgattgagaacaagatgcaactgtatgtgccacagcccgaagaggacatatacgaactgctctacaaggaaattgagatatgccctaaggtgacccagtctatccatatcgaaaaaagcgacacagctgccgatacatatggcttttccctctccagtgtggaggaagatgggataaggagattatatgtgaacagcgtgaaggaaacgggtctggctagcaagaaaggtctgaaagctggagatgagatcctcgagattaacaaccgggctgctgacgctttaaacagctccatgctcaaagacttcctttctcaacctagtctcggcctgctcgttcgaacttatccagaactggaggaaggtgtggagctgttggaatcccccccccatagggtcgacggacctgctgatctgggagagagcccgcttgccttcttaacatcaaatcccggccactccctctgctccgagcagggctccagcgctgagacagccccagaagagactgagggccctgatctggagtctagcgacgaaaccgatcatagcagcaagtctaccgagcaggtagctgcgttttgtaggagcctccatgaaatgaatccatcggaccagtcaccgtctccccaagattctaccggcccacagttggccaccatgcggcagctttctgatgctgacaagttgagaaaagtgatctgcgagttactagagaccgagcgtacttatgtgaaagatctcaactgtctcatggagcggtacctaaagcctctccagaaggaaacctttctgacacaggatgagctcgacgtcctgttcggaaatctaactgaaatggtggaattccaggtggaatttctcaagactcttgaggatggtgtccgactggtacctgatctcgaaaagctggagaaggtggatcagttcaaaaaggtcctttttagtctgggtggctcattcctgtactacgccgatcgattcaaactatatagcgctttctgtgcgcataaaagctctcagggtccaggtgagtcccaggaccggcatggctttcagggtatacttggctgtcctgagcccgaggccgctgccttgatccatgcaggcgtagtgcctcatcaggctcacccagaggatccacaagtgccaacatccgcacagggagcagtgcgccctgataggtgcggtgagcgtggtgcattaccccccggacgaggtcaccaagaccacgaacagggatgccagtcgcaccagtag

SEQ ID NO: 208220 - DNA, 678 bp, synthetic construct
  misc_feature 1..678: note = Description of Artificial Sequence: Synthetic coding sequence
  source 1..678: mol_type = other DNA
atgggcaacgccgagagccagcacgtggagcacgagttctacggcgagaaacacgccagcctggggagaaagcatacctcgcgatccttgcgtcttagtcacaagacaaggagaacacggcatgcgtcctctggcaaggttattcatagaaattccgaggtcagcactaggtctagttccacacccagcatcccacagtcgttggccgagaatgggctcgaacctttcagccaggatggtaccctggaagactttggcagcccaatctgggtggacagggtggacatgggactcaggcccgtgagttacacagactccagtgtgaccccttcagtggatagctctatcgtgcttacagctgctagtgtgcagtccatgcccgacaccgaggagtcgcgtctttacggtgatgatgcaacctacctggctgaaggcgggcgcagacaacacagctacacatctaatggccccactttcatggagacagcttcttttaaaaagaaaaggagcaagagcgccgatatttggcgggaagattcactcgagttctccctgagcgatctgtcacaggagcacctgaccagtaatgaagaaatcctcggctctgcggaggaaaaggactgcgaggaagcccgcggcatggagactcgtgcctccccacggcaactctctacttag

SEQ ID NO: 208221 - DNA, 4596 bp, synthetic construct
  misc_feature 1..4596: note = Description of Artificial Sequence: Synthetic coding sequence
  source 1..4596: mol_type = other DNA
atgggcaacgccgagagccagcacgtggagcacgagttctacggcgaaaagcacgcctcactggggaggaagcacacttctaggagtttgagattgagccataaaaccaggaggacacgacatgcctcctcaggcaaagtcattcacaggaattctgaagtgagcacccgcagtagttcaaccccatccattccacaatcacttgcggagaatgggcttgaaccattttcccaagatggcaccctggaggacttcgggtcacctatttgggtggatagggtggatatgggactacgccccgtgtcttataccgattcttccgtcacccccagcgttgactcatcaattgtcctgacggcagcctctgtccagagcatgccagatacagaggagtcccgcctgtacggagatgacgccacttacctggccgaagggggaaggaggcaacactcttacacgtcaaatggaccaacctttatggaaaccgcgagtttcaaaaaaaagagaagcaagagtgcagacatctggagggaggactctctcgaattctcactttcagatctctcacaagaacacctgactagcaatgaagagatcctgggaagcgccgaggaaaaggactgcgaggaggcgagaggaatggagactcgggcctcgcctagacagctctccacgtgtcagcgggctaatagcttaggcgatctgtatgcacaaaagaactccggagttactgccaacggtggccccggcagtaagtttgctgggtactgtcgtaatcttgtgtcagacatcccaaacctggccaaccacaaaatgccacccgctgccgccgaggagacacccccttacagcaactacaatacactgccctgtcgcaagtcccattgcttgagcgaaggtgccacgaacccccagataagccacagcaactctatgcaggggaggcgcgccaaaacaacacaggatgttaacgccggcgaaggctctgaatttgcagattccgggattgagggcgcaactacggacacagatctcctgtctcggcggtcaaacgctactaacagttcctacagtcccacaacaggcagagcatttgtaggctcagactctgggtctagctccaccggtgatgctgcaagacagggtgtgtacgagaacttccggcgagaactagagatgtcaactactaactcggagagcctggaggaagccgggagcgctcacagtgacgaacagagttcgggtaccttgtctagtcccggacagtctgacatccttctgaccgcagcccagggaacagtgcgtaaggccggagctctggccgtgaaaaacttcctagtccacaagaaaaacaaaaaggtcgagtctgccaccaggaggaagtggaaacactattgggtttctctcaagggttgcactctattcttctatgagtccgacggtagatccggtattgatcacaacagtatccctaagcatgccgtgtgggtagagaattccatcgtgcaagccgtgcctgagcaccctaaaaaagatttcgtcttttgcctctccaacagcctgggcgatgctttcttatttcagactacttcccagacggagctggaaaattggattaccgcgatccacagcgcatgcgctacagctgtcgcacgccaccaccacaaggaggacactctgcggttgctgaagtcagagatcaaaaagttggaacagaagatagacatggacgaaaaaatgaagaaaatgggagaaatgcaactctccagcgtgaccgactcaaaaaaaaaaaagacgatactcgatcaaatattcgtttgggaacaaaatctggaacagtttcaaatggacctgtttcgattccgttgctatctagccagtctgcagggcggagagttgcccaaccccaaacggctcctagcatttgcatcccgcccaaccaaggtggccatgggacggctgggcatattttccgtgtcctcatttcacgcgctcgttgcagcgcgtacaggagagaccggcgtaagacgcagaactcaggcaatgagtcgttccgctagcaaacggcggagccgcttttcatccctgtggggcctagatacaacttccaagaaaaagcagggccgtcccagtattaaccaacgtgagaaagaggttgttctgcctaacgtacatcaacacaatccagactgcgacatttgggtgcacgagtactttaccccgagctggttttgtctccccaataatcagcctgcactcactgtggttagacctggcgatacagccagggacacactggagcttatatgcaagctgtataaggagattgaaatttgccctaaggttacccaatccatccacattgaaaaaagtgatactgctgccgatacttacgggtttagtctgagcagtgtggaagaagatggcatacgacgcctgtatgtcaattcagttaaggaaaccggtctggcctccaagaaaggcctaaaggctggcgacgaaattctggagataaataatcgcgccgccgacgccctaaattcctccatgttgaaagacttcctgagccagcctagcctggggctgctcgtcaggacctatcccgagcttgaggaaggagtggaactgcttgaatctcccccgcatagagtggacggcccagccgacctgggcgaatccccactggcttttcttacctctaaccctggccatagtctgtgttccgagcaaggcagctcagccgagactgcgcctgaagagaccgagggcccggatttggagtcaagcgacgagactgatcacagttcaaagtctactgagcaggtagccgccttttgtagaagcctccacgagatgaacccctccgaccagtcaccttccccacaggacagcaccgggcctcagctggctaccatgagacagcttagcgatgcagataaactgcgcaaggtgatttgtgaacttcttgaaacagaaagaacctacgttaaggacctcaactgcctcatggagcgctatctgaaacccctgcagaaagaaactttcttgacacaagacgagctggacgtcctgttcggtaacttgacagagatggtcgaatttcaagttgagtttctgaaaaccctagaggatggcgtgcggctcgtcccagatctggagaagttggagaaagtggaccagttcaagaaggtgctcttcagcctaggaggatcctttctgtactacgctgacagattcaagttatatagcgccttctgtgctagtcacactaaggtgccaaaggttctcgtcaaggctaagactgatactgcgttcaaggcatttctcgatgcacaaaaccccaaacagcagcacagtagtactctcgagtcttacctcatcaagccaattcagcggattttaaaatatcccttgctgctgcgggaactttttgcgctgaccgacgctgagtctgaggaacactatcatcttgacgtggcaattaaaaccatgaacaaggtcgccagtcatatcaacgagatgcagaagatccacgaggaattcggagctgtgttcgatcagctgatcgccgagcaaactggggagaaaaaagaagtggcagacctaagtatgggcgacctactcctccacaccacggtcatctggctgaacccacccgcgtcactgggaaaatggaaaaaggagcctgaactcgctgccttcgttttcaaaactgcagtggtgttggtctataaggacggaagcaaacaaaaaaagaagttggtggggtcccacagactgagcatctacgaggattgggatccttttcggttcagacacatgatccccacggaggctctgcaggtgagagccctggctagcgcagacgctgaggccaatgcagtctgtgagattgtgcacgtgaaaagtgagtctgagggtcgccccgagcgtgtgtttcatctgtgttgttcaagccctgagtcccgaaaagactttctcaaagccgtgcatagtattctgcgggacaagcacaggagacagcttttaaagacagagtcccttccctctagccagcaatacgtcccattcggcggcaagaggctatgtgcgctaaagggagctcggcccgctatgtcacgtgccgtaagcgctccctcgaaaagtctaggcaggagacgcagacgactggctcgaaacagattcaccattgactccgatgcggtatcagccagttctcctgaaaaggaaagccagcagccgcctggcgggggcgacactgatcggtgggtagaagagcagttcgatctggctcagtacgaggagcaggatgatatcaaggaaacagatattctgtccgacgacgacgaattctgcgagagcgtgaagggcgcttctgtggaccgggatcttcaggaacgcttgcaggcaactagcatctctcagcgggaaagaggcaggaaaaccctggatagtcacgcctcacggatggcgcagctgaagaagcaggccgccctgtcgggcataaatggaggtctcgagtccgcctcggaagaggtgatctgggtgagacgcgaggatttcgctccatcccggaagctgaatactgagatatag

SEQ ID NO: 208222 - DNA, 2493 bp, synthetic construct
  misc_feature 1..2493: note = Description of Artificial Sequence: Synthetic coding sequence
  source 1..2493: mol_type = other DNA
atgggcagcatgttccggagcgaggaggtggccctggtgcagctgtttcttcccacagcggctgcttatacctgtgtcagccggctgggggagctcggacttgtcgagtttcgcgatctaaatgcgtctgtctccgctttccaaagaaggtttgtggtcgacgtgagacgctgcgaggagttggaaaaaacgttcaccttcctgcaagaagaagtgcggcgtgccgggctggttctgcctcctcctaagggcagattgccagctccacctccaagggacttgctgcggatacaggaagaaacagagcggctggcccaagaactgcgcgacgttagagggaaccagcaagccctgagagctcagctgcatcagctacagcttcatgccgcggtgctgcgccagggccatgagccccagctggccgcggcacacactgacggcgcgtctgagcgaacacccctactgcaggcccccggagggccacatcaggacctcagagttaatttcgtggcaggggctgttgagcctcacaaagctccagcgctggaaaggctcctctggagggcctgtagaggattcctgatcgccagctttcgtgaattggaacagccgctggagcacccggtcactggagaacctgcaacctggatgactttcctaatctcgtattggggtgagcaaattggccagaagatccggaaaataacagattgttttcactgtcacgtcttcccgttccttcaacaggaagaagcgcgcctgggtgctctacagcaactgcaacagcagagccaggaactgcaggaggtgctaggcgaaactgagagatttctgtcccaggtgcttggacgcgtgttacagctgctgcctcccggccaggtccaagtgcataaaatgaaggctgtgtacctggcactgaaccagtgctctgtgtcgactactcacaagtgcctgattgccgaagcttggtgctcagtaagagacctgcccgctcttcaagaggctctccgggactcctcaatggaggagggagtgagcgctgtggcccatcggataccctgtcgcgacatgcctccaacgttaatcagaactaaccgctttaccgcctcctttcaggggatagttgacgcttatggagttggcaggtatcaggaggttaatccagcaccatatactatcatcactttccctttcctgtttgccgttatgttcggcgatgtgggacacggattactgatgtttttattcgctctggccatggtgctggccgaaaatcggcctgcagtgaaggctgcacagaatgaaatttggcaaaccttcttcagggggcgctatctgctgcttctgatgggactgttttctatatacacagggtttatctataacgagtgtttcagtcgagctacaagcatttttccttctggatggtctgtggcggccatggcaaatcagtctggatggtctgatgcctttctggcccagcacaccatgcttaccctcgatcctaatgtaacgggagtttttctggggccttaccccttcggcattgatcccatttggtccctggcggcgaaccacctctcattcctgaattcattcaaaatgaaaatgtcggtgattctgggggtggtgcatatggcttttggggtggtgttgggagtatttaaccacgtccactttgggcagaggcatcgactgcttctggaaactctccccgagttgaccttccttctggggctgttcgggtacttagtgttcctcgtaatttacaaatggctgtgcgtctgggccgcccgtgcagcttccgccccatctattttaatccactttatcaacatgtttcttttctctcattcaccgagcaacagactactctaccccagacaagaagtcgtccaggccacactggtggttctggctcttgcaatggtccccattctcctgcttggtactcccctgcatcttctgcacagacacaggcggcggttaagacgtcgaccagcagataggcaggaggagaataaggcaggactcctggacttgccagatgccagtgtgaatggatggagctcggacgaggagaaggctggcggccttgacgacgaggaggaggcggagctcgtgccgagcgaggtcctgatgcaccaggccatccacaccattgaattttgtttagggtgcgtcagtaataccgctagttacctacggctgtgggcgctgagtctggctcacgcccaattgtcagaagtgctgtgggcaatggtgatgcgcataggcctgggcctgggacgcgaagtcggagtggcagccgtggttctggtgccaatttttgccgcttttgccgttatgactgtggctattctcctagtcatggagggattgtcagcctttcttcacgcccttagattgcattgggtggagttccaaaacaagttttatagcggtacgggatacaagctgtctccctttacctttgcggcaacagacgactag

SEQ ID NO: 208223 - DNA, 657 bp, synthetic construct
  misc_feature 1..657: note = Description of Artificial Sequence: Synthetic coding sequence
  source 1..657: mol_type = other DNA
atgggcagcatgttccggagcgaggaggtggccctggtgcagctgttcctgccgacagcagctgcctacacttgcgtgtcccgccttggcgaactcggcctggtggagttccgggacctcaacgctagtgtgtcagcttttcagcgtcgcttcgtagtagacgtgagaagatgcgaggaactagagaaaacctttaccttcctgcaggaggaagtgcggagagccgggctggtgttaccgcctcccaaaggaagactgccggcacccccccctcgtgacctcctccggatccaggaggagacagaaaggctcgcccaggagctcagggatgttcgggggaaccagcaggccttaagagcgcagctgcatcaactacaactgcatgcagccgtccttagacaggggcacgagcctcaactggctgcggcccatactgacggcgcatcagagagaactcctctcttgcaggcacccggcggacctcatcaggatcttagggtgaattttgtagcgggggctgtggaaccccacaaagcccccgcactagaaaggctgctgtggagagcctgcagaggcttcctcatagcttcctttagagagctagagcaaccgctcgagcatccagttaccggcgagcctgccacctggatgacctag

SEQ ID NO: 208224 - DNA, 186 bp, synthetic construct
  misc_feature 1..186: note = Description of Artificial Sequence: Synthetic coding sequence
  source 1..186: mol_type = other DNA
gacgacgaggaggaggccgagctggtgcccagcgaggtgctgatgcatcaagcaattcatactattgaattttgcctgggatgtgtgtccaacaccgcttcgtatcttcgcctctgggcgctgtctctcgctcatgccaggtggaattccaggaccagttctactcaggccagggccacctcttag

SEQ ID NO: 208225 - DNA, 1845 bp, synthetic construct
  misc_feature 1..1845: note = Description of Artificial Sequence: Synthetic coding sequence
  source 1..1845: mol_type = other DNA
atgaccttcctgatcagctactggggcgagcagatcggccagaagattcgcaagatcacagactgcttccactgtcacgtcttccccttcctccagcaggaggaggccagacttggagccctgcagcaacttcagcagcagtcacaggaactccaggaagttctgggagagactgaacggtttctctcccaggtattaggccgcgttctgcagctgctcccacccggtcaggtgcaggttcataaaatgaaagcagtgtacctagcactgaaccagtgcagcgttagcacgacccataagtgtcttattgccgaggcatggtgctctgtgcgggacttacccgccctccaggaagctcttcgtgatagcagtatggaagaaggggtatctgcagttgcccaccggattccgtgcagggatatgcccccaacactgatccgaacaaatagatttaccgccagtttccaaggcatcgtggacgcatacggcgtagggagataccaggaggtcaatccagctccgtacacgatcatcaccttccctttcttgtttgcagtcatgttcggagatgtgggacacggcctgctgatgtttctattcgccttagccatggtgcttgcggaaaatcgaccggcagtgaaggccgcgcaaaacgagatttggcagacctttttcaggggcaggtatctacttctgctgatgggacttttcagtatttataccggtttcatctataatgagtgttttagtcgggctacaagcatcttcccctccgggtggtctgttgccgccatggccaaccagagtggatggagcgacgcatttctggctcagcataccatgctgactttagaccccaatgtaaccggcgtgttcttaggcccatatccgttcggaatagatcctatctggagtctcgcggcaaatcatctttcttttctcaattcctttaagatgaaaatgagtgtgattcttggggtggtgcacatggccttcggcgttgtccttggtgttttcaaccatgtccacttcggccagagacacagactgctccttgagacacttcccgagctaaccttcctccttggactgttcggttacttagtgtttttggttatatataagtggctttgcgtgtgggcagccagagccgcctctgcccctagcatcctgatccattttattaatatgtttctgttctctcattcacctagtaatagactgttatatcctcggcaagaggtggtgcaagccacactcgtagtgcttgctctggctatggtgcctatattgctactcggcacacctctgcacctgcttcacagacatcgcaggagattgcgaagacggcctgcagataggcaggaggaaaacaaggccggattgctcgacttgcctgatgcaagcgtgaacggttggagctcagacgaagagaaggctggcggtcttgacgatgaggaggaagctgagctggtgccctctgaagttctgatgcaccaggccatacacaccatcgagttctgccttgggtgcgttagtaataccgccagctatctgagactgtgggcgctttctttggcccacgcccagctttccgaagtgctgtgggccatggtgatgcggataggccttgggctgggcagggaggtgggcgtagccgccgtggtgttagtacctattttcgccgcctttgccgtcatgactgttgccatcctcttggtgatggagggcctgagcgctttcctgcatgccttgcgcctgcactgggtggagtttcaaaacaaattttacagtggaacaggctataaactgtccccgttcaccttcgccgcgacggacgattag

SEQ ID NO: 208226 - DNA, 357 bp, synthetic construct
  misc_feature 1..357: note = Description of Artificial Sequence: Synthetic coding sequence
  source 1..357: mol_type = other DNA
atggtgcccatcctgctgctgggcacccccctgcacctgctgcaccgccacagacgcaggctccggcgacggcccgcagaccgtcaggaggaaaataaagcgggactgttggacctgcctgacgcgtctgtaaatgggtggtcatccgacgaggagaaggcggggggcctggatgacgaggaggaggctgagctggtaccaagtgaggtactcatgcaccaggccattcacacaattgagttttgtctgggatgtgtgagtaatacagcatcttatctgcgcctgtgggctctctctctcgcacatgcccgatggaactctcgcacctcctccactcaagcccgcgctacgagctag

SEQ ID NO: 208227 - DNA, 1671 bp, synthetic construct
  misc_feature 1..1671: note = Description of Artificial Sequence: Synthetic coding sequence
  source 1..1671: mol_type = other DNA
atggagggccccctgagcgtgttcggcgaccggagcaccggcgagaccatccggtcccagaacgtgatggcagcggcatcaattgccaacatcgtcaagtcctctctgggacccgtgggcttggataaaatgctggtggatgatattggagacgtcacaattacgaatgacggagccacaattctgaagctgctggaagtcgaacaccccgccgcaaaagtgctatgcgaactggctgacctgcaagataaagaagtcggggacggtacaacaagcgtggtgatcatcgcagcagagctactgaagaacgctgacgaacttgttaagcagaagatccatcctacctcagtgatttccggctacagactggcttgtaaggaagccgttcgctatataaacgagaaccttatagtgaatacggacgagctcggcagagattgcctcattaacgcagccaagacgagtatgagctcaaaaataatcgggattaacggcgactttttcgctaacatggtagtggacgctgtgctggctattaagtataccgatattcgcggccagcccaggtacccagttaattctgtaaacatactaaaagcccacggtcgctcccagatggaatctatgctgatcagtggctacgcattgaattgtgttgtgggatcacagggcatgccaaaacgaatcgtgaatgccaagattgcttgcctcgactttagcctgcaaaaaacaaagatgaagttaggtgtgcaggtagtaatcacagaccctgaaaaactcgatcagataagacagagagagtccgatattaccaaagaaagaattcagaagattctggccactggggcaaacgtcatcctgacaacaggcgggatcgacgatatgtgcctgaagtactttgtggaagcaggtgctatggctgttaggagagtgctgaaacgtgacctgaagcgcatcgcaaaggcatccggagcaacaattctgagcacattggccaatctggaaggcgaggagacatttgaggctgctatgctgggacaggctgaggaagtggtgcaggagcggatttgtgacgacgagttaatcctgatcaaaaatacaaaggcccggacatcagcctccattattttgaggggggccaatgatttcatgtgtgacgagatggagcgatcgctccacgatgcactgtgtgtcgtcaagagagtgctggaaagcaagagcgtggttccaggcggcggggcagtcgaagctgctttgtcgatttacctagaaaactacgcgacttccatgggatcgcgtgagcagctggcaatcgcggaattcgcccgttccttactcgtgatccctaacaccttagccgtgaacgccgcccaggacagtacggacctggtcgctaagctaagagccttccacaacgaggcccaggttaatcctgagcgcaagaatctcaagtggatcgggctggatctcagtaatgggaagcctcgcgacaataaacaggcgggtgtgttcgaacccactattgtcaaggtgaaatctttgaaattcgccaccgaagccgccatcactattctaaggattgacgacttgatcaagctccacccagagtccaaagatgataagcacgggagctatgaagacgctgtgcattcaggagccctgaatgactag

SEQ ID NO: 208228 - DNA, 1206 bp, synthetic construct
  misc_feature 1..1206: note = Description of Artificial Sequence: Synthetic coding sequence
  source 1..1206: mol_type = other DNA
atgagcagcaagatcatcggcatcaacggcgacttcttcgccaacatggtcgttgatgcagtgctcgcaattaagtatactgacattagagggcaaccccgctatccggtaaacagtgttaatattctcaaggcacacggaaggagccagatggagtctatgctcatctccgggtatgcgctgaattgcgtggtcggctcacaggggatgcccaagcgaatcgttaacgctaagattgcctgcttggatttctctctacagaagaccaaaatgaagctcggcgtgcaggtggtaatcacagaccccgagaagctcgaccagatacgacagcgcgaatctgacattaccaaggagcggatacaaaaaatcctcgccaccggagccaacgtcattttgacaacagggggaatcgacgacatgtgcttgaaatattttgtggaggcaggggccatggccgtgcggagggtgctcaagcgggatcttaaacggattgccaaagccagcggtgccacaatccttagtacactcgccaatctcgagggagaggaaacgttcgaggctgcaatgcttggccaggcggaggaggtcgtgcaggaaagaatctgtgatgatgaactgatactgatcaaaaacactaaggccagaaccagcgccagcatcattttgaggggcgccaatgacttcatgtgtgacgaaatggaaagatcacttcacgatgctttgtgtgtggttaagcgggtcctcgagtccaaatctgtggtgccagggggcggagccgtggaggcagcacttagtatttacctggaaaactacgctacttcgatggggtcaagagaacagctggccatcgcagaatttgctcgatcccttctcgtcatccccaataccctcgcagtgaacgctgcacaggactccaccgatctggtggcaaagttgcgagcctttcacaacgaagcccaggttaatcctgagcgtaagaatctgaaatggatcggacttgacctttcaaacggcaaacccagggataataaacaggcaggtgtatttgagccaactattgtgaaagttaagagcctgaaatttgccacagaagccgcgataacgatcctgaggatcgatgacttaattaaattacaccccgagtcaaaagatgacaaacacgggtcctacgaagacgctgtgcacagtggggctctgaacgattag

SEQ ID NO: 208229 - DNA, 1302 bp, synthetic construct
  misc_feature 1..1302: note = Description of Artificial Sequence: Synthetic coding sequence
  source 1..1302: mol_type = other DNA
atggagggccccctgagcgtgttcggcgaccggagcaccggcgagacgattaggtcccaaaatgtcatggctgctgccagtattgccaatattgtcaaatcctctctgggccccgtaggcttagacaagatgctggtagacgacattggcgacgtgacaataacgaatgacggggccactattttaaagttactcgaagtcgaacacccagctgccaaggtactttgtgaactagcggacctgcaagataaggaagtcggtgatggcaccacttctgtggtgataatcgccgctgagttactgaaaaacgcagacgaattggtaaagcaaaagattcacccaacgtctgttatcagtggctacaggctggcatgcaaagaggccgtccggtacatcaatgagaatctaatagtgaacactgatgaactgggccgggactgccttattaacgccgccaaaacatctatgagcagcaaaattatcggcatcaatggggatttttttgcgaatatggtagttgatgctgttcttgccattaagtatactgacattcgcggacagcctcgttacccggtgaacagtgtgaacatcctcaaagcccacggccgctctcagatggagagtatgcttataagcggctacgccttgaattgtgtagtgggttctcagggaatgcctaaaagaatagttaacgcaaagatagcttgtctggacttctccctccagaagacgaaaatgaagctcggggtacaggttgtaatcacagaccccgaaaagcttgaccaaataagacagcgtgagtccgacattaccaaagaaagaatacagaagatcttagccacaggcgccaatgtgatactgaccaccgggggcatcgatgatatgtgccttaagtatttcgtcgaagctggagccatggccgtgagacgggtgctgaagagggacttgaaacggatagccaaagctagcggcgcgacgatcctgtccaccttggctaatctcgagggggaagagactttcgaagccgcaatgctcggtcaggctgaagaggtcgtgcaagagagaatctgcgacgatgagttgatactgatcaaaaatacaaaagctcggacatcagcgagcatcattctgcggggagcaaacgatttcatgtgcgacgagatggagcgctctcttcacgacgctctctgcgtggtgaagcgcgtgcttgagtctaagagcgtggttccaggggggggagcagtggaagctgctctcagcatctacctcgaaaattatgccacatcgatggactggagttag

SEQ ID NO: 208230 - DNA, 648 bp, synthetic construct
  misc_feature 1..648: note = Description of Artificial Sequence: Synthetic coding sequence
  source 1..648: mol_type = other DNA
atgctggccggccagctggaggcccgggaccccaaggagggcacccacccagaagatccttgccccggagcaggagcagtcatggagaagactgcagtagcggcggaagttttaacagaggattgtaacactggtgaaatgcctccattgcaacagcagatcattcggttgcaccaggagttgggcaggcagaaatccctgtgggctgacgtgcatggaaaactcagaagccatatcgacgctctgagagagcagaatatggagctacgcgaaaaactcagggctctgcagctgcagcgatggaaagcgcgtaaaaagagcgctgccagccctcacgccggccaagaaagccataccctggcccttgagcctgctttcggtaagatctcgccactcagcgccgatgaggaaacaattcccaaatacgccggtcacaagaaccagtctgcgaccttgcttggacagcgtagctcatccaataacagtgccccaccaaaaccaatgtcattgaagatagagagaatttcaagctggaaaacgcctccccaggagaatcgagataagaacctgtcaaggaggcgccaggatcgccgtgccacgcctactgggagacccacaccttgcgctgagcgtcgtgggggggtgtag

SEQ ID NO: 208231 - DNA, 981 bp, synthetic construct
  misc_feature 1..981: note = Description of Artificial Sequence: Synthetic coding sequence
  source 1..981: mol_type = other DNA
atggagaagacccccgccgccgccgaggtgccccgggaggacagcaatgctggcgagatgccaagtctgcaacaacagattaccagtctccaccaggagttgggtcgccaacagtccctttgggccgacattcaccggaaactgcagtcacatatggatgcactgagaaaacaaaaccgcgaacttcgagaagagctccgagggctgcaacggcagcaatgggaggccggcaagaagcctgccgcaagtccccacgcaggtcgagagagccacactctcgctctagaaccggcctttggaaagatttctcatctgtctgccgatgaagacactacacccaagtacgccggacgaaaatctcaatccgccacactactcggccagagatggtcctccaaccatcttgctcctccaaagccgatgtccctgaaaaccgaacgcatcaacagtggaaaaacccccccccaggaggaccgcgagaagtcgccgcctgggaggagacaggatcgcagccctgcaccaacgggtaggcctaccccgggggcagagaggaggggcgtttccgaggacggaaagattatgcacccgtcctcccgcagcccccagaactccggagggaggaagtcgcccgtgcaagctagccaagctacaacattgcaggaacagacggcagcagcccgaggcgccgaccggtcatcatctgttctcggttcctcggagggcggcttcctctcccgagtccaagcggatgagttcgcgtccagcgcacctgactccgctgagcggcagaatctgccagttaacccaccatcctctctggagattgcacaggctatggatacaaagatgaaaaaagaagaggtgcaggaggagaaacgccatcctaaggggaaggccgacgactgtcgccggagtggtttcccatcagaattccccggagctctacatgctgctccttcaaggcaggacatgggtccttag

SEQ ID NO: 208232 - DNA, 1326 bp, synthetic construct
  misc_feature 1..1326: note = Description of Artificial Sequence: Synthetic coding sequence
  source 1..1326: mol_type = other DNA
atggcccccaagggcatcctgggcagcttccccaccgccatgaacttgtccctcgaaggaaaagtgaaagaaacagtgcataacgccttttgggatcatctcaaagaacagctgtccgccacacctccggatttcagctgcgctctagagttgctgaaggaaatcaaggagatcctcttgagcctgctgctgcctcgccaaaaccgcctaagaattgagatcgaagaagccctcgatatggacctgctgaagcaggaagccgagcatggggcactgaaggtcctgtatctctcaaaatatgtgctgaatatgatggcactgctctgcgccccagtgcgggacgaagcagtgcagaaattagagaacataactgatccggtctggctgctgcgcgggatattccaagtcctgggccgaatgaaaatggatatggttaactataccattcagtccctgcagccacatttgcaggaacacagtatacagtatgagcgcgccaagtttcaagagctcctgaacaagcaacctagcctgcttaaccataccacgaagtggcttacccaagctgccggcgacttaacaatgtctcctcccacctgtcccgacacatccgactcatcatccgtggcaggccctagcccaaatgaagccgccaataaccccgagcctttgagccctacaatggtcctatgccaagggttcttaaacctgttgctgtgggacctggaaaacgaggaatttcccgaaaccctgctgatggaccgtacccgactgcaggaacttaagagtcaattgcaccagttgacagtcatggcctctgtgctgctggtggccagttccttttctggatctgtattgtttgggagtccccagtttgtcgataaactgaaaaggattaccaaatctctgttagaagacttccatagccggcctgaggaggcgatactgaccgtgagtgagcaggtgagccaggagatacaccagtctctgaaaaatatgggcctcgtggccctgtcctctgacaacacagcttcactaatggggcagctgcagaacattgcaaagaaagaaaattgtgtttgcagcgtgattgaccagaggattcatctgtttctgaagtgctgcctggtgctgggcgtgcagcgcagcctccttgatctgcccggaggtctcactttgatcgaagccgagctcgctgagcttggccagaaatttgtcaatttaacacatcacaaccagcaagtgtttggaccctattatacagaaatcctcaaaacactgatctcccctgctcaagcccttgaaacaaaagtagaaagcgtgtag

SEQ ID NO: 208233 - DNA, 1551 bp, synthetic construct
  misc_feature 1..1551: note = Description of Artificial Sequence: Synthetic coding sequence
  source 1..1551: mol_type = other DNA
atgacccggggcggcggcggcggcgacaccatcagcaagatgcccgatgtgaaagaaagcgtgccacccaagtacccaggtgatagcgagggtaggagctgcaaaccggaaacttcaggacccccacaggaagataagtcagggtccgaggacccacccccgttcctctctgtgactggtctgaccgaaaccgttaacgaagtgtctaagttgagtaacaagatcggtatgaactgtgattactacatggaggagaaagtcctgccacccagttcgctggagggtaaagtgaaggagacagttcacaacgccttctgggaccaccttaaggagcagctgtctgccaccccacctgatttttcttgcgccctggaactcctgaaagagattaaagagattttgctgtcacttttgctccctcggcagaatcgcttgcgcattgagattgaagaggctctcgacatggaccttcttaagcaggaggccgagcacggtgccctcaaggtgctgtatctgtccaagtatgtgctcaacatgatggccctactctgtgcaccagtcagggacgaagccgtgcagaagctcgaaaatattacagacccagtgtggttgctccgcggaatcttccaagtactcggtcggatgaagatggacatggttaactataccatccaaagccttcagcctcacttgcaggagcatagtatccagtatgagagggccaaattccaagaactgctaaacaagcagccctctctcctgaatcataccaccaagtggctgacgcaagcagcaggcgatctgacaatgagcccacctacgtgtcctgacacctctgactcctctagtgtcgctggacccagcccaaacgaggcggccaataaccccgaacctctgagcccaacaatggtcctttgccaaggatttttaaatctactgctgtgggatctcgagaacgaggaattcccagagacattgcttatggaccggacacgcctccaggagcttaaatcccagctgcatcagctgacagttatggcaagtgtgcttctggtggcttctagcttttctggcagcgtgctgttcggatccccacagtttgtcgataaactcaagcggatcacgaagagtctcttagaggactttcactccaggccagaggaggccattctgacggtaagcgagcaggtgtctcaggagatccaccaatccttaaaaaatatggggctggttgccctctctagtgacaataccgcctcactaatggggcagctgcagaatatagccaagaaagaaaattgcgtgtgttccgtcatagatcaacgcatccacctgtttctgaagtgctgccttgtattgggtgtgcaacgatcactgctagatctaccaggcgggttaacactcatcgaggccgaacttgcagaactgggacagaagttcgtgaaccttacccaccataaccagcaagtgttcggaccttactatacagagatccttaaaacgctcatcagcccagcacaggctctcgagactaaagttgaatccgtttag

SEQ ID NO: 208234 - DNA, 822 bp, synthetic construct
  misc_feature 1..822: note = Description of Artificial Sequence: Synthetic coding sequence
  source 1..822: mol_type = other DNA
ggcctgagccaccgggccaccccccagcccgccgcccccccccggtggtacgcccccggacgacaagccgcccgaccaaccgaaagaacccccgtggacgacccccgccggggcaggcgctctctggaaggcaaggtgaaagaaactgttcataatgctttttgggaccatctaaaagaacagctctcagcgaccccacctgactttagttgcgccctggagttgctgaaggaaatcaaagagattcttctgtcgttacttctgcccagacaaaatagactgcgcatcgagattgaagaggctcttgacatggacttgctgaagcaggaggctgaacacggcgctctgaaggtgctctatttgtctaagtatgtactgaacatgatggcacttttatgcgccccagtcagggacgaagcagttcagaagctcgagaacattactgatcccgtgtggcttctccggggaatctttcaggttctgggcagaatgaagatggacatggtgaactacacaatccagtctcttcagcctcacctgcaagagcattccatccagtacgagcgcgctaagttccaggagttacttaacaaacagccatctcttttgaatcacactacaaagtggttgacgcaggcggctggggacttaacaatgtccccccccacctgccctgacacatctgactcctcgtcagtggcgggccccagtccgaatgaggctgcaaataacccagagccgctctctcctactatggtactgtgtcagggttttctgaaccttctgctgtgggacctggagaacgaggaatttcccgagtag

SEQ ID NO: 208235 - DNA, 1326 bp, synthetic construct
  misc_feature 1..1326: note = Description of Artificial Sequence: Synthetic coding sequence
  source 1..1326: mol_type = other DNA
atggcccccaagggcatcctgggcagcttccccaccgccatgaacttatccctggaaggcaaagtcaaggaaacggtgcacaacgccttctgggaccacttgaaggaacagctgtctgctacgccacctgacttctcttgtgcattagagcttctcaaggaaatcaaagaaattttattatcactgctgctacctcgacagaatcggctccgcatagaaattgaggaggccctcgacatggacttattgaagcaagaagctgagcacggcgccctgaaggtgctctacctctcaaagtatgtccttaacatgatggcattgctatgcgctcctgtaagggacgaggccgtgcaaaagttggagaacatcacagaccccgtgtggctgctgcgggggattttccaggtgctgggaaggatgaagatggacatggtgaactacaccatccagtcacttcaaccacacctgcaggagcactcgatacagtacgaacgcgccaaattccaggagctgcttaacaagcagccatctctcctaaatcacaccacaaagtggctgacacaggccgctggggatctgactatgagcccgcccacttgtcccgacactagtgatagttcttctgtggcgggcccttctccaaacgaggccgcaaacaatcctgagcctctatcgcctaccatggtgctttgtcaaggctttctaaacctgctgctctgggacctggagaacgaagagttccctgaaacccttctgatggaccgaaccaggctgcaggagctgaagtctcagctccaccagctaactgtgatggcttcagtgctgttagtcgcctcctcctttagcggctcagtcttgtttgggagcccccagttcgtggacaagctgaagcgaatcaccaagtctctgctcgaggatttccacagcaggcctgaggaagccatcttgaccgtgagcgaacaggtgagccaggagatccaccagagtctgaagaacatgggtctcgtcgccctcagttccgacaacacagcctcacttatgggacagctgcagaacatcgcaaagaaggagaactgcgtctgttccgttattgaccagcgcatccacttgttcctcaaatgctgcctggtcctgggcgttcaaaggtccctgctggacctaccaggggggcttaccctcattgaagccgaactcgccgagctaggccagaaatttgtgaacctcactcaccataaccaacaggtcttcggtccatactacacagagatccttaagaccctgatttcccctgcccaggcgcttgaaaccaaggttgaaagtgtgtag

SEQ ID NO: 208236 - DNA, 312 bp, synthetic construct
  misc_feature 1..312: note = Description of Artificial Sequence: Synthetic coding sequence
  source 1..312: mol_type = other DNA
atggcccccaagggcatcctgggcagcttccccaccgccatgaacttatcgttagaggggaaagtaaaagaaaccgtccacaatgctttctgggaccacctcaaggaacagcttagcgcaacccctccggatttttcttgtgccctagagttattgaaagaaataaaggaaatcctgctctctctgctgctgcctcggcagaacaggctgcgaatcgagatcgaggaggcattggatatggaccttctgaagcaggaagcagagcatggggccctgaaggtcctgtacctctctaagtatgttctcaattag

SEQ ID NO: 208237 - DNA, 1512 bp, synthetic construct
  misc_feature 1..1512: note = Description of Artificial Sequence: Synthetic coding sequence
  source 1..1512: mol_type = other DNA
atgcccgacgtgaaggagagcgtgccccccaagtaccccggcgactcagagggccggtcctgcaagccagagacaagtggcccaccccaagaagacaagtctggaagtgaggatccccctcctttcctgtcggtgaccggattgactgagacagtgaacgaagtgagcaaactctccaacaagattggaatgaactgtgactactatatggaggagaaggtactgcccccctcctcattggagggcaaggtgaaagaaacggtccacaatgccttttgggaccacttgaaggaacagctctccgccactccgccagacttctcctgcgcacttgaactgctaaaagaaatcaaagaaattctcctttccctgctgctcccaagacagaaccgactccgcattgaaattgaggaggccctggatatggacctgttgaaacaggaggcggaacatggcgccctgaaagtcttgtatttgagcaaatatgtcctaaacatgatggcacttttgtgcgcacctgtaagagatgaagcagtccaaaagctggaaaatatcactgacccggtgtggttactacggggaatctttcaggtgctaggcaggatgaagatggatatggtgaactacacgattcaaagcctgcaacctcatctgcaagagcactcgattcagtacgaaagagctaagttccaggaactcttaaataagcagcctagtcttttaaaccacacgacaaaatggctaacccaggccgctggggacctcacaatgtccccccctacatgcccagatacaagcgactcttctagtgttgctggaccgtctcccaacgaggccgctaataatccagaaccgctctcaccgaccatggtactctgccagggatttctaaacctgctcctgtgggatctggagaacgaagaattcccggaaaccttacttatggacaggaccaggttacaggaattgaagtcccagttacaccaattgactgtcatggcgtctgtgcttctagttgccagctcatttagtggctcggttctgttcgggtctcctcagtttgtggacaaactgaagagaatcaccaagtctctgctggaggacttccatagcaggcccgaggaggcaattctcactgtgtcagagcaggtctcacaggaaatccaccagtccttgaagaacatgggactggtagccctgagcagtgataacacagcatcactgatgggtcaacttcaaaacatagccaagaaggaaaattgcgtgtgtagtgtgatcgatcagcgaatacatctgtttttgaaatgctgtttggtactcggtgtgcaaaggtccctgctggatctgcccggaggactcactctcatcgaggccgaactcgcagaattggggcagaaattcgtgaacttaactcatcacaatcagcaggtgttcgggccttactataccgagatcctgaagaccctgatatctccagcacaggctctggagaccaaggtggaatcagtatag

SEQ ID NO: 208238 - DNA, 1413 bp, synthetic construct
  misc_feature 1..1413: note = Description of Artificial Sequence: Synthetic coding sequence
  source 1..1413: mol_type = other DNA
atgacccggggcggcggcggcggcgtgctgagcgtgaccggcctgacagagaccgttaatgaggtctctaagctctccaacaagatcggaatgaactgcgactactacatggaagaaaaagtcctcccgccaagcagcctggaaggcaaggtgaaagaaacggtacacaacgctttttgggaccatctgaaggagcagttgtcagctacccccccagatttctcatgcgccctggaacttctgaaggaaattaaggaaatcctgctctcactcctgctgccacgacagaatagactgaggatagagattgaggaggctttggatatggacctgttgaaacaggaggctgaacacggtgccttaaaagtgctctacctgagtaaatacgtattgaatatgatggcactgctgtgtgcgcctgttcgcgacgaggccgttcagaagctcgaaaacatcacagaccccgtctggcttctacgagggatctttcaggtgctggggaggatgaagatggacatggtcaactatactatccagtccctccaaccccatctgcaagagcacagcatccagtacgaacgggccaaattccaggagctcctcaacaagcagcccagtctccttaatcacacaaccaaatggctgacacaggctgccggcgatcttaccatgagcccacccacttgcccggataccagcgactcctcctcagtggcaggaccatcacccaatgaagccgcaaataacccagagccactaagtcccaccatggttctgtgtcagggcttcctgaatctgctgctctgggaccttgagaacgaggagttccctgagacactactgatggacaggacccgattgcaagagttaaagagtcagcttcaccagctgaccgtgatggcgtccgttctgttggtcgcctcttctttttctgggagcgtgctgtttggatcaccacagttcgtcgacaagctcaagcgtatcactaagtcgttgcttgaagacttccactctcgtcccgaagaggcgattttaactgtgtctgagcaggtgagtcaggagattcaccaaagcctcaagaacatgggcttggttgcacttagctccgataacacagcttctctgatgggacagctccagaacatagctaagaaggaaaattgcgtgtgcagcgtcatcgaccagcgcatacacctattcttgaaatgctgtcttgtgttaggggtgcagcgttctctgctcgatctgccaggggggcttacactcatagaggcagaacttgctgaactgggtcagaagtttgtaaatctcacccaccataatcagcaggtatttggaccgtactataccgagatacttaagaccctcatatcgccagcacaggctctagagacaaaagtagaaagcgtgtag

SEQ ID NO: 208239 - DNA, 1398 bp, synthetic construct
  misc_feature 1..1398: note = Description of Artificial Sequence: Synthetic coding sequence
  source 1..1398: mol_type = other DNA
atgacccggggcggcggcggcggcggcctgaccgagaccgtgaacgaggtgtcaaaactttccaataaaatcgggatgaactgcgattactacatggaggagaaggtgttaccaccctcgtctctcgagggaaaggtcaaggagacagtgcacaacgcgttctgggaccacttgaaagagcaactgtccgccacaccacctgattttagctgcgccctggagctgctaaaggaaataaaagagattcttctgtctctgctcttgccacgacagaacaggttaagaatagagatcgaggaagctctcgatatggatctattgaaacaggaggccgaacacggcgccctgaaggtgctgtatttgtccaagtatgtcctgaatatgatggcgttgctctgtgcacctgtcagagatgaagcagtccagaaactggagaacattaccgatcctgtctggctactaagagggattttccaggtgctcgggaggatgaagatggatatggtcaattatacaatccaatccctgcagccacacctccaggagcactcaatccagtatgagagggctaaattccaggaactactgaacaaacaaccatccttgctgaaccacacgactaaatggctaacacaggctgctggtgacctaactatgagtcctcctacatgccccgatacctcagatagctcatcagttgcggggccatccccaaacgaagcagcgaacaatcctgaacctctgtcaccaacaatggtcctgtgccagggtttcttgaacttgttgctttgggatctcgaaaacgaggagttccccgagaccctactcatggatcggacccgcctccaggagttgaaaagccagctacaccagttgacggtgatggcctctgtgttgctcgtggcgagtagcttctctggaagcgtattgtttggatccccacagttcgtcgataagttgaagcggatcacgaaaagcctcctggaggacttccactcgaggcctgaggaagcgatactgaccgtctcggagcaggtgtctcaagagatacaccagagtttgaagaatatgggcctggtcgctctgtctagtgacaataccgcgagcctcatggggcagctgcagaatattgccaagaaggagaattgtgtttgtagcgttattgatcagcggattcatctgttcctgaaatgctgtcttgtgcttggcgtgcaacgaagtctgctggatctgccggggggattgactcttatcgaggctgaactcgcggaacttggccagaagttcgtgaatctcacccaccacaatcagcaagtttttggcccatactacaccgagattctgaaaactctgatttcgccggcccaagccctggagactaaggtcgaatctgtatag

SEQ ID NO: 208240 - DNA, 165 bp, synthetic construct
  misc_feature 1..165: note = Description of Artificial Sequence: Synthetic coding sequence
  source 1..165: mol_type = other DNA
atgacccggggcggcggcggcggcgacaccatcagcaagatgcccgacgtgaaggagtctgtgcccccaaagtacccaggagacagcgagggccggtcatgtaagccggagactagtgggcctccacaggaagacaaatccggtagcgaggaccccccaccatag

SEQ ID NO: 208241 - DNA, 165 bp, synthetic construct
  misc_feature 1..165: note = Description of Artificial Sequence: Synthetic coding sequence
  source 1..165: mol_type = other DNA
atgacccggggcggcggcggcggcgacaccatcagcaagatgcccgatgtcaaagaatctgtgccaccaaaatatcctggggacagcgaaggtcggagctgtaagcctgaaacgtcaggccctcctcaggaagataagagtggtagcgaggatccccccccctag

SEQ ID NO: 208242 - DNA, 597 bp, synthetic construct
  misc_feature 1..597: note = Description of Artificial Sequence: Synthetic coding sequence
  source 1..597: mol_type = other DNA
atgttcttcgagcggcacctggagaacctgctgaagcacttcatccctggaacgaccgatccagcggtcatcctggacctattgccgctgtgtcgcaactatgtgagacgggttcacgttgaccagtttttaccacccgtgcagctacccgctcagttgcgacccggcgaccagtccgacagcgggagcgagggcgagatggaagaaccgacggtagatcattaccaactgggtgaccttgtggccggcttaagccacctggaagaattggaccttgtgtatgatgttaaggattgtggaatgaatttcgaatggaatttattcctgtttacctaccgggactgtttgagcctggccgcagcaataaaggcttgccacaccctcaaggacggggggaagcagctactggagggaatgtcagacaacaagaccctactggaattcgatctgcgtctttcggatgtggcacaagagtctgagtacctaattgggcaagcactgtacgccaatagggaggccgcccgccaaagggctctgaatcctagccactttatgtctacaattaccgcaaatggccccgagaactctgtggggtag

SEQ ID NO: 208243 - DNA, 597 bp, synthetic construct
  misc_feature 1..597: note = Description of Artificial Sequence: Synthetic coding sequence
  source 1..597: mol_type = other DNA
atgttcttcgagcggcacctggagaacctgctgaagcacttcatccctggtacaactgatcccgccgtgattctggatcttctcccactatgtcgcaactacgtgaggcgtgtgcacgtggaccagttcctgcccccagtgcaactgccagcacagctgagacctggagatcaatctgactctggcagcgagggggagatggaagaaccaacggtggatcactaccagttaggggacttagtggcggggttgtcacacctggaagaactggacctagtatatgatgtcaaggactgcgggatgaacttcgagtggaacctgtttttgtttacttacagagattgcctgtcactggccgcagccatcaaggcatgccacaccctgaaggatggtggcaagcagctcctggagggaatgtccgacaacaagacattgctcgaatttgatctgaggctcagcgatgtggcccaggagtctgagtaccttatcggacaagcactgtatgctaatagagaggcagcccgacagcgggcactcaacccgagtcacttcatgagtacgattacggccaacggacccgaaaactcagtaggttag

SEQ ID NO: 208244 - DNA, 1506 bp, synthetic construct
  misc_feature 1..1506: note = Description of Artificial Sequence: Synthetic coding sequence
  source 1..1506: mol_type = other DNA
atgcaggacaccgtgaccaccagcgccctgctggaccccagccactcaagcgtgagtacacaggacaatagctcgacaggggggcacacctcctcgacaagcccccagctaagcaagccgtcaattaccccagtgcctgctaaaagcaggaacccacaccctagggctaatatcaggaggatgaggcgtattatagccgaggacccagagtggtcgttagccattgtacccctgctgacagagctgtgcatacagcacatcatcaggaacttccagaaaaacccaatccttaaacagatgctgccagaacaccagcagaaggtccttaaccacctgagcccagatctgccccttgctgtcaccgcaaacctcattgactccgaaaattactggcttagatgttgcatgcacagatggcctgtgtgccacgttgcacaccatggcggatcgtggaagaggatgttcttcgagagacatcttgaaaatctgctcaaacactttatccccgggaccaccgaccctgctgtcattctggatctgctccccctgtgcaggaactacgttcgccgcgttcatgttgatcaattcctgccaccagtgcagctcccagcccagctgcggcccggcgatcaatctgacagtggatcagagggcgaaatggaagaacccaccgttgaccactatcagctgggcgatttggtggctggcctctcacacctggaggagctggatttagtctacgatgtgaaagactgtggtatgaattttgaatggaacctctttctgttcacataccgcgactgtttatccctggctgccgctattaaagcttgccataccttgaagattttcaagctaacacgaagcaaagtggatgacgacaaagccaggattattattagatctcttcttgatcaccccgtgctggaagagctggatctgtcccagaatctgattggggataggggcgcgaggggagctgcaaagcttctgagccattcccggctccgcgtgctcaatctcgccaacaaccaggttcgggcccctggcgcacagtctctagctcatgccctcgcacataacactaaccttatctcattaaacctcagacttaactgtatcgaggacgaagggggtcaggccctagctcacgctttacaaacaaataaatgtctgaccactttgcatttaggcgggaatgagctctccgaacctacggcgactctgctgtcccaggtcctcgcaatcaacacaactcttaccagtataaatcttagctgcaaccacatcgggctggacggcggaaagcagctcctggaaggcatgtctgataacaaaaccctgctcgaattcgatttacgcctgagcgatgtcgctcaagagtccgaatacttaatcgggcaggccttgtacgccaacagggaggctgcacggcagcgcgccttaaacccttcccattttatgtcaaccatcacagcgaatggtccggagaattccgtgggttag

SEQ ID NO: 208245 - DNA, 597 bp, synthetic construct
  misc_feature 1..597: note = Description of Artificial Sequence: Synthetic coding sequence
  source 1..597: mol_type = other DNA
atggagaagcggggccggggcgtgaagagcagccccatccagacccccaaccagaccccacagcaggcccctgtcaccccaaggaaggaacggaggccttctatgttcgaaaaagaggcctacacccagatactacgtgaaaggctgcgggagtcaattcacaatgtccagtatgtggaaccacccttcgatgatagcattgcagatatcgggaaggagtggaaatccgccctcgccaagttaaaatttgcaaactcttacagaatggagccacttaaaaagtttcaggcccacagtgtggagacaaaggtacagcagattttaaccgagtccctgaaagatgtgaagtacgatgataaggttttttctcatttatctctggagctggccgaccggattctgctcgccgtaaaggaattcgggtatcaccggtacaagtttataataaaagtcctgtttattcaaaagacaggccaggccattaatatagcctctcgatggatatgggacattgcctgggattcatgggtggcagcgaagcatgaagctgaaagttatgtggccctggtccttgtttttgcattatactatgaatag

SEQ ID NO: 208246 - DNA, 666 bp, synthetic construct
  misc_feature 1..666: note = Description of Artificial Sequence: Synthetic coding sequence
  source 1..666: mol_type = other DNA
atggccagccggcccctgccccccggccggcaggaggaggagaacgccaaggactctgggaggaaaccgtcacccgttcgcccgagaggctgtctgccatccatcgatgaggcccgtcccgctggaccaggtcccgctcctgcctctcgacggggttcaatgttagggcttgcggcgtctttttctaggaggaactccctggtgggacctggggccgggccaggcggccagagacccagcttgggaccagtacccccgctgggtagcagagtaagtttcagcggcctacccttagctccagcaaggtgggtggctcccagttacagaactgagcccgtacccggcgaacgctgggaggccgcccgcgcacagcgcgctctggaggctgctctagctgcaggtctacacgatgcatgctactcatcggacgaagccgcgagactggtgcgcgagctatgcgagcaggtccacgtcaggctgcgggaactatccccgccgcggtacaagctggtgtgctccgtcgttttaggccccagagccggccagggcgtgcatgtggtatctagagctctgtgggacgtggccagggacgggcttgcaagtgttagttacaccaataccagcctgtttgcagtagctaccgtgcatggcttgtattgtgaatag

SEQ ID NO: 208247 - DNA, 666 bp, synthetic construct
  misc_feature 1..666: note = Description of Artificial Sequence: Synthetic coding sequence
  source 1..666: mol_type = other DNA
atggccagccggcccctgccccccggccggcaggaggaggagaacgcaaaggattccggacggaaacctagtcctgtgcgccctcgcgggtgcctgcctagtatcgatgaagcccgcccagctggccctggtccagcaccggcatctagaagaggctcaatgctgggcctggctgccagtttcagccggagaaattccctggtgggacccggagcggggcctggaggtcagcgccccagcttgggaccagtccctccactcggaagccgcgtttctttttccggcctaccactggctcccgcgcgctgggttgctcccagctatcgcacagaacccgttcctggtgagcgatgggaggccgcccgagctcaaagagccctcgaggccgccttggctgcggggctccatgacgcgtgctacagctccgatgaggccgcaagactagtgagggagttgtgcgagcaggtgcacgtgcgattgcgagaactctcacccccaaggtacaaactggtctgttctgtagtgcttggcccaagagcaggacaaggtgtgcacgtggtgtcccgagccctctgggatgtggccagagacggactcgcttccgttagttataccaacaccagcctgtttgctgtggccactgtccacggactatattgtgaatag

SEQ ID NO: 208248 - DNA, 1074 bp, synthetic construct
  misc_feature 1..1074: note = Description of Artificial Sequence: Synthetic coding sequence
  source 1..1074: mol_type = other DNA
atggagcggatgagcgacagcgccgacaagcccatcgacaacgacgcagagggggtgtggtctcccgatatcgagcagagttttcaggaggctttggcaatttaccccccctgcggacggagaaagatcatattgagcgacgagggcaagatgtacggacgaaatgaactgatcgctaggtatataaagctccgcaccgggaagactagaacgcgcaagcaggtgtccagccacatacaggtcttggcgcggaggaagtctagagacttccactctaaactgaaggtgactagtatggatcagacggccaaggacaaggcgctacagcatatggcagccatgtccagtgcccaaatagtgtccgccacagccatccataacaaactgggcctgcccggtatcccccgccctaccttccccggtgccccaggcttctggcccggtatgattcagacgggccagccaggtagctcacaagatgtgaagccattcgtgcagcaggcgtatcctatccagcccgctgttaccgcaccaatcccaggcttcgagcccgctagtgctcctgctccatctgtacccgcttggcaggggcgtagcattgggaccacaaaactgcggctggtagaattctccgcctttctggagcagcagcgggaccccgacagcgccgacctcaattgtaatattcaggacgatgccggcgccttctatggagtgacaagccagtacgagtcctctgaaaacatgactgttacttgcagcacaaaagtgtgtagcttcggtaagcaggtagtggagaaggtggagactgagtacgccagatttgagaacggtaggttcgtgtatcgtataaatcgctctcccatgtgcgagtacatgataaatttcatccataaacttaagcatctgcctgaaaaatatatgatgaactcagtccttgaaaacttcaccattttactcgtcgttacaaatagagacacacaggagaccttactgtgcatggcctgtgtgttcgaagtctctaattcggagcacggcgcccagcaccacatttatcgtctggttaaggattag

SEQ ID NO: 208249 - DNA, 1236 bp, synthetic construct
  misc_feature 1..1236: note = Description of Artificial Sequence: Synthetic coding sequence
  source 1..1236: mol_type = other DNA
atggagcggatgagcgacagcgccgacaagcccatcgacaacgacgccgagggcgtgtggagccctgatattgagcagagctttcaggaggccctggcgatctaccccccctgcggcaggagaaagattattctgtccgatgagggtaaaatgtatggaagaaacgaactgatcgcccggtatattaagctgcgcacgggcaaaacgaggactcgaaagcaggtgagttcccatatccaggtcctggctcgcaggaagtcacgggacttccatagcaagttaaaggatcaaacagccaaggacaaggcgctccagcacatggccgccatgtcaagtgcccagatcgtgtccgctactgccatacacaacaagctgggccttccaggcatccctcgacccaccttccctggggcacccgggttttggccaggaatgatccagaccggccaacccggctcttcccaggacgttaagccctttgtccagcaggcatacccaatacagcctgccgtgaccgccccaatccccgggttcgaaccagccagtgctcctgcaccaagcgtgcccgcctggcaggggaggtcaatagggacaaccaaattgagactagtcgaattttctgcattcctggagcagcaaagagaccccgatagttataataagcacttattcgttcacattggacacgccaatcattcgtactcagacccactgctggaatccgttgacattcggcaaatctacgataagttccctgaaaagaagggcggacttaaagaactattcggaaaggggccccagaacgcattctttcttgtgaagttttgggctgatctgaattgcaatattcaggacgacgccggagctttttacggcgttacctcacagtacgagtcctcagagaacatgactgttacatgttccaccaaagtttgcagcttcgggaagcaagtggtggagaaggttgaaactgagtacgcccggtttgaaaacgggagatttgtctatcggatcaataggtcgcccatgtgcgagtatatgatcaattttatccacaaacttaaacacctgcccgagaagtacatgatgaactccgtactcgagaattttactatcctgcttgtagttaccaacagggatacccaagaaacactgctgtgtatggcatgcgtctttgaagtctctaactctgagcacggggcgcagcatcacatataccgcctggtaaaagattag

SEQ ID NO: 208250 - DNA, 1281 bp, synthetic construct
  misc_feature 1..1281: note = Description of Artificial Sequence: Synthetic coding sequence
  source 1..1281: mol_type = other DNA
atcgagcccagcagctggagcggcagcgagagccccgccgagaacatggaacggatgtcagattcggctgataagcccattgacaacgatgcagagggagtctggtcccctgatatcgagcagtcttttcaggaagctttagctatttaccccccctgcggccgtaggaagatcatcttatccgatgaaggaaagatgtacggccgcaatgagctgatcgcacgctatataaagctgcgcactgggaagaccagaacacgcaagcaggtctcaagtcatattcaggttctggctaggcgcaagtctcgcgattttcacagcaagctgaaggatcagacagccaaagacaaggcgttacaacacatggccgcaatgagctccgcgcagatagtctcggctactgctatccacaacaagctcgggttgcccgggattccaaggccaacatttcccggggctccgggcttctggcccggcatgattcaaacaggtcagccaggcagcagtcaggacgtgaagccattcgttcaacaagcttatccaatccagcctgcggttacagcaccaatacctggcttcgagccagcttccgcccctgctccttccgttcccgcctggcaagggagaagcatcggaacaactaagctccggctggttgaatttagcgctttcctggaacagcaacgggaccctgactcatataataagcatctgtttgtgcacataggacatgccaatcactcatactcagatcctttattggaaagcgtcgatatccgccagatttacgataaattccccgagaagaaagggggtctgaaggagttatttggcaagggccctcagaacgccttctttcttgtcaagttttgggctgatttgaattgtaacatccaggatgatgccggagccttctatggcgtcacttcgcagtacgagtcatctgaaaatatgactgtcacctgtagtactaaagtgtgttcttttgggaagcaggtggtggagaaggtggagaccgagtatgcacgcttcgagaatggcagattcgtgtatcgcatcaatcgcagcccaatgtgcgagtatatgattaattttatccataaattgaagcacctgccggaaaaatacatgatgaattctgtgcttgaaaatttcacaatcctcctcgtggtgactaatcgggacactcaggaaactctgctgtgtatggcctgtgtgttcgaggtgtctaattctgaacacggtgcacagcatcacatctacaggctcgtgaaagactag

SEQ ID NO: 208251 - DNA, 993 bp, synthetic construct
  misc_feature 1..993: note = Description of Artificial Sequence: Synthetic coding sequence
  source 1..993: mol_type = other DNA
atgcggtacgtgctgagctggtgcgtgaccgtgaccttcaaggaccagacagccaaggataaagccctccagcacatggctgctatgtcctctgcccaaattgtctccgctactgccatccacaacaagttaggcctgcctggcatcccaagaccaacatttccaggcgccccaggattctggccgggcatgattcagactggacagccaggcagtagccaggatgtgaaacccttcgtgcagcaggcctatcctatccaacctgccgtcacggcacccatacccggcttcgagccagcaagcgctccggcaccatccgtacctgcgtggcaggggcgatcaatcggtacaaccaagctgcggcttgtagaattctccgcctttttggagcagcagcgggaccccgacagctacaacaagcatctattcgtgcatatcggccacgcaaatcactcctacagcgaccctctgcttgagagcgtagacatacggcagatctacgataagttcccagaaaagaagggaggactgaaagaactttttggaaaaggcccccagaacgcctttttcttggtgaaattctgggccgacttgaattgtaacattcaggacgatgctggagctttttacggcgtgacttcccagtatgaatcaagcgaaaacatgaccgtaacttgctcaaccaaggtgtgctcctttggtaaacaggtggttgagaaggttgagactgagtatgccagatttgaaaatggccgattcgtgtaccggatcaatcgctcacctatgtgcgaatacatgataaacttcatacacaagctcaagcatctcccggagaagtatatgatgaacagtgtcctggaaaatttcacaatcctcttggtcgttaccaatcgggacacacaggagactcttttatgcatggcgtgcgtgtttgaggtgagcaactcggagcatggagctcagcaccacatctataggcttgtgaaggactag

SEQ ID NO: 208252 - DNA, 207 bp, synthetic construct
  misc_feature 1..207: note = Description of Artificial Sequence: Synthetic coding sequence
  source 1..207: mol_type = other DNA
atcgagcccagcagctggagcggcagcgagagccccgccgagaacatggagagaatgtccgattccgccgacaaaccgattgataacgatgcagagggcgtatggtcgccggatatagaacagagcttccaagaagccctggccatctatcccccgtgcggaaggcgaaaaatcatcctttcagatgaaggaaagatgtacggatag

SEQ ID NO: 208253 - DNA, 1281 bp, synthetic construct
  misc_feature 1..1281: note = Description of Artificial Sequence: Synthetic coding sequence
  source 1..1281: mol_type = other DNA
atcgagcccagcagctggagcggcagcgagagccccgccgagaacatggagcgcatgtcagactctgcggacaagcccatcgataacgacgcagagggcgtgtggagccccgatattgagcagtccttccaggaagctctggcgatctatccaccatgcggtagaagaaaaattattctttcggacgaaggaaaaatgtatgggcgcaacgagcttattgcgcgatacatcaaattaagaactggaaaaactaggactcgaaaacaggtgtcttcgcatatccaagttctagcacgccgtaaatctcgagattttcactcaaaactgaaagatcaaaccgccaaagataaggccttacaacatatggctgcaatgagctcagctcagatcgtgtccgcaaccgctatccataacaagctcggcctcccagggatccctcggcccacatttcccggggcacctggattctggcccgggatgatccaaacaggtcagcccggctcttcccaagacgtcaagccctttgtgcagcaggcataccccatccagccagccgtcactgcacctattcctggttttgagcctgcatcagctccggccccatccgtgccagcgtggcaaggacgtagtatcggcaccactaaactaagactggtggagtttagcgctttccttgagcagcagagagatcccgactcttataataagcatctttttgtgcacatcggacacgccaatcattcctactccgaccctctgctcgaatctgtcgatataaggcagatctacgacaaatttcctgaaaaaaaaggtggtctcaaagagctgttcggcaaggggccccagaacgccttttttctagttaaattctgggctgacctcaattgtaatattcaagacgacgccggggctttttatggggtcacaagccagtatgagtcctccgagaatatgaccgtcacctgctccacaaaagtgtgctcttttggcaagcaggtggtggaaaaggtggagacagagtatgcccgatttgaaaatggcaggtttgtttatcggattaacagaagtccgatgtgtgagtacatgattaatttcatccataagttgaaacatttacctgaaaagtatatgatgaactcagtccttgagaactttacaatcctgcttgtcgtgaccaatcgggatactcaggagacattgttgtgcatggcctgcgtgtttgaggtgtccaatagcgagcacggagctcagcaccacatctaccggctcgttaaggattag

SEQ ID NO: 208254 - DNA, 1344 bp, synthetic construct
  misc_feature 1..1344: note = Description of Artificial Sequence: Synthetic coding sequence
  source 1..1344: mol_type = other DNA
atgggcgagccccgggccggcgccgccctggacgacggcagcggctggaccggctccgaggaagggagcgaggaaggcacaggtggctctgaaggggctggcggagacggcggaccagacgccgaaggcgtatggtctccggacattgaacagtcattccaggaagcattagctatataccctccctgtggcagacgtaaaataattctgtctgatgaggggaaaatgtacggcaggaatgagctgatagccagatacatcaaacttaggacaggcaaaactcgaacgaggaaacaggtgtcatcccacatacaagttctggccaggcggaagtctagggagatacagtccaagctgaaagatcaagtgtcaaaagataaagccttccaaaccatggcaaccatgagctccgcgcagttaataagtgccccttctttgcaagccaagctgggacccaccggcccacaggcttctgaactcttccaattctggtccggagggagcggccccccatggaacgtgcccgacgtcaagcctttttctcaaactccattcaccctgtctctgacacctccgtccacagacttacccggatacgaaccccctcaggccctgagccccctgcctcctcccacaccgtcccctccagcctggcaagctcgaggattgggaaccgctcgcctccaactggtggaattttctgcttttgttgagccccccgacgccgtagactcctatcagcggcatctgttcgtgcacatctctcaacattgcccctcccccggcgcgcctccccttgaatcagtcgacgtcaggcagatttacgacaaattcccagaaaaaaaaggcggcctgagggaactttacgaccgcggccccccacacgccttcttcctggtaaaattctgggccgacctcaactgggggccctccggagaggaggccggggccggcggctctattagtagcggcggcttctatggtgtgagctctcagtacgagagccttgagcacatgaccctgacctgttcttccaaggtctgtagcttcggcaaacaagttgttgagaaggtcgaaaccgagcgagctcagcttgaagacggaaggttcgtgtaccggctcctgagatcccctatgtgtgagtaccttgtgaactttctgcacaagctccgtcagcttcccgagagatatatgatgaactccgtgcttgagaatttcacaatcctgcaggttgttacaaatcgtgacacacaggagttgctgctgtgtactgcctatgtgttcgaggtttctacctctgagcgcggcgcacagcatcacatctatcgtctggttagggattag

SEQ ID NO: 208255 - DNA, 1353 bp, synthetic construct
  misc_feature 1..1353: note = Description of Artificial Sequence: Synthetic coding sequence
  source 1..1353: mol_type = other DNA
atgggcgagccccgggccggcgccgccctggacgacggcagcggctggaccgggtccgaggaaggctccgaggaaggaactggagggagcgaaggggcaggaggtgacgggggacccgatgccgagggtgtatggtccccagatatcgaacaatctttccaggaagccctggcgatttatcccccttgcgggcgcagaaagattattctgagcgacgagggcaagatgtacggacgtaatgagctgatcgcacgctatattaagcttcgaacaggaaagacacgaactaggaagcaggtgagcagccacatccaggtccttgctagacgcaaatcacgcgagatccagtccaaactcaaagaccaagtgtcgaaggataaagcattccaaactatggctacaatgtctagcgcacaactaattagtgctcctagtcttcaggcaaagctggggcctacgggccctcaggtcgtacaagcttctgaacttttccagttctggagcggcggctctggccctccctggaacgtccctgatgtgaagcccttttctcagacaccttttacattgtcactgactccgccttccacggacttacccggctatgagcctccccaggccttatcccctcttcctcccccaactccatccccgccggcttggcaagcccgaggcctaggcaccgccagattacagctagttgagttttccgctttcgtggagccacctgatgctgttgatagttatcagcggcacctgttcgttcacatttcccagcactgcccgagcccaggggcacccccactggagtccgtcgacgtgagacagatttacgacaaatttcccgaaaagaagggcggtctgagggaactgtatgaccgcggccctccacacgccttttttctagtcaagttttgggcagacctgaattggggtccaagcggcgaagaagcaggggctggcggttcgatttcctcaggcggattctatggagtgtcctcgcagtacgagtcgctggaacacatgactttgacgtgttctagcaaagtatgtagtttcggaaagcaggttgtggagaaagtggagactgagagagcccagcttgaagatggccggtttgtatatagactattaagaagtcccatgtgcgagtacctggtaaactttttgcacaagttacggcagttgccggaacgatatatgatgaactccgtgctggaaaacttcaccatactccaggttgttacgaatcgtgatacccaggaactccttctctgcaccgcctacgtttttgaggtgtcgactagcgaacgtggcgctcaacatcatatatatcggttagtccgggattag

SEQ ID NO: 208256 - DNA, 960 bp, synthetic construct
  misc_feature 1..960: note = Description of Artificial Sequence: Synthetic coding sequence
  source 1..960: mol_type = other DNA
atggccaccatgagcagcgcccagctgatcagcgcccccagcctgcaggcaaagttggggccaacggggccccaagtcgtgcaggcctctgagctctttcagttctggtccggtggcagtggtccgccttggaacgtgccggatgtaaagcctttttcccaaacaccctttacgctcagtctcacacctcctagcacagatctgcccggatatgagcccccccaggcccttagtcctctacccccaccgacaccttcccccccggcctggcaggctcgggggttgggcactgcgcgactacagctggtggagttttcggccttcgtggagcctccagacgccgtcgattcctaccaaagacatctgttcgtacacattagccaacattgtccctctcctggagcgcccccactcgaaagcgtggatgtgcgtcaaatttacgataaattcccagaaaagaaggggggcctcagagaactgtacgataggggcccccctcatgcatttttcttagtcaagttctgggcagatttgaactggggcccctcaggagaagaggccggcgcaggcgggtctatcagttctgggggtttctatggagtgtcgagccagtatgaatccctggagcatatgacactgacgtgttcaagcaaggtttgctcgttcggaaaacaggttgttgagaaagttgagactgagagggcacagctggaggatggccggtttgtgtaccggctcctccggagtcctatgtgcgaatatctggtgaactttctgcataagctcaggcagcttccggagaggtacatgatgaactccgtattggaaaattttaccatattgcaggttgtgaccaatcgcgacactcaggaactgcttctgtgcactgcctatgttttcgaggtgtccacttctgaacgtggtgcccagcatcatatttacagacttgtcagggattag

SEQ ID NO: 208257 - DNA, 1356 bp, synthetic construct
  misc_feature 1..1356: note = Description of Artificial Sequence: Synthetic coding sequence
  source 1..1356: mol_type = other DNA
atgggcgagccccgggccggcgccgccctggacgacggcagcggctggactgggtccgaggaaggatctgaagaagggaccggcggttccgaaggcgcgggcggcgacggcggacctgatgcagaaggtgtgtggtcaccagacattgagcagtcattccaggaggcgctggccatctacccaccatgtggtcgcaggaagatcatcctctctgatgaaggtaagatgtatggtcgtaacgaattaatcgctcggtatatcaagctgcgcaccggcaaaacacggaccagaaagcaggtgtcatcccatatccaagtgcttgctcggcgaaaatcccgggagatccagagcaagttaaaggctctgaacgtggatcaggtgagtaaggacaaagcctttcagactatggcgacgatgtcttccgcacagcttatttccgcccctagcctgcaggcaaagctgggcccgacaggccctcaggcctccgagctctttcagttttggagcggggggagcgggccaccatggaatgttcccgatgtaaaaccctttagtcagactccttttactctgtcgcttaccccgcctagtacagacctgcctggctatgagccgccacaggccctctcaccattgccaccccctacaccctccccacccgcttggcaagctcgggggctggggaccgcacgattgcaactggtggagttctccgcctttgtggagcctcccgacgccgtggattcataccagcgccatttgttcgtgcatataagtcagcattgtcctagccccggtgctccacccctggagagcgtggacgtaaggcagatctatgacaaattccctgagaaaaagggcggcctgagagagttgtatgatcgtgggcccccccatgcatttttcctcgtcaaattctgggctgaccttaattggggaccgtctggagaggaggcaggggctggtggttctatctccagcgggggattctatggcgtcagctcacagtacgagtccttggagcatatgactctcacatgcagttcaaaggtctgttcatttggtaagcaggtggtggaaaaagttgagacagagcgggcacagcttgaagatggacggtttgtataccgattgctgagatcaccaatgtgcgagtatctggtaaactttttgcataagttacgtcagctgccagaaaggtacatgatgaactctgtgctggagaactttacaattttacaagtggtgaccaatcgcgacacccaggaactgttgttatgtaccgcttatgtttttgaagtgagcacttcggagagaggggcccagcaccacatatatagacttgtccgagactag

SEQ ID NO: 208258 - DNA, 1356 bp, synthetic construct
  misc_feature 1..1356: note = Description of Artificial Sequence: Synthetic coding sequence
  source 1..1356: mol_type = other DNA
atgggcgagccccgggccggcgccgccctggacgacggcagcggctggacaggatctgaagagggcagtgaggaagggaccggtggaagtgagggagcgggaggggacggcggaccagacgccgagggcgtatggtcgccggacattgaacaaagttttcaggaggccctggcaatctatcccccctgtggccggcgcaagatcatcctttcggacgaggggaagatgtacggccggaacgagcttattgcaaggtacattaagttgagaacaggaaaaacccgaactcgtaagcaggtaagctctcatattcaagttctggctcgaagaaaatctagagagatccagtcaaagctgaaggcattaaacgtcgaccaggtcagtaaagacaaggctttccaaactatggcgacgatgtccagtgcccagcttatttctgctcctagcctgcaggctaagctgggacccaccggcccacaggcatctgaacttttccagttctggtctggggggtcaggcccaccatggaatgtgcccgacgtaaagccctttagtcagactccattcaccttatccctgacaccaccatctactgacttgccaggctacgaaccaccacaggccctgtcaccattgcctcctccgaccccaagccctcctgcctggcaggcccgaggactgggaactgctcgtctacaacttgtggaattctctgcctttgtcgagccccctgacgcggtggattcttatcagaggcatttgtttgtccacatctcccagcactgtccctcgcccggtgctcctccactagaaagtgtggacgtgcgacaaatctatgacaaatttcccgagaagaagggagggctgcgagagctgtatgatagaggcccaccccacgctttcttcctggtgaagttttgggctgatttgaactggggcccctcgggggaagaagccggagccgggggctctatatcctcaggagggttctacggcgtatcaagccagtacgaatctctggaacacatgaccctgacatgtagctctaaggtgtgcagctttgggaagcaagtggttgaaaaggtcgagactgaacgcgctcaattggaggatggtcgcttcgtctaccggctgttgagatccccgatgtgtgagtacttggtcaatttcctgcacaagctgcgccagcttcccgagaggtatatgatgaattcagttctcgaaaattttacaatattgcaggtcgttactaatcgcgatactcaagaactactactgtgtactgcctacgtgttcgaggtgtccacctccgaaaggggggcacagcaccacatttatcgactcgtcagggactag

SEQ ID NO: 208259 - DNA, 1353 bp, synthetic construct
  misc_feature 1..1353: note = Description of Artificial Sequence: Synthetic coding sequence
  source 1..1353: mol_type = other DNA
atgggcgagccccgggccggcgccgccctggacgacggcagcggctggacagggtccgaggaaggcagtgaggaggggactggcggctcagaaggcgccgggggagatggcggacctgatgccgagggcgtatggagccccgacatagaacagtcctttcaagaggctctggcaatttaccccccatgtggtcgtcgcaaaatcatactttctgacgaaggaaagatgtacggccgcaatgagcttattgcacgatatatcaagttgagaactggcaagaccagaactcgcaaacaggtttcttctcatatccaggtcctggcccggcggaaatctagggagattcagtccaaattgaaagaccaggtatccaaggacaaggccttccagacgatggcaacgatgagctcagctcaactcatatccgctcccagcctacaggcaaagttgggccctacaggaccacaggtggtccaggccagtgagctcttccagttctggtccggtggcagtgggcctccctggaacgtccccgatgtgaagcctttctctcagactcccttcactctctcactgacacctccatccaccgatcttcctggatacgagccccctcaggctctgagcccattgccaccccccactccttctcctcctgcctggcaggctcggggcctgggaactgcccggctgcaactcgtcgagttttcagccttcgtggagccgcccgatgcagtggacagctatcagagacatctcttcgtgcatatctcgcagcattgcccttctccaggcgcacctcctctcgaatcggtggacgtgcggcagatttacgacaaattcccggagaaaaaagggggattaagagaattatatgaccggggccctccacacgcgttcttcctggtgaagttttgggcagaccttaattggggcccatctggagaggaggccggagccggaggcagtatcagcagtggaggattctacggagtgtcctctcagtacgagagtttggaacatatgacacttacctgcagttctaaggtctgttctttcggtaagcaagttgttgaaaaggtggaaacagaaagggctcagctagaagacgggcggttcgtgtatagactactgcggtcaccaatgtgcgaataccttgttaacttcctgcacaaactcagacagctacccgagcgttacatgatgaactctgtattagagaattttactattctccaagtcgtgactaatcgggacacgcaggagctcctcctttgcactgcctacgtgttcgaggtctccactagcgagcgcggcgcccaacatcacatttatagactcgtgcgtgattag

SEQ ID NO: 208260 - DNA, 1308 bp, synthetic construct
  misc_feature 1..1308: note = Description of Artificial Sequence: Synthetic coding sequence
  source 1..1308: mol_type = other DNA
atcgccagcaacagctggaacgccagcagcagccccggcgaggcccgcgaggacgggcctgagggtctcgacaagggattggacaacgatgccgaaggcgtctggagccctgacatcgagcagagtttccaggaggccctggcgatatatcccccttgcgggcgaaggaagattattttgtctgatgaaggtaaaatgtacggacgaaatgagttaatagcccgatatatcaaattgcgaaccggaaagacccgcactcgtaagcaggtctcctcccatatacaggttctggctcgtaagaaagtgagggagtaccaagtcggcattaaagccatgaatcttgatcaggtgtccaaggacaaagccttgcagtccatggcatcaatgtcaagcgcacagatcgtcagcgccagcgtactgcagaacaagttttcccctccgtcaccactgccacaggcagttttctctacatcatctaggttctggtctagccctcccctgctgggccagcaacccggacccagtcaggacattaagccattcgcccagccagcctacccaatccaacctccactaccacccactctctccagctatgaacccctcgccccactgccaagcgccgccgcaagtgtccctgtgtggcaggaccgaacgatcgcatctagtcgcctccgtcttctcgagtactcggcctttatggaagtgcagagagatcctgatacctactccaaacacctgttcgttcacattggtcagaccaatcctgcattttcagatcccccactggaggccgtggacgtgagacagatctacgacaagttccccgaaaagaagggtggactcaaggagctctatgagaaggggccccccaatgccttctttctggtcaagttttgggctgatctgaacagcacaatccaggagggacccggcgcgttttacggcgtcagttcccaatactctagcgcagacagcatgaccattagcgtttctacaaaggtgtgctcttttggcaaacaggtggtcgagaaggttgaaacggagtatgcccgcctggagaacggaagattcgtataccggatccataggtcccctatgtgtgagtacatgattaacttcatccacaagctgaagcatctcccggaaaagtacatgatgaattctgtgctggagaactttaccattcttcaggtggtgactagcagagattcgcaggaaactctgctggttattgcattcgtgttcgaggtcagcacgagtgagcatggagcccagcatcacgtttacaaactggtgaaagactag

SEQ ID NO: 208261 - DNA, 1356 bp, synthetic construct
  misc_feature 1..1356: note = Description of Artificial Sequence: Synthetic coding sequence
  source 1..1356: mol_type = other DNA
ctgagccggcccgtgggcagcggccccgagccccgggccaccagcaccatagcctctaatagctggaatgcgagcagttcccccggcgaagctcgggaggatggtcctgaggggttggataagggactagacaatgacgctgagggggtttggagcccggatatagagcaaagctttcaggaggcactggccatttaccccccttgtggccgacgaaaaattatcttgagcgacgagggtaagatgtacggcagaaatgagcttattgcccggtatattaaactgcgcacagggaagactaggacgcgtaaacaggtgagttctcatctccaggtactcgcccgtcgcaagagtagagagatccagtcgaaactcaaaagctcacctcaggaccaggtgtccaaggacaaagcgttgcaatccatggcaagcatgtccagcgctcagattgtttccgcttctgtgttacagaataaatttagcccgcccagccccttgcctcaggctgtgttttccaccagtagcaggttctggtcctcacctcccctcctcgggcaacagcctggtccttcccaggacatcaagcctttcgctcagccagcttatccaatacagccacccctgccgcctactctgtctagctacgaacctctagcccctttgccctcggctgccgcctcagtacctgtttggcaggatcggaccatcgcatcctcccgcctgaggctactcgagtacagcgcttttatggaagttcagcgggacccagatacatacagcaagcatctgtttgtgcacataggccagaccaaccccgctttcagtgacccgcccctagaagcggtggatgtcagacagatttatgataagttccccgagaagaagggaggcctgaaggagctctatgaaaagggccctccaaacgctttctttctggtcaagttctgggctgatctcaattcaacaatccaggaaggtcccggagcattctatggcgtcagctcccagtactcaagcgcagacagcatgacaattagtgttagcacaaaagtttgtagttttggcaagcaggtcgtcgaaaaggtggagactgagtatgctcgtctggagaatggtcggttcgtttacaggatccacaggagccccatgtgcgagtatatgattaattttatccacaagctcaagcacctgccagagaagtacatgatgaactctgtcctggaaaactttacaatcctgcaagtggtcacctctcgcgactctcaggagactctgctcgtgatcgcctttgtgttcgaagtttcaacgtcagagcacggcgcgcaacaccacgtgtacaaactcgtgaaggactag

SEQ ID NO: 208262 - DNA, 1176 bp, synthetic construct
  misc_feature 1..1176: note = Description of Artificial Sequence: Synthetic coding sequence
  source 1..1176: mol_type = other DNA
ctggagggcaccgccggcaccatcaccagcaacgagtggagcagccccacgtcgccagagggctccaccgcttctggcggctctcaggccttggataaaccaattgacaatgatgcagagggggtgtggtcccccgacattgaacagtcattccaagaggcactggcgatctatcccccttgcggaagaagaaagatcatactgtcagacgagggcaaaatgtacgggaggaacgaactgatagcccgctatatcaagcttaggacagggaaaacaagaacgcgaaaacaagtgtcaagccacatccaggtactggcccggaggaaagcgcgtgagatccaagctaagctcaaattttggcaaggggccctgcccggacaggccggaacttcgcatgatgtgaagcccttcagccagcagacatatgctgtgcagcctcctctgccattacctggctttgaaagtccggctggtcctgctcctagcccctccgcccctccggccccgccgtggcaaggccgctctgtcgcgagttcaaagttatggatgctggagttttctgccttcctggagcagcaacaggaccccgatacttataacaagcatttgttcgttcacataggtcaatcttctcccagttacagtgatccctacctggaggctgtagatatcaggcagatctacgataaattcccagagaagaagggcggattaaaagacctcttcgaaagaggtccatctaatgcttttttcctggtgaaattttgggctgacttaaacacaaatatcgaagatgaaggatctagcttctatggagtctctagtcagtacgaatcccctgaaaacatgatcatcacctgcagtaccaaggtttgttccttcggcaaacaggtcgtagagaaagtggagactgaatatgcacggtatgaaaatggtcactatagctacaggatccacaggagtccactgtgtgaatatatgataaatttcattcataagcttaagcacctgccggagaagtacatgatgaattccgtgctcgagaacttcacaattcttcaggtggtgaccaatagagacacacaggagaccttgctttgtatagcttatgtgttcgaagtgtcggccagcgagcatggcgcccagcatcacatatacagactcgtgaaggagtag

SEQ ID NO: 208263 - DNA, 1305 bp, synthetic construct
  misc_feature 1..1305: note = Description of Artificial Sequence: Synthetic coding sequence
  source 1..1305: mol_type = other DNA
ctggagggcaccgccggcaccatcaccagcaacgagtggagcagcccgacctccccagagggttccacggccagtggcggatctcaggccctggataaaccaattgacaatgacgctgagggggtgtggtcaccagacatcgagcagagttttcaagaagcactggcaatctacccaccgtgtggcagacgtaaaataatactgtccgatgagggaaaaatgtatgggaggaatgagctcatcgcaagatacatcaaactgcggaccggcaagacaaggactcgtaagcaggtctcgtcacatatccaggtgctcgctcgaagaaaagctagggagatccaggcaaaactgaaagatcaggcagcaaaagacaaagccctacaatctatggcggcaatgtcaagtgcacaaatcattagtgccactgctttccatagttccatggctctggcacgtggaccgggtcggcctgctgtgagcggcttctggcaaggcgccctgccgggtcaggctggtacctcacacgacgtgaaacctttttctcaacagacatacgccgtgcagccccccctgccactcccagggttcgagagcccagctggaccagcgccctctccctcggctcccccagcccccccctggcagggaaggtctgtcgcctcctccaagctgtggatgctggagtttagtgcctttctagaacaacagcaggaccccgacacgtataacaaacatttattcgtgcacattgggcagtcctcaccctcctactccgacccttacctcgaggcagtggatatccggcagatatatgacaagtttccagaaaaaaaaggaggcttgaaggatctattcgagcggggccccagcaatgccttcttcctggtgaaattctgggccgaccttaataccaacattgaagatgagggctcttcattttatggggtgtccagtcagtacgagtcaccggaaaacatgataattacatgtagtacgaaagtctgctcctttggaaagcaggtggtagaaaaagtggagactgaatacgcccggtacgagaatggacattactcatataggatccacaggtctcccctttgtgaatacatgatcaacttcatccacaagcttaagcacctgcctgaaaaatacatgatgaattcagttcttgagaatttcacaattctgcaggtcgttactaaccgggacactcaggagactctcctttgtattgcctacgtgtttgaggttagtgcttccgagcacggcgcgcaacaccatatctacagattagtaaaagaatag

SEQ ID NO: 208264 - DNA, 918 bp, synthetic construct
  misc_feature 1..918: note = Description of Artificial Sequence: Synthetic coding sequence
  source 1..918: mol_type = other DNA
atggccgccatgagcagcgcccagatcatcagcgccaccgccttccactcatctatggctctggcacgaggacccggccgacctgctgtttccggcttttggcaaggtgccctgcctgggcaagcaggtaccagtcacgatgttaagcccttctcacagcaaacctacgccgtgcagcctcccctacccctgcctggattcgaatcccccgctgggcccgcaccatccccctccgctcctcctgccccaccgtggcaagggaggagtgtggccagttcaaagctttggatgttggagttcagcgctttcttggagcaacagcaggaccctgacacctacaataagcacctgtttgttcatatcgggcaaagttctccctcctacagcgacccttatttggaggcagtggatatcaggcaaatctacgataagtttccagaaaaaaagggaggtttaaaagaccttttcgaaagaggaccgtccaacgctttcttcttggtcaaattctgggctgacctcaatactaatatcgaagatgaagggtcttcattctacggcgtttcatcccagtatgaatcacccgagaacatgatcataacttgcagtaccaaggtgtgcagctttggcaagcaggtggtggaaaaagttgaaaccgaatacgcccggtacgaaaatggacattattcctatcgtatccatcgatctcctctgtgcgaatatatgattaattttatccataaactgaagcatctcccggagaaatatatgatgaactctgtcctcgagaacttcaccatcctgcaggtggtcaccaaccgggatactcaggagactctcctttgtatcgcatacgtgtttgaagtgtccgcttccgagcacggggctcagcaccacatttatcgcctggtcaaggagtag

SEQ ID NO: 208265 - DNA, 219 bp, synthetic construct
  misc_feature 1..219: note = Description of Artificial Sequence: Synthetic coding sequence
  source 1..219: mol_type = other DNA
ctggagggcaccgccggcaccatcaccagcaacgagtggagcagccctacatctcctgagggaagcacggcttcgggtgggtcacaggccctcgacaagccaatcgacaatgacgccgagggcgtgtggagcccagatattgagcagagctttcaagaggccttggcaatctatccaccttgtggccgacgcaagatcattcttagcgatgaggggtag

SEQ ID NO: 208266 - DNA, 69 bp, synthetic construct
  misc_feature 1..69: note = Description of Artificial Sequence: Synthetic coding sequence
  source 1..69: mol_type = other DNA
ctggagggcaccgccggcaccatcaccagcaacgagtggagcagcccaacttcaccagaagggtcctag

SEQ ID NO: 208267 - DNA, 528 bp, synthetic construct
  misc_feature 1..528: note = Description of Artificial Sequence: Synthetic coding sequence
  source 1..528: mol_type = other DNA
ctggagggcaccgccggcaccatcaccagcaacgagtggagcagccccactagcccagaggggagtaccgcttccggtggctcccaagccctcgataaaccaatagataacgatgccgaaggagtttggtcaccggatattgaacagtcctttcaagaagcccttgccatctacccaccttgtggcaggcgcaagatcatcctgtcagacgaggggaagatgtatggtagaaatgaactgatcgccagatacattaaactgcggaccgggaaaactcgtactagaaagcaggtcagttcacatatacaggtattggcccggcgcaaggcgagagagattcaggctaagctgaaggaccaggcagctaaggacaaagccctgcaatctatggcagcgatgtcctcagcacagattatttcagcaacagctttccattcatctatggccctagcccggggacccggcaggccagccgtttctggtttctggcagggcgctctgcctggccaagccggcacaagccactag

SEQ ID NO: 208268 - DNA, 3099 bp, synthetic construct
  misc_feature 1..3099: note = Description of Artificial Sequence: Synthetic coding sequence
  source 1..3099: mol_type = other DNA
atgtgcaacgaggagaccgagatcaaggaggcccagagctaccagaattctccagttagctccgctaccaatcaagacgcagggtatggttcaccttttagcgaaagcagcgaccagctggcacactttaagggttcaagcagccgagaggagaaagaggaccctcagtgccctgatagcgtttcataccctcaggattctttggcccagattaaagccgtctacgccaatttgttttctgaatcatgttggtcatcccttgcgctggatcttaaaaagtctggaagcactacatccaccaacgatgcttcccaaaaggagtcttccgcccccacccccacgcccccaacctgcccagttagcaccaccgggcctacaacgagtaccccaagtacaagctgctcatcctcaacttcgcactcctcaactacgtccacatcatcttcatccggctacgactggcaccaagcagcccttgctaagaccctgcagcagacaagttcgtatggattactgccagagccctcgcttttctccacagtccagctgtatagacagaataacaagctatacggcagtgtatttactggggcaagtaaatttcgttgcaaggactgttccgcagcatacgataccttggttgagctgacggtgcatatgaacgagacaggccactaccgtgacgataatcgggataaagactctgagaagactaaacgctggagtaagccccggaaacgctcgctaatggaaatggagggcaaggaagacgctcagaaggtgctgaagtgcatgtattgcgggcacagtttcgagagcctacaagatcttagcgtccatatgattaagacaaagcactatcagaaagtgcctctgaaggaacccgtgcccgccattactaaactcgttccatccacgaaaaagcgggccctccaggatctggccccgccctgctccccggagccagccggcatggcagcagaggttgccctgtcggagtccgccaaagatcagaaggcagccaatccatacgtaacgcctaataaccgttatggttaccaaaatggtgcaagctacacatggcaatttgaggcacggaaagctcagatcctgaagtgcatggagtgtgggagttctcacgacaccctccagcagcttacagctcacatgatggtcacaggtcatttcctgaaagtgacaacctccgccagtaaaaaaggcaaacaactggttctcgacccagttgtggaagagaagattcagtcgattccgctgcccccgaccacccacacgcgactgcctgcttcatccattaagaagcaaccagacagtccagctggcagtactacttcagaggagaagaaggagcctgaaaaggaaaagccccccgtggcgggcgacgctgagaaaataaaggaagagtcagaagacagcctcgaaaagtttgagccatctacactgtacccgtacctgcgagaagaggatctcgatgactctccaaaggggggcttggacatcctcaaaagtttggagaacaccgtaagcactgctatatcaaaggcacagaatggtgctcctagttggggcggatacccttctatccacgccgcgtaccagctgcctggcaccgttaagcccttgccagctgctgttcagtccgttcaggttcagccctcctatgctgggggcgtgaaatctctcagctctgccgaacacaatgctctgcttcacagtcccggcagcctgaccccccccccccacaagtctaacgtgtcggccatggaagagctggtggagaaggtcacgggtaaagttaatatcaagaaagaggagcggccgcctgagaaggagaagagttctctggcaaaggcagctagtcccatagctaaggagaacaaggactttcccaagaccgaggaggtttctgggaagccacagaaaaaaggccctgaggccgagactggaaaggccaaaaaggaagggcctctcgacgtgcacacaccaaacggaacagagcctttaaaggcaaaggtgacaaacggctgcaataacttgggaatcatcatggaccattccccggagccgtccttcattaatccactaagcgctttgcagtcaatcatgaatacccatcttggcaaagtgtcaaaacccgtgtcgccatccctggacccgcttgcaatgctgtacaaaatctcaaattcaatgctggacaagcctgtgtaccctgccactcccgttaaacaggccgacgccatagatagatactattatgagaatagtgaccagcctattgacctgactaagtctaagaacaagccactcgtgagcagtgttgccgactctgtggcttcccccctgcgagagagcgccctcatggatatctcagacatggtgaaaaacttgactggccgtttaacaccgaaatcctcgacgccttctactgtctctgagaaaagcgacgctgacggttctagctttgaggaggctttagatgagctgtcgccagtgcacaagagaaaaggaaggcagagcaactggaatccccagcacctgctgatcctgcaggcccagtttgcttcgtctttacgtgaaacaactgagggcaaatacattatgagcgaccttggccctcaggaaagggtgcacatttcaaaattcaccgggctgtctatgactacgatctcccattggcttgcaaatgtgaaatatcaactgcgccgcaccggcggaacaaagtttctcaagaatctcgatactggccaccccgtgttcttctgcaatgactgtgcttctcagtttcgaactgccagcacttatattagccacctggagactcatctgggcttctccttgaaggatctcagcaaattgcccttaaatcagatccaagaacagcagaacgttagtaaggtgctcaccaacaagacgctgggaccacttggggccaccgaagaggatctcgggtccacttttcagtgtaagctgtgcaatcggacttttgcatccaagcacgcagttaagctccatctgagcaagacgcacggcaaaagccctgaagatcacctgatatatgtcaccgagttggaaaaacagtag

SEQ ID NO: 208269 - DNA, 237 bp, synthetic construct
  misc_feature 1..237: note = Description of Artificial Sequence: Synthetic coding sequence
  source 1..237: mol_type = other DNA
atgtgcaacgaggagaccgagatcaaggaggcccagagctaccagaactctcccgttagctcagctacaaatcaagatgccggctacgggagcccattctctgagtcgtccgatcaactggcacatttcaagggatcttcttccagggaggagaaggaagacccacagtgtccggattccgttagttatccacaggacagcttggctcagatcaaggccgtatacgcgaatctatag

SEQ ID NO: 208270 - DNA, 321 bp, synthetic construct
  misc_feature 1..321: note = Description of Artificial Sequence: Synthetic coding sequence
  source 1..321: mol_type = other DNA
atgtgcaacgaggagaccgagatcaaggaggcccagagctaccagaacagccccgtgtcgtctgccacaaaccaggatgccggttatgggtcccctttcagcgaatcttctgatcagttggcccactttaagggcagttcatcacgggaggaaaaagaagatccacagtgccctgacagtgtctcttatccacaagattccctcgcacagataaaagctgtgtacgctaacttgttctctgagtcttgctggagctctctggcacttgatcttaagaaatcaggctctaccacaagtactaatgatgccagccagaaatag

SEQ ID NO: 208271 - DNA, 3096 bp, synthetic construct
  misc_feature 1..3096: note = Description of Artificial Sequence: Synthetic coding sequence
  source 1..3096: mol_type = other DNA
atgatggccgccgccctgctgcactacaccggctacgcccaggaggaacagctcaaggaggaagaggagatcaaggaggaagaagaggaagaggactctggttccgtggcgcagctgcaaggcggtaacgacactggcaccgatgaggagctggaaaccggccccgagcagaagggttgcttctcctaccagaacagccctggttcgcacctctccaatcaggatgccgagaatgagtcccttctctctgatgcatcggatcaagtgtcggacataaaatccgtctgcggacgagacgccagcgataaaaaggcccacactcacgtgaggctacctaacgaagcacataactgcatggataagatgactgccgtgtacgctaatatactttcagactcttactggtccgggttgggactgggctttaaattgtcaaattctgagaggaggaattgtgacaccagaaacggcagcaacaagtccgatttcgactggcatcaggacgccctgagcaaaagcctgcagcaaaacctgcctagccgctccgtatccaagccctccctgttctcaagcgtacagctctacaggcaatctagcaagatgtgcgggacagtgtttacaggcgcttctcgttttcggtgtcgtcagtgctctgctgcatacgatacactggtcgagctcacagtgcacatgaacgagacaggacactaccaggacgataatcggaaaaaggacaagctgagacccacatcttacagtaagcctaggaagcgcgcctttcaggacatggacaaggaggatgctcagaaagtgcttaaatgcatgttttgtggcgacagttttgactccttacaagatctttctgtgcatatgatcaaaactaaacactaccagaaggtgccactgaaggaacccgtgccaacaatctccagtaaaatggtgaccccagccaaaaaacgcgtgtttgacgtcaataggccgtgtagccccgattcgaccacgggatcattcgccgattcctttagctcacagaagaatgcaaaccttcagttgtccagcaacaatcgctacgggtatcagaatggagcctcttacacatggcaatttgaggcatgcaaatctcagattctgaagtgcatggaatgcggaagtagtcacgacactctccagcaattgacgacacacatgatggtcaccgggcactttctgaaagttacctcttccgcctccaaaaaaggaaagcagttagtgctggatcccctcgcagtcgagaaaatgcagtccttgagcgaagcaccaaattcggatagccttgccccaaaacccagctccaattccgcctctgactgcaccgcctccactacggaacttaagaaagaatctaaaaaagaaaggcctgaagagacatcaaaggatgagaaagtggtcaaatccgaagattacgaagatcctctgcagaaacctcttgacccaacaatcaaatatcaatatctgcgcgaggaagatctggaggacggatctaaaggtggcggagatattcttaagtcactcgaaaataccgttaccacagcgattaataaggcccagaatggcgccccatcatggtcggcctacccttctatacatgccgcctatcagctgtctgagggcactaaaccgcctctcccgatggggtcccaagtcctgcagattagacccaatctgacaaacaaactgcgacccattgcccccaagtggaaggtcatgcccctggtttccatgcctacccatttggctccatacacacaggtgaaaaaggaaagcgaagacaaggacgaagccgtgaaggagtgcgggaaggagtccccccacgaagaggctagctcattttcacattcagagggcgacagttttcggaagagtgaaaccccaccagaggcaaagaaaactgagctgggccctctgaaggaagaggagaagctgatgaaggaaggcagcgaaaaggaaaaaccccagcctctcgaaccaacctctgccctgtccaatggatgcgctctggccaatcacgctcccgctttaccttgcatcaacccactctccgccttgcagtccgtgctgaacaaccacctcggaaaagccacggagccactgcgtagtcccagctgtagtagccctagttcatctacaatctctatgtttcataagtctaacctgaatgtgatggacaaacctgtcttaagccccgcttcaactaggtcagccagtgtttcacggaggtacctgttcgagaactccgatcagcccatcgacctaacaaagtccaagtctaagaaggcagaaagttcccaggctcagtcatgtatgagtcctccgcagaagcacgccctgtccgacatcgccgacatggtaaaggtgctccctaaggctacaacacccaagcctgcctctagttcccgggtgcctcccatgaagctcgagatggatgtgcggaggttcgaagatgtttctagcgaagtgagcacactgcacaagcgtaaagggcggcagagcaactggaaccctcagcaccttcttatacttcaagcccagttcgcgtcgagtctctttcagacctcagaggggaagtacctgctctctgaccttggaccccaggagcgcatgcagataagtaagtttacgggccttagtatgaccactattagtcactggttagccaatgtgaaataccagctccggaaaacaggggggaccaagttcctgaagaatatggacaaaggtcaccccattttttattgtagcgactgcgcatcccagtttcgtaccccaagcacatatatttcacacctcgaaagccatctagggtttcagatgaaggacatgacgcggctgtctgtcgaccagcagtccaaggtggagcaagaaatcagccgcgtgtcctccgcccagaggtctccagagacgatagctgccgaggaggataccgatagtaaattcaaatgtaagctgtgttgccgcaccttcgtttcgaagcacgcagttaagctccacctcagcaagacccattctaaatcaccagagcatcatagtcagttcgtcaccgacgttgacgaagaatag

SEQ ID NO: 208272 - DNA, 3105 bp, synthetic construct
  misc_feature 1..3105: note = Description of Artificial Sequence: Synthetic coding sequence
  source 1..3105: mol_type = other DNA
atgccccggcggaagcagcaggcccccaagcgggccgccggctacgcacaggaagaacagcttaaagaggaggaagagataaaagaggaagaggaagaagaggattctggaagtgtggctcagcttcagggagggaacgatactgggactgacgaagaactggaaactggtcctgaacaaaagggatgcttttcatatcagaatagtccggggtcccatctctccaatcaggacgcagaaaacgagtcactgctgagcgatgcatccgaccaggtcagcgacatcaagtccgtctgcgggagggatgcgagcgataagaaagctcacacccacgttcgcctccccaatgaggcgcataactgcatggataaaatgacggcggtgtatgccaacatcctctccgattcctattggtcagggctgggtctgggcttcaagttatcaaattccgagagaaggaactgtgataccagaaatggctccaacaagagcgactttgattggcatcaggatgcgctgtccaaaagtctccagcaaaacctcccttcccgaagcgtgtcaaaaccctctctcttctcctcagtccagctgtataggcaatccagtaaaatgtgcggcacagtttttacaggcgccagccgcttccggtgccgacagtgctccgcagcttatgacaccctcgtggaattaacggttcacatgaacgaaacaggtcactaccaggatgacaaccgtaagaaagacaaattgcgacccaccagctatagcaagccgcgtaagagagcttttcaagatatggacaaagaggatgcccagaaggttctgaagtgtatgttttgcggggatagtttcgacagcctccaggacttgtcggtgcatatgattaaaactaaacactaccagaaagtgccattaaaggagccagtacctactattagttccaaaatggtgacccccgccaagaaaagggtttttgatgtcaatcgcccatgcagtccagactccacgacagggagttttgccgactctttttcttcacagaagaatgccaacctgcaactgtccagcaataaccgctatggctaccagaacggagccagctatacttggcagtttgaggcttgtaaatctcaaatcctaaaatgtatggagtgcggatcaagccacgatactttgcagcagctgacgactcatatgatggttaccggacatttcttgaaggttacttctagtgcctccaagaaaggcaaacagctggtgctggatcctctcgccgttgagaagatgcagagcctttccgaagcccccaattccgacagcctcgccccgaagccaagcagcaattccgcctccgattgcacggcttccacaaccgagcttaagaaggagtctaagaaagaaagaccagaagaaacatctaaagatgaaaaggttgtgaaatccgaagactacgaggaccctctgcagaaacccctggatcccacaataaagtatcaatatctgagagaggaggacctcgaggatggcagcaagggaggaggagatattcttaaaagtcttgagaatactgtgactactgccatcaataaagcccagaatggagccccctcttggtccgcctatccaagtatccatgctgcgtatcagctctctgaaggaacaaagcctccgctgccaatgggcagccaagtgctacaaattcgcccaaatctcaccaataaattgcgtccaatcgccccgaagtggaaagtgatgccactcgtgagcatgcccacccacctggcgccatacacccaggtcaaaaaagaatccgaagacaaagatgaagcggtgaaagagtgcggaaaggagtccccacatgaagaggcgtcctcctttagtcactctgagggcgacagttttagaaaatctgaaaccccccctgaagcgaagaagaccgagcttggacctctcaaggaggaggaaaagctgatgaaagagggttctgagaaagagaaacctcaaccgctggaaccgacttcagctctgagtaacggctgcgccctagctaatcacgctccagctctgccctgcataaaccccctgtctgcactgcagtccgttctcaacaaccatctcggaaaagcaacagagccgctgcgctctccctcttgttcctccccttcttcatctacgatcagcatgtttcataagtccaatctcaatgttatggataaacctgtgctgagcccagcaagcaccagatcagcttccgtcagccggaggtacctgttcgaaaattccgaccagcctattgacttaactaaatctaaatccaaaaaggccgaatctagccaggcccagtcatgcatgtcaccacctcaaaaacacgctctctccgacatcgccgacatggtgaaagttctccccaaagccacgactcctaagcccgctagctccagccgggtgccaccgatgaaactcgagatggacgtacgcaggtttgaagatgtgagttctgaagtgagtaccctgcacaagcgaaaagggcgccagtcaaactggaacccacagcatctgctaatcttgcaggcccaattcgccagttcccttttccagacatccgaagggaaatacctgttgtccgatcttggcccacaggagcgtatgcagatcagcaaatttacagggctctctatgactactatctcccactggcttgctaacgtgaaatatcagctccgcaagacaggtgggacgaagttcctgaagaacatggacaaagggcatcctattttctattgttccgactgtgccagccagtttcgaacccctagtacatatatatctcatctggaatcccaccttggtttccagatgaaggatatgacccggctctctgtagaccagcagagtaaagtcgaacaagaaatctccagggtgtcatctgcccagaggtctccagaaactatagcggcggaggaggacaccgactcaaaattcaagtgcaaactatgctgcagaactttcgtgtctaaacacgcagtgaagctacatctcagcaaaactcactctaaaagcccagagcaccactcacaatttgtgactgatgtcgacgaggagtag

SEQ ID NO: 208273 - DNA, 3246 bp, synthetic construct
  misc_feature 1..3246: note = Description of Artificial Sequence: Synthetic coding sequence
  source 1..3246: mol_type = other DNA
atgccccggcggaagcagcaggccccccggcgggccgccgcctacgtatctgaggaacttaaagccgctgccctggtggatgaaggtctagacccagaggagcacacggcagacggagagcctagtgctaaatacatgtgtcctgagaaggaactcgcccgggcctgtccatcataccaaaactctccagccgcagaattctcctgtcacgagatggattcagagtcacacatcagtgagactagcgataggatggcggattttgagtctggctcaattaaaaacgaggaggaaaccaaagaagtaaccgttcctctcgaggacaccaccgtctcagatagcctggaacagatgaaggcggtatataataacttcctatcaaattcatactggtccaaccttaatctgaacttgcaccagccctccagtgaaaaaaataatggaagctcctcttcttcatcaagctcaagcagcagttgcggctccgggagcttcgactggcaccagtcagccatggcaaagaccctgcagcaagttagccaatccaggatgttgcccgagccctcactgtttagcaccgtgcagctttaccggcagtcaagcaagctgtatgggtcgatatttactggtgccagtaaattcaggtgtaaagactgctctgcagcttacgataccctggtcgaattgactgtgcatatgaatgaaactgggcattatagggatgataaccacgagaccgataataataaccctaagcgctggagcaagccgaggaagaggtcactccttgagatggagggcaaggaggatgcccaaaaagttctaaagtgcatgtactgcggtcactcctttgaatccttgcaagacttgagtgttcacatgattaagaccaagcactaccagaaagtccccttgaaagaaccggtcacacctgtcgctgctaagatcatccctgccacacggaagaaggcctcactggaactggagctcccatcatctccagactcaacaggcggaacacctaaagctacgataagcgatactaacgatgccctgcagaagaactccaacccttacatcactcccaataaccggtatggccaccagaatggggcctcttatgcatggcactttgaggcccggaaatcacaaatcctgaagtgtatggagtgtggctctagccacgacaccctgcaagaattgacagcccacatgatggtcacaggccactttattaaagtcactaattcggctatgaagaaagggaaaccaatcgtcgaaactcccgtgacacccacaattaccaccttacttgatgaaaaagtgcagtcagtgccactggcagccacaacatttacttcccccagcaacaccccagccagtatcagtccaaagttgaacgtcgaagtgaagaaggaagtcgacaaggaaaaagcagtcacagacgaaaaacctaaacagaaggacaagcccggcgaggaagaagaaaagtgcgatatcagtagtaagtatcattacctgactgagaatgacctggaggaatctcccaaaggaggattagatatcctgaaatctctggaaaatacagtcacatctgccatcaataaagcccaaaacggcacaccctcatggggtggctatccctcgatccatgccgcgtatcagctgcctaatatgatgaaactgagcctgggctccagtggcaagtcaacaccgctgaagcctatgtttggcaactcggagattgttagccccaccaagaaccagactctggtctcacccccgagtagtcagacttcccccatgccaaagacaaattttcatgccatggaggagctcgtcaagaaagttactgaaaaagtggccaaggtggaagaaaaaatgaaagagccagacggtaagttgtcgccaccgaaaagagccacacccagtccatgttctagcgaggtgggagagccaatcaagatggaagctagttccgacggaggcttcaggagtcaggaaaactcccctagtccccctcgcgacggctgcaaggacgggtcccctctggcagaacctgtggagaacggcaaggaactggttaagcccctggcttcttctctctccggatcgacagcaatcatcaccgaccatcccccagagcagcctttcgtcaaccctctcagcgccctccagagtgtaatgaatattcatctgggaaaagcggcaaagccttctctacctgcactggatcccatgtccatgctgtttaagatgagcaattctctcgccgaaaaagcagcagttgctacaccccctcccctccagtcaaagaaagcggatcatctcgatagatacttttaccatgtcaataatgatcaacccattgacttaaccaaaggcaagtccgacaagggatgcagtctcgggagcgtactgctatctccaacaagcacagctccagcaaccagctccagtaccgttactactgcaaagacaagtgctgtggtgtcatttatgtcaaatagcccgttgcgggagaatgccttgtccgacatctctgacatgctgaagaatctaaccgagtctcacacatccaaaagctctaccccgagcagcattagcgagaaatcggatatagacggggccaccttagaggaggccgaggaatctacaccagctcagaaacggaagggacgccagtcaaactggaaccctcagcatttgctcatccttcaggcacagtttgcagcctctttgcggcagacatcagaggggaagtacattatgtcagatctgagcccccaggaacgcatgcacatcagtaggttcacagggttgtcaatgactactataagtcactggctggctaacgtgaagtatcagcttcgtcgaaccgggggcacaaaattcctgaagaaccttgacaccgggcaccctgtattcttttgcaacgactgtgcttcccagattaggacaccttcaacatacatttcccacttagagtcccatttaggcttccgtctgcgggacctgtcaaagttatccacggagcagattaattcccaaatcgcccagacaaagtccccttctgagaagatggtgactagctccccggaagaggatctgggtactagctatcagtgcaaattgtgcaaccgcaccttcgcttcgaaacatgctgtcaagcttcatctatcaaaaacgcatggaaagagtcccgaagaccacctactatacgtctctgagctagagaagcagtag

SEQ ID NO: 208274 - DNA, 1896 bp, synthetic construct
  misc_feature 1..1896: note = Description of Artificial Sequence: Synthetic coding sequence
  source 1..1896: mol_type = other DNA
atgaacttcaacaccatcctggaggagatcctgatcaagcggagccagcaaaaaaagaagacgagtcctctgaattacaaggaacgactatttgttctcactaagtcaatgctgacgtactatgaagggcgtgcagagaagaagtataggaagggattcatcgatgtctcaaagatcaagtgcgttgagatagtaaagaatgacgacggtgtcattccctgccagaacaagtaccccttccaggtagtgcatgacgctaatactctgtatatcttcgcaccgagcccccagagcagagatttatgggtgaaaaaactaaaagaggagattaagaacaataataacattatgatcaagtaccatcccaagttctggaccgacgggagttaccagtgctgccgtcagactgagaagctggcacctggttgcgagaagtataatcttttcgagtctagcattcggaaggccctccctcccgcacctgaaaccaaaaaaagacgccccccgcctccaatccctctcgaagaagaggataactccgaggaaatcgtcgtcgctatgtatgactttcaggccgccgagggccacgatctgcgcttggagcgcggtcaagaatatctgatcctggaaaagaatgacgttcactggtggagggcccgtgataagtacggaaatgagggatacataccctcgaattacgtcactgggaaaaaatccaataatcttgatcaatacgaatggtactgccgcaatatgaataggagcaaagctgagcagctcctgagatctgaagataaggagggtggtttcatggtgagggattcctcccagcctgggttgtacaccgtttctctctacacaaaatttggaggggaggggtcctcaggattcagacattaccatatcaaggagacaaccacatcacccaaaaagtattacctcgctgaaaaacacgcgttcggatcaattcctgaaatcattgagtaccacaaacacaacgcagctggattggtcactcggctgcggtatcccgtgagcgttaagggaaaaaacgcccccaccacagctggattctcgtatgagaagtgggagattaacccaagcgaactgacatttatgagagagctcggctccggactctttggagttgtgcgactgggcaaatggagagctcagtacaaggtggcaattaaggcaataagagaaggggccatgtgcgaagaggatttcattgaggaggccaaagtcatgatgaaacttacccacccaaaactggtccagttgtacggtgtgtgcacacaacagaagcctatctacatcgtgacggagtttatggaacgggggtgtcttttgaactttcttcgacagaggcaaggacatttttcccgggacgttctgctaagtatgtgccaggatgtctgtgaggggatggaatatttggagcgtaacagtttcattcatcgcgatctcgcagcgagaaactgcttggtgtcagaggcgggtgtggtcaaggtgagcgacttcggcatggctaggtatgttctggacgatcaatacacatcatccagcggagccaagttccccgtcaagtggtgtcctccagaggttttcaactacagcaggttttcatctaagtcggacgtctggtcctttggggtgctcatgtgggaggtatttacggaggggcgcatgcccttcgaaaaatatactaattacgaggtggtgacgatggttacccggggtcatcggctgtaccagccaaagctggcatcgaattatgtgtatgaagtaatgcttcgatgttggcaggaaaagcccgaagggagaccctcattcgaggacctcttgcggacaattgacgaactcgtcgagtgcgaagaaactttcggacgatag

SEQ ID NO: 208275 - DNA, 2094 bp, synthetic construct
  misc_feature 1..2094: note = Description of Artificial Sequence: Synthetic coding sequence
  source 1..2094: mol_type = other DNA
atgggcttccagccccccgccgccctgctgctgcggctgttcctgcttcaagggatactgcgcctgctgtggggggacttggctttcataccacctttcataaggatgtctgggccagccgtctccgccagtctggtgggagatacagagggtgtcactgtttcccttgcagtcctgcaggacgaggcaggtattctgcctatcccaacctgtggagtcctgaacaacgagaccgaggactggtccgtcacggtcataccgggagccaaagtacttgaggtcaccgttcggtggaagagagggttggactggtgctctagtaatgagaccgactcttttagtgaatccccttgcatcctccaaacactgcttgtatcagcttcccataatagttcatgttcagctcaccttcttattcaagtcgaaatctatgcaaacagctcacttacacacaatgcctccgaaaacgtcaccgtcatccctaaccaggtctaccagcctctgggcccatgtccgtgtaatctgaccgcgggtgcatgtgatgtgcgttgctgttgcgaccaggaatgctcttccaacctgactacactttttcggaggagctgctttaccggcgtgttcggaggcgatgtaaaccctccattcgaccagctgtgttccgcagggactaccacaagaggggtcccagattggttccctttcctttgtgttcagtcaccactggctaatacgccttttctcgggtacttctatcacggtgccgtgtcccccaaacaggatagctcttttgaagtctatgtggataccgacgccaaagactttgcggacttcggctacaaacagggcgaccccatcatgacggtaaaaaaggcctactttaccatcccacaggtgagcttagccggccagtgtatgcagaatgcaccagtcgccttcctccataacttcgacgttaaatgcgttaccaatctggaactatatcaggaaagggatgggattatcaatgccaagattaaaaatgttgccctcggcgggatagtgacacccaaagttatatacgaggaggcaactgacctcgataaatttatcaccaacaccgagaccccccttaacaacgggtctaccccccgcatcgtaaacgtggaggagcattatattttcaagtggaataacaacactataagcgaaatcaatgtgaagattttccgagctgagattaacgcgcaccagaaaggtatcatgacacagcgcttcgttgtgaagtttttgtcttacaatagtggtaacgaagaggagctgagcggcaatccgggataccagctcggtaagcccgtgcgcgcactgaatataaataggatgaataacgttactaccttgcacttgtggcagtccgcaggtcgcggcctatgcacatccgccactttcaaaccaatccttttcggcgaaaatgtgctgagcggttgcctgcttgaggtcggtatcaatgagaattgcacccagctacgcgagaacgccgtggagagattggactctctaatccaagccacacatgtcgctatgaggggaaatagcgattatgccgacctgagtgacgggtggctggagatcattcgtgtggacgcgcctgatccaggcgcagacccccttgctagcagtgtcaacgggatgtgcttggatatcccggcacacctgtcaattcgtatactgatctctgacgccggcgccgtggaggggatcacgcagcaggaaattttgggtgtggagactaggttctcctctgttaattggcaataccaatgcggactgacttgtgaacataaggctgacctccttccgatatccgccagcgtgcagtttattaagattccagcacagctgccacaccctttgactcggttccaaattaattacactgaatacgattgcaacagaaacgaggtctgctggccacagttactgtatccatggacacagtactaccagggcgaacttcattcacaatgcgtggcaaagggcctgcttttgctgctgtttcttacactggccctgttcttgtccaatccatggacgcggatctgtaaagcctacagttag

SEQ ID NO: 208276 - DNA, 2091 bp, synthetic construct
  misc_feature 1..2091: note = Description of Artificial Sequence: Synthetic coding sequence
  source 1..2091: mol_type = other DNA
atgggcttccagccccccgccgccctgctgctgcggctgttcctgctccagggcatcctcagattactgtggggtgacctcgcctttatcccccctttcatccgaatgtcgggacctgccgttagcgcttctctcgtgggcgacaccgagggagtaaccgtttccctcgccgtcctccaggacgaagcaggaatcttacccatcccgacatgcggtgtacttaacaatgagacggaggactggagtgttaccgtgatccccggggcggtcctggaggtcacagtaaggtggaaacgaggcttagattggtgtagctctaacgagaccgacagcttctccgaatccccatgcatcctccagaccctgctggtgagtgcatcacataattcctcttgctccgcgcatctattgatccaggtggagatctatgcaaactccagcttaacacacaacgcttccgagaacgtcaccgttattcccaaccaggtttatcagcccctgggaccctgcccctgcaatctgaccgcgggcgcatgtgacgtgcgctgctgttgcgaccaggaatgctcctctaacctaaccactctttttaggagatcatgtttcacaggtgtttttggaggagacgtcaaccccccatttgatcagctctgttcagccggtactacaaccagaggcgttccagactggtttcctttcttatgtgtccaatccccactggccaacactccattccttgggtacttctaccacggagctgtttctcccaaacaggactcttcgtttgaagtgtacgtcgacacggatgcgaaggacttcgctgacttcgggtacaagcagggtgaccctattatgacggtgaaaaaggcctactttactattcctcaggtgagtctggccggccagtgcatgcagaacgcaccagtggcctttctgcataattttgacgtcaaatgcgtgaccaatctggagctgtatcaagaacgagacggaatcattaatgcaaaaatcaagaacgtcgcgctcgggggcatcgtcactcccaaagtgatctatgaagaggcgactgacttggacaagttcatcactaacaccgaaactcccctgaacaacggcagtacgccgcgcattgttaacgtcgaagaacactatattttcaagtggaataataacactattagtgaaatcaatgttaaaatcttccgggccgagatcaatgcacatcaaaagggcatcatgacccaacggttcgtggtgaagtttctctcatataactccggcaacgaggaagagctgagtggcaacccagggtaccagctaggaaagcccgtccgtgccctaaacatcaatagaatgaataacgtgactacgctgcatctctggcaatccgccggccgcggactatgtaccagcgcaacattcaaacctattctattcggagaaaatgttttatctggatgtctgcttgaggtgggtattaatgaaaactgtacccagctgagggagaacgctgtggagcgcctggactcactcattcaggccacccacgtagcaatgcgggggaatagtgactatgccgacctgagcgatggatggttggagattattagggtggacgctccggacccgggcgcagacccattggcttcttcggttaacgggatgtgtctggacatccctgcacatctctcaatccgcatcctcatttctgatgcgggagccgttgaaggaatcacgcaacaagaaatcctcggcgtggaaacacggttcagttccgtgaactggcagtatcaatgcggtcttacttgcgaacacaaagccgacctgttacccatctcagcctccgtccagtttattaaaattcccgcccagctgccacacccactgaccaggttccagatcaactacacagagtacgactgcaaccggaatgaggtctgctggccccagcttttgtacccatggacgcagtactaccagggggagctgcactcccagtgcgtggctaaagggctgctgcttttgctgttcctgaccctggccctgtttctgtccaacccatggacacgcatctgtaaggcttattcatag

SEQ ID NO: 208277 - DNA, 1824 bp, synthetic construct
  misc_feature 1..1824: note = Description of Artificial Sequence: Synthetic coding sequence
  source 1..1824: mol_type = other DNA
atgcggaccccccagctggccctgctgcaggtgttcttcctggtgtttcccgatggcgtgcggccgcagccttcatctagcccctcgggcgcagtccccacatctctcgaacttcagcgtggaacagacggcggaacacttcaaagccctagtgaagccactgccacccggccagccgtgccggggctgccgacagttgtgcccactctggtgacaccgtccgcccccggcaataggaccgtcgacctgtttccagtcttacctatttgcgtgtgtgacttaacacccggcgcctgtgacatcaattgctgttgcgacagagactgttacctactgcacccaagaacggtgtttagcttttgtctgcctggcagcgttaggtcgtcctcatgggtgtgcgtggataattcagtaatatttcgtagcaacagcccgtttccaagccgcgtcttcatggactccaacggcattagacagttttgtgtgcatgtcaacaattccaaccttaactatttccaaaaactgcagaaagtaaacgctacaaacttccaggccttagcagccgagttcggtggcgaaagcttcacgtccacattccagacacagtcacccccttccttttacagggctggcgaccccatccttacctactttccgaaatggtcagttatcagtctcctccggcagccagccggcgtgggggccgggggcctttgtgcagagtctaatccagcgggcttcctggaaagtaagtcaactacctgcacccgtttcttcaaaaatctcgcttcttcatgcactctggatagtgccctgaacgctgcatcttattataacttcacagtgcttaaggtccctcgctctatgacagatccacaaaatatggagtttcaagtcccagtgatcttgacgtctcaggccaatgctccattgcttgccggaaatacctgtcaaaatgtggtctctcaagtgacctatgaaatcgaaacaaatggaacattcggtattcagaaagttagtgtctccctggggcagacaaaccttactgttgaaccaggagcttccctgcagcagcattttattctccggtttagggcttttcagcaatcaaccgccgcgagtttgactagtcctagatcgggaaatcccggctatattgtgggaaagcctctgctcgctttgacagacgatatcagctatagcatgacactcctccagagtcagggtaatggttcgtgcagcgttaagcggcatgaggttcagttcggcgtaaacgccatttccggatgtaagctgcgactgaaaaaagccgactgcagccacttgcagcaagagatttaccaaacgctgcacggcagaccacgccctgagtacgtagccatttttgggaatgccgatcctgctcaaaaaggcggatggacaaggattctcaaccggcattgctctatttccgccatcaactgcacctcctgctgtctgattccagtgtctttagagatacaggtgttgtgggcgtatgtcggcctgctgagcaatcctcaggcacacgtgtccggtgtccgtttcttgtatcagtgtcaatccatacaggattcccaacaggtgaccgaggtgagcttgacaactctcgtgaacttcgttgacatcacacagaagcctcagccacccagagggcagcccaaaatggactggaagtggccatttgatttctttccgtttaaagtcgccttttccagaggagtgtttagtcagaaatgttccgtgagccccatcctgatcttgtgcctcctgcttctgggcgtcctgaatctcgagacaatgtag

SEQ ID NO: 208278 - DNA, 1290 bp, synthetic construct
  misc_feature 1..1290: note = Description of Artificial Sequence: Synthetic coding sequence
  source 1..1290: mol_type = other DNA
atggacagcaacggcatccggcagttctgcgtgcacgtgaacaactcgaatctgaattattttcaaaaactacaaaaggttaacgccacaaattttcaggccttggccgccgagttcgggggagaaagcttcacaagtaccttccagacacagagcccacccagcttttatagagcaggggatcccattctgacttacttccccaagtggagtgtgatcagtttactccgccagcccgcaggtgttggcgctggcgggctttgcgcagaatccaaccctgccgggtttttagagagcaaatcaaccacgtgtactcgattttttaaaaatctggcaagttcttgcacgcttgacagtgccttgaatgccgccagctactataattttacagtgctgaaggtgccgagatctatgacggaccctcagaatatggaggttacgtacgaaatagagactaatggtacatttgggattcagaaggtttccgtttcactcggccagaccaacttaaccgtggagcccggagcgtctttgcaacagcatttcatacttagatttcgcgcgtttcagcaatcaaccgccgcctcgctgacctcaccccggagcggcaaccccggctatattgtaggtaagccgctgctggctttgacagacgatatctcttattctatgacgctgttgcagtcccagggtaacggaagctgtagtgtgaaaaggcacgaggtgcaattcggagtgaatgcaatttccggctgtaaactgagactgaagaaagctgattgtagtcacctacagcaggaaatttaccagaccctccacgggcgccctaggcctgagtatgttgccattttcggtaatgcggaccccgctcagaagggaggatggacgcgaattttgaacaggcactgttctatctctgctataaactgtactagctgttgtttaatcccagtgtcactggaaattcaggtcctgtgggcttacgtaggactgctctcaaatcctcaggcgcacgtgagtggcgtccgttttttgtaccaatgccagtccatccaagattcacagcaggttacagaagtgtcgcttaccaccctggttaattttgtcgatatcacacaaaaaccacaacctcctagaggacaaccaaaaatggactggaagtggccttttgacttcttccctttcaaagtcgctttcagcagaggcgtgttcagtcagaaatgcagtgtgtcacccatcctcatcctgtgtttattgctcctgggggtgctgaacctcgagactatgtag

SEQ ID NO: 208279 - DNA, 1332 bp, synthetic construct
  misc_feature 1..1332: note = Description of Artificial Sequence: Synthetic coding sequence
  source 1..1332: mol_type = other DNA
atgcggaccccccagctggccctgctgcaggtgttcttcctggtgttccccgatggagtgcggccacagccgagtagtagtccatctggggcagtcccaacatctctagaactgcagagaggtaccgacggtggtaccttgcagagcccatcagaagcaaccgcaacccggcctgctgtaccaggcctgcctaccgttgtccccaccctggtgacaccctccgcacccggaaatagaaccgtggacctcttccccgtgttgcccatctgtgtgtgtgaccttactccaggcgcatgcgatataaactgctgttgcgatcgtgattgttacctgctgcatccacggacggtgttttccttttgcctgcctggctctgtcaggtcttcttcttgggtgtgcgtggacaacagcgtcatcttcagaagtaattcccccttcccatcgagagttttcatggacagcaatggcatccgccagttctgtgtccacgtgaataattctaacctcaattattttcagaagctacaaaaggtgaatgctactaatttccaggcactggccgccgagttcggtggagagagtttcacaagcaccttccagacccagtctccgccctccttttatcgggctggcgaccccatcctcacctatttccccaagtggagcgtgatatcgttgctacggcagccggccggtgtcggggcgggaggcctctgcgccgagagcaaccccgctgggttcctggagagcaagtcaacaacatgcacccgctttttcaagaacctcgcttcgagctgcaccttggactcggccctgaatgccgcctcttattataactttactgtgctaaaggtaccccgaagcatgacggacccccagaatatggaatttcaggtccccgttatcctgacatcacaggccaacgctccactgcttgcgggcaacacctgtcagaacgttgtcagccaggtgacatatgagattgaaacaaatggcactttcggtatccagaaggtctcggtaagtctcggccagacaaacttgacagtggaacccggggcctctctccaacagcatttcattctgcggtttcgggcctttcaacagtccaccgcagcctctctgacatcaccgcgatcagggaacccaggatacattgttggaaagccccttcttgcgcttaccgatgacatttcgtacagcgtgtcctttctggagttggggggcctgttgcagcctaatgagaagagctgtaagggctttcagacttacgtgaggctggctaagggcgaggagttcttcgtgcactacaatgaagtgttaatttactag

SEQ ID NO: 208280 - DNA, 1878 bp, synthetic construct
  misc_feature 1..1878: note = Description of Artificial Sequence: Synthetic coding sequence
  source 1..1878: mol_type = other DNA
atgcggctggagaccgccgaggcctacgtgggccccggcggccccgaatgcccaatgagaaccccacagctggcactcctgcaggtgttcttcctcgtatttcctgacggagtacggccacagccttccagcagcccgagcggagctgttcctaccagcttggagctgcagagagggaccgacggagggaccttgcagagcccctccgaggcaaccgcaacgcgccccgcagtccccgggctaccgaccgtggtgcccactctggtgacgccctcagccccaggaaacaggacagtggatctgttccctgtgttgcctatatgtgtatgcgatcttactcccggggcctgtgacatcaattgctgctgcgaccgcgactgctaccttcttcacccacggacggtgttctctttttgccttccaggatcagtgcgatcctccagttgggtgtgcgttgacaacagcgtgatatttcgctccaactcaccttttccatctcgagtttttatggactccaacggcattcgacagttctgcgtgcacgtgaataattcgaacctaaactattttcagaagcttcagaaagtgaatgcgactaacttccaagctctcgcagccgaatttggtggtgagtcctttacctcaacctttcagactcagagtcctccatcattttacagagctggcgacccaatactgacgtactttcctaaatggagtgtcatatctctgctgagacagcctgcgggagtgggtgcaggcgggttatgcgcggaatctaatccagccggattcctagagtccaaatcaacaacctgtacaaggtttttcaagaatttagccagtagttgcactctggactccgctcttaatgctgcctcatattacaattttaccgtgctcaaagttcccagatccatgactgatccacaaaacatggagttccaggttccagtcattctgaccagccaggcaaatgcccctctgctcgccggaaatacatgtcagaacgtagtaagccaagttacttatgaaatagagaccaacggcactttcgggatccagaaggtgagcgtttctcttggccagaccaatctcaccgttgaaccaggggcttcactgcagcagcacttcatattgcggttccgggcttttcagcagagcacggccgcaagccttacaagtcctcgatcgggcaatcccggctacatagtgggcaaaccactgctggcattgaccgatgacataagctatagtatgactttgctgcagtcccagggtaatggatcctgctccgtaaaacgccatgaggttcaatttggggtaaatgcaatctcaggttgtaagcttagattgaagaaggcagattgttcccatctccagcaagaaatataccagacactgcacgggcgtccccggccggaatacgtggctattttcggaaacgccgatccggcccagaaaggcggctggactagaatcttaaacaggcattgctcaatttccgcgattaattgcacttcttgttgcctgattcccgtttctctggaaatccaggtgctgtgggcatatgtgggcttgctctccaacccccaagctcatgtgagcggtgtgagatttctgtaccaatgtcaaagcatacaggattcccagcaggtcacagaagtgagtttgaccactctggtgaactttgttgacatcacccagaaacctcaacccccacgtgggcagcctaaaatggactggaaatggccgttcgacttcttcccatttaaagtagctttctctcgcggtgtcttctctcagaaatgctccgtgagcccaatactcattctgtgcttgctgttacttggcgtgctgaatcttgagactatgtag

SEQ ID NO: 208281 - DNA, 1380 bp, synthetic construct
  misc_feature 1..1380: note = Description of Artificial Sequence: Synthetic coding sequence
  source 1..1380: mol_type = other DNA
atgcggaccccccagctggccctgctgcaggtgttcttcctggtgtttccggatggcgttcgaccccagcctagttccagtccttcaggggccgtccccactagtttagaactgcagcgggggacggatgggggcacgttgcagtcaccatctgaagccaccgctaccagacccgccgtccccggtcttccaaccgtggtcccaacactcgtcactccgagcgctcctgggaaccggaccgttgatttgtttccagttctccccatttgcgtgtgtgatctcacccctggtgcttgcgatattaactgctgctgcgacagagattgctatctactccatccaaggactgtgttttcattctgtttgcctggaagtgtccggtcatccagttgggtctgcgtcgacaactctgtcatctttcgaagtaattcaccctttccgtcacgtgtgtttatggattccaatgggatcaggcagttttgcgttcacgtcaacaactgctttctggaatccaagagcacaacctgtactcggttcttcaaaaatctggcaagctcctgtacccttgatagcgcactgaacgctgctagttattacaacttcacagttctgaaggtgcctcgctccatgacagacccacagaacatggaagccttccaacagtcaactgccgcctccctgacctcccctcgttccggaaaccccgggtatatcgtgggaaaaccgctcctcgcactgacagatgatataagttactccatgaccctgctgcagagtcagggaaacggcagctgctctgtcaagagacatgaagtacagtttggggttaacgctatatctggctgtaaactccgcctaaagaaagccgattgctcgcatcttcaacaggagatctaccagactctgcatgggaggccccggcctgaatatgtcgctatcttcggtaatgcggatccagctcagaagggtgggtggactaggatcctgaacaggcactgctccatctctgcaatcaactgtacatcctgctgcctaattcctgtcagcctagagatacaggtgctctgggcctacgtaggccttctttcaaaccctcaggcccacgtgtccggagtgaggttcctctaccaatgccagtctatacaggatagccagcaggtgactgaggtctccctcaccaccctggttaattttgtggatataacgcagaagccacagccgcctaggggtcagccaaaaatggactggaagtggcctttcgactttttcccatttaaggtcgcattctcaaggggagtgtttagccaaaaatgcagcgtcagtccaatcttaattctgtgcctgctcctgctgggtgtcctgaaccttgagacaatgtag

SEQ ID NO: 208282 - DNA, 6468 bp, synthetic construct
  misc_feature 1..6468: note = Description of Artificial Sequence: Synthetic coding sequence
  source 1..6468: mol_type = other DNA
atgaactacagcagcttcctgcggatctgggtgagcttcatcttcgccttggtgcagcaccaggcgcagccacgggagcttatgtatcccttctggcaaaacgacaccaagacaccgaaggttgacgatgggtcctcctctgagataaaactggccatccctgtcttctttttcggagtaccctacagaacagtctacgtaaacaacaacggcgtggtgagttttaatgtgctcgtttcccaattcactcctgagagctttcctcttacagacgggcgggcatttgtggccccattctgggctgacgtgcacaatggtattagaggagaaatatactatcgcgaaactatggagccggcgatattgaaacgcgcaaccaaggatattcgtaagtacttcaaagacatggcaaccttttccgccacatgggttttcatcgtgacctgggaggaggttactttctatggaggcagttccaccactcccgtgaacacgttccaggcagttttagtcagcgatggcagttacactttcacacttttcaactattatgaaatcaactggaccactggcactgccagcggcggtgaccccctcaccgggctgggtggagttatggcacaggcaggcttcaacggaggcaatctgactaacttcttcagtctgcctgggagccggacccccgagatcgtgaacatacaggagactacaaatgttaatgtgcccggacgctgggcttttaaggtggacggaaaagaaatcgatcctgctaacggctgcacaagcaggggccagttcctgcgacgcggcgaagtgttctgggatgatctcaactgtaccgtgaaatgcagatgcctcgacttcaacaacgaaatttattgccaggaggccagctgcagcccatacgaggtgtgtgaaccaaaaggaaagtttttctattgctctgctgtggagaccagcacctgtgttgtttttggtgaaccacattaccacaccttcgacggcttcctgtttcacttccaaggatcctgtgcttacctcctggcgagacagtgtttgcaaacctctagtctgccctttttcagcgttgaggcgaagaacgagcatcggcgcgggagcgctgtgtcatgggtaaaagagctgagtgtagaggtgaacggctataaaatcctaatccccaagggatcgtatggcagagttaaggttaatgatcttgtcacatcccttcctgtgactcttgatttgggaactgtaaagatataccagagcggtatctcaactgccgtggagaccgactttggcctactggtaactttcgatggacaacattatgccagtatctctgtgccgggttcctatattaacagtacgtgtggcctttgtggtaattataataagaaccctctggacgattttctgcgccccgatggtagacccgcaatgtcagtactcgatctgggagaatcatggagagtctatcacgcggactggaaatgcgacagtgggtgcgtggataactgtacacagtgcgacgcagccaccgaggcactgtattttggcagcgattactgtggctttctgaacaagacggacggccctctctgggaatgtggtacagttgtggatcccacagcctttgtccactcttgtgtgtatgacctgtgcagtgtacgggataacggtactttgctgtgccaggccatccaggcatatgcattggtgtgtcaggcattaggcataccaatcggtgactggcggactcagactggttgtgttagtacggttcaatgcccatccttctctcattactcggtgtgcacaagctcctgccctgatacctgctctgatcttactgcaagccgcaattgtgctaccccgtgtaccgaagggtgcgagtgtaaccaggggttcgtgctgagtacaagccaatgcgttcccttgcacaagtgcggctgtgattttgacggacactactacaccatgggcgagttcttttgggccacagcaaattgtaccgtgcagtgtctgtgcgaggagggaggggacgtgtattgctttaataagacatgtggatctggcgaggtgtgtgctgtggaggatggctaccagggctgtttccccaagcgagagacggtctgcttactgagccagaatcaagtcctgcatacatttgatggggcttcgtacgcattcccttctgaattctcttacaccttgctcaagacctgccctgaaagacccgaatacctggagattgatattaacaagaagaagccagatgcgggccctgcgtggctcagagggcttcgtattctagtggccgaccaggaagtgaagatcggaggaatcggggccagcgaagtgaaactgaatggtcaagaggtcgaacttccctttttccacccatccggcaaactcgagatctaccggaataagaacagtacaactgtggagagcaaaggagtagtcactgtgcaatatagtgatattggactcctctacatcagactctctacgacctatttcaactgtacaggcggattgtgcggtttttacaatgcaaacgcatccgatgagttctgcctgccaaacggcaaatgcaccgacaatctcgctgtcttcctcgagagttggacaaccttcgaggaaatttgcaacggagagtgcggcgacctcttgaaggcctgtaacaatgactccgaactgcttaaattctatcggagccgcagccggtgcggcattatcaacgatccatctaattcaagctttcttgaatgtcacggtgtggtaaatgtgaccgcatattatcggacatgcctgtttaggctgtgtcagagtggggggaatgagtccgagctgtgcgacagcgtggccagatatgccagcgcctgtaaaaatgctgatgtggaggtgggcccgtggaggacctatgatttttgtcctctcgagtgtcccgaaaactctcactttgaggagtgcatcacgtgtactgagacctgcgagacccttactctgggcccaatctgtgtggatagttgctcagaaggctgccaatgcgatgaggggtacgccctcctggggtcccaatgcgtgacccgatctgaatgcggatgcaatttcgaaggtcatcagctggccaccaatgaaactttctgggtcgatcttgattgccagattttctgttattgctctggaactgacaatagggttcattgtgagacaatcccctgcaaggatgacgaatactgcatggaagaggggggtttgtactattgccaggccagaacagacgccagctgtatcgtgtccgggtacggacattatctgacctttgacgggttccccttcgattttcagacaagctgtcctctgattctttgcaccacaggcagccgaccctccagtgatagctttccaaaattcgttgtcacggcaaaaaacgaggacagagatccatcgctggcactttgggtcaaacaggtcgatgtaaccgtgttcggctatagcatcgtaattcatagggcatataaacatacagtgttagtcaactccgaaaggctttatctgccactgaagttgggtcaaggtaagattaacattttttcctttgggttccatgttgtcgtcgaaactgacttcggcctgaaggtggtgtacgattggaagaccttcttaagcattacggtgccgcggtctatgcaaaattcaacttatggtctttgtggccgatacaatggcaatcctgacgatgatttggaaatgccgatgggcctgttggcctcttctgtcaatgagttcggacaaagttgggtcaagcgtgacaccttctgtcaggtggggtgcggggaccgttgtccctcatgcgccaaggtggagggcttttctaaagtccagcagctgtgctctctgataccaaaccagaacgctgcattcagcaagtgtcacagcaaagtgaatccaacctttttctacaaaaactgtctgttcgactcttgtatcgatggaggcgcagtccaaaccgcttgtagctggctacagaattatgccagtacctgtcagacccagggcatcactgtgacgggctggcgcaactatacgtcctgcacagtgacctgcccccccaactcccactatgagtcatgtgttagtgtctgccagccccgctgcgccgccattagattgaagtctgattgctcccattactgcgtcgaaggctgtcactgtgacgccgggtacgtcctcaacggtaagtcttgtatcctgccacacagctgcggatgctactccgacgggaagtactatgagccaaagcagttgttttggaatagcgactgtactagaagatgtcgttgtttccggcgcaatgtgatacaatgcgacccgcggcagtgtaaatcagatgaagagtgcgcactaagaaacggggtgcgcggttgtttctccaccaaaacatcatactgcctggcagccggcggaggtgttttccggactttcgatggtgctttcctgaggttcccagccaactgtgcctttgtcctctccaccatctgccagaagttgcctgatatctcctttcagctcatcatcaactttgataagtggagtgctccaaatctcacaatcatctcccctgtttatttctacataaatgaggagcagattctgataaacgaccggaacacggtgaaagtcaatggcactcaggtcaacgtgccattcatcacaggcctggctaccaaaatatattcatccgagggcttccttgtaatcgatacaagccctgatatccagatatactataatggctttaatgttatcaagatatccataagcgagcgtttgcagaacaaggtttgcggtttgtgtggcaacttcaatggggaccttaccgatgactacgtgactctacgtggaaaacctgtggtgagtagcgttgtgctggcccagagttggaaaaccaatggtatgcagaagcggcctcttgcacctagctgtaacgaactccagtttagccagtacgccgcgatgtgtgataatgtgcacatccagaagatgcagggggacggctactgcctgaagttaactgatatgaaggggttcttccaaccctgttacggactgcttgatcctttacccttctatgaatcttgttatctagacgggtgttacagtcacaaaaaatttcagctctgcggttccctagctgcctatggagaagcctgtaggagctttggcattctgtctactgaatggattgagaaagagaattgtagcggagtcgtggaagacccttgcgtgggggccgactgccccaatcggacatgcgaactcggcaacggaagagaactgtgcggatgcatagaaccgccaccttacggcaataacagccatgatatcattgatgcagaagttacctgcaaagcggcacagatggaggtctccatcagtaaatgcaaactttttcagcttggttttgaacgtgagggagtgcgcattaatgacagacaatgcacagggatcgaaggtgaggactttatttcttttcagatcaataatacaaagggcaactgcggaaatatcgttcaatccaatggaacgcacattatgtacaagaacaccctctggatcgagagtgccaataacaccggaaacatcattacccgagatcgaacaataaatgttgaattctcttgcgcctacgagctggacattaaaatttcgcttgatagcgtcgttaagcccatgctgagcgtcatcaacttaaccgttcctacccaggaaggcagttttatcacaaaaatggccctgtataagaacgcaagttataaacatccataccgtcagggagaggtcgtattgacaactcgggacgtgctatatgtcggagtgtttgtcgtaggggctgacgccacgcacctcatactcacacttaataaatgctacgctaccccaacacgtgattccaacgacaaactgcgttattttataattgaaggcggctgtcagaacttgaaagataatacaatcggaattgaagagaatgcggtcagcttgacatgtaggtttcacgtgaccgttttcaaattcattggggactatgacgaggtccacctccactgcgccgtgagcttatgtgattccgaaaaatactcctgcaaaatcacgtgtccacataatagtcggattgcaaccgattacactaaagaacccaaagagcagatcattagcgtaggaccgattcggagaaaacgccttgactggtgcgaggacaacggcggatgcgaacagatttgtacatctcgcgttgatggacccttatgcagctgtgtgacaggaacactgcaggaagacggcaaaagctgccgcgctagtaacagctcgatggaacttcaggtatggaccctgctcctcatcatgatccaaatctctctctggcacttcgtttataaaagtgggacgacgtcctag

SEQ ID NO: 208283 - DNA, 6468 bp, synthetic construct
  misc_feature 1..6468: note = Description of Artificial Sequence: Synthetic coding sequence
  source 1..6468: mol_type = other DNA
atgaactacagcagcttcctgcggatctgggtgagcttcatcttcgcattggtccagcaccaggctcagcctagagagcttatgtatccgttttggcagaatgacactaaaaccccaaaagtggacgatgggagttcgtccgaaatcaaacttgctatccccgtgtttttcttcggtgtgccttatagaactgtgtatgtcaacaacaatggagttgtgtcttttaacgtgctggtatcgcagttcactccagagtcttttcctctgactgatggacgcgcgtttgtcgctcccttctgggctgacgtccacaacgggatccggggtgagatctactacagagagaccatggaacctgctattctgaagagagccaccaaagacatacgcaagtattttaaagatatggctaccttctccgcaacctgggtgttcatcgtgacatgggaggaagtcaccttctacggcgggtctagcaccactcctgtgaatacgtttcaggccgtgttggttagcgacggatcctacacattcactctgttcaactactatgaaataaattggacgacaggcaccgcctctggcggggacccactgactggcctcggcggagtgatggcacaggcaggttttaacggagggaaccttactaacttcttcagtctcccgggatccaggacacccgagattgttaacattcaggaaactacaaatgtgaacgtccccggtaggtgggcgtttaaggtggacgggaaagaaattgacccggccaatggctgtacctcccgcgggcagtttctccggcgcggagaggttttctgggacgatcttaattgtaccgtgaagtgtagatgtctggactttaataacgagatttactgccaggaggccagctgttctccatacgaggtgtgtgaaccaaagggaaagttcttctactgctctgctgtcgaaacgagtacctgcgtagtgttcggagaaccacactaccacaccttcgacggatttttgttccattttcagggcagctgcgcatatctattagccagacaatgccttcagacaagctctctgcccttcttctctgtggaggccaaaaacgaacaccgccgagggtctgcagtgtcatgggtgaaggaactttccgtggaagtgaatggctacaagatccttatcccgaaagggagctatgggcgcgtgaaggtaaacgacctggtgactagcctgcccgttaccctggatctgggcactgtgaagatataccaatccggtatctcgactgctgtagagacagatttcgggctcctggttacttttgacggacagcactacgcatctatatccgtcccagggagttatataaacagcacctgcggcttgtgcggtaactacaataaaaatcctctggatgactttcttcgaccggatggacgaccggccatgtccgtgctggacctgggggaaagctggcgggtttatcacgcagactggaagtgcgactctggttgtgtggacaactgcacccagtgcgacgcagcaactgaggctttgtattttggttccgattactgtggtttcttgaataagactgatgggcccctttgggagtgcggaaccgtggttgaccctactgcctttgtgcattcctgcgtgtacgatctgtgttccgtgagagataacgggactctgctttgccaagctattcaagcatacgcacttgtctgccaggccctagggatccctatcggtgactggagaacccagaccgggtgtgttagtactgtgcagtgtccgtcgttctctcactacagcgtgtgtacctctagttgccctgacacctgctcagatttaaccgcttcacggaactgtgccaccccatgcaccgagggttgcgagtgtaatcagggatttgtcctgagcaccagccagtgtgttcccctgcataaatgcggatgtgactttgacggccattattacaccatgggcgagttcttttgggctacagctaactgtacagtgcagtgtctttgcgaagagggaggggatgtttactgttttaataagacatgcggctccggggaagtctgcgctgtggaagacggctatcaggggtgcttccccaagagagaaacagtatgcctcttgagccagaatcaagtcctgcacactttcgatggggcgtcttatgccttcccatcagaattctcctacaccctccttaaaacttgtccagagcgacccgagtacctcgagatagacattaacaagaaaaagcccgacgccgggccagcttggcttcggggcctgaggatcttggtggccgaccaggaagtcaaaatcgggggcatcggtgcgtcagaagtcaagctgaacgggcaggaagtcgagctgcctttctttcatcccagcggcaagcttgagatatacagaaataagaactccacaacagtggagagcaaaggcgtagtcactgtacaatattctgatatcgggctgttatatataagattatccaccacatactttaattgcacgggaggcctctgcgggttctacaatgccaacgcgtccgatgagttttgcctgcccaatggaaaatgcacggataacctcgctgtgttcctggagagctggaccacctttgaagaaatctgtaatggagaatgtggcgacctccttaaagcgtgcaacaatgacagcgagctcctgaaattctaccgttcccgatctcgctgtgggatcatcaatgacccaagtaacagctcatttcttgaatgccatggagtcgtgaatgttacggcctattaccgcacttgcctgttcagactctgccagagcggtggcaacgaatcggaactgtgtgattccgtagccaggtacgcgtccgcctgtaaaaatgcggacgttgaagtaggcccttggcgaacttacgacttctgtcccttagagtgtcctgagaatagccacttcgaggaatgtatcacttgcactgaaacgtgcgagacattaaccctcggtcccatttgcgtagatagctgtagcgaaggttgccaatgtgatgaggggtatgcactcttggggtcacagtgcgtcacacgtagcgagtgtgggtgtaactttgagggtcaccagttggccacaaacgagacattctgggtcgacctggattgccagatcttttgctattgttcggggaccgataaccgcgtccactgcgagacaatcccatgtaaggacgatgagtactgcatggaggaaggcggcctgtattattgtcaggcgcgtaccgacgcttcctgcatcgtttccggatacggtcactacttgacttttgacgggttcccgttcgacttccaaaccagctgtccgctgatcctgtgcaccacaggaagccgtccctcctcggatagttttcctaagtttgtcgttaccgcaaagaatgaggatcgggacccatccttggccctttgggtgaagcaggtggacgttactgtgtttggttattctatcgttatccacagagcctacaaacacacggttcttgtgaactctgaaagattgtaccttcccttgaaactggggcaggggaaaattaatatcttcagttttggattccatgtcgtggtagagacagatttcgggctgaaagtcgtgtacgactggaaaacattcttatctattacggtgccacgatccatgcagaacagcacttacggactttgtggtagatacaatgggaatcccgatgacgacctcgagatgcctatgggactcctggcttcctcagttaatgaattcgggcagtcttgggtgaagcgggacacattttgccaggtcggctgtggcgatcgatgcccgtcgtgcgccaaagtcgaaggcttctcaaaggtacagcaactgtgttccctgattccgaaccaaaatgccgcgttttctaagtgtcatagcaaagtgaatccaacttttttttataagaattgtctgttcgactcttgtatcgacggcggagccgtgcaaactgcctgcagctggctacaaaactatgccagtacatgtcagacacaaggcatcacagtcacgggatggcggaactataccagctgcactgtgacttgtccgcccaacagccattacgagtcttgtgtctcagtctgtcagcctcggtgtgccgcgattaggctgaagtcggactgtagccactactgcgtggaagggtgtcattgtgatgcgggatacgtgttgaacggaaaaagctgcattcttcctcactcctgtggatgttactctgatggtaaatactatgagcctaagcaactgttttggaacagtgattgtacgcggcggtgtcggtgtttccgtagaaacgtgattcagtgcgatcctagacagtgcaaatcggacgaggaatgtgctctacgcaatggtgtgagaggctgtttctccaccaagacgtcatattgcttggccgccggtggcggggtctttcggaccttcgatggagcattcttacgttttcccgcgaactgcgcatttgtcctgagtacaatttgtcaaaaactgcctgatatatccttccagctgatcatcaatttcgacaagtggtccgcccccaatctgaccatcataagccccgtatacttctatatcaacgaggagcagatcctcatcaacgatcggaacaccgttaaagtgaacggcactcaggtgaacgtgcccttcatcaccgggttggccaccaagatctacagctccgaaggcttcctcgtgatcgatacgtcacccgacatccaaatatattacaacggattcaacgtgatcaaaatcagtatctctgagcgcctgcaaaataaggtgtgcggcctgtgtggcaatttcaatggagacttaaccgacgactatgttaccctgaggggaaaacccgtggtgtcaagcgtggtactggctcagtcttggaaaaccaacgggatgcaaaaaagacccctcgctccttcttgcaacgagctgcaattttctcaatacgctgcgatgtgtgataacgtccatatccaaaagatgcaaggcgatggatactgcctgaaactgaccgatatgaagggctttttccagccctgttatggtcttctggacccactgcccttttacgagtcctgttatctcgacggttgctattcccataaaaagtttcagctgtgtggctcactagcggcctacggagaggcctgtaggtcttttggcattctgtcaacagaatggatcgagaaggaaaattgttccggcgttgttgaggacccttgtgtcggtgcggattgcccaaatcgcacgtgcgagctggggaatggacgcgagctatgcgggtgcatagagcctccgccatacggcaacaacagccacgacattatcgatgcggaagtcacttgcaaggccgctcaaatggaggtatccatcagcaaatgcaaactatttcaacttggcttcgaacgcgagggcgtgcgcattaacgaccgtcaatgcaccggtatagaaggcgaggatttcatttcttttcagatcaataacaccaaaggtaactgcgggaacatcgtccagtccaatgggacgcacattatgtacaagaacaccctgtggatcgaaagtgcgaataatacgggtaacatcatcacgcgggatcggaccatcaatgtagagtttagctgcgcctacgagctcgacattaaaatctccttggacagcgtggtgaaacctatgttgtctgttatcaacttgaccgttccaacccaggagggttcctttatcactaaaatggccctgtacaagaacgccagttacaagcatccataccgccagggggaggtcgtactaacgactagagatgttttgtacgtgggcgtcttcgtcgtgggcgctgacgcaacccatctgatattaacactgaataagtgttatgcaacccctactcgggacagtaacgataaattgaggtactttataatcgagggtggatgtcagaacttaaaagacaatactatcgggatcgaagagaatgcagtgagtcttacttgtcgctttcacgtgacagtctttaagttcattggggactacgacgaggtgcatctgcattgcgcagtctccctctgtgatagcgagaagtactcatgtaaaataacgtgcccacacaactcccgaattgcaacagactacaccaaggagcccaaggagcaaatcataagtgtggggcctattagacggaaaagactggattggtgtgaggataacggggggtgcgagcaaatttgtacctcaagggttgatggaccgctctgctcttgcgtaacagggactctccaggaggatggcaaatcgtgtcgcgctagtaacagcagtatggagctccaagtctggactttactcttaatcatgatccagatctccctctggcatttcgtgtacaaaagtggcaccacatcctag

SEQ ID NO: 208284 - DNA, 1257 bp, synthetic construct
  misc_feature 1..1257: note = Description of Artificial Sequence: Synthetic coding sequence
  source 1..1257: mol_type = other DNA
atggccaagctgctgcagcccccccccaagttcctgcccagcgagtggcatatagctaacaagaatcagtatcatagggccgatgcccagcgctcacgtagcgagagattggtcgccgaatcccagcgcttagtcgacgaaattgaaaaaactactaggaagagccagtccgacgtgaataaaaagcttgagcagcgcctggaagaagtccaattctggaaaaaggagctcgacgacaaacttgagcagctcgtgaacgttacagatgacttactcatttacaaaatccgcctagagaaggcgctggagacactgaaggagcccctgcacatcacagagacgtgcctggcataccgggagaagagaattggcatcgaccttgtgcacgatactgtagaacacgagttaatcaaagaagccgaaattatacaagggatcatggctttgttgacgaggacgctggaagaggccagtgagcagattcgtatgaacagatcagccaagtacaacctcgagaaggacttgaaagacaagttcgtggcgctcacaatagacgatatctgcttttcattaaacaacaactcacccaatatccgctacagcgagaacgccgtgcgcatcgagccaaattccgtgagcttggaagattggctcgacttttctagcacaaatgtcgaaaaagcagacaagcagcgcaacaattccctgatgctgaaggcattagtggacagaattctctcgcagactgccaacgaccttcgcaagcagtgtgacgtggtggatacggcctttaagaacggccttaaggataccaaggatgcccgcgacaaactggcagatcacttggccaaggtcatggaggaaatcgcctctcaagagaagaatattacagccctggaaaaggctatcctggatcaggaggggcccgctaaggtcgctcatacacgcttggagacacgtactcaccggcccaatgtcgagctatgcagagatgtcgcacagtatcgcctgatgaaggaagtgcaggagattacgcataacgtggctaggctgaaggaaaccctggcccaagctcaggcagagctgaaaggactgcaccgccggcagctcgcacttcaggaggagattcaggtaaaggagaatacaatctatatcgacgaggttctctgcatgcaaatgagaaagtccatcccgcttcgcgatggagaagatcatggggtgtgggccgggggattgagaccagacgccgtgtgttag

SEQ ID NO: 208285 - DNA, 819 bp, synthetic construct
  misc_feature 1..819: note = Description of Artificial Sequence: Synthetic coding sequence
  source 1..819: mol_type = other DNA
atggccctgctgacccggaccctggaggaggccagcgagcagatcaggatgaacagatccgcaaaatacaatctggagaaggatctcaaggacaagttcgtggcactcacaatcgacgatatttgcttctccctcaacaataattccccgaacatcagatatagtgagaacgccgtgagaatcgagccaaatagcgtttcactagaagattggcttgacttttctagcaccaacgttgagaaagccgataagcaaaggaataatagcctgatgctgaaggcccttgtcgaccgcatactgtcccagaccgccaatgatctccgcaagcaatgcgacgtggtggacactgcgttcaagaacggtcttaaggatacgaaggacgcgagagataagctggccgatcacctggcgaaagtcatggaagagattgcctcacaggagaaaaacatcaccgccctcgaaaaggccatactcgatcaggagggtccagccaaagttgcacataccaggctggagaccaggacccacagaccaaacgtcgagttatgcagggacgtagcccaatatcgactcatgaaagaggttcaggaaataactcacaacgtggctcgtctgaaggaaactctagcccaggcccaggccgaacttaagggacttcatcggaggcagctggctttacaggaggagatccaggttaaagagaacacaatttatatcgatgaagtcctctgcatgcaaatgcggaaatcgatcccattaagggatggcgaggaccacggcgtctgggccggtgggctaagacccgacgcagtgtgttag

SEQ ID NO: 208286 - DNA, 1473 bp, synthetic construct
  misc_feature 1..1473: note = Description of Artificial Sequence: Synthetic coding sequence
  source 1..1473: mol_type = other DNA
atggagcgggtgggctgcaccctgaccaccacctacgcccaccccaggcctacacccactaattttctccccgcgatctcaactatggcttcaagctacagagataggttcccacactctaatctgacacacagcctctccctgccttggcggccctcaacatactataaggtcgcctcaaactcgccaagtgtggccccttactgcacacggtcccagagagtcagcgaaaacacgatgttgccattcgtgtctaatcggaccacttttttcacccgctatacacctgatgactggtacaggagcaatctcacaaattaccaagagagcaacacaagtcgccataatagtgagaagctgcgcgtggatacatcgcgcttgattcaggacaaatatcagcagacgagaaagacacaggccgacactactcaaaatttgggcgaacgggtgaatgatatcggattctggaagtcagaaattattcacgagctcgatgaaatgataggcgagacaaacgcccttacggacgttaagaaaagactagaaagagctctgatggagactgaggcacctttacaggtggccagggagtgccttttccaccgcgaaaagagaatgggtattgacctggtacacgatgaagtggaggctcagctgctgaccgaggtggacacaattctatgctgccaggagcgtatgaaattgcacctggacaaagccatcgcccaactggctgccaaccgcgcctcacagcacgaactcgaaaaagacctttcagacaagcagaccgcctatcgcattgacgataaatgtcaccatctgagaaacacatccgatggagtgggatattttaggggggtggagagagtggatgccaccgtgagcgttccggagtcctgggctaaattcaccgatgacaacatccttaggtctcagtcagaacgtgctgcctccgcaaagctgcgtgacgacattgaaaatctgctggtcgtgacagcgaacgagatgtggaaccaattcaataaagtaaatctgagcttcactaatcgtatcgccgagacagcggacgccaaaaataaaattcagacccacttagctaagacgcttcaggaaatcttccagaccgaaatgacaatcgaatccattaaaaaagctattaaggataaaacggcattcctgaaggtggcccagactaggttggacgagcgcactaggcggcccaacattgagttgtgcagagacatggcccaactgaggttggttaatgaagtgcacgaagtggacgacaccattcaaacattacagcaaagattgcgcgacgcggaggacacgctgcagtctctcgtgcatattaaagcaacgcttgaatacgacttggcggtcaaggccaactctctatatattgaccaggaaaaatgcatgagtatgcgaaagtcatatccaaatacactccggctggttgggttttgctag

SEQ ID NO: 208287 - DNA, 1473 bp, synthetic construct
  misc_feature 1..1473: note = Description of Artificial Sequence: Synthetic coding sequence
  source 1..1473: mol_type = other DNA
atggagcgggtgggctgcaccctgaccaccacctacgcccaccccaggccaaccccgacaaatttcttgcccgcgatcagtacaatggcaagctcctatcgagataggttcccacacagcaatttaacccattcattgtctcttccatggagaccatcgacatactacaaagtggccagtaattcaccgagcgtggcaccttactgtacaagatcccaaagagtgtcagaaaacactatgctgccttttgtgagtaaccgaacgacattctttaccaggtacacacctgatgattggtataggtctaacctgaccaactatcaggagagcaacacgagccgccacaactcagaaaagcttcgggttgacactagccgactgatacaggacaaatatcagcagacccggaaaacacaggccgataccacccagaacctgggcgagcgcgtgaacgacattggcttctggaagtcggagatcattcacgaactggacgagatgatcggagaaactaacgccctcaccgacgtaaagaaacggctagagagggccctgatggagacggaggcccctctgcaggttgcgagagagtgtttattccaccgcgagaagagaatggggattgacctggtgcatgacgaagtcgaagcccaactcttgaccgaagtggacacaattctgtgctgccaggagcggatgaagctgcacttagataaggcaatcgctcagctggctgctaatcgagctagccagcacgaactcgagaaagatctgtctgacaaacaaaccgcttataggatcgatgacaagtgccaccacctacgcaacacttcagacggcgttgggtattttcggggggtcgaacgggtggatgctacagtctcagtccctgaatcatgggcaaagttcaccgacgataacatcctgaggtcccagagcgaaagggccgcgagcgccaaactccgggatgacatcgaaaaccttctggtggtgactgctaacgagatgtggaaccaattcaacaaggtaaatctgagctttaccaaccggattgcggaaacagccgacgcgaaaaataaaatccagacccatctcgccaaaacattgcaggagatcttccaaactgagatgaccatcgaaagtataaagaaggcaataaaagataagaccgcattccttaaggtagcccagacaagactggatgagcgcacacgcagacccaacattgagctgtgtagggacatggcccagcttagactggttaatgaggtgcacgaagttgatgatacaatacagacactacagcagcgcttgcgtgacgccgaggatacgctacaatctctcgtgcacatcaaagcaactctggaatacgacttagcagtaaaggccaactccctatatatcgaccaagagaagtgtatgagcatgagaaagtcatacccaaataccctccgcttagtcggattctgttag

SEQ ID NO: 208288 - DNA, 444 bp, synthetic construct
  misc_feature 1..444: note = Description of Artificial Sequence: Synthetic coding sequence
  source 1..444: mol_type = other DNA
atggagcgggtgggctgcaccctgaccaccacctacgcccaccccaggccaactccgacaaatttcctccccgcaataagcacaatggcttcttcttatcgggacaggtttccccatagcaatctgactcactccctgtccctgccatggagaccgtctacttattacaaagttgcctccaacagtccctccgttgcaccatactgcacccgtagccagagggtctctgagaataccatgctgccctttgtttcaaatagaaccacctttttcacccgttataccccagacgattggtacagatcgaacctgactaactaccaggagtcgaatactagcagacacaattccgaaaaactgcgagtggatacaagccgtctcatccaggataaatatcagcagacgcgtaaaacccaggcagataccactcagaaccttggttag

SEQ ID NO: 208289 - DNA, 423 bp, synthetic construct
  misc_feature 1..423: note = Description of Artificial Sequence: Synthetic coding sequence
  source 1..423: mol_type = other DNA
atggagcgggtgggctgcaccctgaccaccacctacgcccacccccgcccaacccctactaattttctcccggcaatatccacaatggctagtagttaccgcgacagattcccccactccaatctcacacactccctgtcccttccatggcgcccttcaacatattacaaggtggccagcaacagcccaagcgtcgccccatattgtacgcggagccagagagtctctgaaaatacgatgttaccatttgtctctaaccgcaccacattcttcaccagatatacacctgatgactggtacaggagtaatttgaccaattaccaggaatctaacactagtcggcacaatagcgagaagttacgcgtggatacctcacgactaatacaggacaagtatcagcaaacccgaaagacacaagcatag

SEQ ID NO: 208290 - DNA, 249 bp, synthetic construct
  misc_feature 1..249: note = Description of Artificial Sequence: Synthetic coding sequence
  source 1..249: mol_type = other DNA
atggagcgggtgggctgcaccctgaccaccacctacgcccaccccagaccaacacccactaatttcctgcccgccatatctactatggccagttcttacagagacagattccctcatagtaatctgacccactccctcagtttgccctggcgacccagtacatattacaaagtcgctagtaatagcccgtccgtggctccttactgtactaggagccaacgggtttctgaaaatacaatgctgccatag

SEQ ID NO: 208291 - DNA, 2514 bp, synthetic construct
  misc_feature 1..2514: note = Description of Artificial Sequence: Synthetic coding sequence
  source 1..2514: mol_type = other DNA
atggagcccgcccccagcgaggtgcggctggccgtgcgggaggccattcacgctctcagcagcagcgaagacggaggtcacattttctgcaccctcgagagtctgaagcgatacctcggagaaatggagcctcctgctcttcctagggaaaaggaggagttcgcttcagcacatttctccccagtgttaaggtgcctcgctagcaggctgtcaccggcctggctcgagctactgccgcatgggcgactagaggagttgtgggcaagcttttttctcgaggggcctgcagaccaggccttcctggtactgatggagacaatcgaaggcgcggcgggaccatcattcaggttgatgaagatggcgcggctactggcaagattcctgagagaaggcagattagcagtcttgatggaagcgcagtgtaggcagcaaactcagcctggattcatcttactgagggagacattgcttgggaaggtggttgcccttcccgaccacctgggaaacagactgcaacaagaaaaccttgctgagttctttccgcagaattattttcgcctcctgggcgaggaggtagttcgtgtactgcaggctgttgtagacagtctgcagggtggcctcgacagttccgtgagttttgttagccaggttctgggaaaagcctgtgtacatgggcgccaacaggagatcctgggcgtactggtgcctcgtctggcagcactgacacagggatcctacttacaccagcgcgtttgttggcgactggtggagcaggtgccggaccgggctatggaggccgttttgacagggctggttgaggcagccctgggaccagaggtgctcagccggctgctcggcaatcttgtcgtgaagaacaagaaggcccagttcgtgatgacgcagaagttgctgtttttgcagtccagacttactaccccaatgttacaatccctactgggacatctggccatggactctcagcgcagacccctgttgttacaagtgttgaaagagctcttggagacctggggaagctcttctgcaatccggcatacccctctccctcaacagaggcacgtgtcaaaagccgtcctcatctgtctggcacaactaggcgagcctgagctgagagacagtcgggatgagctcctcgcatcgatgatggcgggggtgaagtgcagactcgactccagcctgccccctgttcgacgactgggcatgattgtggctgaggtggttagcgctcgaattcatcctgaagggccccctctcaagtttcagtacgaggaagatgaacttagcctggagctgttggctctggcatcacctcagcccgctggagacggcgctagcgaggccggaaccagcttagtgcccgcaacagccgaaccccctgccgagacccccgccgagatcgtggacgggggcgtcccccaggctcagttagccggatctgactctgatctcgactcggacgacgagtttgtgccgtacgatatgagcggcgacagggagctgaagagttcgaaggcacccgcgtacgtccgagactgcgtggaagccttgactacatcagaagacatagagcgctgggaagcagcattgagagctctggaaggcctggtctataggtcaccgacagctacgagggaggtttccgtggagctggctaaggtgctgctccacctggaggagaagacttgcgtagtaggattcgctgggcttcggcagcgtgcgctagttgccgtgaccgtgacggaccctgctccggttgcggactatcttacctcccaattctatgctctgaattacagtcttcggcagcgaatggacattctcgatgttctgactctagccgcccaggagctgtctaggcctggatgcctgggccggaccccccagcccggctccccgagcccgaataccccctgtcttccagaggccgccgtgagtcaaccagggagtgccgtggcatcagattggagggtggtggtggaagaaagaatccgatcaaaaacacagagactctccaaggggggcccccggcaggggccggcaggcagtccatccaggtttaattcagtggccggtcatttcttttttcccctgctacaaagattcgacaggcctctagtcacattcgacctgctaggcgaagatcagctggtccttggaagacttgcacataccctgggggcactgatgtgtctggccgtcaataccactgttgcggttgccatggggaaggccctgctggagtttgtgtgggctctgcggtttcacattgacgcttatgtacgtcagggcctgctttcagcagtaagctcagttctgctctcactgccagccgcaagacttcttgaagatctcatggatgaactgttggaggccaggtcttggctcgcagatgtggccgaaaaggatcctgacgaggactgcaggacattagcccttcgggccctgctccttttgcaaagactgaaaaatcgactactgcctccagcctccccctag

SEQ ID NO: 208292 - DNA, 1083 bp, synthetic construct
  misc_feature 1..1083: note = Description of Artificial Sequence: Synthetic coding sequence
  source 1..1083: mol_type = other DNA
atgatggccggcgtgaagtgccggctggacagcagcctgccccccgttcgacggcttggaatgattgttgcggaagttgtgtctgccaggatccatccagaagggcccccactcaagttccagtatgaggaggacgaactttcacttgagctattagctttggccagcccccaaccagctggcgacggagcctctgaagctggtacctccctcgtccctgcaactgctgaacctccagcggagacacccgccgagatagtggatggtggtgtgccccaggcacagcttgccggctccgactccgacctcgatagcgacgatgagtttgtgccctatgatatgtctggtgaccgagagctgaagagctcgaaggctcctgcatacgttagggattgtgttgaggtgcttgatgttcttacactcgccgcacaagagcttagcagacccggctgtttgggacgaaccccacagcctggctcgccatccccaaataccccatgccttcctgaagccgccgtgtcacagccaggcagcgctgtcgcttctgattggcgcgttgtggtggaggagaggatcagatcgaaaacacaacgactctcaaagggtggccctcggcagggaccagccgggagtcctagtagatttaattctgtagcggggcactttttttttccactgctccagagatttgataggcctcttgtgacttttgatctattgggcgaagaccagctcgttctggggcgactggctcatacgctgggagcattaatgtgtctagccgtgaataccacagtcgctgtggcaatgggaaaggctctgttagagttcgtgtgggcactcaggtttcatatagacgcttacgtgaggcagggtcttttgagcgctgtgagctcagtgctgctttccttgcccgctgctcggcttcttgaggatctgatggacgaactgctggaggcccggagttggctggcagacgtcgctgagaaggatcccgatgaggactgcaggaccttagcactgcgtgcacttctgctgctgcagagactcaaaaatcgcttgctgccaccggcatcgccctag

SEQ ID NO: 208293 - DNA, 3270 bp, synthetic construct
  misc_feature 1..3270: note = Description of Artificial Sequence: Synthetic coding sequence
  source 1..3270: mol_type = other DNA
atggccgtgttcgacacccccgaggaggccttcggcgtgctgcggccagtgtgtgttcagctcacaaagactcagacagtggagaatgtcgagcatcttcagacaaggctgcaggctgtgtcggatagtgccttgcaagagcttcaacaatacatcctttttccgctgagattcacacttaagacccccgggcccaagcgcgagcggctgatccagagtgtagtcgagtgtctgacgtttgtgctcagttcaacgtgcgtcaaggagcaagaactgctccaggaactgtttagtgagctgagtgcgtgtctgtattctccttccagccagaaacccgctgcagtgtctgaggagctgaaactcgccgtgattcaggggttgtccactttgatgcatagcgcctatggagacattatactaaccttttatgagccctcaattctgcccaggttaggcttcgcagtcagtctactcctgggccttgctgaacaggagaaatccaagcagatcaaaatagccgccctgaaatgcctgcaggtactattgctccaatgcgattgccaggatcatcctaggagcttggatgaactcgaacagaaacagctcggcgacctcttcgccagtttcctgccaggcatttctacggctctcaccagactcatcacaggtgatttcaagcaaggacatagcatcgtcgttagctcattgaagatcttttataaaaccgtcagctttattatggcggatgagcagctgaagcgcatatccaaagtacaggcgaagcccgctgttgagcatagggtggcagagctgatggtctaccgcgaggcagactgggtcaagaaaaccggggataagctgaccattttaataaagaagataatcgaatgcgtttctgtgcaccctcactggaaagtgcggctggaactggtggagctcgttgaagatttgctcctaaaatgcagtcaatccctggttgagtgcgccgggcctctcctgaaggctctggtcgggctggtgaatgatgaaagcccagagatccaggctcagtgtaacaaggtgcttcgacacttcgcagatcagaaagtggttgtgggaaacaaagctctggccgacatcctgtcggagtccttacatagtctggctacgagcctgccacgccttatgaacagccaggacgatcagggcaaattttccaccctgtcacttctcctcggctatctgaagctcctcggtccaaagatcaattttgtattgaattcggtggcacacttacagagactctctaaagctctaatccaggtgctagaactagacgtcgcagacattaaaatagtcgaggagcgccggtggaatagtgacgatctgaatgcctcccccaagacgagcgccacccagccctggaaccggattcaaagacgttattttcggttcttcaccgatgagaggatctttatgttgctgcggcaggtatgtcaactcctagggtactacggcaatttgtacctgctggttgatcacttcatggaactgtatcaccagtcagttgtctaccgcaaacaggccgcaatgatcctgaatgaactggtgacaggggcggccggactagaggtcgaggatcttcacgagaagcatattaaaactaatccagaagagctgcgtgaaatcgtgacctcaatcctggaagagtacacatcccaggaaaattggtatctcgtgacttgcctggagaccgaggagatgggagaggagttaatgatggagcaccctggacttcaggcaatcactagcggcgagcacacgtgccaggtcaccagcttccttgcgtttagcaaaccctcacccaccatatgcagtatgaacagtaatatctggcagatttgtatccagctggaggggatcggtcagttcgcgtatgctctgggtaaagatttctgtctcctcttgatgtccgctctgtatcccgtgctcgaaaaagcgggagaccagacgctcttgatttcacaggtcgccacttctacaatgatggatgtatgcagggcatgcggatatgactctctacagcacctgattaaccagaacagcgactatcttgttaacggaatttcgctgaatcttcggcatttggccttacatccccataccccaaaggtgctcgaggtgatgttgcgcaatagcgatgctaacctcctaccattggtagctgacgtggtgcaggatgtgttggcaacactggatcagttctatgataagagggcagccagtttcgtgtcagtgctgcacgcactgatggcagcactagctcaatggttccctgatactggcaatttgggacatctccaggagcagagcttgggagaggaaggctcacacctcaatcagaggcctgccgcgctggaaaagtccaccaccactgcggaggatattgagcagttccttctgaattatctcaaagaaaaagatgtggctgatggaaatgtttctgacttcgataacgaggaggaggaacagtccgtgccccccaaagtggatgagaacgacacccgtcctgatgtagagccacctttaccactccagatccaaatcgccatggacgtgatggagcgctgcattcacctcctgtcagacaaaaacttgcaaattcgattgaaggtcctggacgtgctcgatctgtgtgtcgttgtgctgcaaagccataaaaaccagcttctgcctctggcgcatcaggcctggccaagtctggtccacagactgactagggatgcccccttggctgtattgagggcttttaaggtcctgcggacactgggatccaagtgtggcgactttttgcgaagtcggttttgtaaagacgtgctcccaaagctcgcggggtctctcgtcacgcaggcgcctattagcgctcgggcagggccagtttactcacatacactcgcattcaaattgcagctggctgtcctccagggattaggtcccttgtgtgagcggctcgatttgggcgagggtgatctgaacaaagtggctgacgcatgcttgatttatctgagtgtaaagcagcccgtgaaactgcaggaagcagcccgttccgtgtttttgcacttgatgaaagtagatccggactccacttggttcctgctcaacgagttatactgtcccgtccagttcaccccaccacacccctcactccatcccgtgcagctgcacggggcgagcggccagcagaacccgtacaccacaaacgtgctccagttattgaaagagctccagtag

SEQ ID NO: 208294 - DNA, 3270 bp, synthetic construct
  misc_feature 1..3270: note = Description of Artificial Sequence: Synthetic coding sequence
  source 1..3270: mol_type = other DNA
atggccgtgttcgacacccccgaggaggccttcggcgtgctgcggccagtgtgcgtccagcttactaagacgcagacagtggagaacgtggaacacctgcaaaccaggctccaggccgtgtccgactccgctctccaggagttgcaacagtacatcctctttcccctcagattcacactaaagacccccggcccaaagcgcgagcgtcttatccaatccgtggtggagtgccttacatttgtattgtcctccacatgcgttaaggaacaggaactgctgcaggaactgttttctgaactgtccgcttgtctctactccccctcaagccagaagcctgcggcagtttcagaggaactgaaactagctgtgatccagggtctgagcacactcatgcacagcgcctacggtgacatcatcctgactttctatgaaccatctatcctgccaaggctgggatttgccgtcagtttgcttttgggacttgctgaacaggagaaatccaagcagatcaagattgccgccctgaagtgcctccaggttttgctcctgcagtgcgactgtcaggaccatcccaggtcactggacgagttggaacaaaaacagctgggcgatctatttgcttctttcctgccgggcatcagcacggccctgacccgtctgatcactggtgatttcaaacagggccattcaatcgtagtgtcaagcttgaagatcttctataagaccgtaagctttataatggcggatgaacagctcaagcgcattagcaaggtgcaggctaaaccagccgttgaacaccgcgtggcagagctcatggtctaccgggaggcagactgggtgaagaagacaggtgataaacttaccattttgatcaaaaaaataattgaatgcgtcagtgtgcatccccactggaaagtgcggctcgaactggttgagctggtagaagatctcctgctgaaatgcagccagagtcttgtggaatgcgctggacccctgttgaaggccctcgttggtctggtaaacgacgagtcgccagaaattcaggcacaatgtaataaggtgctccgccacttcgctgatcagaaggttgtggtggggaataaggcattggctgacattctgagcgaatcacttcattctctggcaacctctcttcctaggttaatgaactcgcaggatgaccaaggtaagttctccacgctcagtctgctgctgggatacctgaaactcctgggcccaaagataaattttgttctgaacagtgtggcacatttacagagacttagtaaagctctgattcaggtgctagaactggacgttgccgatatcaaaatcgttgaagaaaggcggtggaatagtgacgaccttaatgcttccccaaagacctcggccacgcagccttggaacagaatccagagacggtactttcgctttttcaccgatgagaggatttttatgttactgcgccaagtatgccagcttcttggatactatgggaacctgtatttgttagtggaccacttcatggagctctaccaccagtctgtggtgtaccgaaagcaggccgccatgatcctgaacgagctggttacaggggctgcaggtctggaagtggaggacctgcatgaaaagcacattaagacaaacccggaagaacttagagagatcgtgacaagcatcttggaagagtacacctcccaagagaactggtaccttgtcacatgtctggagaccgaggagatgggggaagaattgatgatggagcaccccggcttgcaggctattacttccggtgaacatacatgccaggtgaccagcttcctggccttctcaaaaccttcacccactatttgctccatgaactccaacatctggcagatttgcatccagctggaaggcatcgggcagtttgcctacgcacttggcaaagatttttgcctgctgctgatgagcgcattgtatcctgtgctcgagaaggccggggaccaaacgttgctcatttcccaggttgctacaagtacaatgatggacgtgtgcagagcttgcggctacgattctctgcaacatttgattaaccagaacagcgactatttggtaaacggaatcagcctaaacctgcgccacctggcactgcatccgcatactcctaaggtactggaagtcatgcttcggaacagcgatgctaacctcttgcctctggtcgccgacgttgtacaggacgtgctggctactctggaccaattctacgataaacgcgcggcctccttcgtctctgtgctccacgcgctcatggctgcgcttgcacagtggtttcctgatacagggaacttaggacatcttcaagagcagtcgttgggcgaagaaggcagccacctgaatcagcggcctgctgccctagagaaatctacgacaacagccgaggacatcgaacagttcctgctgaactatctcaaggagaaagacgtagcagacggaaatgtaagtgattttgataacgaggaggaggagcagagcgtcccacccaaggtcgacgagaacgacaccaggccagatgtcgaaccccctctcccattgcagattcagatcgctatggacgtgatggaaaggtgtatccaccttcttagtgacaagaacctccagatccgtcttaaagtgttggatgtgctggatctatgcgtcgttgttttacagtcacataagaaccagctgttgccactagcgcatcaggcctggcccagcctggtgcacagactgaccagagacgcgcccctggccgtgctcagggcgtttaaagtgttgagaaccctcgggagcaaatgtggggatttcctgcgttcccggttttgcaaggacgtgttaccaaaactggccgggtcactcgtcacacaagctcctatctcggcccgagccggccccgtgtattctcacaccctcgcctttaaactgcaactggccgtccttcaggggctggggcccctgtgcgagcgcctcgatctgggcgaaggggacctgaacaaagtcgctgatgcctgtctaatatatctttcggtgaaacaaccggtgaaactgcaggaggctgcacgaagtgtctttttacatctcatgaaagttgatcctgactcaacatggtttcttttgaacgagctatattgccctgtgcaattcactccacctcaccccagcttgcacccagtgcaactgcacggcgcgagtggccagcagaatccatataccacgaacgtcctgcagctcctgaaagagctgcagtag

SEQ ID NO: 208295 - DNA, 3270 bp, synthetic construct
  misc_feature 1..3270: note = Description of Artificial Sequence: Synthetic coding sequence
  source 1..3270: mol_type = other DNA
atggccgtgttcgacacccccgaggaggccttcggcgtgctgcggcccgtgtgcgttcaacttacaaaaacccagactgtggagaatgtggagcatttacagacacggctgcaggcggtctccgattctgctctgcaggaactccaacagtacattctttttccgctgcgcttcaccttgaaaactccaggtccaaagcgagagcgtctgatccagtctgtggtagaatgcctgaccttcgtccttagctccacgtgtgtgaaagaacaggaactgctgcaggagctgttttcagagctgagcgcatgtctttattctccttcatcacaaaaacccgcagcagtgtccgaagagctgaaactcgccgtgattcagggtctgagtactctcatgcattctgcttacggagacatcattctgaccttttacgagcccagtatcctgcctagactaggctttgccgtgtctcttctgctcggactagccgagcaggaaaagagtaaacaaattaaaattgccgccttgaagtgtttacaggtgttgctgctacagtgtgattgtcaggatcacccccgatctttggatgagttagagcaaaaacagctcggcgatttgtttgcgagcttcctgcctggaatcagtacagcgctcacacggctgattacgggtgactttaagcagggacacagcattgtggtcagctccctgaaaattttttacaaaactgtgagtttcattatggcggacgaacagctgaaaaggatctccaaagtgcaggccaaaccagctgtagaacacagggttgctgagttgatggtctacagagaagctgattgggtgaagaagaccggagacaagctgactatcttgatcaaaaaaatcattgaatgcgtatccgtgcatccccattggaaggtcaggctggagttagtggagctggttgaggatttactgctgaagtgcagccaaagtttggttgaatgtgccggtccattgcttaaggcactggttggtctcgtgaatgacgaatcacctgagatacaggcacagtgcaataaagtcctgaggcatttcgccgaccagaaagtggttgttggaaacaaggctctggccgatatccttagtgagtcgctgcattcattggccaccagccttcctcggcttatgaactctcaggacgaccaggggaagttctcaaccctcagcctcctgctaggctatttgaagctcctggggcctaaaataaattttgtccttaacagcgtggcgcaccttcagaggctttctaaagccctcatccaggttctagaactggacgtagcagatatcaaaatcgtcgaagagagacggtggaatagcgacgacctcaatgccagtccaaagacaagcgccactcagccatggaacagaatacagcggagatattttagattttttacagatgagcggatcttcatgctactccgccaggtctgtcagttgctcggttactatggaaacttgtacctactggtggaccacttcatggaattatatcaccaaagtgtcgtctatcgcaagcaggccgctatgattctgaatgagctggtgacaggcgccgccgggttagaggtggaggatttacatgagaagcacataaagactaacccagaggagttgcgagagattgtcacaagtatcctggaggagtatacctcgcaagaaaattggtatctcgtcacctgtcttgaaaccgaggaaatgggtgaggagctaatgatggaacaccctgggctccaagccattacctccggggaacacacatgccaagtgacttccttccttgccttctccaaacctagccctacaatctgtagcatgaactcaaacatttggcagatttgtatacagctggagggaattggacaatttgcatacgctctgggaaaggacttttgcctcttgctgatgtcggcactgtacccagtgcttgagaaggcaggcgaccagacactgctcatcagtcaggtagccacatcaacaatgatggatgtttgcagagcctgtggctacgattccctgcaacacttgatcaaccaaaactcagactatctcgtcaatggaatcagtttgaatcttcggcatttggcactgcatccacacacacccaaagtgcttgaagttatgttaagaaactcagacgccaatttactcccactggtggcagacgtggttcaggatgttctagcaactctggatcagttttatgataaaagggctgcctctttcgttagcgtgctgcacgctctgatggcagctctggctcaatggtttccggacactggcaatctgggccatctgcaagagcaaagcctgggggaagagggaagtcacctcaatcaacgtcccgcggctctggagaaatccacaaccactgcagaggacattgaacagttcctgttgaactatttgaaagaaaaagatgtggcggacggcaacgtgtcagacttcgacaatgaggaggaagaacagtctgtccctcccaaggtggatgaaaacgacacgaggcccgatgtggagccacctttacctttacagattcaaatcgcaatggatgtgatggagcgctgcatccatttactcagcgacaaaaatttacaaattcgcctaaaagtgctcgatgtgcttgacctctgtgtggtggttctgcaatctcataagaaccagctcctcccactggcacatcaggcttggccatcattggttcatcggttgaccagagacgctcccctcgctgtactgcgcgccttcaaggtgctccgtaccctcggaagtaagtgtggcgacttcctgaggagcaggttttgcaaggacgtgcttccaaagctggcgggctctttagtgacccaggcacctatatccgctcgcgcgggtcctgtgtacagccacacattggcttttaagctgcaattggcagtgctccagggccttgggcctctctgcgagagattagatctcggggaaggcgatctgaacaaggtggcggacgcatgtctgatctacctgagtgttaaacagccagttaaacttcaggaagccgcgaggtccgtgtttcttcacttgatgaaagtggacccagacagcacctggttcctgcttaacgagctgtattgccccgtccagtttactcccccacacccgtccctgcaccctgtgcagcttcacggcgcttccggccagcagaacccctatactactaacgttctccagcttttgaaagagttacagtag

SEQ ID NO: 208296 - DNA, 1527 bp, synthetic construct
  misc_feature 1..1527: note = Description of Artificial Sequence: Synthetic coding sequence
  source 1..1527: mol_type = other DNA
atggagctggacagcgccctggaggcccccagccaggaggacagcaacctctcagaggagctatcacactcggcgtttggacaagctttctccaagatccttcactgtctggcacgtcccgaggccagacggggcaatgtgaaggatgctgttttaaaggacctgggcgacctcattgaggctacggaatttgatagactgttcgaaggcacgggggcccgcctacgtggaatgcctgaaactctggggcaagtggcgaaggctctggaaaagtacgctgcaccatcgaaggaagaggagggaggaggggatggacactccgaagccgcagagaaggccgcgcaggtcggcctgttatttttgaagcttttgggaaaggtggagacagccaagaatagtcttgtggggccggcctggcagacaggcctacaccatttagcaggtcccgtgtatattttcgccatcacacatagtcttgagcagccatggaccaccccaagaagccgggaggtcgcccgggaggttcttaccagcctcctccaggtgactgagtgcggtagcgtcgcaggatttctacacggcgaaaatgaagatgaaaaggggagactgtcggtgattctgggcctgttgaagcctgatctgtacaaagagtcgtggaaaaacaacccagccattaagcatgtcttttcctggaccctgcagcaggtgacgcgaccatggctttcccagcatctcgagagagtattgccagcctcactggtgataagcgatgattatcagacagagaacaaaatactgggtgtccactgtctgcatcacatcgtgctgaacgtgcctgccgctgatcttttgcagtataatagagcgcaggtcttgtaccacgctatttccaatcatctttacactccggaacatcacctgatccaggccgtgctattatgcctacttgacctgtttcccatcctggagaagacactccactggaaaggggacggtgccagaccaaccacgcactgcgatgaggtgctgcggctgatacttactcatatggaacccgaacacagattgctcctgcgccggacttacgcgcgtaatctgccggcattcgtgaatcggctgggcatcctcacggtgcgccacctcaagcggttagagcgtgtcatcattgggtacctggaggtgtatgacggtccagaagaggaagcccgcttgaagattctcgagacactgaagctcttaatgcaacacacctggcctagagtgagttgtcgattggtcgtcctcctgaaggccttgctgaagctgatctgcgacgtagctcgcgatcctaacctgacacccgagtctgttaaatccgctttgcttcaggaagccaccgactgcttaatcctcctcgatcggtgcagccagggaagagtcaaagggttgcttgctaagatcccacagagttgtgaagatagaaaggtggtgaactacattcgaaaggtgcagcaggtgtccgaaggagctccgtacaacggcacttag

SEQ ID NO: 208297 - DNA, 1527 bp, synthetic construct
  misc_feature 1..1527: note = Description of Artificial Sequence: Synthetic coding sequence
  source 1..1527: mol_type = other DNA
atggagctggacagcgccctggaggcccccagccaggaggacagcaacctcagcgaagagctgagtcattctgcattcggccaagccttttccaaaatcttgcactgcttggcaagacccgaggcaagacgcggaaatgtaaaagatgccgtattgaaggacttgggcgaccttatcgaggctactgagtttgatcgactatttgaggggactggggcaagacttaggggcatgcccgaaacactcggacaggtggccaaggccctggaaaagtatgctgcaccatcaaaagaggaggagggcggcggcgacggtcacagcgaggccgctgaaaaggccgctcaggtgggcctcttgttcttgaaactcctcggtaaagttgagactgcgaaaaattccctggtggggcctgcatggcagacaggtcttcatcacctggctgggcccgtgtacatttttgcaatcacacatagtctagaacaaccctggacaacacctcgctccagggaagtggctcgcgaggtactgacctcactgttacaggtgacggaatgtggcagcgtggccggctttctgcacggcgaaaatgaggatgaaaaaggtcggctgtctgtgatcctgggactgttgaaacctgacctttacaaggagtcttggaagaacaatccagccatcaagcatgttttctcatggacacttcagcaggtaacccgtccatggcttagtcagcatctggaacgcgttctgcctgctagtctggtgatttcagatgactaccagacggagaacaagatcctcggggtccattgtctgcatcatattgtccttaacgttccagcagccgatctcctgcagtataatcgggctcaggtattgtatcacgctatctccaaccacctatatacaccggaacaccacctaattcaggcagtgcttctttgcttgcttgacctgtttcccatcctggagaagactctgcactggaaaggtgatggcgcccgaccaacgacccactgcgatgaagtgttgagacttatcttgacacatatggaacctgaacaccgcctgcttcttaggcgcacatatgctcgcaatctcccggccttcgttaaccgcctcggcattctcactgtgcggcatctcaagcggttggaaagggtgattattgggtatctcgaggtatacgacggccctgaggaagaggctaggctgaagatccttgaaacccttaagctgttgatgcagcacacatggccccgggtctcatgccgcctggtggttctccttaaagccctgttgaagctgatttgcgatgttgctcgcgatcctaacttgaccccagagagcgtgaaatccgcgctcttacaggaggctaccgactgcctcatccttctggacaggtgttcccaagggcgcgtgaaagggctgttagccaagattcctcagtcttgcgaagacagaaaagttgttaattacatccgaaaagtgcagcaagtgagtgaaggagccccttacaacggcacttag

SEQ ID NO: 208298 - DNA, 1494 bp, synthetic construct
  misc_feature 1..1494: note = Description of Artificial Sequence: Synthetic coding sequence
  source 1..1494: mol_type = other DNA
atggagctggacagcgccctggaggcccccagccaggaggacagcaacctgagtgaagagctatcacactccgcttttggacaggctttcagcaaaattctgcactgtctcgcccgtcctgaagccaggagggggaatgtgaaggatgccgttctcaaggacctgggagatctcatcgaggccaccgaatttgataggctcttcgagggcaccggcgctagactgcgaggtatgccagaaactctgggacaggtcgccaaagccttggaaaagtacgccgcccctagtaaggaggaggaagggggaggagatgggcattctgaagcggccgaaaaggccgcccaggtggggctgctgtttctgaaattactcggaaaggtggagacagccaaaaactccctcgtcgggccagcttggcagacgggccttcatcacctagctggtcctgtgtatatcttcgccatcactcatagtctggagcaaccttggacgacgccacggtctagggaagtcgcgcgggaagtattgacatctctcctgcaggtaacagagtgcggctccgtcgccggtttccttcacggtgagaacgaggacgagaaggggaggctctcagtgatcctggggctgctgaagcccgatttatataaggagagttggaagaacaatccggcgattaaacatgtattttcttggacgcttcagcaggtgacccgtccatggttatcgcaacatttagaacgcgtgctgccagcctcactggtgattagtgacgattaccagaccgaaaataaaattctgggtgtccattgccttcaccatattgtgctgaacgtacccgcagccgaccttcttcagtataatcgggcgcaggttctgtatcatgccataagcaaccacctgtacacgccagaacaccatctgatccaggcagtcctgctgtgcctcctcgacctattcccaatccttgaaaagaccttgcactggaagggtgatggggcccgaccgacgacccactgtgacgaggtgcttaggctgatactgacccacatggagccagagcaccgtttgctccttcgtcggacatacgcaaggaatctgccggcgtttgtgaatcgccttgaaagagtcattattggctatttagaagtatatgatggacctgaagaagaagcaaggctgaagatcttggagactttgaagcttctgatgcagcacacatggccacgggtgtcgtgtcgtctggtagtcctgctgaaggccctgttgaagcttatctgtgacgtcgcacgcgatcctaacctcacccccgaatctgttaagagcgcgttgctgcaagaggccaccgattgcctaattttgcttgatcgctgctcacagggcagagtcaaagggctcttggccaaaatccctcaaagttgtgaggataggaaggtggtgaattatatccgtaaagtccagcaggtgtccgagggggcaccctacaatggcacgtag

SEQ ID NO: 208299 - DNA, 306 bp, synthetic construct
  misc_feature 1..306: note = Description of Artificial Sequence: Synthetic coding sequence
  source 1..306: mol_type = other DNA
atggagctggacagcgccctggaggcccccagccaggaggacagcaacctttcagaggagttgtcccactctgcgttcggccaagcttttagcaagatccttcactgcttagcccgcccagaagctcgaagaggaaacgtgaaagacgcggtacttaaggatctgggcgatctcattgaagcgaccgaatttgatcggttattcgagggcactggggctcggctgcgcggcatgccagagacactcggacaagtggcaaaggcattagagaaatacgctgccccctccaaagaggaagaggggtag

SEQ ID NO: 208300 - DNA, 2424 bp, synthetic construct
  misc_feature 1..2424: note = Description of Artificial Sequence: Synthetic coding sequence
  source 1..2424: mol_type = other DNA
atgccccgggccccccggtgccgggccgtgcggagcctgctgcggagccattaccgggaagtgctcccgctggccacattcgtgaggagactcggcccccaaggctggcggctggtgcaaaggggagatccagcggcattcagagccctggtggcccagtgtcttgtgtgtgtgccgtgggatgcacgacccccccccgctgctcctagcttcagacaagtcagctgcctgaaagagctggttgcgagggtactgcagaggctgtgtgaaagaggtgcaaagaacgttctggcattcgggttcgctctccttgacggggctcgaggcggcccaccagaggcgtttaccacatcagtgcggtcctacctccccaatacagtgacagatgctctgagagggtctggcgcgtgggggctgctgctccggcgggttggtgatgacgtgcttgtgcacctgctggctcgatgcgcccttttcgtacttgtggcaccttcctgcgcctaccaggtgtgcggcccacccctgtatcaactcggagcagcaacccaagcgaggccacctcctcacgcgtccgggcctcgcaggaggctgggctgtgaacgggcctggaaccatagtgtcagagaggctggagtgccccttggcctgcctgcacctggtgcccggcggcggggcggctcagcttccaggtccctgcccctccctaaaagacctcgcagaggcgccgctcctgagcctgagagaacccctgtgggacaagggtcgtgggcacatcctggtagaacacgcggtccttcagatcgaggattctgcgtggtgagccctgccaggcccgccgaggaagctactagcctagaaggcgctctgagtggcacacgccactctcatccctccgtgggcaggcagcaccatgcaggtccacctagtacctcaagaccacccagaccctgggacacaccctgcccgcctgtctatgccgagaccaaacacttcctgtactcttccggggataaggagcagttgcggccttcattcttgttgtcttcgctcaggccaagcctgaccggtgcgagacgactggtagagacaattttcctcgggtcacgaccctggatgcccgggacacccagaagactcccacggctgcctcagagatattggcagatgcggcctctgttcctggagctgttgggcaaccatgcccaatgcccctacggggtgttactgaagacccactgccccttgcgtgcagctgtgacgcccgccgccggggtgtgcgcgcgggaaaagccgcaagggagtgtggcagctcccgaggaggaggacaccgatccaaggagactcgtgcagctcctgcgacagcatagctccccctggcaggtttacggcttcgttcgggcctgtctgagacgattggtgccccccggactttggggatcacggcacaacgagcggcggttcctgcgaaacactaaaaaatttatctcccttggaaaacacgcgaagttgtctcttcaggagctaacatggaagatgagcgtacgtgactgtgcgtggctcaggaggtcgcccggcgtcgggtgcgtgccagctgcggaacatcgccttcgggaggaaattctcgctaaattccttcactggctaatgtctgtctatgtggttgaacttttgcgttcattcttctatgtgaccgagaccacgttccagaaaaacaggctatttttctacagaaagagtgtatggtcgaaactacagtcgatcggaatacgccagcatctcaagcgggtgcaattacgtgaactttctgaggctgaagtgcggcagcaccgagaagctaggcctgcattacttacctccagattgcgcttcattcctaagcctgatggactgcgccccattgtgaatatggactacgtcgtgggggctcgtacatttcgcagagaaaagagggccgagaggctcactagtcgggtgaaggctctgttttccgtcttaaactatgagcgtgcgcgacggccaggactgctcggggcttcagtgttggggctcgacgacatccatagagcatggagaaccttcgtactgagggttcgcgcccaagacccaccaccagagctgtattttgtcaaagttgatgtcactggggcttatgatacgatccctcaggatagacttactgaagtgatagcttctatcataaaaccacagaatacgtattgcgtgaggcgatatgcagttgtgcagaaggctgcccatggacacgtgagaaaagccttcaagagccacgtcctgaggcctgtgcccggagaccccgcgggcctgcatcccctgcatgccgctctccaacctgtgttgcgacgacacggggaacaggcagtgtgcggggacagcgctggcagagccgctcctgctttcggcggatag

SEQ ID NO: 208301 - DNA, 3399 bp, synthetic construct
  misc_feature 1..3399: note = Description of Artificial Sequence: Synthetic coding sequence
  source 1..3399: mol_type = other DNA
atgccccgggccccccggtgccgggccgtgcggagcctgctgcggagccattaccgagaggtgcttcctctggcaacattcgtcaggaggctgggtccacaggggtggcggttggtgcagcgaggggatcccgccgcatttagggcgctggtcgcccagtgcctagtctgtgtgccgtgggacgccaggccacctccagcggccccctctttccgccaggttagttgtctgaaagagctcgtggcgagggtgcttcagagactttgtgagcggggcgcgaagaatgttttggcattcgggtttgccctcttagatggagcacgcgggggcccacctgaggcttttacaacttccgtgcgctcgtacttaccaaacactgttaccgatgctttacggggaagcggggcatgggggctactactaagaagagtgggggatgacgtgctagtgcatcttctggccaggtgcgccctattcgtgcttgtcgcaccttcatgcgcttaccaggtgtgcggaccacctctgtaccagctgggcgccgctactcaggctaggccccccccacacgcatcgggtccgaggcgcagattgggatgcgagagggcctggaatcatagcgtgagggaggctggggtcccactgggcctccccgcccctggcgcgagacgcagaggtgggtccgcatccaggagcctgcccttacccaaacggcctcgcagaggtgctgctcccgaacccgaacgcaccccagtggggcaaggatcctgggcacatccgggcagaactcgcggaccgtccgaccggggcttctgcgtggtctctcccgcacggcccgctgaggaagccacatctctagaaggggctctcagtggaactagacacagccatcctagtgtcggccggcagcaccacgcgggccccccctctactagtagacctccaagaccatgggacactccttgcccgcccgtgtacgcagaaactaagcatttcttatacagctccggcgacaaagaacagttgcggccgagcttcctgttatcctcactccgtccctcgctgacgggcgctcggagactagtcgaaacaatttttctgggcagccgaccctggatgccaggcactcccaggcgcttgccaagattacctcagcggtactggcaaatgagacccctgtttttggaattgttagggaatcatgctcagtgcccatatggcgtcctcctgaagacacactgtcctctccgtgccgctgtcacccctgccgctggcgtctgcgccagggaaaaacctcagggcagcgtggctgctcccgaggaggaggatacagacccccgtcgcctggtgcagcttctgcgtcaacactcttcgccctggcaagtctatggctttgtgcgcgcatgcttgaggcggttggttccccccggtttatgggggtcccggcacaatgaacggaggttcctaaggaatacaaaaaagttcatttcactggggaagcacgccaagctctcgctgcaggaactcacttggaaaatgtcagtaagggactgtgcatggcttagaagatcccctggtgttggatgcgtgcccgccgccgagcatcggctccgagaggaaatcttggccaagttccttcactggctgatgtccgtgtatgtagtggagcttctgcgcagtttcttttacgtgactgagaccactttccagaagaacaggctgtttttctaccgtaaatctgtctggagcaaactgcaaagcataggcattagacaacacctgaaacgagtgcagttgagggaactgtctgaggccgaggttcgacagcaccgggaggcccgtcccgctttattgacatcacgcctgcgattcatacccaaacctgacggccttaggcccatcgtcaatatggactacgtcgtgggtgccagaacctttaggcgggaaaagcgcgccgagagattaaccagcagggttaaagccctgtttagcgtgcttaactacgaacgggctcggagacctggcctgctcggggctagtgttcttggtctggacgacattcaccgggcctggagaacatttgttcttagggtaagggcccaggatcccccacccgagctgtacttcgtgaaggtagatgtgaccggtgcctacgacacaatcccgcaggataggcttaccgaggtgattgccagcatcataaagcctcagaacacatattgtgtgagaaggtacgcagtcgtgcagaaagctgcccacggtcacgtgagaaaagccttcaaatctcatgtcagcactctcacagacttgcagccatacatgcgacagttcgtggcccacctccaggaaacatccccactcagagatgctgtggtgattgaacagtcctcatcactcaacgaagcgtcgtccgggctctttgatgtctttctgcgatttatgtgccatcatgctgtgcgaatcagagggaagtcttacgtgcagtgtcagggcatcccccagggttctatactgagtacactgctgtgtagcctgtgttacggcgacatggagaacaagttattcgcaggcatccgccgggacggcctactcctcaggctagtggacgactttctgttggtaaccccccacttgacccacgctaaaaccttcctacgcacgctagttcgaggggtccctgagtacgggtgtgtggtgaatctgaggaaaaccgtggtcaatttccccgtggaagacgaagcactcgggggtacagcctttgtccagatgccagcccatggactattcccctggtgtggtttattgcttgacactcgaactctggaagtgcaatccgactatagcagctacgctagaacctctatccgcgccagtctgacctttaatcgaggtttcaaggcggggcgcaatatgaggcgcaagctgttcggagtgttgagacttaagtgtcattccttgtttttggaccttcaagtaaattcgctccagaccgtgtgcactaatatctataagattctacttctgcaggcttaccgcttccatgcgtgcgtcctgcagctgcccttccaccagcaggtgtggaagaaccccacattctttctgcgcgtcatctccgacaccgctagcctgtgctattcaatactgaaagccaaaaacgcaggaatgtccctaggagcaaagggggcggcaggcccactgccatctgaggccgtccagtggctttgtcaccaggctttcctgctcaagctgacacggcatagagtcacgtacgtacctttgctgggcagcctcagaactgcccagacccagctctcacgcaagctccctgggaccactctgactgctctcgaagccgcggccaaccccgccctaccgtctgatttcaagacgatcctcgattag

SEQ ID NO: 208302 - DNA, 3210 bp, synthetic construct
  misc_feature 1..3210: note = Description of Artificial Sequence: Synthetic coding sequence
  source 1..3210: mol_type = other DNA
atgccccgggccccccggtgccgggccgtgcggagcctgctgcggtctcactatcgggaagtgctgccactggcaacttttgtacgacgactggggcctcagggatggcgcttggtacagagaggcgaccccgccgccttccgcgcgctggtggctcagtgcctggtttgtgtaccttgggacgctagacctcccccagctgccccaagctttcggcaagtgagctgtctaaaggaactggtggcccgcgtgcttcagcgcttgtgtgagagaggggccaaaaacgtgctagccttcgggttcgctctgctcgacggagcccgcggtgggccacccgaagcatttacgacctcggtccgctcctacctgccaaatactgttaccgatgctttgcgaggcagtggcgcatgggggctgctactcagacgcgttggcgacgacgtgctagttcatctgcttgctcgctgcgctttgtttgtactcgtggcacccagctgcgcctaccaagtttgcggaccacccttgtaccagctgggcgcagccacccaggccaggcctcctcctcatgccagtggaccccgccgcaggttggggtgcgagagggcctggaaccacagtgttcgcgaagccggggttccattgggcttgccagcccccggcgcccggcggagaggcggatcagccagtcggtccctgcctcttcctaaacgcccccgcaggggcgcagcacccgagccagaacgtaccccggttgggcagggcagctgggcccaccccggccggacacgtgggcctagcgaccgcggcttctgtgtggtgagccctgcgcggcctgcagaggaggcaacgtccctggagggggcattgagtggcacgcgccatagccatccttccgtcgggagacagcatcacgctggaccaccgtcaactagtaggcccccacgcccgtgggacaccccgtgcccacctgtttatgcagaaaccaagcactttctctattcctctggagataaagaacagttaaggccctcctttctcctgtctagtttacgaccaagcctcacaggtgctcgtcgcttggtggaaacaatcttcctgggctcacggccttggatgccagggacgccgcggcgcctccctcgactaccccagaggtattggcagatgcggccactgttcctggaactgcttgggaatcacgcccagtgcccctatggggtgctgctcaaaacccactgtcctctccgcgccgccgtaactcctgctgcaggagtgtgtgctagagagaagccacagggttctgttgccgctccggaggaagaggacaccgacccccgccgactcgtacaactgcttcgccagcacagttccccctggcaggtctacggatttgtgcgcgcatgccttcgccgcctcgtccccccaggactgtggggtagccgacataacgagcggcggttcctgcggaacacaaaaaaatttatttcccttggaaagcatgcgaagctttctttacaggaactcacatggaaaatgagcgtgcgggactgtgcatggctgcgtcgctcccctggcgtcggttgtgtcccagccgccgagcatcggcttagagaggagatcctggcaaagtttctgcattggctgatgtccgtctacgtagtggagctgcttcgtagtttcttttacgttacagagactacttttcaaaagaacagattgttcttctaccgcaagagcgtgtggtcaaaactgcaaagtatcggtatccgacagcacctcaagcgtgtgcagctgcgcgaacttagcgaggccgaggtgcgccagcatagagaagcgcgtcctgcgctcttgacctccaggctgagatttattcccaagccagatggcctgagaccgatcgttaacatggattacgtggtcggggcacggacatttcgcagggagaagcgcgctgaacgcttgactagccgggtgaaagccctgttttccgtccttaattacgaaagggcgaggaggccgggactcttgggagctagcgtgctcggcttagatgatattcaccgcgcgtggaggacatttgtgctgcgagtccgggcccaggatcctcctcctgaactgtactttgtcaaggtggacgtgaccggagcatacgacacgatcccccaggatcgtcttaccgaggtcatcgcctccatcatcaagccgcaaaacacgtattgtgtgcgaagatatgcggttgtacagaaggctgctcatggtcacgtccgcaaggcattcaagtctcatgtcagtacactgacagatctgcaaccgtatatgagacagttcgtggcacacctccaagagacctcgcccctcagggatgcagtagtgatcgagcaaagctctagtctgaacgaagccagctccgggctattcgatgtcttcctccgctttatgtgccatcacgcagtgcggattcggggcaagagctacgtccaatgtcagggtataccccaaggctccatcctgtccactctactatgctctttgtgttacggtgacatggaaaacaaactctttgcagggattcggcgcgacggactgctgttacgactagtcgacgattttctcctggtcacgccacacctgacacatgctaaaacctttctgtcctacgcccgaacctccataagagcgagcttgaccttcaacaggggctttaaggccggcagaaatatgaggagaaagctattcggggtgctgcgcctcaagtgccacagtctgttcctggatctccaggttaactcactgcaaactgtctgcacaaacatttacaagattttgctgctgcaggcctataggttccatgcttgcgttctgcagctgccttttcatcagcaggtctggaaaaatccaaccttttttctcagagtcatttctgatactgccagtctgtgttatagcattttaaaggctaaaaatgctggcatgtcattgggggctaagggcgcggccggtcctctgccttctgaggcggtccagtggttatgtcaccaggcgtttctcttaaagctgacaagacaccgggtgacttatgtccccttgttaggctccctccgcaccgcacagacccagctgtcccgaaaactgcctggcacaactttaacagccctggaggccgccgccaatccagcactgcctagtgattttaagaccattctcgactag

SEQ ID NO: 208303 - DNA, 2424 bp, synthetic construct
  misc_feature 1..2424: note = Description of Artificial Sequence: Synthetic coding sequence
  source 1..2424: mol_type = other DNA
atgccccgggccccccggtgccgggccgtgcggagcctgctgcggtcccactatcgagaggttctacctttagctacttttgtgaggcgactgggaccccagggatggcgactcgtccagagaggcgaccccgcagcgttccgggccctggtagcccagtgcttagtgtgcgtgccctgggacgcccggcccccgccagccgctccatcctttaggcaggtgtcctgcctaaaggagctggttgcccgggtcctgcagaggctgtgcgaaagaggcgccaagaatgttctggccttcggttttgccctgctggacggcgctcggggaggcccccctgaggcctttaccacgtccgtccgctcttatctcccaaatacggttactgatgcactaagagggtcgggggcctgggggctcctgcttcggcgagtgggcgacgatgttctggtgcaccttctggccaggtgtgccttgttcgtcttagtggcaccgtcgtgtgcctaccaggtatgtggccctcccctataccagctgggcgcagcgactcaggccaggccccccccccacgcctccggcccacggaggaggttggggtgtgaacgagcttggaaccacagtgtcagagaagccggcgtccctctcggcctgccagcccctggggcccggcggcggggtggaagcgcatcccgaagtcttcccctgcctaagagacctcgtagaggcgcagcaccagagccggagagaacccccgtgggacagggctcttgggcccacccagggaggactaggggtccatccgaccgcggcttttgcgtggtgtctccagcccgtcccgctgaagaagcaacgagcctagagggagccctcagtggcacacggcacagccacccatccgtaggaaggcagcaccacgccgggcccccgtctacaagcagaccaccgcgaccctgggacacaccatgcccgcctgtttacgccgaaacgaagcactttctctatagctccggagacaaggaacagcttcgacccagcttccttctgtctagcttacgaccatctctgactggggcgcgccgcctggtcgagactattttcctggggagcaggccctggatgccgggcacaccgcgacgactacctcgactgcctcaacgctattggcagatgagacctttattcctcgagctcctagggaaccacgcccagtgtccatacggagtgcttctgaagacgcactgccccttgagagcagcagttactcccgcagctggcgtatgcgctcgtgagaagccccaaggctctgtggccgcccctgaggaggaggatacagatccacggcgccttgtgcaacttctgcggcagcattcttccccttggcaggtatacggttttgtaagggcgtgcctgagacgactggtgcctccaggactttggggaagccgccacaatgaacgccgctttctgcgcaatacaaagaagttcatctccctcggtaagcacgccaaactgagtttacaggaactcacatggaagatgagtgtcagggactgcgcttggctaaggcgaagtcccggagtaggctgtgttccagcagccgaacatcggttaagggaggagatactggctaagttcctccattggctgatgagcgtgtatgtcgtcgagttgctgagatcattcttctatgtgactgagaccacctttcagaagaaccgcctgttcttttacaggaagtctgtatggagcaagctacagtccataggaatccgacaacatcttaagagagtgcagttgcgcgagctgagcgaagccgaagttaggcagcatagggaggctcggccggcccttcttacatccaggctcaggtttatacctaagccggatggtctccggcccattgttaacatggactacgtggtgggagccagaacgtttagacgggaaaaacgcgcagagagactcacatcacgggtaaaggccctgttttcagtattgaactatgagagagcccgacggccaggactccttggcgcgagcgtgctcggcctggacgacatccacagggcatggaggacatttgtgcttcgggtgcgggcccaggatcctccaccagagttatactttgtaaaagtcgatgtcactggggcttatgatacaattccacaagatcggcttaccgaggtcatcgcctccattattaagccgcagaacacatattgcgtcagacgctatgcagtggtacagaaggctgcccacggacacgttcgtaaggccttcaaatctcacgtgctacggcctgttcctggggacccagccgggctgcatcctctgcacgccgctttgcagccagttcttaggagacacggcgagcaagccgtgtgcggagatagcgccggacgggcagccccagcctttggcggatag

SEQ ID NO: 208304 - DNA, 372 bp, synthetic construct
  misc_feature 1..372: note = Description of Artificial Sequence: Synthetic coding sequence
  source 1..372: mol_type = other DNA
atgatgctgcccaagcccggcacctactacctgccctgggaggtgtcagccggacaggtgcctgatggttctaccctgaggacattcggcaggctgtgcctttatgatatgatccagagccgggtgactctgatggctcagcacggttctgaccagcaccaagtcctcgtgtgcactaaacttgtagagccttttcacgctcaggtaggtagtctgtatatagtgctgggcgagttgcagcaccagcaagaccggggatccgttgttaaggcccgcgttctgacatgcgtggagggtatgaatctccccctgctggaacaggccattcgtgagcagaggctgtacaaacaggaacggggcggctcacagtag

SEQ ID NO: 208305 - DNA, 369 bp, synthetic construct
  misc_feature 1..369: note = Description of Artificial Sequence: Synthetic coding sequence
  source 1..369: mol_type = other DNA
atgctgcccaagcccggcacctactacctgccctgggaggtgagcgccggccaggttcccgacggaagcacgctacgcacattcgggcgactgtgcttatacgacatgattcagagccgagtcacccttatggcccaacatgggagtgatcagcaccaagtgctcgtctgtactaagctcgtggagccattccacgcccaggtgggatccctctacatcgtgctgggtgagctgcagcaccagcaggatcgggggagtgtggtgaaggcccgtgttctcacatgcgtggaagggatgaaccttcccctcctggaacaggccatcagagagcaaagactgtataagcaggagagaggtggaagtcagtag

SEQ ID NO: 208306 - DNA, 5514 bp, synthetic construct
  misc_feature 1..5514: note = Description of Artificial Sequence: Synthetic coding sequence
  source 1..5514: mol_type = other DNA
atgggcgccatgacccagctgctggccggcgtgttcctggccttcttggctcttgccactgagggcggtgtactgaaaaaggtgattcgccacaaaaggcagagcggggtgaacgccactttacccgaggaaaatcagccagtggtgttcaaccatgtctacaacataaaactccccgtgggttcacagtgttcggtggatctcgaatccgcctccggcgaaaaggatttggccccaccatcggaaccaagtgagtcgttccaggaacacactgttgacggcgagaatcaaatcgtgtttacccacagaataaatataccacggagggcttgcggctgtgccgcggcccctgacgttaaggagctcttaagccgacttgaggagctcgagaaccttgtgtctagtctccgggaacagtgtactgccggcgcaggctgctgtcttcagcctgccactggacgcctggatactaggcccttttgttccggtcggggcaacttttccaccgaaggatgcggctgcgtgtgtgaacctggctggaaagggcccaattgctcagagccagaatgtccgggcaattgccacctccggggacggtgtatcgatggacagtgtatatgtgacgacgggtttacaggtgaggattgtagtcagctggcctgtcccagcgactgtaacgaccagggcaaatgcgtcaatggcgtgtgcatttgtttcgaaggctacgcaggggctgactgctcaagggagatttgtcctgttccttgctcggaggagcacggaacgtgcgtggacggtctgtgcgtttgccatgacgggttcgccggtgatgactgcaacaaacccctgtgcctaaataattgttataatcggggtaggtgcgttgaaaacgaatgcgtgtgcgacgaaggattcaccggggaggattgttccgagctcatctgccccaatgattgctttgacagaggaaggtgcataaatggtacatgctactgtgaggaaggatttactggcgaggattgcgggaaaccaacttgcccgcatgcatgtcacacccaaggacggtgcgaggaaggtcaatgtgtgtgtgatgaaggctttgctggagtggactgttccgaaaagagatgccctgccgactgtcacaatcgcggccgatgtgtggacggcaggtgtgagtgcgatgatggctttaccggcgccgactgtggagagcttaagtgccccaatgggtgctcaggccacggtaggtgtgtgaatgggcagtgtgtttgtgacgagggttacaccggcgaggactgctcacagctcagatgtcctaatgactgtcactctcgaggccggtgcgtagaaggaaagtgcgtatgcgagcaagggtttaaagggtacgattgttcagacatgtcgtgtcctaacgactgccaccagcacggtaggtgtgtgaatggtatgtgcgtctgcgacgatggctatactggggaagattgtcgggaccgccagtgcccaagggactgcagcaatcggggcttgtgcgtcgacggtcagtgtgtctgcgaagatgggtttacggggcccgattgcgctgaactgagctgcccaaatgactgccatggccaaggaagatgcgtgaacggccaatgtgtctgtcacgaaggctttatggggaaagactgcaaggagcaacgctgccctagcgactgccacggccaaggacggtgcgtggatggacagtgcatatgccacgaaggatttactgggcttgattgtgggcaacacagttgtccatccgactgtaataatttgggccagtgtgtatcaggtcgctgcatctgcaatgagggttattctggcgaagactgttctgaagtgagtcctcctaaggacctggtggtgacagaagtgaccgaggagacagtgaacctcgcgtgggacaatgaaatgagagtcaccgaatatttggttgtgtatacccctactcacgaaggcgggcttgaaatgcagttccgagtgccgggcgaccaaaccagcactatcattcaggaactcgagcccggcgttgaatattttattagggtttttgctattctggagaacaagaaaagcattccagtgtcagctcgagtagccacatatttgccagccccagaagggctgaagttcaagagtattaaggagacctcggtagaagtcgaatgggaccccctcgatattgcctttgaaacctgggagatcatttttaggaacatgaataaagaagatgagggtgaaataactaagtccttgcgacgccctgagacctcctatagacagaccggcctagcgccggggcaggagtatgagatttctctccatatcgtcaaaaataacacacggggcccaggtctcaaaagagtgacgaccaccaggttagacgcacctagtcaaatcgaggtcaaggacgtcaccgacacaactgcactgatcacttggttcaagcccttggccgaaattgatggtatcgaattgacttatggcatcaaggacgtacccggcgatcggaccaccattgatctcaccgaagacgagaatcaatactctatcggcaatctgaagccggataccgaatatgaagtgtcccttattagccgtagaggggacatgtcctccaaccccgccaaggagaccttcaccaccggtctcgatgcccccaggaaccttcggcgagtgtctcagacagataattctattaccctggagtggcggaatggaaaagcagccatagactcttaccgcattaagtacgccccaatttccgggggagaccacgctgaagtggacgtcccgaagtcccagcaggcgactacaaagacaactctgacaggtctgaggccaggtaccgaatacggtatcggcgtgtctgcagtaaaggaggataaagagtccaatcccgcgaccatcaatgccgccacagaactcgacacccccaaggatcttcaggtatcagaaaccgctgagacatcactgacactgctgtggaagacaccactggcaaaattcgatcgctacagactcaattatagtctccctacgggacagtgggttggagtacagctgcctaggaatacgactagctatgtcctcagggggctcgagcctggtcaggaatacaacgtgctgctcaccgccgagaaaggacggcataaaagcaaaccagcaagagtcaaagctagcacggccaaggagccagagattgggaatctgaatgtctctgatataacacctgagagctttaacctgtcctggatggccaccgacggtatcttcgagaccttcaccatagaaatcattgatagtaatcggctactcgagactgttgagtataatataagcggcgccgagcgaaccgctcacataagcggactgccaccaagcacggattttatcgtttacctgagcggcctagcacctagtatccggacaaagactatttctgcaaccgctaccaccgaagcccttccactgcttgaaaatttgactatctcagatatcaacccttacgggttcaccgttagctggatggccagcgagaacgcattcgattcattcctggtcaccgtggtggacagcggaaagttgcttgatccacaggagttcactttgagtgggacacaaagaaaactcgaattgcgaggtctaattacaggcataggatatgaggtgatggtgtccggcttcacacaaggccaccagacaaaacccctacgggctgagattgtcactgaggcggagcctgaggtggacaatctgctcgtgagtgatgccaccccagatggctttaggctttcttggaccgcggacgagggggtgtttgacaattttgtattgaagattagagatacaaaaaagcagagtgaacccctcgaaataaccctcctggctcccgagaggacccgggatatcactggcctgcgagaggcaaccgagtacgagatcgaactttatggaatttcgaaaggccgccgctcccagactgtcagtgctatagctaccacagccatgggctctcccaaggaggtgattttctcagatatcaccgaaaacagcgccaccgtgtcttggagggccccaacagcccaggtggagtcgttcagaataacatacgtacctatcactggcggaacacctagcatggttaccgtggacgggacgaagacacagactcgtctagttaagctgatcccaggggtcgagtatctcgtaagcatcatcgcaatgaaaggttttgaagagagcgagcccgtctcgggcagtttcaccacggcattggatggaccttctggattagtaaccgctaacatcactgacagcgaggctctggcccggtggcagcccgccatcgccactgtagactcatacgtgatcagttataccggagaaaaggtccccgagattactaggacagtgagcggcaatactgtggaatacgccttgacagatctcgaacctgccacggaatacaccctcaggatttttgctgagaagggaccccagaaaagttctacaattaccgccaagtttactacagacctggatagccctcgcgatctgaccgccacggaggtacagtcggagacggcactgctgacttggcgaccaccacgcgcttcggtgacagggtatctcctggtgtatgaatctgtcgacggaaccgtgaaagaagttatcgtcggaccagacacaacctcttattcgctggccgacctgtccccgagcactcactacactgccaagattcaggctctgaacggtccacttaggtccaacatgatccagacgattttcacaaccatcgggttgctttacccttttcctaaagactgttctcaggccatgttaaatggcgacaccacgtcgggcctatatactatttatcttaatggcgataaagccgaagcactcgaggtgttttgtgatatgacctccgatggcgggggctggatagtcttcttgcgccggaagaatgggcgcgagaatttttaccagaattggaaggcctatgctgccggcttcggcgatcgcagggaggagttctggctgggcctggataacttaaacaaaatcacagcccaaggccagtacgaacttcgcgtggatcttcgcgaccacggggaaacggcctttgcagtttacgataagttctccgtgggagacgcaaagacgaggtacaagctcaaggttgaaggctattccggcaccgcaggagacagcatggcttaccacaacggaaggagtttctcaaccttcgataaagacactgacagcgcgatcactaactgtgccctgagttacaaaggcgccttctggtacagaaactgccacagagtaaatctgatggggaggtatggggacaataaccatagtcagggtgtaaattggtttcactggaaggggcatgagcacagtatccagtttgctgaaatgaagcttaggcccagtaattttcgtaacctggaaggaagacggaagcgcgcctag

SEQ ID NO: 208307 - DNA, 4695 bp, synthetic construct
  misc_feature 1..4695: note = Description of Artificial Sequence: Synthetic coding sequence
  source 1..4695: mol_type = other DNA
atgggcgccatgacccagctgctggccggcgtgttcctggccttcctcgctctcgcgaccgagggcggagtgctgaagaaggtaattcgccacaaacggcagtctggcgtcaacgccactcttcccgaagaaaatcagcccgtggtgttcaaccatgtgtataatatcaaactgccagtggggtcccagtgtagtgtggaccttgaatcggcttctggagagaaggacctggcccctcccagcgagccttctgagagcttccaggaacacactgtcgacggcgagaatcagatagtgttcacacaccgtattaacatcccacgccgcgcttgcggctgcgctgccgcccctgacgttaaagagctgctgtcaagactggaggaacttgaaaacctggtctcttcgctaagagaacaatgcacggctggtgcgggatgttgtctgcagccagcaaccggccgtctggatactagacccttttgcagcggacgggggaactttagcaccgagggctgtggatgcgtgtgcgaaccaggttggaagggacccaactgttccgagcccgagtgcccgggcaactgccacttacgtggtagatgcattgatggacaatgcatctgtgatgacggattcaccggcgaagactgcagccagttggcttgtccatctgactgcaacgaccagggaaagtgtgtgaacggggtgtgcatctgctttgagggttacgctggcgccgactgctctcgggagatatgcccagtcccatgcagcgaggagcacggtacctgcgtggatggactgtgtgtctgtcatgatgggttcgccggtgacgactgtaacaagcccctgtgcctcaacaactgctataacagagggagatgtgtggaaaatgagtgtgtttgcgatgagggattcactggtgaagattgctctgagcttatttgcccaaatgattgttttgatcggggacggtgtattaacggtacatgctactgtgaggagggtttcaccggagaagactgcggaaaacccacctgccctcacgcttgtcatactcagggccgatgcgaagagggccaatgtgtatgtgacgaagggttcgccggagtggattgtagcgaaaagagatgccccgccgactgccacaaccgcggacggtgtgtggacggtcggtgcgaatgcgacgacggtttcacaggggcagattgcggcgaattgaagtgcccaaacggctgttcaggacacggacgatgcgtaaacggtcagtgcgtttgcgatgaggggtacactggtgaggactgctctcagctcaggtgccccaatgattgccacagccgtgggaggtgcgtggagggcaagtgcgtgtgtgaacagggtttcaagggctatgactgttctgacatgtcttgccctaatgactgtcaccagcacggtcggtgcgttaatggaatgtgtgtctgtgacgacggatacactggtgaggactgtagggaccggcagtgccccagagattgctccaataggggcctttgtgtcgacggacaatgtgtgtgcgaagatgggtttacaggaccggactgcgcagagctcagttgtcccaacgattgccacgggcaggggcgctgcgttaatgggcaatgtgtgtgccacgaggggtttatgggcaaggattgcaaggagcagcgctgtcccagtgattgccacggacagggaaggtgcgttgacggacagtgtatatgccacgaagggtttactggattggactgcggtcagcactcatgcccatccgattgtaataatttaggccagtgtgtgagtgggagatgtatctgcaacgagggatacagcggcgaagactgctccgaggtgagtccccccaaggaccttgtggtgacagaggtcactgaggagactgtaaaccttgcctgggataatgagatgagagtgacagagtacctcgtcgtgtatacacccacccacgaaggaggtttggagatgcagttcagggtgcccggcgatcagacttcgacaataattcaggagctggaacctggggttgaatacttcatcagagtgttcgccatactagagaataagaagagtattcccgtgagcgccagggtcgcaacataccttcccgcgccagaaggccttaaattcaaaagtattaaagaaacctctgttgaagtcgagtgggaccctcttgacatcgcattcgagacttgggagattatcttcagaaacatgaacaaagaggatgaaggcgagatcactaagtcactacggcgtcccgaaactagttaccgccagactggcctggcccccgggcaagaatacgaaatatcccttcatattgtcaaaaacaatacaaggggccccggcctcaaacgagttacgaccaccagacttgatgcacctagccaaattgaggtaaaagatgtgactgataccaccgccctaatcacatggttcaaaccccttgccgagatcgatgggatagaactgacatacggaattaaggacgtgcccggggaccggaccacaatcgatctcactgaggatgaaaatcagtacagcattggaaacttaaagccagacactgaatacgaagtctcgttgatcagccgccgcggcgatatgagtagcaatccagcaaaagaaaccttcactacaggcctcgacgcaccccgaaacctccgccgggtctcgcaaaccgacaactcaatcactctagaatggcggaatggtaaagctgcaatagactcttatcgcattaagtacgcacctatttcgggcggagaccatgcagaagtcgacgtcccgaagtcccagcaggcaacgacaaagactacgcttacaggcttgagacccggaactgaatacggtataggcgttagcgcagttaaggaggataaggagtccaaccccgccaccattaatgccgcaaccgaattagacacacccaaagacctgcaagtttccgagacagcggaaaccagcctcaccctgttgtggaaaactcctctggccaagtttgataggtatcgtttaaactactctctgcccactggccagtgggtgggggtgcagctcccacggaataccacatcgtacgtactcagagggctggaacccggtcaggagtataacgttcttctgacagccgaaaaaggtaggcataagtcgaagccggccagagtgaaggccagcactgcaatggggtcgcccaaagaagtgatcttctctgacatcacggagaattctgcaactgtttcatggcgagccccaacagctcaagtcgaaagcttcaggatcacatacgtgcccataaccgggggaaccccaagtatggtgaccgttgacggcaccaagactcagacccgcttggtaaaattgattcccggcgttgagtacctagtctcaataatagcgatgaaagggtttgaagaatccgagcccgtgagtgggtcctttacaactgccctggacggtccttccggcttggtaacagcgaacattaccgactcggaggctctcgcaagatggcagcccgcgatcgcaaccgttgactcttatgttattagctacactggcgaaaaggtgcccgagatcactcggaccgtgagcggaaacaccgtggaatacgccctgactgatttggagccagcaactgagtataccctgagaatcttcgctgagaagggtcctcagaagagtagcaccataacagctaagtttactactgacctggattcacctcgagacctgaccgccaccgaagttcagtcagaaactgccttgctgacttggcgtccgcctcgggcatccgtgactggctatcttcttgtgtatgaatccgttgatggaacagtaaaggaagtcattgtaggcccggatacaactagctacagcctggccgacctgtcaccaagcacccactacaccgcaaagatccaggctctcaacggacctttgagatcaaacatgatccagacaatattcactactatcggattgctctacccatttcctaaagactgttcccaagctatgcttaatggagacactacctcgggactgtacactatttacctgaatggggacaaagcagaggccctcgaggtgttttgtgacatgactagcgacgggggcggttggatagttttcttgagacgaaaaaacggcagagaaaatttctaccaaaattggaaagcctacgccgctgggtttggtgaccgacgggaggaattttggttaggactggacaatctgaacaaaattactgcacaaggacagtatgaactgagggtcgacctgcgggatcacggcgagacagccttcgcggtgtacgataagttttccgtgggggacgccaagaccagatacaagctcaaggtggaaggctactccgggacagccggggacagcatggcctaccacaacggccgctctttcagcacattcgacaaggataccgacagcgccataacaaactgcgccttgtcgtacaaaggggctttctggtatcggaattgtcaccgcgtgaacctgatgggtaggtatggtgacaacaatcactcacaaggagttaattggttccactggaagggccatgaacatagtatccagttcgccgaaatgaagcttaggcctagcaactttcggaacctggagggccgcagaaagcgtgcatag

SEQ ID NO: 208308 - DNA, 4968 bp, synthetic construct
  misc_feature 1..4968: note = Description of Artificial Sequence: Synthetic coding sequence
  source 1..4968: mol_type = other DNA
atgggcgccatgacccagctgctggccggcgtgttcctggccttcctggccttggcaacggaagggggcgtgctgaaaaaagtaatccggcacaaacgccaatccggcgtaaacgccacacttcccgaagagaaccagcctgttgttttcaaccatgtatacaacatcaaactccccgtggggagccagtgttctgtggacttggaatctgccagtggagagaaggacctggctcccccctcagaaccctccgaatcattccaggagcacacagtggacggagagaaccaaatcgtgtttacacatcgaatcaatattccacgtcgcgcctgtggttgcgccgccgccccagacgtgaaggagctgctgagcaggctcgaggaactcgaaaatctggtgtctagcctgagagaacaatgcactgccggagcggggtgttgcctccagccagcgactggcaggctggacaccagaccgttttgctccggaagaggaaacttttccactgaaggctgtggctgtgtgtgcgagcctgggtggaaggggcctaattgtagcgaacccgagtgccccggaaactgccacctccggggtcgctgcatagacggccagtgcatctgtgatgatggattcaccggggaggactgtagtcagctggcctgtccatcagattgcaacgaccagggtaaatgcgttaatggtgtctgtatttgtttcgaaggttacgcaggggctgattgctctcgggagatctgccccgttccatgctccgaggagcacggtacgtgtgtggatggcttatgtgtctgccacgatggcttcgctggagatgactgcaataagccactctgcctgaataactgttataatcgagggcgctgtgtggagaatgagtgtgtgtgcgatgagggatttactggcgaagactgtagtgagcttatctgccctaacgactgcttcgatcgtggccggtgcattaatggcacatgttactgtgaggaaggttttaccggggaagactgcggaaaacctacttgcccacacgcttgccacacgcagggccgttgtgaagaggggcagtgcgtgtgcgacgaaggctttgcaggagtggattgttccgaaaagcggtgtccagctgactgtcacaaccgggggcgctgcgtcgacggccggtgcgagtgcgacgacggcttcacgggagccgactgcggggaattgaagtgtcctaacggctgttcaggccatggcagatgcgtaaacggccagtgtgtgtgcgacgagggatatacgggtgaagactgttctcaactcaggtgtcctaatgactgccacagccggggtcgctgcgttgagggaaagtgtgtgtgcgagcaaggcttcaaaggatacgattgctcagacatgagttgccccaacgattgtcaccaacacggcagatgtgtgaacggcatgtgtgtctgcgacgacggatatacaggcgaagattgtcgggatcggcaatgcccaagggattgttccaacaggggtctctgcgtcgatgggcagtgcgtgtgcgaggacggcttcacgggacccgattgcgcagagttgtcatgccccaatgattgtcatggacagggccggtgcgttaatgggcagtgtgtatgccacgaaggcttcatggggaaagactgcaaagagcagagatgtccttctgactgccacggacaaggccgatgcgtggacggccagtgcatctgccatgagggcttcaccggactagattgcggccagcattcctgccccagcgactgcaataatctggggcagtgtgtgagcggtaggtgtatctgtaatgaagggtattcgggagaggattgttccgaagtttcccctcccaaggacctcgtggtcactgaggttactgaggagacagttaacttggcatgggacaacgaaatgcgtgtgacagagtatctggtcgtctatacacccactcacgaaggcggactggaaatgcagttccgcgtgccaggggaccagacgtccacgattatccaggaacttgaaccgggcgtggagtacttcatccgggtcttcgccatcttagagaacaagaagtctattcctgtgtctgccagagtggccacatatcttccggcccccgagggactgaagtttaagagcataaaagagacgtccgtggaggtagagtgggacccccttgatattgcgttcgagacttgggaaatcatttttcgcaacatgaataaagaagacgagggagagatcaccaaaagtctgaggcgtccagagacaagttatcgacagacagggctcgctccaggacaggagtatgagataagtcttcatatcgtgaagaataatactcggggacctgggttgaaaagggtaactaccacgcgcttagacgctcctagccagattgaagtgaaagacgtaactgacacaacggcgcttattacttggtttaagcctctggcagaaatcgatggaattgagttgacctacggaatcaaggatgtcccgggcgatcggacaactatagatctgacagaggacgagaatcagtactccattggtaacttgaagcccgataccgaatacgaggtttctctcatctctaggcgaggagatatgagttccaaccctgcaaaagagaccttcacaacaggacttgacgccccacggaaccttagacgcgtgagccagaccgacaatagcatcactctggagtggcgtaatggcaaagcagcaatcgatagctatcggatcaaatatgctccgataagtggaggcgatcacgccgaagttgatgtgcctaagtcccagcaagctactactaagactacactgacggggctgcggcctggcactgaatacggtatcggtgtgtcggccgtaaaagaggacaaggaaagtaatcctgctactattaatgccgctaccgagttggacacacctaaagacttacaggtctccgaaacagctgagacctccctgaccctgctatggaaaactcctctggccaagttcgaccggtaccggctgaactacagtctgccaactggtcagtgggttggagtccagctgccccgcaacacaacatcttacgtcttgcgaggcctggagcccggccaagaatataatgtgctgctcaccgctgagaaaggccggcataagagcaaaccagccagggtgaaagctagtacggaggctgagccagaagtggacaaccttctcgtctcagatgccaccccagatggcttccggctgagctggacggccgatgaaggcgtgttcgataactttgttctcaagatccgggatactaaaaagcaatcagaaccacttgaaatcacattgctagctcctgaacgcactcgagacatcaccggtttacgggaggctaccgaatatgaaatagaactatacggcatttctaagggacggcgctcccagaccgtgagtgccattgccacgacagctatgggtagccccaaagaggtgatttttagcgatataaccgaaaattccgcaaccgtatcgtggcgagcaccgacagcccaggtggagagtttccgaataacgtacgttcctattacaggcggcacaccctccatggtaaccgtggacggtaccaagacacaaactaggctggtgaaattaatccctggggtggagtacttagtatcaatcatcgcaatgaaagggtttgaggaaagcgaaccagtcagcggaagctttactactgccttggacgggccaagcggccttgttacagccaatattacagacagcgaagccctggcgcgttggcagcctgccatagccaccgttgatagttacgttatctcatacactggagaaaaggtgccagagattacacgaactgtgtcgggtaacacagtggaatatgctctcacagacctggagcctgcaacggagtatacgcttcggatctttgcagagaagggtcctcagaagtcgtccacgattaccgctaaattcaccacagacctggactcccctcgtgacctgacagccactgaggtgcagagcgaaacggccctcctaacatggagacccccaagggcttccgtcaccggctacctcctggtgtatgaatctgtggacggaaccgttaaggaagtgatcgtgggccccgacactacctcttactccctggccgatctgtctccctccacccactataccgccaaaattcaggcgctgaacgggcccctccggagtaatatgatccagaccattttcaccactatcggactcttatacccttttccgaaggactgttcccaggcaatgctcaatggcgataccacctccggtctttacaccatttaccttaacggtgacaaagcagaagcactcgaggtattttgtgacatgacatctgatggtggtggctggatagtgttcctgcgcaggaagaatgggcgggagaacttctaccagaactggaaagcctatgctgcggggtttggagaccgcagagaggagttttggctgggcttagataatctgaacaagattacagcccagggtcagtacgagctaagggtggatctgcgagaccatggtgaaactgcctttgctgtgtatgacaagtttagcgtgggcgatgctaaaactagatacaagctcaaggtggaaggctattccggtacagcaggtgacagcatggcctaccacaacggccggagttttagcactttcgacaaggatacagattccgctattaccaactgcgcactgtcttataagggcgctttctggtatcggaactgccatcgggtcaaccttatgggccggtatggcgataataatcacagtcaaggggttaactggtttcattggaaggggcacgaacactccattcagttcgcagagatgaagctgcgtccctccaactttcgtaatctggaggggcggcgcaaaagagcctag

SEQ ID NO: 208309 - DNA, 6606 bp, synthetic construct
  misc_feature 1..6606: note = Description of Artificial Sequence: Synthetic coding sequence
  source 1..6606: mol_type = other DNA
atgggcgccatgacccagctgctggccggcgtgttcctggccttcctggccctggccaccgagggtggcgtattgaaaaaagtgatccgacacaagaggcaatccggggtgaatgccacactcccggaggagaatcagccagtggtgtttaatcacgtatataatatcaagctcccggtgggaagccaatgctcagtcgacctcgagagtgctagtggcgagaaggatttagccccacctagtgagccatccgaatcctttcaggagcatactgtagatggtgagaaccagatcgtgttcacacacaggatcaatatcccgagacgcgcctgtggttgcgcggctgccccggatgtaaaagagctgctctctcggctcgaagaattagagaacctcgtgtcgtccttgagggagcagtgcactgcaggagctgggtgttgtctccagcccgcaacaggcaggctcgacacaaggcctttctgttccggccgcggtaacttttcgacagaagggtgcggctgcgtctgcgagcccgggtggaaaggacctaactgttcagaacctgaatgccctgggaactgtcatcttcggggacgatgtatcgatggtcaatgcatttgtgacgacggctttacaggcgaggactgttcccagcttgcctgcccctctgattgcaatgaccaaggaaaatgtgttaatggggtgtgtatatgctttgaaggctacgccggggcggattgtagccgcgaaatttgcccagtgccttgctctgaagaacacgggacttgtgtggatgggctgtgcgtgtgtcatgacggattcgcgggcgacgactgtaacaaacctctgtgcctcaacaactgctacaacagggggaggtgtgtcgaaaatgaatgtgtgtgtgacgagggctttaccggggaggactgttctgagttaatttgccctaacgactgtttcgaccgtggcaggtgcatcaatggcacatgttactgcgaggaggggttcacgggcgaagattgcgggaagcctacctgtcctcacgcctgtcacacacaggggaggtgcgaagagggtcaatgcgtctgcgacgaaggcttcgcgggagtggactgttccgagaaacgctgcccagccgattgtcacaatagaggccgttgcgtggatgggagatgtgagtgcgatgacggtttcaccggggccgactgtggagaattgaaatgtcctaacggatgtagcggacacggcagatgcgtcaatgggcagtgtgtttgcgatgagggttatacaggggaagattgctcgcagctgcgctgccctaacgactgccatagtcgtgggcgatgtgtggagggcaagtgtgtttgtgagcagggcttcaaggggtatgattgttctgacatgagctgtcctaacgactgtcaccaacatgggcggtgtgtcaatggaatgtgcgtatgcgacgacgggtataccggtgaggattgccgtgacagacaatgcccgagagattgcagcaaccgaggtttgtgcgtagacggacagtgtgtgtgcgaggacggtttcacaggaccggattgcgccgaactgtcttgcccaaacgattgccatgggcaggggcgttgtgtgaatggccagtgcgtgtgccacgaaggctttatgggcaaggattgcaaggagcagcggtgccctagtgattgccacggacagggaagatgcgtggacgggcaatgcatctgtcatgagggttttaccggcctagattgcggacaacactcctgtccttccgactgcaacaatttagggcaatgtgtctcaggcaggtgcatatgcaacgaggggtactctggagaggactgctctgaggtgtctccacctaaggatctggtggttaccgaagtgactgaagagacagtgaatctagcctgggacaacgagatgagagtaactgagtatctcgtagtgtatacccctacacacgagggcggtcttgagatgcagttcagggttccaggtgatcagacatcgacaatcattcaggaactagagcccggggtggaatatttcatcagagtcttcgccattttggagaataagaaaagcatccccgtgtccgctagagttgctacatatctcccggccccagaaggcttaaaatttaagagcatcaaggaaacttcagtcgaagtggagtgggatccattggacattgccttcgaaacctgggaaatcatatttagaaatatgaacaaggaggacgaaggcgagattactaagagtctacgtagacccgagacctcttaccggcaaaccgggctcgctccaggccaggaatatgagatatccctccatatcgtgaaaaataatactcgcggacccggattaaagagagtgacgactacacgtctggatgcaccctctcagatcgaggtgaaggacgtcaccgacacaacagccctgatcacttggttcaagcctctggccgaaatcgacggcatcgaattgacgtacgggatcaaggacgtcccaggtgacagaaccacaattgatctcaccgaagatgaaaatcagtatagcatcgggaatctcaagcccgataccgagtacgaggtgagccttatttcccgtaggggggacatgtcatctaaccctgccaaggagacatttactactggcttggacgccccaagaaacctaagacgcgtctctcagacagacaactcaatcacactggagtggcgtaatggtaaagctgcgatagacagctatagaattaagtatgccccaatatccggcggagaccatgctgaggtggacgtgcccaagtcccagcaggcaaccacaaagaccactcttacagggttgcggcctggcaccgaatacgggattggcgtatctgcagtgaaggaagataaggaatctaatccagcgacgatcaatgccgcgactgaactagacacccccaaggacctgcaggtctctgagacggctgagacttctttgaccttattatggaagactccactggctaagttcgatcggtatcgtctcaattattctctgcccaccggacagtgggtgggcgtacagcttcctcgcaataccacttcatatgtgctacggggtctggagccaggacaggaatacaatgtcctgctgactgcagagaaaggcagacataagtctaaacccgctagagtcaaggcctcgacagagcaggcacccgaattagagaacctgactgtcaccgaggtcggttgggacggcctgcgactaaattggactgcggcagatcaagcctatgaacattttatcatccaggtacaagaggccaataaggtggaggctgcccgaaaccttacagtgcccggctcactgcgcgcagtggatatcccaggcctgaaagccgctacaccttacaccgtgagtatatatggtgtgatccaaggatatcgtactcccgttctgagcgctgaggccagtactggggagacaccaaaccttggcgaggtggtggtggcagaagtggggtgggacgcactcaaactgaactggacggctccagagggcgcctacgaatacttttttattcaggtgcaagaggctgacacagtggaagcagcccagaacttgacagtaccaggcggcctgagaagtactgatctacccggcctgaaggccgctactcactataccatcacgatcaggggcgtgacccaagactttagcaccactcccctctccgtggaagttcttacagaagaggtgccagacatgggcaacttgacagtgacggaagtatcgtgggacgcactccgcctgaactggaccacccctgacggaacctacgaccagttcacaattcaggtccaagaggcggatcaagtggaggaagcgcataatctgactgtgccgggctctttacggtccatggaaattcccgggctgcgggccggcactccttacactgtgacactgcacggggaagtcagaggccattccactcgaccattggccgtggaggtggtgacagaagacctgcctcaactgggcgatctggccgtgagtgaggtaggctgggacggattgagactgaactggaccgccgccgacaacgcctacgaacacttcgtcattcaggtccaagaggtgaataaagtcgaagcagctcaaaatctgacactacccggctctctccgggcggtcgatatccccgggctagaggctgctacaccatatcgtgtgtccatttacggcgtaatcagggggtaccggacgccagtgctgagtgcagaagcatctacagccaaggagcccgaaattggtaatctgaacgtgtctgatatcacccctgaatcattcaatctgagttggatggccaccgacgggattttcgaaacctttacaatcgaaattatagattcaaacaggcttctggaaactgttgaatacaatatatcaggcgcggagaggacagcccacatcagcgggctgcccccaagcaccgacttcatcgtgtacctgtctgggctggccccctctatccgcactaagacaatctcagctacagccacaaccgaggcgctacctcttctggagaacctcaccattagcgatataaacccttatgggtttactgtgtcttggatggcttcagaaaacgcctttgactccttcctcgtcacagtagtagatagcggtaagttgctagacccacaggaattcacattgagcggcactcagagaaaactggagctgcgtggactgatcacaggcattggatacgaggtgatggtctccgggtttacccagggtcatcagactaagccgctgagagccgagatcgtgaccgaagccgagcccgaggtcgacaatctgctggtgtccgatgccacacctgacggtttcagactgtcctggaccgctgacgaaggcgtcttcgataactttgttttaaaaatccgcgacactaagaagcagagtgaacccctggagataacattgctggctccggaaaggacccgcgatatcacaggactgcgggaagctacggagtacgaaatcgaactctacggcatctcaaagggtcggcgcagccagactgtaagtgccattgccaccacggcaatgggtagcccgaaggaagtcatattctccgacattacagagaattcagccacagtctcatggcgtgcacctaccgcacaggtggaatcgtttagaatcacctacgttcccatcactggaggtaccccctctatggtgacggtagatgggacaaagacccagacacgactggtcaagctgattccaggcgtcgaatacctggtctctattatagccatgaagggttttgaggaaagtgaacccgtgtcaggttccttcactactgcacttgacgggccatccggactcgtgaccgctaatattactgactctgaagctctggccagatggcaacccgccatcgctaccgtggattcttacgtgattagctatacgggggaaaaagtcccggaaattacaaggacagtgtcaggaaacactgtggagtacgctctcaccgacttagaaccagcaaccgagtatacattaaggatcttcgcggaaaagggtccgcagaagagcagcactattaccgccaaatttactacagatctggactccccccgggatctcacagctaccgaagtccagtcagagactgcactgcttacctggcgaccaccccgcgcttccgtgactggatacctgctcgtgtatgagagcgtggacggaaccgtgaaggaagttatagttggcccggatactactagctactcacttgcagacctgagtccttctacccactataccgccaagattcaggccctgaatggtccactgcgcagcaatatgatacagacgatcttcaccacgatcggtcttctttacccctttccaaaggattgctctcaggccatgcttaatggggacaccacttccggtctctatacgatctatttaaatggggacaaggccgaggccctagaggtgttttgcgacatgactagcgacggcggcggttggatagtctttcttcgccgcaaaaatgggagggagaacttttaccagaactggaaagcctacgccgccgggtttggcgacaggcgagaggagttctggctgggcttagataatctcaacaagataactgctcaggggcagtacgaattgcgcgtggacctcagggatcacggcgagacagcttttgccgtgtacgataagttttcagtgggtgacgccaaaaccagatataagttgaaggttgaagggtatagcgggaccgcgggggacagtatggcctatcataacggccgcagcttctccactttcgacaaagatacagactctgccattaccaactgcgcactgagttacaaaggggctttctggtataggaactgtcacagggtcaacctcatgggtaggtacggagacaacaatcactcacagggagtaaactggttccactggaagggccacgaacattctatccagttcgccgaaatgaaacttagaccctcaaattttcgcaacctcgaagggaggcgaaagagagcgtag

SEQ ID NO: 208310 - DNA, 3240 bp, synthetic construct
  misc_feature 1..3240: note = Description of Artificial Sequence: Synthetic coding sequence
  source 1..3240: mol_type = other DNA
atgggcgccatgacccagctgctggccggcgtgttcctggccttcctggcacttgcaactgaagggggagtgcttaagaaggttataagacacaaacgacaatccggggtgaatgccacccttcctgaggagaatcaaccggtcgtcttcaatcacgtctacaatatcaaactgcccgtgggaagccagtgctccgtcgatctggagagcgccagcggtgagaaggatctggcaccaccaagcgagccctcggaatcattccaagaacatacagtagacggcgaaaatcagatagtttttacccacagaatcaatataccacgcagggcttgtggctgtgccgcggcacccgatgtgaaagagctgttatcccgacttgaagagctggaaaacctggtgtcgtccctccgcgagcagtgtaccgcgggggccggctgttgcttacagccggccactggtagactcgacactcgaccattctgttcaggacgaggcaacttctctactgagggatgtgggtgcgtgtgcgaaccagggtggaagggaccgaattgtagcgaaccagagtgtcctggcaactgtcacctgcggggacgctgcattgacggccaatgtatctgtgacgatgggtttaccggcgaggactgtagccagctggcctgtccctcggactgtaacgatcagggcaaatgcgtgaatggtgtgtgcatctgttttgaggggtatgctggcgctgattgctcccgggagatctgcccagtgccctgcagcgaagagcatggcacctgcgtcgatgggctctgcgtatgtcatgacgggttcgctggtgacgattgcaacaaacccctctgcctgaataactgttataatagaggccgctgcgtagaaaatgaatgtgtgtgtgatgagggctttaccggcgaagactgttcagagctgatttgccctaatgattgcttcgaccgagggaggtgcatcaacgggacctgctattgtgaagagggattcaccggcgaggattgcggtaagccaacgtgccctcacgcctgccatacccagggtcgctgtgaagaaggtcagtgcgtttgtgacgaaggtttcgctggagtggactgctctgagaagcgatgtcctgctgattgccataatcgagggaggtgcgtagatggtcgctgcgagtgtgacgacggatttacaggtgcagattgcggagagcttaaatgccccaatgggtgctcaggccatggaagatgcgtgaacggacagtgcgtgtgcgacgaaggctacacaggcgaggactgtagtcaactgcgttgtccaaatgattgtcacagtagagggcgatgtgtagaaggaaagtgtgtctgcgagcagggattcaaggggtacgattgctccgatatgagctgtcccaatgattgccatcagcacgggcgctgtgttaacggtatgtgtgtgtgtgacgacggatacaccggggaggactgtcgagatcggcagtgcccccgggactgtagcaaccgcggcctgtgtgtggacggacagtgcgtgtgtgaagatggattcacaggccctgactgtgctgaattgagctgcccgaacgattgccatgggcagggcagatgtgtgaacggccagtgcgtgtgtcacgagggattcatgggaaaagactgcaaggagcaaagatgtccctccgattgccatggacaggggcggtgcgtggacggtcagtgcatttgccacgagggctttacaggattggattgtgggcagcacagttgcccgtcagattgcaacaatctggggcaatgcgtgtccggaagatgcatatgtaacgagggatactcaggggaggattgttccgaagtttctcctccgaaagacctggtggtcactgaggttaccgaagaaacagtgaacctggcatgggataatgaaatgcgcgtgacagaatacttggtggtgtacactcctacccatgagggcggattggagatgcagttccgcgttcccggcgatcaaacttcaactatcattcaagaacttgaaccaggcgttgagtatttcatccgggtgtttgccattctggaaaataagaagtcaattcccgtctcagctcgcgtggccacatatctccctgcaccggagggcctgaagtttaaatcgatcaaagagacatccgtcgaggtcgaatgggaccctctcgatatcgcctttgagacctgggagatcatcttcagaaatatgaacaaggaagacgagggcgagattactaaatctctgcgtaggcccgaaacgagttataggcagacaggactggcccctggccaggagtatgagataagtctgcacattgtgaagaacaacacccgagggcccggcctgaaacgcgtcacgacaactaggctggacgcacccagtcaaatagaagtgaaagacgtgaccgacactacggcactgattacctggttcaagccactggccgaaatcgatggtattgagctgacttacggtatcaaagacgtacctggagacaggaccaccattgacttaacggaggatgagaaccagtacagcataggtaacctgaaacctgacaccgagtacgaggtctcactcatcagccggcggggggacatgtcatccaaccccgcaaaggaaacattcaccacaggactcgacgccccccggaatcttcgccgcgtctctcagaccgataattccattaccctcgagtggcggaacggcaaggcggccatcgacagttacagaattaaatatgcaccaatatcaggcggggatcacgccgaagtggacgttcccaagagtcaacaggctacgacaaagaccatcacagctaagttcaccaccgaccttgattcgcctcgggatctaacagcaaccgaggtccagagcgaaacagccttattgacgtggcggccacctcgtgctagtgtgacaggctacctgcttgtctatgagtcagtagacggaacagtcaaggaggttatcgttggcccggatacgaccagctattccctggccgatctcagtcctcctagtctgtttctccattttattcagcagaaacccgaaaagcaatattgtttccattttaaagacatgattaatatcatcaacatcatcatgatgatgatgatgatgaagacaaaggacttctcccgcgacctgtccttccagaacatcagcggccagtacctgattgtgttttttttttag

SEQ ID NO: 208311 - DNA, 279 bp, synthetic construct
  misc_feature 1..279: note = Description of Artificial Sequence: Synthetic coding sequence
  source 1..279: mol_type = other DNA
atgggcgccatgacccagctgctggccggcgtgttcctggccttcctcgctctggcgacggaggggggggtattaaagaaagttatcaggcataagagacagagcggcgtcaatgcaaccctgcctgaagagaatcagcccgtcgtcttcaaccatgtttataatatcaaacttcctgtagggtctcagtgctccgtggatctggagagcgcgtctggggaaaaagacctcgcgcctccctcagagcccagcgaaagtttccaggagcacaccgtatag

SEQ ID NO: 208312 - DNA, 5241 bp, synthetic construct
  misc_feature 1..5241: note = Description of Artificial Sequence: Synthetic coding sequence
  source 1..5241: mol_type = other DNA
atgggcgccatgacccagctgctggccggcgtgttcctggccttccttgcgctcgccacagaaggaggcgtcttgaagaaggtgatccggcacaaacgccagtcaggagtgaatgccaccctgccagaggagaaccagccggtcgtgttcaatcacgtgtataacatcaaactgcccgtagggtcccagtgctcagtggatctcgaatccgcctcaggcgaaaaggatctggcaccgccctctgaaccctcagagtcattccaagaacatacggtggatggcgagaatcaaattgtgttcacacaccggataaatattcctagaagggcctgtggatgcgccgctgctcccgacgtaaaggagctgctgtctcgtttggaggaactcgaaaacttagtctcatcactcagagagcagtgcactgcaggcgccggttgctgtcttcagccagccaccggaaggctagatactaggccattttgcagcgggagggggaacttctcaactgagggatgtggctgtgtctgtgagcctggatggaaggggccaaactgcagcgagccagagtgcccaggcaactgccacctccgaggaagatgtattgacggtcagtgcatctgtgatgatgggttcacaggtgaggattgctcacaactggcatgccctagcgattgtaacgaccagggcaaatgtgtgaacggtgtgtgtatctgtttcgaagggtacgctggggcggattgctccagggaaatctgcccggtgccttgcagcgaggaacatgggacatgtgtggacggcctttgtgtttgtcacgatggattcgccggcgacgattgtaataaacccctctgcttgaataattgttacaacagggggcgctgtgtagaaaacgaatgcgtttgtgacgagggctttactggcgaggactgctccgaactgatttgtcccaacgattgctttgaccgaggaaggtgcatcaatggtacttgttattgtgaggaaggttttactggcgaggattgtggcaaaccaacctgtccccacgcctgccacacgcaagggaggtgcgaagaagggcaatgtgtgtgtgacgagggtttcgccggagtggattgtagcgaaaagcgttgccctgctgattgccacaaccgcgggcggtgcgtggacgggaggtgcgagtgcgacgatggcttcaccggtgccgactgtggggaattgaaatgccccaacgggtgctcagggcatggtagatgtgtgaacggccagtgtgtttgtgacgagggatatactggcgaggactgctctcaactgcgctgtccgaacgattgccactcacgtggccggtgcgttgaagggaagtgtgtatgcgaacaggggttcaaggggtatgactgctccgacatgagctgtcccaacgattgccatcagcatggtaggtgtgtgaacgggatgtgcgtctgcgacgacgggtacactggcgaggattgtcgcgacaggcagtgcccaagggattgctccaatcgtggcctgtgtgtcgatggtcagtgtgtttgcgaagatggttttactggtccagactgtgctgagctttcctgccccaatgactgccatggccagggccggtgcgtgaacgggcaatgtgtctgccacgaagggttcatggggaaagattgcaaggagcaaagatgtccgtcagattgccacggtcaaggccgctgtgtggatggccagtgtatctgtcatgaagggtttaccgggctcgactgcgggcagcatagctgccctagcgactgtaataatctgggtcagtgtgtcagcgggcgctgcatctgtaacgagggatactctggagaggattgctcggaagtgagccctccaaaggatctggtggtgacagaagtgaccgaagagaccgtaaacctggcgtgggacaacgaaatgcgtgtgactgagtacctggtcgtgtacactcccacacacgagggagggctggagatgcaatttagagttccgggggatcaaacctccactattatccaggaactcgagcctggagtggagtactttataagagtctttgccattttagagaataagaagtctatcccggtttctgccagagttgcaacataccttcctgctcctgaaggattaaagttcaaatccattaaggagactagcgtcgaggtagagtgggaccccctggacatagcctttgaaacctgggaaattatatttcgtaatatgaacaaggaggacgaaggggaaatcaccaaatcgttaagacgccctgagacgtcgtaccgccagacgggcctggccccagggcaggagtatgagataagcctgcatatagtgaaaaacaatacaaggggacccggccttaaaagagtgaccaccacgcgtctcgacgctcctagccaaattgaagtgaaggacgtaactgacactaccgccctcatcacatggttcaagcccctcgctgagattgatggcatcgagctgacttatggcatcaaggacgtacctggcgaccgaacaaccatcgacctgacggaggacgaaaaccagtactcaatcggaaacttgaagccggacactgaatacgaagtcagtctgatcagccggcggggcgatatgtccagcaatccagcaaaagagaccttcacaacaggtcttgacgcgccaaggaatctgaggcgggtcagccaaacagacaactccatcacactcgaatggaggaatggtaaggccgctattgattcttaccggatcaagtacgctccaatttcggggggcgatcatgccgaggttgacgtgcccaaaagccagcaggctacaactaagaccacattgactggcctgaggccaggcacggagtacgggatcggggtgtctgccgtaaaggaggacaaggagtccaatccagctactataaacgccgccacagaacttgacacgcccaaagatttgcaggtgtcggaaactgcagagacatccttgacactcctgtggaagaccccactcgcaaagttcgaccggtaccgactgaactactctctgcccacggggcaatgggtgggggttcagctcccacgcaataccacaagctacgtgttgcgaggcctggagccaggccaggagtataatgtgctgctgacggcggagaaggggagacataagtccaagcccgcaagagtgaaagccagcactgccaaagaaccggagatcggcaatctgaacgtatccgacattacccctgagtcgtttaatttgtcctggatggctaccgacgggatcttcgaaacattcacgatagagatcattgactctaatcgccttcttgaaaccgtagagtacaacatctcaggtgccgagagaacagcccacatttccggactgccaccctccactgatttcatcgtgtatctgtctggcttggccccctccatacgaactaaaaccatctccgctacagcgacaaccgaggcagaaccagaagttgacaacctcctggtgagcgatgctaccccggatgggtttcgtctatcatggaccgccgacgaaggcgtctttgataactttgtactgaaaatccgcgatacgaagaaacaaagtgaacctcttgaaatcactttattggccccagaacgcactagggacattactggactgagagaggccaccgaatatgaaattgagctctatggaatctcaaaaggtagaaggagccagaccgtttctgctatagcaacaacggcgatggggtcaccaaaagaagtaattttctcagacattactgaaaatagcgccactgtatcctggcgggctcccactgcacaggtggagtcttttcggattacatatgttcctataaccggcggaacaccatccatggtaaccgtggatggtactaagactcagacccgactcgtgaagcttataccgggggtagaatacttggtatcgataatcgcaatgaaggggtttgaggaatcagagccagtgtcaggaagcttcacaacagccctggacggacccagcggcttggtcaccgctaatatcaccgacagtgaagcccttgctagatggcagcccgccatagctactgttgattcgtacgtcatcagttataccggcgagaaagtccccgagatcactaggaccgtgtcaggtaataccgtcgagtatgctcttactgacctcgaacccgctacagaatatacactgcgtatattcgcagaaaagggaccccagaaatcctccacaatcactgcaaaattcaccacagacttggattcccctcgggatcttacggccaccgaggtgcagtcagaaacggcccttctcacttggagacctccacgtgcctctgtgacaggttaccttcttgtgtatgaatccgttgatggaacagtgaaggaggttattgtggggcctgacacaacttcctacagtctcgccgacctgagcccttcgacccactacactgccaaaattcaggctttgaacgggcctctccgcagcaatatgattcagactattttcaccaccatcggcctgttgtaccctttccctaaagactgctctcaagccatgctcaacggcgatactaccagcggactttatacaatctatctcaatggggacaaggcagaggcgctcgaggtattttgtgacatgacaagcgatggaggaggatggattgtttttcttcgacgcaaaaacggtcgggagaatttctaccaaaattggaaagcttatgccgccgggtttggcgaccgtagagaggaattttggcttggcctggataacttgaataaaatcaccgctcaggggcagtatgaactgcgagtagacctgcgggaccacggggagacagcattcgctgtgtacgacaaattttccgttggcgatgccaaaaccaggtacaagctgaaggtggaaggctactcagggacggcaggtgactccatggcttatcataacggacgctcctttagcacattcgataaggatactgactcagcgatcacaaactgtgccctgtcatacaagggcgctttttggtacaggaactgccaccgagtcaacctaatgggaaggtacggcgataacaatcactcccaaggggtgaactggtttcattggaaagggcatgaacactccatccagtttgctgagatgaagttgcggccatcaaacttccgaaacctcgaagggcgtagaaagcgagcatag

SEQ ID NO: 208313 - DNA, 5517 bp, synthetic construct
  misc_feature 1..5517: note = Description of Artificial Sequence: Synthetic coding sequence
  source 1..5517: mol_type = other DNA
atgggcgccatgacccagctgctggccggcgtgttcctggccttcctggctctggccacggagggcggagttctaaaaaaagtgattcgccacaagagacaatcaggcgtgaacgcaacgcttcctgaagaaaaccagcctgtggtattcaaccacgtttacaacatcaagctgcctgtgggttcccagtgtagtgtagatttagagtcagcctccggagaaaaggacctcgcaccccccagcgaaccgtccgaaagcttccaggaacacacagtggacggggagaaccagattgtgttcacacatcgcattaacatcccccgccgcgcctgcgggtgcgccgccgctcccgacgtaaaggagctgttgtctaggctagaggagctcgagaatcttgtaagttctctccgggaacagtgcacggctggggccgggtgttgtttgcagcctgcgactgggcggctagatacccggcccttttgttcaggacgcggaaacttctctacagagggttgcggatgtgtgtgcgagccggggtggaagggacccaattgcagcgaacccgagtgtccagggaattgccacctgagaggcaggtgcattgatgggcagtgcatctgcgacgatggattcacaggggaggattgctcccaattggcatgtccgagcgactgtaatgaccaaggcaagtgcgtgaatggagtctgtatttgttttgaagggtatgctggagccgattgcagtcgggagatttgtccagtcccctgctccgaggaacacgggacgtgtgtggacggactgtgcgtgtgccacgatggattcgccggggatgattgcaacaaacctctgtgcctgaataactgttacaaccgaggtcgctgcgttgagaacgaatgcgtctgcgatgaagggttcaccggagaggactgctcagaacttatctgtcccaacgactgttttgaccgcggacgttgtatcaatggaacctgctactgcgaagagggatttacaggagaggattgtggcaaacccacgtgcccccacgcttgtcacacccagggacgatgtgaggaagggcagtgcgtttgcgatgagggattcgccggcgttgattgctccgaaaaacgctgtcccgcagattgccacaacagaggaagatgcgtggacgggagatgcgagtgtgacgacggattcaccggggccgattgcggtgagctaaagtgtcctaatgggtgttccggccatgggcggtgtgtcaacggacagtgcgtgtgcgacgaagggtatacaggagaagattgctcacagctccgttgccccaatgactgtcacagtcgtgggcgctgcgtcgagggcaagtgcgtctgtgaacagggatttaagggatacgattgctcagacatgtcgtgtcccaacgactgccatcagcacggacgttgcgtaaatggcatgtgcgtgtgtgacgacggttacacaggggaggattgtagggaccggcagtgccccagagattgttccaaccgtgggctgtgcgtcgatggtcagtgcgtgtgtgaggacggattcacgggccctgattgtgcagagctgagttgcccaaatgattgtcacggccaaggaaggtgtgtgaacggccagtgtgtctgtcacgaaggcttcatgggcaaagattgcaaagaacagcgctgcccgtcagactgccatggccagggtaggtgcgtggatggacaatgcatctgtcatgagggcttcaccggcctggactgcggacaacattcttgcccctctgactgcaacaacttagggcagtgcgtgagtggtcgctgcatctgtaacgaggggtacagcggagaggactgctccgaagtttcaccacctaaggacctggttgtgacggaggtgacggaagagactgtcaacctggcctgggataacgagatgagagtgacagagtacctggtggtgtacactcccactcacgaaggcggtctggagatgcagttcagggtgcctggcgaccagacatcgaccatcatccaggagctggagcccggagtcgaatacttcatccgcgtgtttgccattctggaaaataagaagtctattcccgtttccgcccgtgtggccacgtatttgccagctccggaaggtttaaaatttaaatccatcaaggaaacaagtgtggaagtcgaatgggatcctctagacatcgcatttgagacatgggagattatctttagaaacatgaacaaggaagatgagggggaaataacaaaatcccttagacgccctgaaactagctacaggcagactggattggcccctggacaggagtatgagatctctctgcatatcgtgaaaaataacacccgcggaccggggttgaagcgtgtgacaaccacacgcctggatgccccgtctcagatcgaagtcaaggacgtaacagataccactgcgctgattacttggtttaaacccttggccgaaattgatggaatagagctgacgtacggaataaaagatgtccccggggatcggactaccattgatttgaccgaagacgagaatcagtactccatcggcaacttaaagcctgacacagagtacgaagtcagcctgatcagtcgccgaggggatatgtcctcaaaccctgcgaaggagacgtttactactggcctggatgccccccgcaatctcagacgcgtaagccagacagacaattctatcacacttgagtggagaaatggaaaggctgcaatagattcgtataggattaaatacgcccctatatctggcggcgatcacgcagaggtggatgtgcctaagtcgcagcaggcaaccaccaagaccaccctgaccggtctcagacctggaacggaatacggcatcggggtttcagcagtgaaggaggacaaggaaagtaatccagcaacaatcaacgctgcaacagagctcgacactcctaaggacctgcaggtttctgaaacggctgaaaccagcttgacactgctctggaaaacacccctcgcaaagtttgatagatacagactcaattatagcctcccaaccggccagtgggttggggttcagctcccccgcaacaccacatcatacgtgcttagggggttggaacccggccaggagtataacgtcctgttgaccgccgagaagggccggcacaaaagtaagcctgccagggtgaaggcctctacagccaaggaaccagagattgggaacctgaacgttagtgatattactccagagtcattcaatttgtcttggatggcaaccgacggaatctttgaaaccttcactattgagattattgattccaataggctgctcgagacggttgaatacaacatctcaggcgcggagagaaccgcacacatctcgggattgccacccagtactgactttattgtttatctctccgggctggcgcccagtatcaggaccaaaaccatctccgcaaccgccacgacggaacctaagccccagctcgggacactcatttttagcaatatcacgccaaaaagtttcaatatgtcatggactacccaggcaggcctgtttgcaaagattgtgatcaatgtcagcgacgctcactcccttcacgagtctcagcaattcacagtgagtggcgatgccaaacaagcccacattaccggccttgttgagaatacaggatatgatgtgtcggtcgcgggcacaaccctagctggtgatcccaccagacctctgactgccttcgtgattacggaagctgagccagaggttgacaatttgttggtttccgacgctacacccgatgggtttaggctgagctggaccgccgatgagggcgtgttcgacaattttgtgctgaaaattcgcgacactaaaaagcagtcggaacctcttgagattacgctgcttgcccctgagcgtacaagagatatcactggtttgcgcgaggcaacagagtatgaaatcgaactgtacgggatctcaaagggcagaagatctcaaaccgtctctgctatagcgactaccgccatggggagccctaaagaagtgatctttagcgacatcaccgaaaacagcgctactgtgtcttggcgagctccgacagcacaggtggagtccttcagaataacctacgtacccattactggggggaccccatctatggtcactgtggacggcaccaagactcagacacgcctggtcaagctgattcctggagtggaatatctggtctccattatcgctatgaagggtttcgaggaatctgaacctgtaagtggaagttttaccacggcactggacggccctagcggacttgtaacagccaacataactgacagtgaggcgttagcaagatggcagcctgcaatagccacagttgacagctacgtaatcagctacacgggagagaaggtgccagagatcacaagaacagtatctgggaatacagtggaatatgccctgacagacttggaacccgctaccgagtacacgctgcgaatctttgcggagaagggcccacaaaagagcagcaccatcaccgctaagttcactaccgatctggactcccctcgagacctcaccgcgaccgaggtccagagcgaaacggcattgcttacgtggcgaccccctcgggccagcgttactggctatctgcttgtgtacgagtccgtcgacgggaccgtgaaggaggttatagtgggtcccgacaccacaagttacagccttgctgacttgtcaccatccacccactacacagccaagattcaagcattgaacggacccttgagatccaatatgatccagactattttcaccacaatcggactcttgtaccctttccccaaagactgcagtcaagcaatgttgaacggggacacgacttccggactttatactatatatctgaacggagacaaagcagaagcgctggaggtgttctgtgacatgacgagtgacggcggcgggtggatcgtcttcctgaggaggaaaaacgggcgcgagaatttttatcagaactggaaggcgtacgcagccggcttcggggaccgcagagaagagttctggttaggcctggataatctaaataaaattaccgctcagggccagtacgaactgcgggtggatctgagagatcacggcgaaaccgcttttgctgtttatgacaaattcagcgtcggagacgccaagactcggtacaagctgaaagttgaggggtacagcggcactgctggggatagcatggcctatcataatggacgtagctttagtacatttgacaaggatacagactctgcgatcactaactgtgccctgagttacaaaggtgctttttggtaccgcaactgccacagagttaatcttatgggacgctacggcgacaataatcatagccaaggcgtaaactggtttcactggaagggacacgagcattccattcaattcgctgagatgaagctccggcccagcaatttccggaacctcgaaggtcgcagaaaacgggcttag

SEQ ID NO: 208314 - DNA, 4077 bp, synthetic construct
  misc_feature 1..4077: note = Description of Artificial Sequence: Synthetic coding sequence
  source 1..4077: mol_type = other DNA
atgggcgccgacggcgagaccgtggtgctgaagaacatgctgatcggaattaaccttattcttctggggtccatgatcaaaccttcagagtgccaactggaagtgacaacagaacgtgtgcaacgtcagagtgtggaagaagaaggcggaatcgctaattataatacatctagcaaagagcaacctgtggtcttcaatcacgtgtataacatcaacgtgccactggataatctctgctcctctgggttggaggccagtgcagagcaggaggtttcagctgaggacgagacactggccgagtacatgggacagacatcggaccatgagagccaggttactttcacacatcgcatcaacttccccaagaaggcgtgtccgtgtgcttcaagtgcgcaggtgctgcaggagctcctgtcaagaatcgagatgctggaacgggaggttagtgtgctgagagatcaatgcaacgctaattgttgccaagagagcgccgctaccgggcaactggattatattccccactgttccgggcacggtaacttttcctttgaatcatgtggatgtatttgcaacgaaggttggttcgggaagaattgttctgaaccttactgtcccctaggctgcagctcccgcggggtgtgtgtggacgggcagtgtatttgtgactctgaatattccggtgatgattgtagcgagctgagatgccctaccgactgtagctcaaggggtctttgtgtggacggcgagtgtgtgtgtgaggagccatatacaggggaggattgtcgggagctcagatgtcctggcgattgtagcggaaagggtcgatgtgccaatgggacctgcctttgtgaggaagggtatgtgggcgaggactgtgggcaaaggcaatgtttgaacgcttgcagcgggagaggacaatgcgaggaggggctgtgtgtgtgtgaggaagggtaccagggcccagattgctccgccgtcgcccccccggaggatcttcgcgttgcggggataagcgatcggtccatagaactggagtgggacggtcctatggctgtcaccgagtacgtgatttcttatcaacctaccgcactgggcggactgcagctccagcagagggttcctggtgattggtcaggagtgactataactgagctggaacctggcttaacttataatatctctgtgtacgctgtcataagcaacatcctctccctgccgatcacggctaaggtcgccactcacctgtccacaccacagggtcttcagtttaagacaattaccgaaactactgttgaggtacagtgggaaccgttcagttttagttttgacggctgggagatttccttcatccctaaaaacaatgaaggaggagtaattgctcaggtcccgagcgatgtgacgagcttcaaccagaccgggctgaagcccggggaagagtatatcgtcaacgttgttgcattaaaagagcaggctcgctcaccacccacctccgcctcagtatccaccgttattgacgggccaacacagatcctggtccgagatgtgtccgacactgtggccttcgtggaatggatccctccacgtgctaaggtggactttatcttgctaaaatacggtcttgtggggggcgagggcggtaggaccacctttagactccagccacctctatcgcagtattctgtgcaagctctgaggccgggatcccgctacgaggtgtctgttagtgccgtccgcggcacaaatgaatccgatagtgccacaacccagtttacaacagagatcgacgctcccaagaacctgagagtcgggtctcggaccgcaacctcactggatctggaatgggataactctgaggccgaagtacaggagtataaagttgtgtatagcactttagctggtgagcagtatcacgaagtgctggtgccccgaggtataggacccaccaccagggccacacttactgatctagttccaggaactgaatatggcgtaggcatcagtgctgtgatgaattctcagcagtccgtgcctgcgactatgaacgccaggaccgaactggactccccccgtgatttgatggtgacagctagctccgaaacttctatctcactcatatggacaaaggctagcggacctatcgaccattaccgaataacgttcacccctagttcgggcattgcctctgaggtaacagtgcctaaagatagaacaagctacaccttgaccgatctggaacccggggcagagtacattatctctgtgactgctgagagaggccggcagcagagtctcgagagtacggttgatgcgtttactggctttcgacctatatcccacctgcacttttcacacgtgacttcgagttctgtcaacattacttggagtgatccgtctcctccagccgaccggcttatcttaaactacagcccaagagacgaagaggaggagatgatggaagtctcccttgacgctacaaagcggcacgcggtgctgatggggctgcagcccgcgactgaatatatcgtcaacctggtggccgtgcacggcactgtgacatcagaacctatcgtcggaagcatcacaacgggcattgaccctcctaaggatatcacaattagtaacgtgacaaaggatagcgtaatggtgtcttggtccccccctgttgcaagctttgactattatagggtgtcttataggccaacccaggttggcaggcttgactcctctgtagttcccaataccgtgaccgagttcaccataacccgcctgaatcccgccaccgagtacgagatcagtctgaacagcgttaggggcagggaggaatccgagagaatatgcactcttgtgcatacagcaatggacaatcccgtagacctgattgcgacaaatatcacacccacggaagcacttctgcagtggaaggcaccggtgggagaggtcgagaactacgtaattgtgctcactcattttgcggtggctggtgagactatcctggtggacggagttagcgaggaatttcggctcgtggatttgctgccctcaacccactataccgccaccatgtacgcaaccaacggtcctctaacttctggcacaatttcaactaatttcagtaccctgctcgatccaccagcaaatctgacagcgtccgaagttacccggcagtctgcgctcattagttggcagcccccccgggccgaaatagagaactatgtgttgacatacaagtccaccgacgggtcacgcaaggagctgatcgtcgacgctgaggacacttggataaggctcgagggactgctggagaacacagactacactgtgctgctgcaggctgcccaagataccacatggtctagtataacatctaccgcttttacaaccggaggcagggtgtttccacacccccaggattgtgctcagcacctcatgaacggagacaccctctctggtgtttacccaatctttctgaatggagagctgtctcaaaaattgcaggtatattgtgatatgaccaccgatggaggtggttggatcgtatttcagagaaggcagaacggtcagacagattttttcaggaaatgggctgattacagagtgggctttgggaacgtcgaagatgagttctggcttggtctcgacaatatccataggatcacctcgcaggggaggtatgagctgcgcgtggatatgcgagatggccaggaggcagcgtttgctagttatgataggttctcagttgaagatagtagaaacctttataagctccgcatcggctcttataacgggaccgccggggacagcttgtcttaccaccagggccggcccttttccaccgaggaccgggacaatgatgtggctgtgacaaactgcgctatgagctataagggcgcatggtggtacaagaattgccaccgcacaaacctgaatggcaaatatggggaatctcgtcatagtcagggtattaactggtaccattggaaaggccacgagtttagcattccgtttgtcgagatgaagatgagaccctacaaccatcgacttatggctggtcgaaagaggcaaagcctgcagttttag

SEQ ID NO: 208315 - DNA, 3807 bp, synthetic construct
  misc_feature 1..3807: note = Description of Artificial Sequence: Synthetic coding sequence
  source 1..3807: mol_type = other DNA
atgggcgccgacggcgagaccgtggtgctgaagaacatgctgatcgggattaaccttatccttctggggtcgatgatcaagccctcggagtgccagctggaggtgactactgaacgtgttcagagacagagtgtcgaagaagaagggggtattgcaaactacaacactagtagcaaggagcaaccggtcgtgttcaaccacgtatacaacattaatgtgcccctggacaatttatgttcgtctggcctggaagcctctgctgagcaggaagtctctgcggaagacgagaccctcgccgaatatatgggacagaccagcgaccacgaaagccaggtcacctttacgcatcggatcaatttccccaaaaaggcatgcccatgcgctagcagcgcgcaagttcttcaggagctgctgtctagaatcgaaatgctggaaagggaagtgtctgtactgcgggaccaatgtaacgctaattgctgtcaggagtctgccgcaacagggcagctggactacatcccccattgttcagggcatggaaacttctcattcgagtcttgtggctgtatatgtaacgaaggatggttcggtaagaattgctccgaaccctactgccctctgggatgctcatcacgcggtgtctgcgtggatggccaatgtatttgcgattcggagtatagtggggacgactgctccgagctgaggtgccctacagactgtagcagcaggggactgtgcgtggacggcgagtgcgtgtgcgaggagccatatacaggagaggattgcagggaactacggtgcccaggcgattgtagcggtaaaggtcgctgcgctaacggtacatgtctgtgtgaagaaggttatgtgggcgaggactgcggacaaagacagtgtttgaacgcctgctccggtagagggcagtgcgaagaaggactgtgtgtctgcgaggagggatatcaggggccggattgttctgcagtggccccccccgaggatctgagggttgccggaatcagtgatcgaagcattgagctggaatgggacggccctatggcagttacggagtacgtgatctcctaccagcccaccgcactaggcggcctgcagctgcagcagcgagtccctggcgattggagtggcgttacaatcaccgagttggagccgggcctgacatacaatatcagcgtctacgccgttatcagtaacattctatcccttccaatcacggccaaggtggctacccacctttcgacgcctcagggattgcagttcaagacaataacagagaccaccgtcgaggtccagtgggagcccttttccttttcatttgatggctgggaaataagcttcataccaaagaacaatgaggggggcgtgatcgcgcaggttcctagcgatgtaactagcttcaatcagacgggcctgaaaccaggggaggagtatatcgtcaatgtcgtggccctgaaagagcaggcccgcagtcccccaaccagtgctagcgtaagtacggttatagatgggcccactcagattctggtgcgagacgtcagtgacacggtcgcctttgtggagtggatcccaccccgcgctaaggtggacttcatcctgctgaaatatggcctcgtcggcggagaaggcggtcggaccacgtttcggctccagcctcctctctcccaatactccgtgcaggctttgcgacccggtagtaggtacgaggtcagtgtcagtgcagtccggggtacaaacgaatcagactcagccacaacacagttcaccaccgagatcgatgcacccaagaatcttagggtgggctcacggacggctactagtctggatctcgaatgggataactctgaggcagaagttcaggagtacaaagttgtctactccacgcttgctggtgagcaataccacgaggttcttgtacctagaggaattggtccgaccactcgcgctaccctcaccgacctagttcccggaaccgaatatggcgtgggaattagtgccgttatgaatagccaacagtccgtcccagctactatgaatgcaagaacggagctcgattccccacgcgacctgatggtgacagcgagttccgagacttcaatcagcctgatttggacaaaagcatctggcccgatagaccactatagaatcaccttcacgccatcctctgggattgcctcagaggtcacagtaccgaaagaccgaacgagctacacacttactgaccttgaaccaggtgctgagtatattatatccgtgactgctgaaagaggtcggcagcaatccctggagtccactgttgatgcctttactggcattgacccacccaaagacatcacaatatcaaatgtcacaaaggactccgtgatggtctcttggagcccacccgtggccagcttcgattactaccgggtgtcataccgccctacccaggtgggaaggctggattcttctgtggtccctaacacagtaacggagtttacgattacacgcctcaacccagcaacagaatatgagatctctctgaactcagtcaggggccgcgaggagagcgaacggatttgcacactggtgcacaccgccatggacaatcccgtggatttaatcgccactaatatcacccctaccgaagccctgttgcagtggaaggcccccgttggagaagttgagaattatgtcatcgtcctcactcacttcgcggtggctggcgaaacgattttggtggatggtgttagcgaggaattccgtctggttgatctgctgccctccacccactataccgccactatgtacgctacaaacggcccactgacgtcgggaacaatctctactaacttttccaccctcctagatcctcccgccaatctcacagcttcggaggtgacccgacaaagcgcgttaatatcatggcaacccccacgggcggaaattgaaaattatgtgctgacatacaagtcaaccgatggttcccggaaagaactcatcgtggacgccgaagatacctggattcgtttggagggactactggagaatactgattatacggttctgctgcaggccgcacaagacactacttggtcgtcgataacctcgaccgccttcactactggaggaagggtgttcccacacccacaagactgtgcccagcacttgatgaacggagacacccttagcggagtctatccaatctttttgaacggagaactgagccagaagctccaggtttactgcgacatgactacagacggcggcggctggatagtctttcagcgccgtcaaaatgggcagacagacttctttcgcaagtgggccgattatcgcgttggctttggcaacgtggaagatgaattctggctcgggctggataacattcatcgtatcacatctcagggtagatacgaactaagagtcgacatgcgcgacgggcaagaagccgcatttgcttcatatgaccggttttctgtcgaagattccaggaatctgtacaaactgcgcatcggcagctataatggcacagcaggtgactctctgtcataccaccaggggcggccctttagtacagaagatcgagacaatgacgtggcagtgaccaattgcgcaatgtcttataagggcgcttggtggtacaaaaattgtcaccgaaccaatctgaacggaaagtacggcgagtcccgacattcccagggtatcaactggtatcactggaaggggcatgagttctcaatcccatttgtagaaatgaagatgaggccttacaaccacaggctcatggccggcagaaagagacagagcttgcagttctag

SEQ ID NO: 208316 - DNA, 4077 bp, synthetic construct
  misc_feature 1..4077: note = Description of Artificial Sequence: Synthetic coding sequence
  source 1..4077: mol_type = other DNA
atgggcgccgacggcgagaccgtggtgctgaagaacatgctgatcggcattaacctcattctactagggagtatgatcaagcccagtgaatgtcaactagaagtaaccaccgagagggttcagcggcagtcagtcgaggaagagggcggaatcgcgaactataatacctctagcaaggagcaacctgtcgtgttcaaccacgtgtataacataaacgttcccttagacaacctttgcagctcggggctcgaagccagtgctgagcaggaggtctcggcagaagatgagaccctggccgagtatatgggccaaacttcagatcacgagagccaggtgactttcacacatcgaattaatttccctaaaaaggcctgcccctgtgcctcctccgcacaagtgctgcaggaacttctctcccgcatcgagatgcttgaaagagaggtttccgtcttacgtgatcagtgtaacgcaaattgttgccaggaaagtgctgctaccggccagctggattacatcccccactgtagtgggcacgggaatttttcattcgaatcctgcggatgtatttgcaacgagggatggttcggaaagaattgcagtgagccttactgccccctcggttgctcctcccgcggagtgtgtgttgatggtcagtgcatttgtgatagcgagtattctggagatgattgctcagagctgagatgccccactgattgcagtagtagaggcctgtgtgtggacggggaatgcgtttgcgaggagccctacaccggcgaagactgccgagaacttcggtgcccaggggattgcagcggaaagggtaggtgtgctaatggcacatgcctttgcgaggagggatacgtcggagaagattgcgggcaaagacaatgtctgaatgcctgctccggcagggggcaatgcgaggagggtttgtgcgtttgcgaggaaggataccagggccccgattgttctgcagtggcaccacccgaagatctgagagttgcgggcatatccgaccgttcaatcgagcttgagtgggatggacctatggcagtgaccgaatacgtgatctcttaccagcccactgccttgggaggactccagctgcagcagcgggtcccaggtgactggtccggggtcacaattacggagttggagcccgggctcacttacaacatcagcgtttacgcggttatatccaatattctatcactgcctatcaccgcaaaagtcgccacgcaccttagcacaccgcaggggttgcagttcaaaaccattacagaaaccactgtcgaagtgcagtgggagcccttttctttttctttcgatggttgggagatctcatttatcccaaaaaataatgagggaggggttattgctcaggtaccaagcgatgtcacgtcgttcaatcagaccggactgaaacccggagaagaatatattgtgaacgtggtcgcactgaaagaacaagcacgcagcccgcctaccagcgcctcagttagcaccgtgatcgacggtccaacccagatcttggttcgagatgtgagcgatacagttgctttcgttgagtggatcccacctagagcaaaggttgatttcatactgctgaagtacgggctagtaggaggtgaggggggtcggaccacctttcggcttcaaccaccattaagccagtatagcgtccaggcactcaggccaggctcacgttacgaggtttctgtcagtgcagtgcgcggcacaaatgagagcgatagtgccaccacccagtttaccactgaaatcgatgccccaaaaaacctaagagtgggctctaggaccgcaaccagcttagatctggaatgggataattcagaagccgaggtgcaagagtacaaagttgtatactccacattggcaggtgaacagtaccacgaggtgctggtccctagaggtatcggacccactacacgcgccacacttacagacctagttcccgggacagagtacggcgtggggatttcagccgttatgaatagtcaacaaagcgtgccagcgactatgaacgcaaggactgagttggattcccccagagatctcatggtcaccgcaagcagcgagacttctattagcctaatctggacaaaagcaagcgggccgattgaccactacagaatcactttcacgccctcaagcggaatcgctagcgaggttacagttcccaaggatcgcacctcctatacattgaccgatctggagccaggagcagaatacatcatttctgtgacagccgagaggggcagacagcagtcccttgagtctactgtcgatgcatttacaggcttccggccaataagtcatcttcacttctcacacgtgacctcaagctcagtgaacatcacgtggtcagacccctccccccccgctgatcgacttatcctaaattatagccctcgggacgaggaggaagagatgatggaggtctctctggatgccacgaagagacacgcggtgttgatgggcttgcagccagccactgagtacattgtgaacttggtcgcggtccatggcactgttacttccgaacccatcgtagggagtattacaaccggtatcgatccacccaaggacattactatctcgaatgtcactaaagattcggtgatggttagctggtcaccccctgtggctagctttgactactacagggtgtcgtatcgccctactcaagtggggaggttggactcctcggtggtgccaaacacagtgactgagttcacgattaccaggctcaaccctgcaaccgagtacgagatctccctgaactctgtcagaggtagggaggagtcagagagaatctgcaccctggttcacaccgccatggacaaccctgtagacctaattgccaccaacatcacccctaccgaagcactgctgcagtggaaggcacccgtgggagaagtcgaaaactatgtgatcgtcttgacacactttgcagtggccggtgagacaatcctggtagatggggtgtcggaggagtttcggctggtcgacctgctgccttccacccactatacagcgactatgtatgctaccaatgggcccctgacctccggaacaatttccacaaacttctccaccctcttagatcccccggctaacttgacagcgtccgaggtgacccgacagagtgccctgatatcctggcagccaccccgcgccgagatagagaactacgtgctcacctacaagtctactgatggcagtcggaaggaactcatcgtggacgccgaggatacctggatacgcttagaaggacttcttgagaacactgattacactgtcctgcttcaggccgcacaggatacaacgtggagcagcattacctccacagcctttacgaccggcggaagggtgttcccacatccacaggactgtgcccagcatcttatgaacggtgacaccctttctggcgtctaccctatcttcctgaacggagagctgagccagaaactccaagtctactgcgatatgactaccgatgggggaggttggatcgtattccaaagacggcagaacggccaaacagacttttttcgcaagtgggctgactacagggtcgggttcggtaacgtggaggatgagttttggctcggcctggacaatatccatcgcatcacaagtcagggcagatatgaactgcgagtggatatgagggatggtcaagaggccgcattcgcttcttacgatcggttttctgtggaagactcacggaacttgtacaagttgagaattggttcctacaacggcaccgcaggtgactccctgtcttatcatcaaggacgacctttcagcaccgaagatagggataacgatgtggcagtaaccaactgtgctatgtcatataaaggcgcctggtggtacaaaaattgccatcggactaatctgaatggaaagtatggcgaaagccgccacagtcaaggcattaactggtaccactggaagggacatgaattctctattccttttgtagagatgaagatgagaccctacaatcacagactgatggccggaagaaagaggcaatctctacagttttag

SEQ ID NO: 208317 - DNA, 534 bp, synthetic construct
  misc_feature 1..534: note = Description of Artificial Sequence: Synthetic coding sequence
  source 1..534: mol_type = other DNA
tgaatcaacttccccaagaaggcctgcccctgcgccagcagcgcccaagtgctgcaggagttactgagtcgcattgagatgctggaaagggaagtttcagtcctgcgggatcagtgcaacgctaattgctgccaagaatcagctgccactgtagccccaccagaagacctgagggtcgctggcatctcggatcgcagtattgagctagagtgggacgggcctatggccgtaacagaatacgttatttcgtatcagcccaccgcgctggggggtctgcagctccaacagagagtgcctggcgactggtctggggtgacgattacagaactggagcctggcctgacctacaatattagtgtgtacgctgtgattagtaatatcctgtctttacctatcacagccaaggtcgcaacccacttgagcacaccccagggactgcagttcaagacgataactgaaactacagtggaggtccagtgggagccgttcagcttttcttttgatggatgggaaatctcttttatacctaagtag

SEQ ID NO: 208318 - DNA, 12669 bp, synthetic construct
  misc_feature 1..12669: note = Description of Artificial Sequence: Synthetic coding sequence
  source 1..12669: mol_type = other DNA
atgatgcccgcccagtacgccctgaccagcagcctggtgctgctggtgttgctttccaccgcgcgagccgggcccttcagtagcagatcaaacgttaccttaccagcccctcggcctccaccccagcctggcggccataccgtgggagcgggcgtaggaagcccaagctcacagctctacgagcatacagtggagggcggggagaagcaagtggtatttacccacaggatcaacctgcctccttcaaccggatgcggctgtccgcctgggacggaacccccagtcctcgccagtgaggttcaggccctgcgagtgcgtctggagatattggaagagctcgtgaaaggactgaaggagcagtgtacagggggctgttgcccagcaagcgctcaggccggcaccggtcagaccgacgtgcggacactctgcagcctgcatggggtcttcgacctatcccgctgtacctgctcatgcgaacccggctggggaggtccaacgtgtagcgacccaactgatgctgagattcctccgagtagcccccctagtgcaagcgggagctgtcctgacgactgtaacgatcaagggaggtgcgtgcgcggacgatgcgtctgcttcccagggtatacagggccgtcctgcggctggcccagctgtcctggtgactgtcaggggcgcggaagatgtgtgcagggcgtgtgcgtctgcagagccggcttttctggtccagattgttcacagcggagctgccctcgggggtgttctcaacggggcaggtgcgaaggggggagatgtgtttgtgatcccgggtatactggagacgattgtggtatgcgtagttgcccccgtgggtgtagccagcggggtcggtgcgagaacggtaggtgcgtatgcaatcctggctacgcaggcgaagactgtggggttcgctcctgtccacggggttgctcccagagaggtaggtgcaaggacggacgctgcgtttgcgacccgggatataccggcgaggattgtggcacacggagttgcccttgggactgtggggagggggggagatgcgtggacggcaggtgcgtgtgttggcctggttataccggagaggactgtagtaccagaacatgcccacgcgactgtcgcggacgaggacggtgcgaagatggtgagtgtatctgcgatacgggctactccggcgatgattgcggcgtgcgctcatgtcccggcgattgcaatcaacgtggccgctgcgaagacgggcggtgtgtgtgctggcctggctatacagggacagactgcggatccagagcctgtcctcgcgattgcagagggcgcgggcgttgcgagaatggcgtgtgcgtgtgcaacgctggctattctggggaggactgcggggtgcggagctgccctggagattgccggggcaggggacgttgcgaaagcggccggtgcatgtgctggcctggctatactggcagggactgtgggacacgagcctgcccaggggactgcaggggaaggggtcggtgtgttgatgggaggtgcgtgtgtaatccgggctttactggtgaggactgtggctccaggagatgcccgggtgattgcagaggccatggcctatgtgaggacggagtctgtgtgtgcgatgccgggtactctggcgaggactgctcaaccagaagttgtccaggagggtgcagaggacgtggacaatgcctggatggcagatgcgtctgcgaggacgggtactccggagaagattgcggggtgaggcagtgccctaacgactgttcccagcatggagtctgccaagatggcgtgtgtatctgttgggaggggtacgtgagtgaagactgctccatccgcacctgtccatccaattgtcatggacgaggtcgttgcgaggaagggagatgtctgtgtgacccaggttacactggtcctacctgcgccacccgtatgtgtcctgctgattgtcgcggcagaggtcggtgtgtgcaaggggtatgtctgtgccatgtggggtatggtggggaggactgtggtcaggaagaacccccagcttcagcatgcccaggcggatgcggtcccagagaactttgccgcgccggccagtgcgtgtgcgttgaggggtttaggggtcccgactgcgccatccagacatgtccaggagactgcagaggccgcggggagtgccacgacgggtcttgtgtgtgtaaggacgggtacgcaggagaggactgcggagaagaggtgccaactattgagggcatgagaatgcatctcctggaggaaaccacagtaaggacggaatggaccccagctcctggacccgttgacgcatatgagatccagttcattcccaccacggagggagcaagcccaccctttactgcacgggtgccctcttctgcttcagcttacgaccagcggggcctcgctccaggccaggaatatcaggtgacggttagagctctacgagggacatcctggggattgcctgcgtcaaagaccattacaacaatgatcgacggcccccaggatcttcgcgtagttgcagtcaccccaacaaccctcgagctcgggtggcttcgcccacaggccgaagtggatcgattcgtggtgtcatatgtgagcgcaggtaaccagcgggttcgcctggaagtaccgcctgaggccgatggcactctcctaactgatctgatgcccggagttgaatatgtggtcaccgtgacggccgagaggggtcgagccgtttcctatccggcgtcggtcagagctaataccggctctagtccccttggactcctgggcaccacagatgaaccacccccctcaggcccctccacgactcaaggcgcccaggctccactactgcagcagagacctcaggagcttggagaattgcgggtgctcgggcgcgacgagaccgggagactcagagtggtgtggacagcccaaccggacacattcgcttactttcagttgcgcatgcgcgtgcctgaaggccccggcgctcatgaagaagtgctgccaggcgacgtgagacaggccctggtcccaccaccgcctcccggaaccccgtacgaactctccctgcatggcgtgcctcccggtggcaagccatctgaccctataatttatcaaggaattatggacaaggatgaagaaaaaccaggcaagtcctccggaccaccccggctgggcgagctgaccgtgactgaccggacctccgattccctattgctgcggtggactgtgccagagggagagtttgactccttcgtcatacagtataaagatagggacgggcaaccgcaggtcgtcccagtggagggcccccagagatctgctgttatcacctcccttgaccccggacgcaagtacaaatttgtcctgtacggatttgtgggcaagaaaagacatggccccttagttgccgaggctaagattctaccgcagtcagatccgtctcctggtacacctccccacctggggaatctgtgggtgaccgaccctactccagacagccttcacttgtcctggacagtgccagaaggccagttcgacactttcatggttcaataccgggatcgagacggcaggccccaggtggtgccagtggaggggcctgaaaggtctttcgtcgtgtcaagtctcgaccctgatcataaataccgctttacattatttggtatcgcaaataagaagcgctatggcccccttaccgccgacggaactaccgctcctgagaggaaagaagaacccccccgacctgagttcctggagcagccactcctgggggaactaacagtgactggagttacaccggacagcctgagactgtcgtggacagtagctcagggccccttcgactccttcatggtgcagtacaaggacgcccagggccagccacaggctgtcccggtggctggggacgagaacgaggtgactgttccaggcctggaccctgatcggaagtacaaaatgaatctctatgggctgcggggccggcaaagagttgggcccgaaagcgtggtagctaaaacagcccctcaggaggatgtcgatgagacaccgtcccctaccgaattgggcaccgaggcccctgaatccccagaggaaccgctcctgggcgaactgacagtcactgggtcatcgccagacagcctctccctgttttggaccgtgccgcagggcagctttgactcctttacagtccagtacaaggaccgggatggtaggccgcgagctgttcgagtgggcgggaaggagagtgaggtgaccgtgggcgggcttgagccggggcacaagtacaaaatgcatttatatggccttcacgagggacagagggtcgggcccgtttctgctgtaggggtgacagccccacagcaggaagagacccctcctgccactgaatctccattagagcctaggctcggagaactgacggtgacagatgtcacaccaaattctgtcggactcagctggaccgtaccagaggggcagtttgactccttcattgtgcagtacaaggacaaagatggacaaccccaggtggtgcccgtagccgcagaccaacgggaggtgactgtatacaacctcgagccagagcggaaatataagatgaatatgtacggtctgcacgatgggcagcgcatgggccccttgagcgtggtgattgttaccgcaccactacctccggcccccgctaccgaagcatcaaagcctcccctggagccacgcctcggagaactgaccgttacggatatcacacctgacagtgtggggctcagttggaccgtcccagagggggaatttgacagcttcgttgtgcagtataaggacagagacggtcagccacaggtcgtgcctgtggctgccgaccaacgcgaagtaactatcccagatctggagccctctcgcaagtacaagtttctattgttcgggatccaagatggcaaacgacgatcacctgtcagcgtggaagcaaagactgttgcccggggagatgcttcacctggtgcgccccctaggttaggcgaattgtgggtaacggatccaaccccagattccctccggctcagttggactgttcctgaggggcagtttgatagtttcgtggtgcagtttaaagacaaagatgggcctcaagtcgtgcccgtggaaggtcatgaacggtcagttacggtcactcctttggacgctggcaggaagtataggttccttctgtatggtttgctgggtaaaaagcgacatggcccactaaccgccgacggtaccaccgaggctaggtcggccatggacgacacaggcactaagagacccccaaagccaagactcggtgaggaacttcaggtaaccacagtaacccagaattcggttggtctgtcttggactgtgcctgaggggcaatttgattcttttgttgtgcagtacaaggacagagatggacagcctcaagtcgtgccagtggagggctcactgcgcgaggttagtgtgcccggtctcgacccagcgcaccgctataaactcctgctatatggtctgcatcatggaaagagagttggacccatatcggctgtcgccatcacagcaggaagggaggagacagaaaccgagaccactgccccgacccctccggcccccgagccccacttgggtgagctgaccgtggaggaggcgacatcccatacccttcatctgagctggatggtgacagaaggagagtttgacagtttcgagatacaatacacagatagagatgggcagctgcagatggttcggataggtggagaccggaacgacatcactctctccggcctcgagagcgaccatcgttacctcgttaccctctacgggttctcagatggcaagcatgtgggaccagtccacgtcgaagccctaaccgtgccagaggaggaaaagcccagcgaaccaccgaccgccacaccggagcctccaattaagccacgtttgggcgagctgaccgtcacagatgcgactcctgacagtctgtcactctcctggaccgtgcctgagggccagtttgatcacttcctcgtacagtacaggaacggggatgggcaacctaaagcagtgcgcgtgcctggtcacgaggagggggttacaattagcggccttgagcctgatcataagtacaaaatgaacctgtatggatttcatggtgggcagcgcatggggcctgtgagtgttgtgggggtgaccgcggccgaggaggagactccatccccgacggaaccctccatggaagctcccgaaccagccgaagagcccctgctgggcgaactaaccgtgaccggtagcagccccgacagtctctctcttagttggaccgtaccacagggccggttcgatagcttcactgtgcagtacaaagatagagacgggagaccacaggtcgtgcgggtgggcggcgaagagtccgaggtgaccgtgggaggactggagcctggacgtaaatataaaatgcacttgtacggccttcacgaaggcagacgagttggtcccgtgtctgcagtcggagtcaccgcaccagaggaggagagccccgacgcccccctagctaagcttcgactgggacaaatgaccgtgagagacattacctccgattctttgtccctctcatggaccgttcccgaagggcaattcgaccactttctggtccagttcaaaaacggcgacggccagccgaaggcagtccgggtaccgggacatgaagacggcgtgaccattagcggacttgagcctgaccacaaatacaaaatgaatctgtacggtttccacggtggccagcgtgtcggccccgtcagtgctgtgggccttacagcccctggcaaagacgaggagatggcacctgccagcactgagcctccaacgccagagccacctatcaagccacgactagaagaattgacagtcaccgatgctacgccagattcactcagtttaagctggactgtgcccgaggggcaatttgaccactttcttgttcagtacaagaacggtgatggacaaccgaaggcgactagggtgcctggacacgaggacagagttacaattagtggactcgagcccgacaataagtataagatgaacctgtatggtttccatggcggacagcgggtggggccagtaagtgctattggagtgactgcagctgaggaggaaactccatcccctactgaacccagcatggaagctccggagcctcctgaagaacccctcttgggagaactcacggtgactggatccagcccggattcattaagccttagctggactgtgccccagggtaggtttgattcattcactgttcaatataaggacagagacggtcgtccacaggtcgttcgagttgggggcgaggaatcggaggtgactgtgggcgggttagagcctgggcggaaatataaaatgcatttatacgggttgcatgaggggcgtcgggtggggcctgtgagtacggtgggcgtcaccgctcctcaggaggacgtggacgagacaccttctccaaccgagccgggtaccgaggcacccgagccccctgaagagcctctgctgggggaactgactgttacgggctcaagtccagatagcctgagtctcagctggacagtgccacagggaagattcgactccttcacagtgcaatacaaagacagagatggtaggcctcaagctgtgagagtgggtgggcaagagagtaaggtgaccgtcagaggcttggagccgggaaggaagtataagatgcatctgtacgggctacacgaggggagacgattggggccggtgtctgcagtcggcgttacagaggacgaagctgagacgacccaggctgtgccaaccatgactccggaaccacccatcaaaccccgtttgggagagctgaccatgacggacgccacccccgactcgctctccctcagctggactgtcccagaggggcagttcgaccattttctggtacagtaccgtaacggtgatggtcagccaaaggctgtgagggtccctggccatgaggatggggtgaccatttctggtctggagcccgaccacaaatataagatgaacttatacggttttcacggcgggcagcgggtggggccaatttccgtgataggagtcaccgccgcggaggaggaaaccccttcgcccacagagctgagcactgaagccccggaacccccagaggaacccctgctgggggaactgactgtcaccggcagcagtcctgattccctttctttgagttggaccattccccaaggacatttcgattctttcacagtgcagtataaggacagagatggcaggcctcaagtcatgcgcgttcggggagaggagtctgaggttactgtcggtggcctggaacccgggagaaaatacaagatgcacctgtacggcttgcacgaggggagaagggttgggccagtgtctaccgttggcgttacagtgccaacaacaacccctgagccccccaacaagccccggctgggagagctgacagtcaccgatgccacaccagatagtctctccctttcctggatggtgcctgagggacagtttgaccattttctagttcagtacaggaatggagacgggcagccgaaggtggtgagagtacccggccacgaagacggtgttaccatttctggcctcgagcccgatcacaaatacaagatgaacctgtacggcttccacggggggcaacgggtgggccccatctcagtgatcggcgtgaccgcagccgaagaagagacaccagccccgacagagccctcaacagaggcgcctgaaccacccgaagaacccctgctaggggagctgacggtaacgggcagttctcccgacagtttgagtctttcttggaccattccccaggggaggtttgactcatttacagttcagtacaaggatcgagacgggcggcctcaggtggtgagagtcagaggggaggagagtgaggtgacagttggagggctggagcctgggtgcaagtataaaatgcatttgtatggtcttcatgaggggcagcgcgtaggcccagtgtccgccgttggagtgacagtcccgacaatgacgccagagccacccatcaaacccaggctaggcgaattaactgtgaccgatgcaacgcctgactccctgtccttgtcctggatggtccccgagggacagtttgaccactttctggtgcagtatcgcaacggcgacggccaaccaaaggctgtccgcgttcccgggcacgaagacggtgtcactatcagcggccttgagccagaccacaaatacaaaatgaatctgtatggattccacgggggtcaacgggtggggccagtttcagccattggagtgaccgaggaagagacaccttccccgaccgaacccagcaccgaagccccagaggcccctgaggagcctctgctcggagagctgacggtgactggttcgtcccccgactcactgagcctatcatggaccgtgcctcaggggagatttgactcttttacagttcagtacaaggacagagatggacagccgcaagtggtcagagtcaggggagaagagtctgaagttaccgttgggggactggagccagggcgaaagtataaaatgcacctgtacggtctgcacgaggggcaaagggtcggccctgtgtccaccgtgggcattaccgcgccccttccaacccctctgcctgtggagccccggctgggagaattagctgtggccgctgtcacttccgattctgtaggtctctcatggacagttgctcaagggccattcgacagctttctggtgcagtatcgcgatgcccaagggcagcctcaagccgtcccggtgagtggcgatctgcgcgccgtagccgtctcaggcctcgatccagcccgcaagtacaaattcttgcttttcggattacagaacggcaaacgccatgggcccgtgccagtcgaggcccggacagctcctgatactaaaccttctcccagactcggagagctgacggtgactgatgctacacccgatagcgtgggcctctcctggactgtccctgagggagagtttgatagctttgtggtgcagtataaagacaaagacggccgcctgcaggtcgtcccggtggcagccaatcagagagaggtcactgttcaaggattggagccttctcggaaatacagattcttactctacgggctgtctgggcggaaacgcttgggccctatttcagctgacagcaccaccgcccctctggaaaaagagttgcctcctcatcttggagaactgaccgtggcagaggaaacctccagctcactgcgtctcagctggacggtcgcccaggggccattcgactcattcgtggtccagtaccgggatacagatgggcaacctagggccgtccctgttgcggctgaccaaaggactgtaacagtggaggacctggaacctgggaagaaatacaagtttttgctctatggcctgctggggggtaaacggctggggcctgtgtccgcccttggaatgactgcccccgaggaggatacccctgcgcctgagttggcgccagaagctcctgaaccacccgaagagcctaggcttggcgtcttgacagtaacggacaccacgccagactctatgagacttagctggagtgtggctcagggccccttcgatagctttgtcgtgcagtacgaggacacaaacggccagccacaagccctgctggtggatggggatcagagcaagatactgatctccggtctcgaaccatctacgccatataggtttctgttatatggcctgcatgaggggaagaggcttggacccctctccgcggagggaactactggcctcgctccagctggccagacttctgaggaatcccggcctaggctgtcacagttgagcgtgaccgacgtcaccaccagctctctccgcttaaattgggaggcacctccaggagccttcgactcttttctgctgagattcggagtgccttctccaagcacactggagccccaccctcggccgcttctccagcgagaattgatggtgccaggaacaaggcactctgctgtcctgcgagatcttcggtcaggaacgctatactccctgactctgtacggactcagaggcccccacaaggcagacagcatccagggcactgcacggacactttccccggtgctggaaagcccgcgtgatttacagttcagtgaaattagagagacaagcgccaaggtgaactggatgccaccaccaagccgcgcagattcattcaaagtgtcctatcagctggcagatggtggagagccacaaagtgttcaggtcgatgggcaggcgagaacccaaaagctacaagggctgatcccaggcgcccgatacgaagtcaccgttgtctccgtgagggggttcgaagaatccgagccgctcacaggttttctaactactgttccagacggcccgactcagttgagagcactgaatttgaccgagggcttcgcagtgctgcattggaagccaccccagaatcccgtcgatacatacgatgtgcaggtcaccgcccctggtgcgccacctctgcaggcggagactcctgggtccgcagtggactatccactgcacgaccttgtactgcacacgaactacacagcgacggtgagagggctccgcggcccaaacctcacctcacctgccagcataacgtttaccacaggcctcgaagcaccaagagatcttgaggcgaaggaggtaacccccagaactgcactcctcacttggacagagcctcccgttcggcccgccgggtacttgcttagcttccacaccccaggcggacagaatcaggaaattcttttacctggagggattaccagccatcagctgctggggctgttcccaagcacaagctataacgccaggttgcaagctatgtggggccagagcctgctgcccccagtctcgacttcctttaccaccgggggactgcgcatcccctttccccgggattgtggcgaagagatgcagaacggcgctggcgccagtcgaacatccacaatattcctgaacggcaatcgtgaacggcctctgaacgtgttctgtgatatggagaccgacggcggcggatggctggtgtttcagagacggatggacggccagacggatttttggcgcgactgggaggattacgcgcacggttttggtaacatcagtggcgagttctggctcggaaatgaagcccttcactcactgactcaggccggtgactacagtatgcgcgtggacctgcgagctggggacgaggcagtgttcgcacagtacgactctttccacgtggatagcgccgctgagtactaccggcttcacttggagggttatcatgggaccgccggggatagtatgagctatcatagcggcagcgtcttctccgcccgagaccgcgatcccaacagcctgctcatcagttgtgctgtttcttacagaggcgcttggtggtataggaattgtcattatgcgaatttaaacggactgtatgggtctaccgtggatcatcagggtgtgtcttggtaccactggaaggggttcgagttcagtgttccatttacagagatgaaactcagaccaagaaactttcgcagcccagcgggcgggggttag

SEQ ID NO: 208319 - DNA, 6450 bp, synthetic construct
  misc_feature 1..6450: note = Description of Artificial Sequence: Synthetic coding sequence
  source 1..6450: mol_type = other DNA
tgagccgaggaggagacccccagccccaccgagcccagcatggaggctcccgaaccagccgaggagccgctgcttggggaactgacggtaacgggttcctccccggacagtctgagtctgtcttggaccgtgcctcagggccggtttgacagtttcactgtccaatacaaggacagagacggccgacctcaggttgtgagggtgggcggagaggagtctgaggtaaccgtgggcggcctagaacctgggcgcaagtacaaaatgcatttgtacggattacatgaaggccgcagagttggacctgtgtccgccgtgggcgtcactgcgcctgaggaggagagcccagacgcccccctggcaaagttgagattagggcagatgaccgtgcgagatattaccagcgatagtctaagcctctcttggacggtgcctgagggccaatttgatcactttctcgtgcaatttaaaaacggagatggtcagcctaaagcggtacgggtgcccggtcatgaggacggcgtcaccatctcaggcctcgaacctgaccataagtacaagatgaacctgtacggctttcacggcggccagcgagttggaccggtgtcagcagtgggcttaactgcccccggaaaggacgaggaaatggctcccgccagcacagagccccctacccccgagccacccattaagccaagactggaggagctcactgttaccgacgccacacccgactctctgagcctgtcctggacagtgcctgaggggcagttcgaccacttcctcgtgcagtacaaaaacggagacggccagcctaaagccacgcgggttcccggccatgaagacagagttaccatctcgggattagaacccgataacaaatacaagatgaacctctatgggtttcatggtgggcagcgggtcggaccagtgagcgcaatcggtgtgactgccgccgaagaagaaaccccaagccccacggaaccatccatggaagcaccagaaccaccagaggaacccttgctgggagagctcaccgtaacaggatcttcccccgattccctgtcgcttagttggacagtgccgcaggggaggttcgattcttttaccgtccagtacaaagatagagatggaaggccccaggtggttcgggttggcggagaagagtctgaagtcaccgtcggcggtcttgaaccaggccgtaagtataagatgcacctatatgggcttcatgagggacgaagagtgggcccagtaagtactgtgggagtaaccgccccccaggaagatgtggatgaaactccaagtccaacagagccaggcacagaggctcctgaaccacctgaggaacctctgcttggggagctgactgtgaccggttcatcccctgatagcctttccctgagctggactgtcccccaaggccgcttcgactcctttactgtgcagtataaggatagggatggaaggcctcaggccgtccgcgtaggaggccaagagagtaaggttactgtccgcggtctggagcctggacggaaatacaaaatgcacttatacggcctacacgaggggagaaggctggggccagtaagcgctgtgggcgtgaccgaagacgaagcagagacaacgcaagcggtgcccactatgacccccgaaccaccaataaagcccagactgggcgaactaacaatgacggacgctacccccgacagccttagcctatcctggacagtacccgagggccagttcgaccattttctcgtgcagtaccggaatggggatgggcagccaaaggccgtgcgggtgccagggcacgaggacggagtgactatctcagggctagaaccagaccacaagtacaagatgaacctgtatggattccatggtggccagcgtgtggggccgattagtgtaactggtgtcaccgccgccgaagaggaaacacctagtcccaccgagttgagtacagaagctcccgagccccccgaggagcctcttctaggagaacttactgtgaccggatcctctccagacagcctttccttatcatggactatcccccagggccatttcgatagttttaccgtgcagtataaggaccgcgatgggcgaccccaggtcatgagagtgaggggcgaagaatccgaagtgaccgtgggagggcttgaacctggacgcaagtataagatgcacctgtacggccttcacgaaggccgtagagttggtcccgtaagtaccgtcggcgtgactgtaccgaccactacgccagaaccccctaacaaaccaagactgggggaactgacagtgactgatgcaactccagactcgctgagcttgtcctggatggtgcccgagggacagttcgaccatttcctggtgcagtatcggaatggtgatggccaacccaaagtagtacgggttcctggccacgaggatggagtgaccatctcaggactggaacccgaccacaagtataaaatgaacctgtatggcttccacggggggcagagggtagggccgatctccgtgattggcgttaccgctgctgaggaggaaacgcccgcacctacagagccttctaccgaggcgccagaacctccagaggagccactccttggagaacttaccgtcacaggtagtagcccagactccctgtcacttagctggaccatcccccaggggcgttttgacagcttcacagtgcagtacaaagatcgcgacgggaggccacaagtcgtgcgtgtccgcggagaggagtcggaggtgacagtcgggggtctggagcccggatgtaagtacaagatgcacctatatggactgcacgagggccaacgggttggccccgtgagcgctgttggggtgacggtgcctactatgacccccgaacctcccatcaaacctcgtttgggggagctcactgtgaccgatgcaaccccagattccctgagtctgtcctggatggtgcccgagggccaatttgaccacttcctcgtccagtacaggaacggagacggacagccaaaagcggtccgggtcccaggacacgaggatggcgtcactatctccggactagagcccgatcacaaatataaaatgaatctttacggattccacgggggccagagagttggcccagtgtccgccattggcgttacggaggaagagaccccctctcccactgaaccttcaaccgaagcccccgaggccccagaggagccactcctgggcgagttgacagttacagggagttcccccgactctctctctctgagctggaccgtgcctcagggtagatttgacagcttcaccgtccagtataaagaccgtgacgggcagccacaggtggtgagggtcagaggtgaggaaagtgaagtcactgtgggggggcttgagccaggccggaaatataagatgcatctttatggactccacgagggccagagggtggggccagtctccactgttggcatcaccgcacccctgcccacacctctcccagtggagcctcgcctcggagagttggcagttgccgctgtcacatccgattctgtgggactttcatggaccgtggcccaaggaccatttgactccttcctcgtacaataccgagacgcccagggacagccccaggccgtaccggtgtctggcgatctgcgagcagttgccgtgagtggccttgatcccgcaaggaagtacaagttcctactgttcgggctgcagaacggtaaacggcacgggcccgtgcccgtggaggctcgcaccgcaccagacacgaaaccatctcctaggcttggcgagcttaccgtgactgacgcaacccctgactccgtgggtctgtcctggacagtgccagagggggaatttgatagcttcgttgtgcaatataaggataaggacggccgcctgcaggtcgtacctgtcgccgctaaccagagggaggttactgtccagggactggaacctagccgtaagtatcgattcctgctgtacggcctctccggccggaaacgcctaggaccgatcagtgcagatagcaccactgcccccctcgaaaaagaattacccccccacctaggggagctgaccgtcgctgaggaaacaagttctagcctgcggctgtcttggactgtcgcacagggtcccttcgacagcttcgtcgtgcagtacagggacaccgacgggcagcccagggccgttcccgtggccgctgaccagcgcactgtaactgttgaggatctggagcctggcaagaaatacaaattcctgctgtatggcctactgggcggtaaaagactgggcccggtgtccgctctaggcatgacagcccctgaagaagacaccccagctcctgagctagcacccgaagcgcctgagcctcctgaggagcctcggttaggggttttaaccgtaaccgacacaacccccgactcaatgaggttaagctggagtgtggcccaggggccctttgactcatttgtggtccagtatgaggacaccaatggccagccgcaggcattactcgtggatggggatcagagcaagattctgatcagtggacttgaaccctcaacaccttatcgatttttattgtacggactgcacgaaggaaaacgtctcggcccacttagtgcagagggaacgaccggcctcgctcctgcaggtcagacttccgaggagagccggccacgactgtcacaattgtccgtgactgatgtcaccacctcttcccttaggctcaactgggaagccccacctggggcttttgatagttttctgctccggtttggcgtgccatcaccatccacgttagaaccacacccaagacccctgctccagagagagctgatggttcccggcacaaggcacagcgcagttctgcgcgacctgcggagcgggacactctacagtctgacgctgtatggactccgaggtcctcataaggctgactctatacagggcaccgcccggacactgagtcccgttctggagagcccccgggaccttcagttcagcgaaataagagaaacctcagcgaaggttaactggatgccaccaccaagccgggctgactcgttcaaagtgtcctatcaattggccgacggcggagaaccccagtctgtccaagtggacggtcaagcccgaacccagaagcttcagggtctcatacccggcgctcgctacgaagtgaccgtcgtgtccgtgagggggttcgaggagtctgagccactgaccgggtttttgactactgtaccggatggacctacccagctccgagccctcaacctcacagagggattcgcggtcttgcactggaagcccccccagaaccccgtagatacttacgatatccaggttacggcccctggtgccccgcctctgcaggcagagacacccggctccgctgtggactaccccctgcatgaccttgttctgcatactaattacaccgccaccgtgcggggcctacgaggtccaaacctcacctcccctgcaagcataacgttcaccactggactcgaagctcctcgtgatctggaagcaaaggaggtcacaccccgcacagctctgctgacttggaccgagccacctgtgcggccagctgggtacttgctgtctttccacacaccagggggacagacacaggaaatcctgctgccaggaggtattacatcacaccagctgctcggactctttccgagcacttcctacaatgcccgtctccaggccatgtggggccagagtctgctgcctcccgtgtccacgagcttcaccaccgggggtctgcgtatcccttttcctcgggactgcggcgaggaaatgcagaacggggccggtgcgagtagaacatccactatttttctgaacggcaatcgcgaaagaccactgatcgtattttgtgacatggagaccgatggcgggggctggttagtattccagcggagaatggatgggcagaccgatttctggagagactgggaagattatgcacatggcttcggcaatatcagcggggagttttggttgggcaacgaggcactgcattcacttactcaggccggcgactattctatgagggtcgatctaagagctggcgacgaagccgtgtttgctcagtacgattccttccacgtagacagtgccgctgagtattatcgtctgcacctggaagggtaccatgggaccgcaggggattccatgagttatcatagtggtagtgtgtttagtgctcgtgacagagatccaaattccctgctgatcagctgcgctgtgtcttacaggggggcatggtggtatcgcaactgtcactatgccaacttgaacggcctgtatggatccacagtcgatcaccagggcgtgtcctggtatcattggaagggattcgaattcagcgtgcctttcactgaaatgaagctcagaccccgcaatttccggagccccgctggaggcggttag

SEQ ID NO: 208320 - DNA, 27 bp, synthetic construct
  misc_feature 1..27: note = Description of Artificial Sequence: Synthetic coding sequence
  source 1..27: mol_type = other DNA
atgatgcccgcccagtacgccctgtag

SEQ ID NO: 208321 - DNA, 27 bp, synthetic construct
  misc_feature 1..27: note = Description of Artificial Sequence: Synthetic coding sequence
  source 1..27: mol_type = other DNA
atgatgcccgcccagtacgccctgtag

SEQ ID NO: 208322 - DNA, 9891 bp, synthetic construct
  misc_feature 1..9891: note = Description of Artificial Sequence: Synthetic coding sequence
  source 1..9891: mol_type = other DNA
tgaagcagccccctgggcctgctgggcaccaccgacgagccccccccaagtgggccgagtaccacccaaggcgctcaggccccattactgcaacagcggcctcaggagctcggcgaacttagggttctgggaagggatgagaccgggagactacgggttgtctggacagcccagccggatacttttgcctatttccagttacggatgagagtgcccgaaggcccgggcgcacacgaggaagtgctccccggagatgtgcgtcaagctcttgtcccacctccgccaccaggtaccccctatgaattaagtctccatggcgtccctccgggaggaaaaccaagcgaccctattatctatcagggtattatggataaggatgaggaaaagccaggcaagtcttcaggcccccccaggttaggtgaactcaccgtgacagaccggacgtcagactctctcctgctgaggtggaccgtgcccgagggtgaatttgactccttcgttattcaatacaaagaccgggacggccaaccacaggttgtgcccgtcgagggcccccagcgttctgctgtgattacttccctggaccctggacggaagtacaagtttgtgttatacgggttcgtgggcaaaaaacgacatggtccattggttgccgaggctaagatcctcccccagtcggacccttcacccggaacaccacctcacctgggtaatttatgggtgacggaccccactccagactcactgcacctttcctggaccgtgcccgaggggcaatttgacactttcatggttcaataccgtgatcgggatggccgccctcaggttgtccctgtagagggtccggagcgttcctttgtggtaagcagcctggaccctgaccacaagtacaggtttaccctgttcgggatcgcaaataaaaaacgatacgggcccctgactgcagatgggactaccgcccctgagcgaaaggaagagcccccaaggcccgagtttcttgagcagcctcttctgggagagcttacagttacaggcgtgactccagatagcctcagactgtcttggaccgttgcgcaggggccattcgatagtttcatggtccaatataaagatgcccagggtcagccccaagctgtgcccgtggcgggtgatgagaatgaggtgactgtacccgggctagatcccgacaggaagtacaagatgaatctgtacggcctgcggggacgtcagagggtgggccccgaaagtgtggtggccaagacagcccctcaagaggacgtggacgaaacaccgtctccaaccgaactcggcactgaagcgcctgagtcccctgaggagcctctgcttggagaactgactgtgacgggctcttcccctgacagtctctcccttttttggactgttcctcagggaagtttcgatagttttacggtgcaatacaaagatagagacggtcgtccccaggctgtgagggtgggcggcaaggagtccgaggtgaccgttggtggcttagaacccggacataaatacaagatgcacctgtacggcctgcatgaaggccagcgggtaggccccgtctccgcagtgggagttaccgcaccgcagcaggaggagactcccccagctactgagagccctctggagccccgactcggcgagctgaccgtgaccgatgtcaccccgaattccgtggggttgagttggacagtgcctgaggggcagtttgattcctttattgttcagtacaaggacaaggacggtcaaccccaggtggtccctgtggctgctgaccagcgggaagtcaccgtgtacaatctcgagcctgagagaaagtataaaatgaacatgtatggtctccacgacggacagcgaatggggcccctcagtgtggtgatcgtcacagcccccctcccaccggcccctgcaacggaggcctctaagccccctttggaacctagattgggtgaacttacggtaacggatattactcctgactctgtagggctgagctggaccgtgcctgagggagaattcgatagtttcgtggtccaatacaaagaccgagacggtcagcctcaagtcgtgccagtcgctgccgatcagcgcgaggttacaatccctgatctcgagccatcccggaaatataagtttctcctgttcggaatccaggatggaaagcgcaggagtcccgtatctgtggaggcgaaaacagtggctcggggcgacgcatctcccggggctccaccccgattgggagagctttgggtgacagatcctaccccggactctttgcgactctcctggaccgtccctgaggggcagttcgacagtttcgtggtgcagtttaaggacaaagacggtcctcaggtcgtgccggtggaaggccacgaaagatccgtgactgtcactcctctggacgcaggaaggaagtacaggttcctgctgtatggccttttgggcaaaaagagacacggaccactaacggctgatggcactactgaagctcgcagcgcaatggacgatacaggaactaaacggcctcccaaacccagactcggcgaggagctgcaggtaaccacggtcactcagaatagcgttggtttgtcatggaccgtacctgagggacagtttgattcatttgttgtgcagtataaggatcgcgacggacaacctcaggttgtcccagtcgagggcagccttcgcgaggtgtcagtgccgggcctcgaccccgcccacagatataaactgctgctttacgggttacatcacggcaaacgcgtgggtccgatctctgccgtcgcgatcacggccggccgggaagagacagagactgagacgaccgctcctacgccaccagccccggaaccccacctgggggagctgactgtggaggaggccacctctcacactctgcacttgtcttggatggtaactgagggcgagttcgattcattcgagatccagtatactgatagagatgggcagttgcaaatggtgcgaatcggcggtgaccgcaacgatattaccctcagtggactcgagtcagatcacaggtatctcgtcacattgtacggtttctccgatggcaaacatgtcgggccagtgcacgttgaggccctcaccgtccctgaggaggagaaaccgtcagaacctccaaccgctacgcccgaaccccccatcaagccacgattgggagagcttacagtgactgacgccaccccagatagtctctctctctcctggacagtgcccgagggacaatttgatcactttctggtgcaatatcggaatggcgacggacagcccaaagctgtgcgcgttccgggccacgaggagggcgtgactatttccggtttggaacccgaccacaaatataaaatgaatctatacggtttccacggaggacagcggatgggccctgtgagtgtggtgggtgtgaccgcagccgaggaagagacaccttcacctactgaaccttctatggaggctcccgagcccgcggaagagccactactcggagagctgacggtaacaggcagctcgcccgacagcttgagcttgagttggaccgtccctcagggccgcttcgactctttcaccgtgcaatacaaagatagggatggcagacctcaggttgtccgcgtaggcggagaagagagcgaggtcaccgtcgggggcctggaacctggcagaaagtacaaaatgcacttatacgggctgcacgaggggcggcgggtcggaccagtctcggcagtgggagtaacggctcccgaggaggaaagcccagatgcaccacttgcaaaactgcgtctcggccagatgaccgtcagggacatcacttcagatagtctgtccctgtcatggaccgtaccagaagggcaattcgaccatttccttgtccagttcaaaaatggtgacggacaacctaaggccgttcgcgttcccgggcacgaagacggcgtgactatttctggattagagccagaccacaagtataagatgaacctatacggatttcatggcggccagcgggtgggacccgtgtctgccgtcggacttactgcccctggcaaggatgaggaaatggcaccagcttcaaccgagccgcctacccccgagcctccgatcaaacccaggctagaggaactgactgtgacagatgcaacccccgacagtttaagcctgagctggacagtgccagaaggccagtttgatcatttcctggtgcaatacaagaacggagacggccagcccaaagccacaagggtccctgggcatgaagatagagttaccatctccggactggaaccggacaataaatataaaatgaacctgtacggattccacggcggtcagcgggtgggacctgtctctgcaatcggagtgacagcggccgaggaggagacacccagccccaccgagcctagcatggaggcccctgagccaccagaggagcctttactcggagaactgacagtgactggctcatctccggactcactgtctctctcttggacagttccacagggacgcttcgacagcttcactgttcaatataaggatcgcgatggccgcccccaggtggtacgcgttggcggggaagagtcggaagtgaccgtgggcggcctcgagccaggacgtaaatataagatgcacctttatggactccacgagggccgacgggttggccccgttagcaccgtgggggtgaccgcccctcaggaagatgttgacgagacacctagtcccacagagcctgggactgaagcaccaggaccacctgaagaaccattgctgggagagttgaccgtgacgggctcatctcctgactccctcagcctgtcctggactgttccacagggccggtttgatagctttacagttcagtataaagacagggacggccggccccaggctgtgcgggtaggtggccaggagagcaaggttaccgttagggggctggaacccgggagaaagtataagatgcacctgtatggtctccatgaggggagacgactaggacctgtgagcgcagtgggagtgacagaggatgaggccgaaacaacacaggctgtgcccacaatgacccctgagccaccgattaagcccagactgggcgagctcaccatgaccgatgctacccccgacagtttgtctctgagttggaccgtccccgagggccaattcgaccactttctggtgcaatatcggaatggagacgggcaacctaaagcagtgagagttcccggccacgaagacggggtcacaataagtggcctggagccagatcataagtacaagatgaatctgtacggattccacggggggcagagggttggccctattagcgtgatcggcgtaaccgcagccgaagaggagactccttcgcctacagagctaagcacggaagctcccgagcctccagaagagccactgctgggggagcttacagtcacaggttccagtcccgatagccttagcctatcctggacaatccctcagggccactttgattccttcaccgtgcaatacaaggaccgcgacggccggccacaggtgatgcgcgttagaggagaggagtcagaggtcacagtgggcggactggagccaggccgcaaatataagatgcacctttacggactgcatgagggaagaagggtgggacccgtgagcactgttggtgtgactgtccctacaaccactccagaaccgccaaacaagcccaggttaggggaacttaccgtgacggatgccaccccagacagtcttagcctgtcatggatggttcccgaaggccagttcgaccactttctcgttcagtacagaaatggggatgggcaacccaaagtagtgagagtacctggccatgaggacggcgtgacaatttctggcctggaacctgatcacaagtacaaaatgaatttatacggtttccatggcgggcagcgagtcggacctatcagtgtaatcggcgtcacggcagctgaagaggaaaccccagcgcctaccgagccctctaccgaggcccctgagccccccgaagaaccgttgttgggtgaattgacggtaaccggttcctctccagacagcctatccctgtcttggacaatcccccaaggtagatttgacagcttcacagtacagtacaaagatagggatggcagaccccaggtggtgagagtgcggggtgaggaatctgaagtcaccgtggggggcctggaacccgggtgcaagtataagatgcatctctatggattgcatgaggggcaacgagtcggcccagttagcgccgtgggcgtcacagtgcctaccatgacccccgagccgcccatcaagcctaggttgggggagctgactgtgactgatgcaactccagattccctgagcctaagctggatggtccctgaggggcagtttgaccatttcttagtccagtacagaaatggggacgggcagccaaaagcagtgagagtgccaggtcacgaggatggcgtgacgatttccggtctggaaccggatcacaagtacaaaatgaatctctacggattccacggcggacaacgggtcgggcctgtgtccgccataggggtgacagaagaagaaacgccctccccgactgagccatctaccgaagcgcccgaagcgccagaagaaccactactgggggagttgaccgtgactggtagctccccggatagtctctcactgagttggaccgtgcctcaaggccggtttgatagttttactgtgcagtacaaggatcgggacgggcagcctcaggttgtgcgcgtcagagtggaggagtctgaggtcaccgtgggaggcctggaaccaggccgaaagtataaaatgcacctgtacggactgcatgagggccagcgcgtgggccctgttagcaccgtcggcatcaccgctccactgcctacaccgctccccgtcgagccacggttaggtgagttggcagtcgctgctgtaacttcggactcagtgggactgtcttggacggttgcccagggccccttcgacagtttcctggtgcagtacagggacgcacagggtcagccccaagcagtcccagtcagcggcgacctgcgcgcggtggctgtgtcaggtctagacccggctcgcaaatacaaatttctgctctttggactgcaaaatggaaagaggcatggaccagtgcccgtggaagcgaggaccgcaccagatacaaaacctagccctaggctgggcgagctgaccgtgacggacgccacccccgatagtgtgggcctgtcttggacagtgccagaaggcgaattcgactcatttgtggttcaatacaaggataaagacgggcgtctgcaggttgtgcccgtggccgccaaccaacgagaagtcacggtccagggattagagccaagcaggaaatatagattcctgctctacggtctctccggtaggaagcgcctgggtcctattagtgccgatagcacaaccgccccacttgagaaagagcttcctccacacctgggagaactgacggttgcagaggagacaagtagcagtcttagactttcctggactgtggctcagggcccttttgatagttttgtagtccagtaccgcgataccgatggccagccgcgcgccgtgcccgtggccgcggatcagagaactgttaccgtggaggatctcgagcccgggaagaaatataagttcctgctgtacgggctacttgggggcaagcgcttgggccctgtgtccgccctcggtatgacggcacccgaggaagacacaccggccccagagttggcacccgaggcccccgagcctccagaggagccccgattaggcgtcctcacggttaccgacacaactccagactcgatgcgcctgtcttggtctgttgcacaggggccctttgattcgtttgttgtccaatacgaggacaccaatgggcagccccaggcactgctggtggatggagatcagagcaagattctgatcagcggtctggaaccctccacaccgtataggttcctgttatatgggctacacgaagggaagcggttgggccccctctctgccgaaggcacaacaggactggcaccggccggacagaccagcgaagagagtcggcccagactgtctcagctgtccgtgaccgatgtcaccactagttcactgagactgaactgggaggcccctccaggggccttcgactctttcttactgcgttttggggttccatctccatccactctcgaacctcaccccaggccattgctgcagagggagctgatggtgccaggcacccgccatagcgcagtgctcagggacctgagatccggcactctgtactctctgactctgtacgggctgcgcgggcctcacaaggccgactctatccaggggacagctcgcactttgagcccggttctggagtctccacgagatcttcagttctctgagatcagggaaacaagtgcaaaagtgaattggatgcctcccccgagcagggctgactctttcaaggtcagctatcagctggctgacgggggtgaacctcagtccgtgcaggtggacggacaagccagaacacaaaagctccaggggcttatccctggggcgcggtacgaagtaaccgttgtctcagtgcggggttttgaagaatcggaacccctcaccggcttcttaaccacggtccctgatggacccacccagttgagagccttgaacctcacggaaggatttgccgtgctccactggaagcccccacaaaaccccgtggacacgtacgatgtgcaggtcaccgctccaggcgcgccccctctgcaggccgaaacacctggcagtgcagtcgattaccccctgcacgacctcgtgttacatacaaactatacggccactgtgaggggcctgcggggccccaacttgaccagtccggcctcaatcactttcacaacaggactcgaagctccaagggacttagaggcaaaagaagttacacctagaacggcattgctgacgtggaccgagccccctgtgaggccagctggttatcttctctccttccatacccctggaggacagaatcaagagattctactacccggtggaattacctcgcaccagcttttgggcctatttccgagcacgtcttacaatgcaagactacaggccatgtgggggcagtctctcctgcctcccgtgagtacctccttcaccaccggcggcttgcgcatcccctttccacgtgactgtggggaggagatgcagaatggcgcaggcgcctcccggacatcaaccatttttctgaatggaaatagagagcgacctctgaatgtgttctgtgatatggagacagacggcgggggatggttggtgttccagagaaggatggacggccagactgacttttggagagactgggaggattacgcccatgggttcggcaatatctccggtgaattctggctggggaacgaggctctgcattcactgacccaagctggcgattatagtatgcgcgtggacttgcgagccggggacgaggccgtgttcgctcaatacgacagttttcacgttgacagcgcggccgagtactaccgtttgcatctggagggctatcacggtaccgcaggcgattcgatgtcttatcatagtgggtctgtgttcagcgcccgcgacagagatcccaacagcctacttatatcatgtgccgtttcatatcggggggcctggtggtataggaattgtcactatgctaatttgaatggcttgtacggaagcactgttgaccatcagggcgtgtcttggtatcactggaagggattcgagttctccgtgccctttactgagatgaagctgcggccacgaaattttaggtctccagccggaggcggatag

SEQ ID NO: 208323 - DNA, 12669 bp, synthetic construct
  misc_feature 1..12669: note = Description of Artificial Sequence: Synthetic coding sequence
  source 1..12669: mol_type = other DNA
atgatgcccgcccagtacgccctgaccagcagcctggtgctgctggtgttgctgtccacagctcgggccggccccttctcctccaggtccaacgtgactctcccagcccctaggccgcccccgcaacccggtgggcacacagtcggggcaggcgtaggttctccatcgtcgcagctgtacgaacacaccgtggagggcggcgagaagcaggtggtgttcacccaccgcattaaccttcccccctctacaggatgtgggtgtcctcctggcaccgaacccccggtgcttgcctctgaagtacaagcacttagggtgcgactcgagattctggaagagctggtaaagggactcaaggaacagtgcaccggcggctgctgtccagcctcggctcaggcaggaacaggccagactgacgtcagaacactgtgctctcttcacggcgtgttcgacttatcgcgttgtacctgctcttgcgagccagggtggggcgggccaacatgttctgatcccaccgacgctgagatcccacctagttccccaccttctgcatctggctcgtgccccgacgactgcaacgaccagggccgatgcgttaggggaagatgtgtgtgttttcctggctatacaggtcccagctgcgggtggccctcgtgccctggcgactgccaaggccgcggtcgttgtgttcagggcgtgtgcgtttgcagagccgggttttccggacccgactgttcccagcgatcttgtccacgggggtgttctcagagagggaggtgtgagggggggcgctgcgtgtgcgacccgggatacaccggagatgactgtggcatgcgttcttgccctaggggttgctcacagcgcggaaggtgcgagaacggtcgctgcgtgtgcaaccccggttacaccggagaggactgcggagtccggtcttgcccgcgcggttgctctcagcgagggaggtgcaaggatggtcgatgtgtttgcgacccaggatataccggggaggactgcgggactcggtcttgtccctgggactgcggggagggcggccgctgtgtcgacggcaggtgtgtgtgttggcctggatatacaggggaggattgtagtactagaacctgtccacgggactgtagggggagaggccggtgtgaagacggcgaatgtatctgcgatacaggctactcaggcgacgattgtggtgttcgctcttgccccggcgattgcaaccaacgggggcgatgtgaagatggacgttgcgtatgctggcccgggtacaccgggactgattgtgggtctcgggcctgtccgagggactgtagaggccgaggccgttgcgagaacggcgtttgcgtgtgtaatgccggttactcgggggaggattgcggcgttagaagctgcccgggggactgtaggggacgggggagatgtgagtccggtcggtgtatgtgttggcctggctataccggtcgagattgtggcaccagggcgtgtcccggagattgccgtgggcgcggacgatgcgtagacggacggtgtgtgtgcaatcctggatttactggtgaagactgtgggtcgagaagatgccccggcgactgcagaggccacggcctgtgcgaggacggtgtttgcgtctgtgatgccggttattcgggcgaagattgctcaacaagaagttgcccaggtgggtgcaggggtcgcgggcaatgtctggatggccggtgcgtgtgcgaagacggctacagtggagaagactgcggagtgcggcagtgccctaacgactgcagccaacacggcgtgtgtcaagacggcgtatgcatatgctgggagggctacgtgtccgaagactgtagcatcaggacttgtccgagtaactgtcacggtaggggcaggtgtgaggagggacgctgcttatgtgaccccggctatactggacccacttgcgcaaccagaatgtgccccgccgactgtaggggcaggggccgctgcgtgcaaggagtgtgcctgtgccacgtgggatacggcggcgaagactgcggacaagaggaaccaccggcgtccgcatgccccggcggctgcggcccccgcgagctctgcagggctggccagtgcgtctgcgttgaaggttttaggggacctgattgcgcaattcagacctgccctggggactgccgcgggagaggcgagtgccatgatggaagttgcgtttgtaaagacggctatgccggagaggattgcggtgaggaagtgccaaccatagaagggatgagaatgcacctcctggaagaaactactgtccgaaccgaatggacccctgcgcctggacctgtagatgcatacgagatccagtttatccccaccacggaaggcgcctccccaccgtttactgctcgcgttccctcctcagctagcgcctacgatcaacgtgggctagcgcccggacaggagtatcaggttacagtacgggcactccgtggcacctcttggggtttgccagcaagtaaaacaataacaacaatgattgatggaccacaggacctcagggtcgttgcagtgacacctaccacgcttgagctgggctggctgagacctcaggcagaagtggataggttcgtggtgtcatatgtctcagcaggcaatcagcgtgtccgactggaagttccacccgaggcagatggcactttattaaccgatttgatgcccggtgtagagtatgtggtgaccgtgactgccgaaagaggccgggcggtctcctatccagccagtgtgagagcaaacaccgggagttcacccctggggctactggggacaacagacgagcccccaccgtctggcccttcaaccacccagggcgcgcaggctcctctgcttcaacagcggccacaagagctgggagagttacgggtcctgggtagggacgagaccggccgcctgcgagtggtttggacagctcagcccgacactttcgcatactttcaattaaggatgcgtgtccccgaagggcccggtgcccacgaagaggtgctccccggggacgtaagacaggccctggttccaccacctccgcctggcaccccttatgaactgtcactccacggcgttccacccggcgggaagccgtctgatcctattatttaccaggggattatggataaggatgaggaaaaaccaggcaaatcgtcaggcccaccccggttaggggaattgacagtgactgaccgtaccagtgacagcctccttctgcgctggactgttcccgaaggagagtttgacagctttgtcatacagtataaagacagggacgggcagccacaagtcgtacccgtcgagggtccacagaggtcagcagttattacgtctctcgaccctggaagaaaatataagtttgtcctatacggcttcgtggggaagaagcgccatggccctcttgtggcagaggccaaaattctgcctcagtcagacccgtctcccggtacacccccccgtctcggtaacctatgggtcaccgatccaacccctgatagcctccacctctcctggaccgttccagagggccaatttgacacatttatggttcagtacagggaccgcgatggtagaccacaggtggtcccagttgagggtcccgagagatcctttgttgtttctagtctagatcctgaccacaaatacaggtttactctctttggaatcgccaataaaaagcgctacggtcccctgaccgccgacggcactactgctcccgagcgaaaagaggagccaccaaggcccgagtttctggagcagcccttactgggcgaactgacagtcacaggtgtgactcctgattctctgaggctgtcctggacagtcgctcagggccctttcgattcttttatggttcagtataaagatgctcaaggccagcctcaggccgtccctgtagccggtgacgaaaacgaggttaccgtgccgggactggatccggatcgcaaatacaagatgaacctctatggcctgcggggcagacagcgggtagggccagaaagtgtggttgctaaaactgcccctcaggaagacgtcgacgaaacccccagccctacagagctcggaaccgaggctcccgagtccccagaggaaccactgctgggagaactgacagtgactgggtcttccccagacagcctttccctcttttggactgtgcctcagggctccttcgacagctttacggtgcaatataaggacagagacggtcggcccagagccgtgcgcgtcgggggaaaggagtctgaggtgaccgtaggggggctcgaacccgggcataaatataaaatgcatctgtacggactgcacgaggggcagagggtcgggccagtgtctgctgtcggagtcaccgccccacagcaggaggaaacacccccggcaaccgagagcccccttgaacctcggctcggagaactgacggttacagacgtgactcctaattctgtgggacttagctggaccgtgcccgaaggccaatttgactccttcattgtacagtacaaggacaaagacggccagccacaggtggtcccggttgccgctgaccaaagagaggtgacagtatataacctcgaacctgaaagaaagtataaaatgaatatgtacggactccatgacggccagaggatgggaccccttagtgttgtgattgtcacggcaccccttccacctgcccccgctactgaagctagtaagccgccattagaaccaagacttggggaactgacagtgacagacatcactcccgatagtgtggggttgagttggaccgtgcctgagggcgaatttgactcttttgttgtccagtataaggatcgcgatgggcaaccccaagtggtgccggtagccgcggatcaaagagaggtgaccatccccgatcttgagccgtcgcgaaagtacaaattcctgctgtttggaatacaagatggcaaacggcgctctcccgtgtcagtggaggcgaagaccgtggcaagaggggatgcctctcccggtgcaccaccccgtctaggggagttgtgggtcaccgatccaaccccggacagtctccgcttatcttggactgtcccagaaggacagttcgattcgtttgtggtgcagtttaaagataaagacggtccccaggtcgtcccggtcgaagggcacgagcgctccgtcacggtgacgccactggacgcgggacggaagtacagatttcttctgtacggattgctgggcaagaagcggcatggccccttaaccgctgacggaaccaccgaggcccggagcgcaatggatgacaccggtacgaagaggcctcctaagcctaggctcggcgaagagcttcaggtgaccaccgtgacacaaaatagcgtcggcctaagctggacagtccctgagggccagttcgatagcttcgtggtgcagtacaaggaccgggacggccagccgcaggttgtcccggtggagggtagcctgcgcgaggtgtccgtccccggactggaccctgctcatcgttataaactgcttttgtatggcctgcaccatgggaagagagtgggaccaatatcagccgtggcgatcacggccggccgggaagaaacagaaaccgaaaccactgcacccaccccaccagccccggagcctcatctgggggagttgactgtggaagaggcaacttcccacaccctgcatttgtcctggatggtgaccgagggagaattcgactctttcgagatccagtatacagaccgagatgggcaactgcagatggtgcgcatcgggggcgatcgcaatgatattaccttgtctggcttggaatctgaccacaggtatctggtcacactgtatggatttagtgatggtaagcatgtgggccccgtccatgtggaagcactcacggtgccagaagaagaaaagccttcagagcccccaacagcaaccccagagccgcccatcaaaccgcgcctcggggagctcactgtgacagatgcaactccagacagcctctctctgagttggacagtccccgaaggccaattcgatcattttctggtgcaatatcgcaacggtgacgggcagcctaaggccgtccgggttcccggccatgaggagggagttaccatatcaggcctagagcccgaccataagtataaaatgaatctctatggcttccatggtggacagagaatggggcctgtctccgttgtaggggtgacagcggctgaggaagaaactccctctccaactgagcccagtatggaggccccggagcctgccgaggagccactgttgggagagttgacagtcaccggatcatctcctgactccctctccctctcttggaccgtgcctcagggcaggttcgacagtttcacggtgcagtataaggaccgagacggccgacctcaggtagtaagggtggggggagaggagtccgaagtcactgtaggtggattagagccaggccgcaagtataaaatgcatttgtacggtctccacgaggggcgcagagttgggccagttagtgcagtcggtgtgactgcccctgaagaggagtccccggacgcacccttggcaaagctgcgactgggacagatgacagttagagatataacatctgactccttgtcactgtcctggaccgtgcccgaaggccagttcgaccactttctggttcaatttaaaaacggggacggacagcctaaggcagtcagggtgcctggccatgaagacggcgtaaccatatcagggctggagccagaccataaatataagatgaatttgtacggctttcacggcgggcagcgggttggccccgtgagcgctgttggtttaaccgccccaggcaaggacgaagaaatggctccagcctccactgagccacctacccccgagccgccaatcaaaccaaggctggaggagctgacagttacagacgctacacctgattccttaagcctgagctggacggtgccagagggccagttcgatcattttctggttcagtacaaaaacggtgacggccagccaaaggcaacgagagtaccggggcacgaggatagagtaaccatttctggtttggaaccagacaacaaatataagatgaacctttacggcttccacggcggacagagagtgggccctgtcagtgctattggcgtgactgcagcagaagaagagaccccaagtccgacggagccttccatggaggcccctgagcccccagaggagcccctcttgggagagttgaccgtgactggttcaagccctgactcactgagcctctcatggaccgtaccacagggaagattcgattccttcaccgttcagtacaaagaccgcgatggacgcccccaggtcgtacgggtgggaggcgaggagtcggaggtcaccgtcggggggttggagccggggcgaaagtacaagatgcatctctacggcctgcacgagggtagaagggtcgggcccgtgagcactgtaggggtcactgctcctcaggaagacgtggacgagacacccagtcctacagagcctggtactgaggccccagaacccccagaggaaccccttctgggggaactcaccgtcacaggctcaagccccgatagtctgtcccttagttggactgttccccaggggagattcgacagctttacggtgcagtacaaagatcgggacggccggcctcaagccgtcagagtcggagggcaagagtcaaaagtcaccgtgcgcggtctggagccgggaagaaagtacaaaatgcacctgtatgggctgcatgagggtcgcaggcttgggccagtgtcagccgtgggcgtaaccgaggacgaagctgaaacgacacaagcagtgcctactatgacaccagaaccccccatcaaacctagactgggggagttaaccatgactgatgccaccccagactctctgtcgctgtcctggacagtgcccgaaggacaattcgaccacttcctggtccagtatagaaatggagatggacagcccaaggcggtgcgcgtgcccgggcacgaggatggggtcacaatttcgggactagaacctgaccacaagtataaaatgaatctgtacgggtttcatggtggccagcgggtcggtcccatttctgtgatcggggtaactgctgcagaagaagagacgccatcaccaaccgagctgagcacagaggcgcctgagcccccagaggagcctttactcggggaactgactgtgactggctcttcacctgactctctgtccctcagctggaccatccctcaaggccatttcgattcttttaccgtgcaatataaggaccgggatggacgaccacaggttatgcgggtgagaggtgaggaatccgaagtaacagttggggggctagagccagggagaaagtataaaatgcatttatacggcttgcatgaaggtcgaagagtgggacccgtcagtacggtgggggtgactgttccaactactaccccagagccacctaataaacccaggctgggggagttaactgtaaccgacgcaacacctgatagtttgtccttgtcctggatggtcccagaagggcagtttgaccactttctggtgcagtaccgaaatggagacgggcaacccaaggtagtgagggtgcccggccacgaagacggagttaccattagtggcctcgaacctgatcataagtataagatgaatctctatggcttccatgggggtcagcgagtagggcccatttcagtgatcggagtcacggcagccgaggaggagacccccgctccgaccgagcccagcaccgaggctccagagcccccagaagagccactactcggtgagctaaccgtgaccggcagctctcctgattcactgtcgctgagttggacgattccccaggggagattcgactcatttacggtccagtataaagacagggacgggaggccccaggttgtgagagtgcgtggggaagaatccgaggttactgtaggcggcctcgagcctggatgcaagtacaagatgcacctgtacggacttcacgaaggtcagagggtgggacctgtgtctgctgtcggcgtgactgtgcccacaatgaccccagaaccaccaattaagccgcgtttgggcgaattgaccgtgaccgacgccacaccggacagtctgtcactgtcatggatggtgcctgagggccagttcgatcacttcctggttcagtataggaacggcgatggccagcccaaggccgtacgtgtccccggacatgaagacggtgtgaccatttcaggtcttgaacctgaccacaagtacaaaatgaatctgtatggtttccacggtggtcagcgcgtgggtccagtcagtgcaatcggagttaccgaggaagagacccccagcccaacggaaccttctaccgaagctcccgaggcccccgaagagccgctgctgggagaactgaccgtcaccgggagctcccccgacagtctgtccttgtcttggactgtacctcagggtcgattcgattcctttaccgtgcaatacaaagacagggacggacagccacaggtcgtcagggtgaggggggaagagagtgaagtgaccgtcggcgggctggaacccggaaggaagtacaagatgcatctctatggactgcatgaaggacagagggtgggcccagtttcgactgtcggcatcactgcccctttgccaaccccactgccagtggagccgcggttgggtgagctggctgttgctgccgtcacatctgacagcgttggactatcttggacagtggcccagggtcccttcgattcatttcttgtgcagtacagggacgcccaaggacagcctcaagcggtgcctgtgagtggggatttaagggccgtggctgtctctggactcgacccggctagaaagtacaagtttctgcttttcggcctgcagaatggcaaaaggcatggtcctgtacccgtggaggccaggaccgctcccgataccaaacccagcccccggctcggtgagctgacagtgacggacgccacccctgacagcgtgggcttatcctggactgtccctgaaggggagttcgactctttcgttgtacagtataaggataaagacggtcgcttgcaagttgtgccagtggccgccaaccaacgcgaggtgactgtccaggggctggagcctagtcggaagtaccgcttccttctgtatggactgagcggacgaaaacggctcggccccatttctgcagactccaccacggcacccctcgagaaggaactccccccccatctgggggaactcaccgtcgctgaggagacttctagcagtctgcggctgagctggactgtagctcaaggccctttcgattcattcgtggtccaatatagggacactgatggtcagccacgggctgtcccagtggccgctgatcagagaactgtaaccgtggaggacctggagcctggaaagaagtacaaattcctcctgtatgggctccttgggggcaaacgattagggcctgtgtctgctctcggaatgacagcccctgaagaagatacacccgccccagagctcgcgcccgaggcccccgagccacctgaggaaccacggctaggggtgttaaccgtgaccgacacaacccctgactcaatgcggctgagctggagtgtagcgcagggcccctttgactcgtttgtggttcagtatgaagataccaatggtcagccacaggcattactggtcgacggagatcagtctaaaatattgatctccggcctagagcctagcaccccctaccggtttctgctgtacggtctgcacgaaggaaaacgcttgggaccccttagtgcggagggtactactggactggctccggcagggcaaaccagtgaagagagcagacccagactgtctcaactctcagtgactgatgtgaccactagtagcctgagattgaactgggaggcaccgcctggcgctttcgactctttcctgcttcggttcggcgttccttcgccttccacactggagccccacccgaggcctcttctgcagcgggagcttatggtgccagggactaggcactctgccgttctgcgcgatctccggagtggaacattgtacagcctcactctctatggcttgcggggacctcataaagcagactcaatacagggcactgcaagaacgctttcaccagtgctggagtctccaagagacctgcagttcagtgagatcagggaaacgtccgccaaggtaaattggatgccgcccccaagtcgggctgatagttttaaagtctcttaccagctggcagacggcggagagcctcagagtgtgcaggtcgatggccaagcgagaactcagaagcttcaggggttgattcccggtgctcgatacgaagtgactgtggtgagtgttagaggattcgaggagtctgagcctctcacagggttccttaccacagtgccagatggacccacgcagctgcgggcactcaatctgactgagggcttcgccgtgttacattggaaacctcctcagaacccagtcgatacctacgacatccaggtgaccgctcccggcgctccacccctgcaggctgagacgcccgggtctgcagtggactaccccttgcacgatcttgtactgcacacaaattacaccgccacggtgagagggttgagaggcccaaacttaacaagccctgcctcaatcacgtttactacgggtctggaagcaccccgggatcttgaagccaaagaagtgaccccacgcacagcacttttgacgtggaccgagccccctgtgcggccagcaggctacctgctaagtttccatactcccggggggcaaacacaggagatcttgctgcccggcggaatcacatcccaccagctgttggggttgtttccatcgacaagctataacgctcgactccaggcaatgtggggacaaagtctgttacctccagtctccaccagctttactacagggggtctccggatccctttcccccgggactgtggtgaggagatgcagaacggcgctggcgctagccgcacctccaccatcttcctcaacggaaatcgagaacggccattaattgtgttttgtgacatggaaactgatggagggggttggttggtgttccagcgccgaatggatggccagacggatttttggagagactgggaagattacgcccacggcttcggtaacatcagcggcgaattttggctggggaacgaggccctccatagtctgacacaagccggggactactccatgcgcgtcgaccttagggctggcgacgaggcagttttcgcccagtacgacagttttcatgttgattcagctgccgagtattaccggttgcacctggaaggctatcatgggactgccggtgatagtatgtcctatcattcgggctcagtgttctctgctagggaccgtgaccctaattcgctgctgattagctgcgccgtgtcttaccgtggggcctggtggtatcggaattgtcattatgccaacttgaacggcctctatggatctaccgtcgatcaccagggcgtgtcatggtaccattggaagggattcgagttttctgtaccttttacagaaatgaagctgcggccaaggaattttcggtccccagctggtggcggatag

SEQ ID NO: 208324 - DNA, 27 bp, synthetic construct
  misc_feature 1..27: note = Description of Artificial Sequence: Synthetic coding sequence
  source 1..27: mol_type = other DNA
atgatgcccgcccagtacgccctgtag

SEQ ID NO: 208325 - DNA, 1905 bp, synthetic construct
  misc_feature 1..1905: note = Description of Artificial Sequence: Synthetic coding sequence
  source 1..1905: mol_type = other DNA
tgaagcagccccctgggcctgctgggcaccaccgacgagcccccccctagtggcccctccacaacacagggggcccaggcccctcttttgcagcagaggcctcaagagctcggcgaactgagagttcttggaagggatgagaccggcaggttgcgcgttgtttggacagcccagcccgatacgttcgcctattttcaactaagaatgagggtgcctgaaggcccaggagcccatgaagaagtcctccctggggacgttcgccaggcccttgttccacccccgccccctgggaccccttacgagttaagcctgcatggtgtcccgccaggagggaagccctcagaccctataatttaccaaggcatcatggacaaagatgaagaaaaacctggtaagagctcggggcctccacggctgggggagctgacagtcacagatcggactagtgattccctcctcctgagatggactgtgccagagggcgagttcgactcctttgtgattcagtacaaagatagagacggtcagccacaggtagtaccagtcgagggtccccaacgatcagccgtaataactagcctcgacccagggagaaagtacaagtttgtactttatggattcgttggtaagaaacgccatgggcctctggttgcggaagctaaaattctcccccagagtgacccctccccaggaacaccacctcggctcgggaacctgtgggtgacagatcccaccccagattccctccatctcagttggacagtccctgaaggccagtttgacaccttcatggtccaatatcgggaccgggatggaagacctcaggtagtgccagtcgagggccccgagcgttcattcgtggtcagcagcctggatcccgaccacaaataccgctttacactatttggtatcgctaacaaaaagcggtatgggccactgaccgcggacggaacgaccgctcccgagcgcaaagaggaaccaccccgccccgaatttttggagcaacctctgcttggtgaactgaccgtgaccggcgtgaccccagactcattgcgccttagctggactgtagcccagggcccattcgactccttcatggtgcagtacaaggatgcacaaggacagccacaggctgtccccgtagctggtgatgaaaacgaggtgacagtgccgggcttggatcctgacaggaaatacaaaatgaatctgtacgggcttcgggggcggcagcgagtaggccctgagtctgtggtagccaagactgcaccgcaagaggacgttgatgagacaccctctcctacggagctgggaacggaagcaccggaatcacctgaggaaccgctcctgggggagcttacagtgaccggatcttcccctgattccctaagcctgttttggacagtgccccagggcagcttcgacagcttcactgtgcagtataaggacagggatgggcgcccccgtgctgtgcgagtcggcggcaaagagtcagaagtgaccgtagggggattggaaccaggccacaagtataaaatgcacctctatgggctgcacgagggccagcgcgtgggccccgttagtgccgtgggtgtaacggccccacagcaggaggagacaccacctgcaactgagtctccactggagcctcgacttggggagctgaccgtcaccgatgtgactcctaactccgtggggctttcctggaccgttcccgagggccaatttgattcttttattgtgcagtacaaagataaagatggacaaccacaggtcgtgcctgtagccgcagatcaacgagaagtgaccgtgtataaccttgagccagagcgcaagtacaagatgaacatgtacggcttgcacgatgggcagaggatgggcccactgtcggtcgtgatcgtcacttag

SEQ ID NO: 208326 - DNA, 27 bp, synthetic construct
  misc_feature 1..27: note = Description of Artificial Sequence: Synthetic coding sequence
  source 1..27: mol_type = other DNA
atgatgcccgcccagtacgccctgtag

SEQ ID NO: 208327 - DNA, 12669 bp, synthetic construct
  misc_feature 1..12669: note = Description of Artificial Sequence: Synthetic coding sequence
  source 1..12669: mol_type = other DNA
atgatgcccgcccagtacgccctgaccagcagcctggtgctgctggtactgctatccacggcacgtgctggcccgttcagttcgcgttcaaacgttacactccctgccccacggcctccacctcagcccggtggccatacggttggagcaggtgtaggctcaccatcaagccagctctacgagcatacagttgaagggggagagaagcaagttgtgtttacccaccgaatcaacctgccgccaagcaccggctgcggctgtcctcccggcactgagcctcccgttctggcaagcgaggtccaggccctgagagtgcgccttgaaattctggaggaactggttaaagggctaaaggagcagtgtactggtgggtgttgtccagcctccgctcaagctgggaccggccaaaccgatgtaaggacattatgctctctgcacggggtgtttgacctatcacgttgtacttgcagctgtgaacccggctggggcggaccaacatgcagcgatccaaccgatgctgaaatcccccccagctccccgccgtcagcctccgggtcatgtcctgatgactgcaatgatcaagggcgctgcgtcagaggtcgatgtgtttgctttccgggttatacgggcccctcttgcggatggccgagctgccccggggactgtcagggtagggggcgttgcgtgcagggcgtctgcgtgtgccgtgctggcttcagcggacctgattgctcgcagcgctcttgccctcgggggtgctcccagagaggccggtgcgaaggtgggcggtgcgtatgtgaccctggctatacgggtgacgattgcggaatgcggagttgtccccggggctgttcccagcggggtagatgtgagaatgggcgctgtgtctgtaatccaggctacacgggagaggactgcggcgttaggtcatgcccccgggggtgttcgcagcgagggcggtgtaaagatggacggtgcgtgtgtgacccggggtatactggcgaagactgtggaacccggagttgcccctgggactgtggcgagggagggcggtgcgtggacggccgatgcgtctgctggccgggatacactggagaagactgctcgacgagaacttgcccccgggattgcagaggaagggggagatgcgaagatggcgaatgtatttgtgacacaggttattcaggagacgattgtggcgtccgcagttgtcctggggattgtaaccagcggggcagatgcgaggacggcaggtgcgtgtgctggcccggctatacaggcacagattgcggcagtcgagcttgtccccgcgactgcagaggtcgcggaagatgtgagaacggcgtgtgtgtgtgtaacgccggctacagcggcgaggactgcggggttcgcagttgtcccggtgactgccgcggtaggggaagatgtgagagtggcagatgtatgtgctggcccggttacacaggaagggattgcggtaccagagcttgcccaggcgattgccgcggccgaggtagatgtgtggatggccgctgcgtgtgtaacccaggcttcaccggtgaggattgcgggtcacggaggtgcccaggggactgtaggggacatggactgtgcgaggatggggtgtgtgtatgcgatgcgggatactcaggggaggattgttcaaccagatcgtgtcccggtggatgccgcgggcggggtcagtgtctcgacgggaggtgtgtgtgcgaagacgggtactctggcgaggactgtggggttcgccagtgtcctaatgattgctcccagcatggagtctgtcaagacggtgtgtgcatctgctgggagggatacgtgagcgaagattgcagtattaggacctgcccatccaactgccatggccgcggaagatgcgaagaggggaggtgtctttgcgatcctgggtacactggcccaacctgcgctacccggatgtgcccagcagattgtagaggccgcggtaggtgcgtccagggggtctgcctgtgtcatgtgggttacggtggggaggactgtggtcaagaggaaccacctgctagcgcgtgtcccgggggttgtggtccaagagagctgtgcagggctggccagtgcgtttgcgtcgagggctttaggggtcccgattgcgcaatccagacctgtcccggtgactgtagaggccgaggagaatgccacgacggatcgtgtgtttgtaaagatggatatgccggcgaagattgcggtgaggaggtcccaaccattgagggcatgcggatgcacctacttgaggagaccacggtcagaaccgaatggactcccgcgccaggcccagtggacgcgtatgagattcaattcatacctaccactgaaggggcttcccctccgttcaccgccagggtcccctcgagcgctagcgcttatgaccagagagggcttgcccccggtcaagagtatcaggttacagttagggcacttagaggcacgagttggggcctgcctgcatcaaaaacgattacaacaatgattgatggcccccaggatctcagggtggtagcagttactcctacaaccctggaactgggatggctccgtccccaggcagaagtggacaggtttgttgtgtcctacgtaagtgccgggaaccaacgagtgcgtttagaagtcccacctgaggctgatggcactttgctcaccgacctcatgcccggcgttgagtacgtggtgaccgttacagctgaaaggggacgggcagttagctacccagcctctgtccgcgccaatactgggagttccccactcggactgctggggacaacggatgagccccccccgtcaggcccttcaaccacgcagggggcccaggcgccacttctgcagcaacgaccccaggagttgggtgaactgcgagtgctcggccgagatgagaccggacgccttcgcgttgtctggacagcccagcccgacaccttcgcctatttccagctacgcatgcgagtgcccgaagggcccggagcgcatgaagaggtgctacccggagatgtgagacaggctctggtccctcccccaccacccggtactccatacgagttatccttgcacggagttccacctggaggcaaacctagcgatccaatcatttaccaggggatcatggacaaagatgaggagaaacccggaaagagtagtggaccccccagactgggcgaactcactgtcaccgaccggacttcagattccctgctgctacgctggaccgtgccggaaggagaattcgacagttttgtgattcaatataaagacagagacggacaacctcaagtggtgcccgtcgagggaccacagcggtcagccgttattacttctctggacccagggcgtaagtataagtttgtgctttacggattcgtgggcaaaaagaggcatggacctcttgttgcggaagccaaaattctgcctcagagcgaccccagcccaggcactcccccgaggctgggaaatctatgggtgaccgacccaactcccgacagtctgcacctgtcatggacagtacccgaagggcaatttgacacgtttatggtccagtatcgggaccgcgatggccgcccccaagtggtgccggtcgagggccctgagaggtcattcgtcgtctcctcgctggatccagaccacaaatacaggttcacgttgtttggaatcgctaataagaaaaggtatggaccgcttaccgccgacgggaccacagcacctgagaggaaggaggaaccaccgcacccagagttcttggaacagcctctgctgggggaactgacagtgacaggcgtcacccccgattcattgagactgagctggaccgtggcccaaggaccatttgatagcttcatggttcagtacaaggacgcccaaggccaaccccaggccgtccccgtggcaggcgatgagaacgaagtgacggtccccggactcgaccccgacaggaagtacaaaatgaacttgtacgggctgcgcgggcgacagcgggtgggtccagagtccgttgtggccaagaccgcccctcaggaggacgtggatgaaacccctagtccaaccgagctcggcacagaagccccggagagcccagaagagcctctgttaggagagctcaccgtgaccggatctagccccgatagtctgtcactcttctggacagtgccccagggatcttttgatagcttcaccgttcagtacaaagaccgggacgggcggccgcgcgctgtgcgcgtgggcggaaaggagagtgaggtgactgtcgggggtttggaacccggtcacaaatataagatgcacttgtacgggctccacgagggtcagagagtagggccagtatcggctgtgggagttacagccccccagcaggaggaaactccccccgctactgagagccctttggagccaaggttaggggagcttacagtgactgacgtcacaccaaactctgtgggactgtcctggacagtcccggaggggcaatttgactcattcatcgtacagtacaaggataaagacgggcagccccaggtggtccctgtggctgccgatcaaagggaagtgactgtgtataatctggaacccgaaaggaaatacaaaatgaacatgtacgggctccacgatgggcagcggatgggtccactctctgtggtgatcgtcactgcacccttgcccccggccccagcaactgaagcatcaaagcctccactcgagccccggctcggagaactcactgtgaccgacatcacccccgacagcgtcggactgtcctggacagtcccggagggcgaattcgattcttttgtggtgcagtacaaggatagggatggccaaccccaggttgtcccagtagcggcagaccagcgcgaggtgacaatacccgacctggagcctagtcgtaagtacaagttcctgctctttggcattcaggatgggaagagacgatcccccgtcagcgttgaggccaagactgtcgcccggggagatgccagcccaggcgcccctccacggctcggcgagctgtgggtgactgatccaaccccggattcactcaggttatcctggacagtcccagagggacagtttgactccttcgtggtccaattcaaggataaggacggtccacaggttgttcctgtggaaggtcacgagagatctgtgacagtgactccactcgatgcgggaagaaaatatcgcttcctcctttacggactgctgggtaagaaacggcacgggcctctgacagctgatgggaccacagaggcacggtcagctatggatgatacaggtacaaagaggccgcctaagccccgactgggggaggagttacaggtaaccacagtcacacagaacagtgtcgggttatcttggaccgtgccagaaggccaattcgattctttcgtagttcagtacaaggacagggatggtcagccacaggtagtcccagtcgaaggcagccttagggaggtgtctgtacccggcctggaccctgctcatagatacaaactgctcctgtacggactccaccacgggaaacgtgtcggtccaatttcagctgtggccattactgcggggcgcgaggaaactgagactgaaacaaccgcgcccaccccgcccgcccccgagccccacctcggggagctgactgtggaagaggccacttcacacaccttgcacctctcttggatggttaccgagggcgaatttgactctttcgagatccagtatactgatagagatggccagctgcaaatggtgaggatcggcggcgacaggaatgacataacactctccggcctcgagagtgaccacaggtacttggttaccctttacggattctcggatgggaaacatgtgggacctgtccatgtcgaagctctcacggtccctgaggaggagaaacccagtgaaccccccactgccactcccgaacccccaattaaaccccgcctgggcgaattaaccgtgaccgatgccacgcccgattcactgtccctgagttggacagtgcccgaaggccaattcgatcattttctggtccagtatcggaatggagacggccagcccaaggcagtaagagtcccagggcacgaggaaggtgtaacaataagcggactggagccagatcataagtataagatgaatctctatggttttcacggagggcaaagaatgggtcccgtttctgttgtaggggtgacagcggctgaggaagagacgcctagtcccacggagccctctatggaagcaccagagcctgcagaagagcccctgctgggcgagctaacagtgacaggatcttctcctgattcgctatcactttcatggaccgttccacagggcaggtttgactcatttactgtgcagtataaggatcgagacggacggcctcaggtggtgcgggtggggggagaagagtctgaagtcactgtgggcggtctcgagcccggtagaaagtacaaaatgcatctatatggcctgcatgaaggccggcgcgtgggccctgtgtccgccgtgggtgttacggccccagaggaagaaagccctgatgcgcctcttgccaagctgcggctgggtcaaatgacagtccgagatatcacgtcagatagcttgtccctgtcatggactgtcccagaaggccagttcgaccatttccttgtccaattcaaaaacggcgacggccagccaaaggccgtaagagtgccaggacacgaggacggtgtgacaatttctggcctggaaccagatcacaaatataaaatgaacttgtatggttttcacggaggtcagagggtcgggcccgtcagtgcagtgggccttacagcccctggaaaggacgaagagatggcgcccgcatctaccgaacctccaactccagagccacctatcaaaccacgattggaagaacttacagtgaccgacgctacacctgattcactgagtctgtcttggacagttcctgaaggtcagtttgatcatttccttgtccagtacaagaacggcgacgggcagcccaaggccacaagggtacctggccacgaagacagagtgactatttctggattggaaccagataataaatacaaaatgaacctgtacggcttccatggcggccagcgggtcgggccggtaagtgctatcggagtcacagcggcagaagaggaaacacccagccctactgaaccttccatggaagcccctgaaccacccgaggagccgctgctgggtgaacttacggtgaccgggagcagcccagactcactttcactgtcttggacggtgcctcagggcagattcgacagttttacagtgcaatacaaggatcgtgatggaagaccgcaggtcgtgagggtcgggggcgaggagtccgaggtcacagtcggcggtctcgagccagggcggaaatacaagatgcatctgtacggtctacacgagggaagaagagtcggccccgtgagcaccgtgggggtgaccgcaccccaggaagacgtggacgagactccttcacctaccgaacctgggaccgaggcaccggaaccaccagaggaacctctattaggggagttaaccgttaccggctcctccccggactcgctgagcctttcatggacagttccccaggggagatttgactcttttactgtacagtacaaggaccgcgacgggaggcctcaagccgtgcgagtcggcggacaagaatctaaagtgaccgtgcgcgggctggagcccgggcgaaaatacaaaatgcacctgtacggcttgcacgagggtagaagattggggcctgttagcgctgtaggggtgaccgaagatgaagctgagaccacccaagctgtgcccaccatgactccggagccaccaatcaaacccagactgggtgaactgaccatgacagacgccacacctgattccctgtctctgagctggactgtccccgagggccagtttgaccattttcttgtgcagtacaggaatggcgatggccagccaaaggccgtgcgagtacccgggcacgaagatggtgtaaccatttccggcctggagccagaccataagtataagatgaatctctacggtttccacggtggccaaagagtgggcccgatctctgtgattggcgtgaccgcggcggaagaggaaaccccctctcctacagagctctctactgaagcgcctgaacctccagaggagccgctactcggtgaactgacagtgaccggaagcagtccagattcactgtccctgtcatggacaattccccagggccatttcgatagcttcacagtgcagtataaagatcgcgatgggaggccccaggtgatgagagtgagaggggaggagtcggaagtgacagttgggggcctggaaccaggccgcaagtacaagatgcatctgtacggactgcacgaggggagacgcgtgggccctgttagcaccgtcggagtgacagtgcccacaacgacacctgagccgcctaataagcctcggctgggggagctcactgttacagacgctacccctgactctctgtctctgtcttggatggtgccagagggccagttcgaccacttccttgtgcagtaccggaatggcgatggacaacccaaggtagtgcgcgtgcctggccacgaagacggcgtcacaatctctggtctggagcccgaccacaagtataagatgaacttatatggtttccacggcggtcagcgcgtcgggcccatcagcgtcataggcgtgacagcagcagaagaagagacccctgcacctacagagccgagcaccgaagctcccgagcctcccgaggagcctctgcttggcgaactcaccgttactggatcttcccccgactccctcagcctgagttggaccatcccgcagggtcggttcgattccttcaccgtgcagtataaggatcgagacggccgacctcaggtcgtacgtgtgcggggcgaagaatcggaggtgacggttggagggctggagcctgggtgcaaatataagatgcatctatatggcttgcatgaaggccagcgggtggggccggtcagtgccgtaggagttaccgtgcctaccatgaccccagagccccctatcaagccacggctcggcgagctgacagtaaccgacgccaccccagactcgctgagcctgagctggatggtgcctgaagggcagttcgatcactttctcgtgcagtatagaaacggcgacggccaaccaaaggccgtcagggtgccgggccacgaggatggggtcactatctccgggctggaaccagaccacaagtataagatgaacctttacggcttccatggtggtcaaagggtggggcccgtctccgctatcggcgtgacagaagaagagacccctagccccacagagcccagtaccgaggctcctgaggctcctgaggagccactgctcggggaactgactgtcacaggctcctctcctgattccctgtcacttagctggacgatcccccagggacgttttgacagcttcactgtccaatacaaggaccgagacgggcagcctcaggtcgtgagagtaaggggcgaggagtctgaagttactgtgggtgggctggagcccggacgcaagtacaagatgcatttgtacggcttgcacgagggccagcgggtcgggccggtttccacggtcggcattactgcgccactccccacgccactgcctgtggagccacggctaggagaactagcagtcgctgctgtgacttcagacagtgtaggtctctcctggaccgtggcgcagggcccctttgattcgttcctcgtacagtacagggatgctcaagggcaaccacaggccgtgccagtgagcggcgatcttcgcgcagtggctgtgtcaggcctcgatcccgctcgtaagtacaagttccttctctttggactgcagaatggaaagagacatggaccagtccccgtggaagcaaggacggctcctgatactaagcctagtccccggctgggcgagctgaccgttacagacgccacaccggattctgtgggcctatcttggactgtccccgagggcgaatttgactcatttgtcgttcaatacaaggataaagatgggagacttcaggtggtccctgtggcagccaatcagcgcgaagttacggtccagggcttggaaccaagtagaaagtatagattcttactctacggactgtccggcagaaaacggttgggaccaattagcgccgatagtacgaccgccccgctggagaaggagttaccaccacacctgggagaactcaccgtggcagaagagacttcttcatcccttcggctgtcttggaccgtggcccagggcccttttgacagctttgttgtacagtatagagacacggatgggcaacctcgagccgtacccgtggccgctgatcagaggaccgttactgtcgaggatctggagcccgggaagaaatacaaatttctgctatacggactgctcggaggcaagaggctgggacccgtgtccgccctagggatgacagcgcctgaagaggacacgcctgctcctgaattggcacccgaggccccagagccccccgaggagccacgtctcggggttctgaccgtgaccgatacaaccccagatagcatgagattgagctggagcgtcgcccagggtccttttgatagcttcgtcgtgcagtacgaggacaccaacggacagccacaggcacttctggtggatggtgatcagagcaagatcctgatctctggccttgagccctcaacaccttatcgcttcctgttgtacggacttcacgagggaaaaaggctggggcctctctcggcagagggcactacggggttggctccagctggtcagaccagcgaggagtctcggccacggctgtcccagttgtccgtgaccgacgtgacaacatcaagcttacgacttaattgggaggctcctcccggagcattcgacagctttctcttgcgtttcggggtgcccagcccctccaccctcgaaccccatccacgaccacttttgcaacgcgaacttatggtccccggaacccgccattcagcagtattgcgcgatttacggtcaggaaccctttattccctcaccctgtacggacttcgcggccctcataaggccgatagcatccagggaacagctcgaacactcagtcccgtgctggaatccccgcgcgatctgcaattcagcgagatacgtgagacatcagccaaggtgaattggatgcccccacctagtcgtgcagactcctttaaggtgtcataccagctggcagatggcggcgagccacagtccgtgcaggtagacgggcaggcccgaacccagaagctgcagggcctgatcccgggagctcggtacgaagtgactgtggtgtctgtgcgggggttcgaggaatctgagcctcttaccggctttctgacaactgtgcctgacggcccgacccagctgcgtgcactcaatctcaccgaggggttcgctgtcttgcactggaaaccaccccagaatcctgtggacacctatgatatccaggttacggctcctggcgctcctccactccaggcagagacacccggatcggctgtggattacccactacatgacctggtcctccatactaactatactgcaactgtgcggggtctacgtggacctaaccttacatccccagcttccatcaccttcaccacggggttggaggcaccacgtgacctcgaggcaaaagaagttacacccaggactgctcttctcacttggacagaacctcccgtacgccctgccgggtaccttctgtccttccacaccccaggcggtcagactcaggagattctcctgcctggtggcatcacatcccatcagttactcggcctgtttcccagcacaagctacaatgcaagacttcaggcaacttggggacagagcttgctaccaccagtgagcacctcgtttacgaccggcggcctacgcattcccttccccagagattgcggagaggagatgcaaaacggggcgggagcctctaggacatctactatcttcctgaacggcaaccgagagagacccctgaatgtcttttgtgacatggaaacggacggaggcggatggttggtatttcaaaggcgcatggatggacaaacagacttctggagggactgggaggattatgctcacggcttcggcaacatctctggagagttctggcttggcaacgaggcccttcattccctgacgcaggccggggattactccatgcgggtggacctcagagcaggggatgaagccgtcttcgcgcaatatgacagtttccatgttgactcagcagctgaatactacagactccacctggaaggttaccacgggacagcaggagatagtatgagttatcacagcggatcggtcttttctgccagggacagagacccgaattcgctcctgatctcctgtgccgtgtcctatcgaggtgcgtggtggtataggaactgccattatgcaaatcttaacggcctgtacggttcaactgtagatcatcagggtgtgagttggtaccattggaaaggatttgaattttctgtgcctttcacagagatgaaattaagaccaagaaattttcgttcccccgccggcggggggtag

SEQ ID NO: 208328 - DNA, 27 bp, synthetic construct
  misc_feature 1..27: note = Description of Artificial Sequence: Synthetic coding sequence
  source 1..27: mol_type = other DNA
atgatgcccgcccagtacgccctgtag

SEQ ID NO: 208329 - DNA, 6843 bp, synthetic construct
  misc_feature 1..6843: note = Description of Artificial Sequence: Synthetic coding sequence
  source 1..6843: mol_type = other DNA
atgatgcccgcccagtacgccctgaccagcagcctggtgctgctggtgctgttatccactgctcgcgcaggtccattttctagccgatctaacgtgaccttgcctgcccctcggccacctccacaaccagggggccacaccgtgggggctggggtgggcagcccgagtagccaactgtacgaacatacagtggagggaggagaaaagcaggtggtgtttactcatcggattaacttgccaccatcgacgggctgcggatgtccacctgggaccgagccacctgttctagctagcgaggtccaagccctccgcgttcgattggagatattagaggagctggtgaagggcctgaaagagcaatgcacaggtgggtgctgcccagcatcagcccaagccggcaccgggcagacggacgttcgcaccctgtgttccctccatggcgtcttcgatctgtctcggtgcacatgctcctgcgagcccgggtgggggggcccgacttgctcagatcctaccgacgccgagatacctccctctagtccaccctctgcatccggctcctgccccgatgattgcaatgaccaaggtcgttgtgtgaggggacgctgtgtatgcttccctggatacactggcccgtcctgcggttggccatcgtgtccaggcgattgccagggcagggggcgctgcgttcagggggtgtgtgtgtgtagagcaggttttagtggccccgactgttctcaacggagttgtcccagaggatgttctcagagggggcgctgcgagggaggcaggtgtgtatgtgaccccggctacactggggacgattgtggcatgaggtcttgtccccgagggtgctcacagaggggccggtgtgagaacggtaggtgcgtctgtaatcccgggtacacaggcgaggattgtggcgtccgctcctgtccccgcgggtgctcccaaagaggccgctgcaaggacgggcggtgcgtctgcgacccgggatatacaggagaggactgtggaacccgctcatgtccctgggattgcggcgagggcgggcgctgcgtggacggaaggtgtgtctgttggccagggtataccggggaagactgttcaacccgcacatgtccaagggactgtagagggcgcggcagatgcgaagatggcgagtgtatctgtgacaccggatacagcggggacgattgcggcgtgcgtagttgtcctggagattgcaaccagagaggacgctgtgaagacgggagatgtgtctgctggccaggatacactggcacagactgcggctcccgcgcatgccctcgcgactgtagagggcggggcaggtgtgagaacggagtctgcgtttgtaatgccgggtactcaggcgaggactgcggtgtacgctcctgtcctggagactgccggggcagaggaagatgtgagagcggcagatgtatgtgctggcccggctacactggacgagactgcggcactcgtgcctgccccggcgattgcaggggcagaggcaggtgcgttgatggacgatgtgtttgcaacccgggtttcactggggaggattgcgggagccgacggtgcccgggagactgccgcggacacggactctgcgaagatggggtgtgcgtgtgcgatgcggggtattccggcgaggactgctccacacgcagttgccctggtggatgtcgggggcgaggacagtgcctggatgggcgatgtgtatgtgaagatggctatagcggcgaggactgtggagtgaggcagtgcccgaacgactgctctcagcacggggtgtgccaagatggggtgtgtatctgttgggaagggtatgtgtctgaggattgttcaatccgcacttgcccatcaaattgccatggccgcggacgatgtgaagagggcaggtgcctgtgcgaccccgggtatactggccccacctgcgcgacacggatgtgtcccgccgattgtaggggaagagggcgctgtgtgcagggtgtctgtttgtgtcacgtggggtacggcggcgaggattgtggccaggaggagcctcccgcgtccgcgtgtccaggcggatgcggtcctagggagctttgccgagcagggcagtgtgtctgcgtggaaggcttcaggggtccggactgtgccattcagacttgtcctggagattgtaggggacgtggtgagtgtcacgacgggtcttgtgtttgtaaggatggttacgcaggtgaggattgtggtgaggaagtgcctacgattgagggaatgcgtatgcatctcctggaggagactacagtgcggaccgagtggacccccgcccctgggccagtggatgcttacgaaatccagtttattcccaccaccgagggagcatcccctccttttacggcgagagtgccttccagcgctagcgcctacgaccagcgagggctcgccccaggccaagaataccaggtgaccgtacgtgccctgcgaggaacttcatggggtttacctgcttcaaaaactataactacaatgatagacgggccccaggatcttcgcgtggtcgcggtgacacctactaccctcgagttgggctggttacgtccccaggccgaagtggatcgcttcgtggtttcttacgtatcggctggaaaccagcgggtgagactagaagtgccccccgaggcagacgggactctcctgaccgacctgatgccgggagttgagtacgttgttactgtgacggcagagcgcggcagggctgtctcttaccccgcctctgtacgtgccaatacagggtccagccctctaggcctgctgggcactacagacgagcccccaccctccggtccaagtaccacacagggtgctcaggcaccactgttgcagcaacgaccccaagagctgggagagcttagagtgcttggccgagatgagacagggcgcttgagggtcgtgtggaccgcacagcctgacaccttcgcctacttccagctcaggatgagggtgccagaagggccaggcgcccacgaggaggtgcttccaggcgacgtccgtcaggccttagtgccaccccccccaccaggaacaccttacgagttgtcattgcatggagtacctcccggggggaagccttccgatcccattatttatcagggcataatggataaggatgaagaaaaacccggcaaatcttccggacccccccgattaggtgagcttacagtcactgaccgcacgtctgattctctcctattgcgatggactgtgcccgagggggaattcgacagcttcgtgatccagtacaaggatagggacgggcagccccaggtagtccccgtggagggccctcagcgctccgctgtaatcacgagcttggaccccggccgaaaatacaaatttgtcttatatggcttcgtgggcaagaagcggcacgggccgctggtcgccgaggccaagatcctgccccagtcagacccttcacccggaacgcctccgcacctcggaaatctgtgggtcactgatcctactccagacagtctccatctctcttggactgtccctgaagggcagtttgatacttttatggtccagtatcgtgaccgcgacggccggccacaggtggtgccagtggaagggcccgaacgtagctttgtggtgtcctctctggaccccgatcacaagtatcgttttacgctctttggcattgccaataagaagcgatatggccctctcaccgctgatggcactaccgcaccagagcgaaaagaagaaccacctcgcccagaattcttagaacaacctctgctcggcgaattgaccgttacgggtgtcacacccgatagcttgcggctcagctggaccgtagcccagggtccattcgactctttcatggtccagtacaaagacgcacaaggccaaccccaggctgtccccgtcgctggtgacgagaatgaggtgaccgtcccaggcctggaccctgatcgcaaatacaagatgaatctgtacggactgagaggtcgacaacgtgtggggcccgagagcgttgtagccaagaccgccccccaagaagacgtagatgaaaccccgtcccctactgagcttgggactgaagcccccgagagccccgaagaacccttactgggcgaattaaccgtgaccgggtctagccctgacagtttatcattgttctggactgtgccgcagggctcctttgattcatttaccgtccagtataaggaccgggacggccggcctagggctgtgcgggttgggggtaaggaatctgaggtcacggtgggggggctcgaacctggacacaaatacaagatgcacctgtacggcttacatgaagggcagcgggttggccctgtgagcgctgtgggagtgaccgcaccacagcaggaggagacacctcctgcgacggagtctccactcgagccccgtttgggtgaacttaccgtaacagacgtgacgccgaacagtgtcggcttgtcatggactgtgcccgaaggacagtttgactcttttatcgttcagtataaggacaaggacggacaacctcaagtggtgccagtggcagccgaccagcgtgaagtgactgtgtacaatctcgagccagagcgaaagtacaaaatgaatatgtatgggctgcatgacggccagcggatgggccccctgtcggtggtgattgtgactgcgcccctgcctccagcccctgccaccgaggcttccaaacctccactagaaccacgcctcggtgaattgactgttactgacattaccccagattctgtcggtctctcatggactgttcccgaaggtgaattcgactctttcgtcgttcaatacaaggacagggatggccaaccccaagtggtccctgtggccgccgaccaacgggaggttacaataccagatcttgagccctcccgaaagtacaagtttctgctgttcggaattcaagatggcaagcggcgtagcccagtgtctgtggaggcaaaaacagtagcacggggcgacgcaagccctggcgctccaccacgcctcggcgaattgtgggttaccgatcccacaccggatagcctgcgcctgtcctggaccgtgcccgaagggcaatttgacagtttcgtggtccagttcaaggacaaggacggcccccaagtggtgcccgtggagggccacgagcggagtgttaccgtcaccccactagatgcaggacgaaagtatcggttccttctgtatggacttcttggaaagaagaggcatggacctttgaccgctgacggcactacagaagccagaagcgccatggacgataccgggacaaaaaggccgccgaagcccagactgggcgaggaactgcaggttacaactgtcacacaaaattctgtcggattgagttggaccgtgccagaggggcagttcgattctttcgtagtgcagtacaaagatagagacggtcagccccaggtggtgcccgtcgaggggagtctccgcgaggtctctgtacccggattggaccccgctcaccgttataagctgctgttatacgggttgcaccatgggaaaagggtaggcccaatcagtgcagtcgccatcaccgctggtcgggaagaaactgaaactgagacgacggcacccactccacccgctcctgaaccccatttgggcgaactgaccgttgaagaagccacctcacacaccttgcacttgtcgtggatggtgacagagggagagtttgatagctttgaaattcaatataccgatagagacggccagttgcagatggtgcggataggaggtgataggaatgacattaccctgtccggcctggaaagcgaccacaggtatctggtcaccttgtacgggttttctgacggaaagcatgtgggccctgtgcatgtagaggctttgaccgtgccagaggaggaaaaaccgtccgagcctcccaccgccacccccgagccacctattaaaccccgcctcggcgaattaacagtaacggatgccacaccagattccctctctctcagctggacggtccccgaggggcaatttgatcatttcttggtgcagtacagaaatggagacggacagccaaaggctgttcgcgtgccaggtcacgaagaaggtgtgaccataagcggcctcgaaccagatcataagtacaaaatgaatctctatggctttcacgggggccagaggatggggccagtgtcagtcgtgggcgtgaccgccgccgaggaggagactccttctccgacggaacccagcatggaggccccagaacccgcagaggaacccctacttggtgagctgactgtaacgggaagcagccctgacagtttatcccttagttggactgtgccgcagggcagattcgacagcttcacagtacagtacaaagatcgtgatgggaggccacaggttgtgcgcgtggggggcgaggagtcagaagtaaccgtaggtgggctggagccagggagaaagtacaagatgcacctgtatggcctgcacgaggggcgtcgggtgggcccagtctctgctgtgggagtgactgcacccgaagaggaatcccctgacgcccccctggccaagctgcgtttagggcagatgactgtgagggacattacttcagattccctctcgttgagctggaccgtgcctgagggacagttcgatcacttcctggtccagttcaagaacggcgacgggcagcccaaagctgttcgggttcccggacatgaagacggggttactatctcaggccttgagccagatcataagtataagatgaacttatatgggtttcacggaggtcagcgggtggggcctgtatcagctgtcggcctgacatag

SEQ ID NO: 208330 - DNA, 2022 bp, synthetic construct
  misc_feature 1..2022: note = Description of Artificial Sequence: Synthetic coding sequence
  source 1..2022: mol_type = other DNA
atgcggctgagctggagcgtggcccagggccccttcgacagcttcgtggtgcagtatgaggataccaatgggcagcctcaggccctattggtagacggggatcaatcgaagattctcattagcggacttgagccgtccaccccctatagatttcttctgtacggactccacgaggggaagcgactgggccctctttccgctgagggcacaactggcctagcaccagccggccaaacatccgaggagtcaagaccaagattgtctcagctttccgtgacggatgtgaccacttcctcactaaggcttaactgggaggccccacccggcgcctttgatagcttcttattgcggtttggagtccccagcccatccacgctcgaaccccacccacggccgctgcttcagagggagcttatggtccctggcacacggcatagcgctgtgctaagggaccttcgctctggaacgctgtacagcctgactctctatgggctacgtggacctcataaggccgacagtattcagggcaccgccagaaccttgtcccctgtattagagtctccacgcgacctgcagtttagcgaaatcagagagacaagcgccaaggtcaattggatgcctccaccttccagagctgatagctttaaggtatcataccagcttgccgatggcggcgagcctcagtccgttcaggtggatgggcaggccagaacccaaaagctgcagggcctgatcccaggagctcgttacgaagtcactgtggttagcgtccgcggctttgaagaatccgaaccactaaccggcttcttaactacagtgcctgatggtccaacccagcttcgggctcttaatctgacggagggctttgccgtattacactggaaacccccccagaaccccgtggatacttacgacatccaagttaccgcccctggtgcacctcccctccaagctgagactcctggcagtgctgtggactatcctcttcacgatctagtcttacacacaaattacaccgcaactgtgagaggactcaggggacccaatctgacttcccccgcaagcattacctttacaaccgggttggaagcacctagggacctggaggcaaaggaagtcacacctcggaccgctcttctgacctggactgaaccccccgttcgaccagcgggatacctccttagcttccatacacctggcggtcagacgcaagagatactactgcctggtgggatcacttcacaccagctgctaggtctgtttccgagcactagttacaacgccagactgcaagccatgtggggacagtccctcctccctcctgtcagcacgagttttacgactgggggcctgcggataccattcccacgggattgcggcgaggagatgcagaatggcgctggcgctagccgcacgtccacaatttttctcaacgggaatagagaaagacccctgatcgtgttctgtgacatggagacagatggcggtgggtggctggtcttccagcggaggatggacggccagaccgatttctggcgagattgggaggactacgctcacggtttcggaaacatatctggtgagttctggttagggaatgaggccctgcacagcctgacacaagccggggactactcaatgcgggttgatttgagagctggggacgaggccgtatttgctcagtacgacagcttccacgtggacagcgccgcggaatactaccgcctccacctggagggctaccatgggaccgccggagactccatgagctatcacagcggctctgtttttagtgctcgagatagagatcctaattcacttttgataagctgtgcggtaagttatcgcggagcctggtggtacaggaattgccattacgctaatttgaatggattgtatggatccacagtggaccaccaaggtgtctcctggtaccactggaaggggttcgagttctctgtacctttcactgaaatgaagctacggccccgcaattttagaagccccgcaggaggcggctag

SEQ ID NO: 208331 - DNA, 654 bp, synthetic construct
  misc_feature 1..654: note = Description of Artificial Sequence: Synthetic coding sequence
  source 1..654: mol_type = other DNA
gcccccggcaaggacgaggagatggcccccgccagcaccgagcccccaacacctgaacctccaatcaaaccaagactggaggaactcaccgtgaccgacgcaacacccgattctctctctctgagttggacagtcccggaaggccagttcgatcacttccttgtgcagtacaaaaacggggatggtcaacccaaagccacacgcgtgccaggtcacgaggatcgtgtcactatcagcgggttggagccagacaataagtacaaaatgaatttgtacggtttccatggaggccagcgggtcggacccgtctccgctatcggggttacagctgccgaagaggagacaccctccccaactgaaccctctatggaggcccctgagccacctgaggagcctctgttgggcgaacttactgtgaccggaagcagtccagactcccttagtctgagctggaccgtcccgcaggggcgttttgacagctttaccgttcaatacaaggatagggatggccgcccacaggttgtgagggtcggtggcgaagaatctgaagtaaccgttgggggattagagccgggaagaaagtacaagatgcacctttatggcctgcatgaagggcgccgcgtgggccctgtgtcaacagttggagtgacctag

SEQ ID NO: 208332 - DNA, 12729 bp, synthetic construct
  misc_feature 1..12729: note = Description of Artificial Sequence: Synthetic coding sequence
  source 1..12729: mol_type = other DNA
atgatgcccgcccagtacgccctgaccagcagcctggtgctgctggtgctcctgtcaaccgctagggctggacccttttcttcaagaagtaatgttactctgcccgcgccccgcccaccacctcagcccggcgggcacaccgttggtgcaggcgtgggtagcccttccagccagctgtatgagcacacggtcgaggggggagaaaagcaggtcgtgttcacccatcgtatcaatctgcccccgtcgactggctgtgggtgtccccctggaacagaacctccagttctcgcctctgaggtgcaagctctacgggtaagactggaaatccttgaggaactggtaaaggggctcaaggagcagtgcaccggcggatgttgccctgcttcagctcaggctgggacaggccagacagacgtccgcacactttgcagcctgcatggcgtttttgacctgagcagatgtacttgttcgtgcgagcctggatgggggggcccgacctgtagtgaccccaccgatgccgaaattcccccttcttctcccccaagcgcctccggaagttgcccggatgattgtaatgaccaggggcgctgtgtgcgggggagatgtgtatgttttcctgggtatactggtccgtcctgcggatggccttcatgccccggagactgccagggaagaggacggtgtgtgcagggcgtttgcgtgtgtcgagccggcttctctggaccagattgttctcagagatcttgtcccagaggctgtagtcagagaggccgttgtgaaggaggccgttgtgtgtgcgatcccggttatactggtgacgactgtgggatgagatcatgtccacggggttgctcacagcgaggacgctgtgagaacgggaggtgtgtttgtaatcccgggtacacaggtgaagattgcggcgtcagatcttgcccgcggggctgcagccaacgaggtcgctgtaaggacggaaggtgcgtttgcgacccaggatacaccggcgaggattgcggcactcgctcctgcccgtgggactgtggagaaggcggccgctgcgtagatgggcgctgcgtctgttggcccggttacaccggagaggattgcagcacccggacgtgcccccgggattgtaggggacgagggaggtgcgaggatggggaatgcatttgcgacaccggctattctggtgacgactgtggcgtgcggtcttgtcccggggactgcaaccaacgcgggagatgcgaagacggccgctgcgtctgctggcctggctataccggaaccgattgtggctctcgcgcatgtcctcgggactgtagaggcagaggcaggtgtgaaaatggcgtctgcgtgtgtaatgccgggtactccggggaggactgtggcgtgaggtcgtgccccggcgattgccgcggtcgcggccgctgcgaatccggcaggtgcatgtgctggccaggttataccgggcgcgattgtggcacgcgtgcgtgtccaggcgattgccgtggaagagggcggtgtgtcgacggcagatgcgtctgtaacccgggatttaccggagaggactgcgggtcgaggagatgtcccggggattgccggggacatggtctgtgtgaggatggggtgtgtgtatgtgatgcaggctactccggcgaggattgcagcacaaggagctgcccagggggatgccgaggacgcggtcagtgtcttgatgggcgttgcgtgtgcgaagacgggtattcaggagaagattgtggtgtgcgtcagtgcccaaacgattgttctcagcatggcgtgtgccaagatggtgtttgtatttgctgggagggttacgtgagcgaggactgtagtatacgcacttgtccgtcaaattgtcacggccggggacggtgcgaggaagggaggtgcctttgcgaccctggatatactggacctacttgcgctactcggatgtgccccgcggattgccgcgggaggggacgttgtgtacagggcgtttgcctgtgccatgtgggctacggcggggaagactgtgggcaagaggaaccacctgcaagtgcgtgtcccggcggttgcggcccgagggaactttgtcgggcgggccagtgcgtctgtgtggagggcttccgaggtcctgactgtgctatccagacatgtcctggggactgcagggggaggggagaatgtcacgacgggagctgtgtgtgtaaggacgggtatgccggcgaagactgcggcgaggaagtacccaccattgagggtatgagaatgcacctcttggaagaaaccaccgtgaggaccgaatggacacccgcaccaggccccgtcgatgcatacgagattcagttcatcccaaccactgagggtgcttcccctcctttcactgctcgggtgcctagcagtgcctcagcttatgaccagaggggcctggcacccgggcaagagtaccaagtcaccgtccgtgccttacgagggaccagctggggattgcctgcctcaaagaccatcactaccatgatagatggcccgcaagacctccgagtagtagccgtgaccccaactactctcgagctgggctggctgaggccccaggctgaagtggatcggttcgtggtgagttacgtatccgccggaaaccaaagggtgagactggaagttcctccagaggcggatggtaccctcctgaccgatctcatgccaggcgttgaatacgtcgtaaccgttactgccgagcgaggtcgggcagtctcttaccccgcctctgtacgcgccaataccggttcatcaccgctgggactgcttggcacgactgacgagccccctccatctggaccgtccactacacagggggcacaggcacctcttctgcagcagcgaccccaggagctgggcgagctgagagtcctaggccgtgatgagaccggtcggctgcgagtcgtgtggaccgctcagcctgatacattcgcatactttcagctgaggatgcgggtcccagaggggcctggggcgcatgaggaagtattgcctggtgatgttagacaagcactcgtcccccccccccctccggggaccccatatgaattgagtttgcacggggtcccaccgggtggcaagccctccgatcccattatctatcaaggaattatggataaagacgaagaaaagcctggaaagagttccgggccccctagactgggcgagctgaccgtcaccgacagaacatccgactcactactgctccgttggaccgtcccagagggagagttcgactcttttgtcattcagtataaggaccgcgatggccaacctcaggtagttcccgtggagggcccacagcgcagcgcggtgatcacctcactcgacccaggaaggaagtacaagttcgtgctttatgggtttgttggcaagaaaagacatggtcctctggtggctgaagccaagatcctcccccagtctgacccttccccaggcactccgccacggcttggaaatttatgggtgaccgaccccacgcctgattcgctgcatctgtcatggacagtccccgaggggcagtttgataccttcatggtccagtaccgagatcgggacggacgcccacaggtggtgccagtcgaaggtcctgagaggtcgttcgttgttagctctctggacccagatcacaagtacaggttcacgcttttcggtatcgcgaacaaaaagcgatacggcccactgaccgcagacgggaccactgcaccagagaggaaggaggaaccccctaggcctgaattcttggagcagcctctcctaggcgaacttacagtgaccggcgtgacacccgactccctgcgattatcttggacagttgcccaggggcccttcgattcattcatggtccagtataaagatgcgcaaggccagccacaggccgtgcctgttgccggagacgaaaacgaggtgactgtgcccggcctggatcccgaccggaagtataagatgaacctgtatggcttgcgaggaaggcaacgagtgggacccgagtccgttgttgcaaaaacagcacctcaggaagatgttgacgaaaccccgtctccaaccgaattagggactgaggcccccgaatcccctgaggaacctctgcttggcgagctgactgtaactggcagttcccctgacagtctgagtttattttggaccgtgccacaagggagtttcgattcattcacggttcagtacaaggaccgcgacgggaggcctcgtgcagttcgggtgggtggcaaggagagtgaagttactgtgggcgggctcgagccggggcacaaatacaaaatgcacttatacggactacacgagggacaaagagtgggaccggtgagcgctgtgggtgtaacggcacctcagcaggaggagacgcctccagcaactgagtctcccctcgaacccagacttggcgaacttacagtaactgacgtgactcccaacagtgtgggtctgagttggacagtaccggagggacaatttgacagttttattgtgcagtacaaagataaagacggacagccacaggtcgtgcccgtggctgctgatcaaagagaggtgacggtgtacaacctagagcctgagcgtaagtataaaatgaacatgtatgggctgcacgacgggcagaggatgggtccactctctgtggtgattgtgaccgctccacttcctcctgcacccgctactgaagcatccaagccccctcttgaacctcgtttgggagagctgacagtgaccgatattaccccggattcagtcggcctctcttggacggttcccgagggggaatttgattcctttgttgtgcagtacaaggatcgtgacggacagccacaggtggtgcctgtggcggcagaccagcgcgaggttaccattcctgacctggaaccatcacggaaatacaagttcttgctgttcggcattcaggacgggaaaaggagatcccccgtgtccgtggaggccaagaccgtcgcccggggcgacgcatctccaggcgcccccccacgacttggcgaactgtgggtgactgacccaacacccgacagcctccggctgagttggacagtgcccgagggacagtttgactcatttgtggttcagttcaaggacaaggacggacctcaggtggtgcccgtagagggccacgaacggagcgtgaccgtaacccctctcgatgcaggaaggaaatatcggttcctattgtacggcctgctgggtaagaaaagacatggcccactcaccgcagacggcacaaccgaagcgcggtcagcaatggacgataccggcaccaaacgaccccccaagcccagacttggcgaggaactgcaggtgaccaccgtcacccagaattccgtcggactgagctggaccgtgccggagggccagttcgactcttttgttgtgcagtacaaagaccgggacggacagccccaggtggtccccgtcgagggcagtctgcgggaagtgtcagtgccgggtctggatcctgcacatagatacaaacttctgctgtacggattacaccatggaaagcgggttgggcccatatctgccgttgccattacggcaggccgggaggagaccgaaaccgaaactacggcccctacaccacccgccccagaaccccatctgggggaattgactgtagaagaagctacatctcacactctgcatctgtcctggatggtaacagaaggagaattcgactcctttgagatccagtacaccgacagagacggccagctgcagatggtcaggattgggggagacagaaatgacataactctcagtggtctggaatccgatcacagatatctggtcaccttgtacgggttttccgatggcaaacatgtggggcccgtgcacgttgaagctttaacagtaccagaagaagagaagcccagcgaaccaccgaccgcgacgcctgaaccccccattaagcccagactgggcgaacttacagtgacggatgccactcccgattccctatctctgtcatggacagtccctgaaggacagtttgaccatttcctggttcaatatcggaacggcgatggacagccgaaggcggtgagggtgcctgggcacgaggaaggagtgacgatttccggcctagaaccagaccacaaatacaagatgaacctttatggcttccacgggggccagagaatgggcccagtgagtgttgtgggagttaccgccgcggaggaggagaccccttcacctaccgagccttctatggaggctcctgagccagccgaggaaccactgctgggagagctaacggtcactggcagctcccctgacagcctttctctgagctggacagtaccccagggtcggttcgattccttcaccgttcaatataaggacagggatggcagaccacaggtggtgcgggtggggggcgaggagtcagaagtcacagtgggagggttggaacccggaaggaagtataaaatgcacttgtacggacttcatgagggaaggagggtggggcccgtgtcagccgttggtgtgaccgcccccgaagaggagtctcctgatgccccactggcgaaactacgtcttggccaaatgaccgtgagagacattaccagcgattccttatccctaagctggactgtacccgagggacaattcgatcacttcttagtacagttcaagaacggggacggccagcctaaggccgtgagagtcccagggcatgaggacggtgtgacaatctctggcctggaacccgaccacaagtacaaaatgaacttgtacggctttcacggggggcagagagtgggtcctgtgtcggccgttgggcttaccgctcccggaaaggacgaggaaatggctccggcttcaactgaaccacccactcctgagccacccatcaaaccacggctggaggaactaaccgtgacagatgctacacccgatagcttgagtctgtcatggacagtgcccgaaggacaattcgatcactttctagtccagtataagaacggtgacggccagccaaaagctaccagagtaccagggcatgaggaccgcgtgacaattagcggcctggaaccagataacaagtataagatgaatctttacggattccatggaggacagagagtcggcccagtatcagcaatcggagtgacagcggcggaggaagaaacccccagtcccaccgagccctcaatggaggctccagagccaccagaggagcctctgctgggtgagctcactgtgaccggatcatctcctgactccctgagtctatcctggacagtgccacaaggccgctttgactccttcaccgtacagtataaagatcgagacggcagacctcaggtggtgagagtgggcggggaagaaagtgaggtcacagtggggggcttagaaccaggcaggaaatataagatgcatctctatggtttgcacgaaggccggcgggtaggaccagtgtccactgtaggcgttacagctcctcaggaagatgtggacgagaccccatccccaactgaacccgggacagaagcccctgagcctcctgaggaacctctgctcggcgaactgacggtaaccgggagctcgcctgacagcttgtccttatcatggactgtgccacaagggcgtttcgacagcttcacagtgcaatataaggacagagatggccgtcctcaagcagtacgggtcgggggccaggagtctaaagtcaccgtgagagggctggagccgggcaggaagtataagatgcacctgtatggattacacgagggccgcaggctgggaccagtgtccgcagtaggcgtgaccgaggacgaggccgagactacgcaggccgtgcccactatgactcccgagccccctatcaagccgaggctaggcgagctgactatgactgatgctaccccagacagcttgtccttgagctggacagtgcctgagggccaattcgaccattttctcgtgcaatatcgtaatggcgacgggcaacctaaagccgtgcgggtccctggtcatgaagacggcgtgacaatttccggactggagccagatcacaaatataaaatgaatctgtacgggttccacggtgggcaacgcgtaggccctatcagcgtgattggcgtaaccgcagctgaggaagaaacccccagcccaacagaactgagcactgaggcccccgagcctcccgaggaaccattgctgggggagctgactgtaaccggttctagcccagactctcttagcctgtcctggaccataccacagggccactttgattctttcactgtccaatataaagaccgcgacggtcggcctcaggtcatgcgggttcgcggcgaggagtccgaggtgactgtggggggactggagccgggtaggaagtacaagatgcacctttatggacttcacgagggccgacgggttgggcctgtctccacagtcggtgttacagaagatgaagctgaaactacgcaggccgtcccaaccactacacccgaaccaccaaacaaacccagactcggagaactgaccgtaaccgacgccactccggactctttgagtttatcttggatggtcccagaaggccagttcgaccatttcctcgtgcagtaccgaaatggggacgggcagcctaaagtcgtaagggtgcctggacatgaagacggggtcacaatttcgggtctggaaccagatcacaagtataaaatgaacctctacgggttccacggagggcagcgcgtgggacccatctctgtaatcggggtgaccgctgccgaagaggaaaccccagcccccactgagccctcgacagaagcccctgaacctccagaagagcccctgctcggcgagctcacagtcacagggtcatcccccgatagcctctctctgtcatggactattccacagggacgattcgactcctttacagtgcagtacaaggatagagacggtcggccccaagtggtccgtgttcgcggggaggagtcagaagtcacagtgggcgggcttgagcccgggtgtaagtacaagatgcatctgtatggcttgcacgaagggcagcgtgtcgggccagtgtccgcagtaggagttaccgccccgaaggatgaagctgagacaactcaagcggtgcccaccatgactccggagccacccattaagcctagactcggggagctgacggtgaccgacgctaccccggactcattaagtctaagctggatggttcctgagggacaattcgaccatttcctcgtacagtacagaaatggagacggtcagcccaaagctgtgcgcgtaccaggacacgaagacggggtgactatcagcggcttagaaccggaccacaaatataagatgaatctgtacggattccacggcggccagcgggtaggaccggtctccgccatcggagttactgaagaagagacaccctcccctactgaaccatccactgaggcccctgaagcacctgaggagccgctgctaggagaactaacggtgaccggctccagccccgattctctttcactatcttggactgtcccccagggaagattcgactctttcacagtgcaatacaaggaccgcgacggacagcctcaagtggtccgtgtccgtggggaagagtccgaggttaccgtggggggcctggagcccggccgcaagtacaaaatgcatttatatgggctgcacgaaggacaaagggtcgggcctgtgagcacagtgggcatcactgctccactccccacacctctgcctgtggagccaaggctgggggagctcgccgtggcggcagtgacctcagatagcgtagggctgtcatggaccgtcgctcagggacctttcgacagctttctggtccagtaccgggatgctcaagggcagccccaggccgttccagtctctggcgatctgcgggctgttgccgtgagcgggctggatcctgcccggaagtacaaattcctgttgttcggtctgcagaacgggaaacggcatggaccggtgccagtagaagccagaactgcccctgatactaagccttcgcccaggttaggagaacttaccgtgacagacgcaacaccagactcggtaggcctgagttggacggtccctgagggcgagtttgactcttttgtggtgcagtataaagacaaggacggccgcctgcaagtggtgccagttgccgcaaatcagagagaggtcacagtgcaggggttggagccgtcacgcaaatataggttcttactctacggactgagtggacgaaagcgactgggccccatcagcgcagacagtactacagctccgctggaaaaggaactgccaccacaccttggtgaattgacggtcgcagaggagacatccagcagccttcgcttgagttggaccgtggctcaaggcccctttgattcgttcgttgtgcagtacagagatactgacgggcagccccgcgccgttcccgtcgctgccgaccaaagaactgtgaccgtggaggatttggaaccagggaagaaatataaattcttactttacggcctgttagggggaaaaaggttgggaccagtgagcgccctaggcatgaccgctccagaagaagacacacccgccccagagttggcccccgaagccccggagcctccggaggaacctcgtctgggcgtactcaccgtgacagacacaactccagatagtatgcggttgtcttggtccgtggcgcaggggcctttcgattccttcgtcgtgcagtatgaagatacgaatggacaaccacaggctcttctggttgacggtgaccagtcgaaaatacttatctctggtcttgagccttcaactccctaccgcttcttactttacggactgcacgaagggaagaggctgggacctctctcagctgaaggcaccacgggcttagcgcctgccggccagacgagcgaggagagccgcccacgcttgtcccagctttcagtgactgatgtgactacttcctctctgagactcaattgggaggctccccctggcgccttcgattcgttcctcctgcggttcggcgttcctagcccaagcactttggaaccgcaccccaggccactactacagcgcgagctgatggtgcctgggactagacacagcgcagtcctgcgcgatttaagatcgggaaccctctactcgctgaccctatatggcctcagaggacctcacaaagccgacagcattcagggcactgctaggactctcagccctgtacttgagtctcccagagatctacagttcagcgaaatacgggagacaagcgccaaagtgaattggatgcccccgccatcacgcgccgatagcttcaaggtgtcgtatcagctcgctgacggaggcgaaccccagtccgtacaagtggacgggcaagctcggacccaaaaactgcagggcctaatcccaggcgccaggtacgaagttacggtggtgagtgtgcgcggctttgaggaaagcgagcccctcaccgggtttctcacaaccgttccagatgggcctacccagctgcgagcactgaatctgacagaaggcttcgccgttctgcattggaagccaccacagaatcccgtggatacctacgatatccaggtgactgcccctggagcgccaccacttcaggccgaaacccccgggtccgcagtcgattacccactgcatgatcttgtgttgcacacgaactatacagcaaccgttcgagggttgagggggcctaatctaacctccccagcttctatcaccttcacaaccggactggaagccccacgcgacctggaggcaaaggaggtcacaccacggacagcccttttgacatggaccgagccaccggttcgaccagccggatatctgctgagcttccatacaccaggaggccagactcaagaaatacttctaccaggaggcattacatcccatcagttactcggcctttttccttctacatcatataatgctcggctgcaggctatgtggggacagtctttgctcccccctgtgtcaactagttttactacaggcggcctcagaattcccttcccacgggattgtggcgaagagatgcaaaacggcgctggcgcctctcggacatccacaatctttctgaatgggaacagagagagacccttaattgtgttctgcgacatggaaacggacggagggggctggttagtctttcaaagacgaatggatggccagacggatttttggagggattgggaggactacgctcatggattcgggaatattagcggggagttttggttggggaatgaagctctgcactccttgacccaggcaggcgactattcgatgcgtgtcgacctgcgggcaggggacgaggctgtgttcgcacagtacgattccttccatgtcgactccgctgccgaatactacagattacacctggagggatatcacgggacggcaggggattccatgtcttatcatagcgggtccgttttctcagcaagggatcgcgatcctaacagcctcttaatcagctgcgctgtaagttataggggcgcctggtggtatcggaactgtcattatgccaatcttaacggcctgtacggttccacggtcgatcatcagggtgtgagctggtatcactggaaggggttcgagttcagtgttccattcactgagatgaaactgaggcctcgtaacttcaggtcccccgcaggaggcgggtag

SEQ ID NO: 208333 - DNA, 12729 bp, synthetic construct
  misc_feature 1..12729: note = Description of Artificial Sequence: Synthetic coding sequence
  source 1..12729: mol_type = other DNA
atgatgcccgcccagtacgccctgaccagcagcctggtgctgctggtgctactcagcacagcacgcgccggaccattctccagcaggtccaatgtgacactgcctgctccgcgtccacccccacagccgggcggacataccgtgggagccggtgtggggagcccctccagtcagttgtacgagcatacagtggaggggggcgagaagcaggtcgtgttcacacacagaatcaatttacccccttcaacggggtgcggatgcccgccgggaaccgagcccccagtgctggcctctgaggtgcaggccctgagggttcggctggagatcctcgaagaattggtgaagggcctgaaagaacagtgtactggcggctgttgcccggctagtgcccaggcaggaacagggcagaccgacgtgcggaccctttgcagcctgcacggcgtttttgatctgtcgcgttgtacttgttcttgtgagccgggttggggaggtccaacctgctcggacccgaccgacgccgagatccccccatcctccccgcctagtgcttcaggatcatgccccgatgactgcaatgatcagggcagatgtgtgcgaggtagatgcgtgtgctttccaggatacactggaccatcttgcgggtggccatcctgtcccggggactgtcagggccgtggccggtgtgtgcaaggggtatgtgtgtgcagggcggggttttctggaccagactgctctcagcgaagttgcccacggggctgctcacagaggggacggtgtgagggtgggcggtgtgtatgtgatcccggttataccggcgatgactgcggtatgcgatcctgccctagaggttgttcacaaagggggaggtgcgaaaacggacgatgcgtctgcaatccgggatacgcaggcgaagactgcggggtgagaagttgccccagaggctgcagccagaggggccgctgcaaagatggccgctgcgtgtgtgaccccggatacaccggcgaggactgtggaactcgctcatgtccgtgggattgtggtgaggggggacgatgcgttgatgggaggtgtgtgtgctggccaggatacactggagaggattgttccacaaggacctgtcctagagattgccgagggcgaggtcgttgtgaggacggcgagtgcatttgcgatacgggctactccggagatgactgcggcgtgcggagctgtcctggggactgtaaccaacgcggcaggtgcgaggacggaaggtgcgtgtgttggcccggatacactgggaccgactgcggtagtagagcttgccctcgggactgccgcggccggggcaggtgcgagaatggggtgtgtgtttgtaacgctggctacagcggcgaggattgcggagtgcgctcttgtcccggggattgtcgtggccgtggcagatgtgagtcgggacgatgtatgtgttggccaggctacactgggagggactgtgggactagagcctgcccaggagactgtcgcggcagaggccggtgtgtcgatggtaggtgtgtgtgcaatccaggtttcacgggagaggattgcggcagccgaaggtgtcctggggattgtcggggccacggtctttgcgaagacggagtgtgtgtgtgtgatgccggctatagcggcgaggactgcagcactagatcttgccctggcggctgccgcggccgcggtcagtgtcttgacggacggtgcgtctgtgaggatggctacagcggggaagactgcggtgtcaggcagtgcccaaatgactgcagtcagcatggagtatgtcaggatggcgtgtgcatatgttgggagggatatgtctccgaggactgttctatcaggacgtgccccagcaactgtcatggcaggggtcggtgtgaggaggggcggtgtctgtgtgacccagggtacaccggccccacatgtgctacaaggatgtgtcctgccgattgcagaggccgcggtcgttgcgtgcagggggtgtgcttgtgccatgttggttacggcggtgaagactgcggacaggaggagccaccggctagcgcctgcccagggggttgcgggccgcgagaactctgccgagcaggtcagtgcgtgtgcgttgagggatttcgcggacctgactgtgcaatacagacatgtcccggcgattgcagggggagaggtgagtgtcacgatggatcctgtgtgtgcaaagacggttatgccggggaagactgtggagaggaagtccctacgatcgaaggcatgcggatgcatttacttgaagagactaccgtgcgtaccgagtggacaccagccccaggccccgttgatgcgtacgagattcagtttataccgactacagagggcgcgtcccccccttttaccgccagggtgccttctagcgcctctgcttacgaccagcgcgggctggcacccgggcaagaatatcaggttacagtgcgcgccttaagaggaacttcttggggccttcctgcaagcaagaccatcacaactatgatagatggcccccaggacctgagagtggtcgcagtgactcccaccacactggagcttggctggctgagaccccaggctgaagtggacagattcgtcgtgtcttacgtgtccgccggaaaccagagggtgcgactggaggttccccctgaggccgacggcactttgctaaccgacctgatgcctggcgttgaatatgtggtgacggtgactgctgagcgcggaagagcagttagctatccagcctcagtgagggccaataccgggtcttctcctctaggattgctgggcaccactgatgaacctcctccatctggacctagcaccacacagggggcacaggctcccttgttacagcagaggccccaagagctcggagagctgagggtgctggggcgcgatgagacaggccgactacgggtggtgtggacagcccagcccgacaccttcgcatactttcagttgcggatgcgcgttccggaaggacccggcgcccacgaggaggttctgcccggtgacgtgcgccaggcgttggtgcctcctccgccacccggaacaccttatgagctgagtttgcacggcgtcccgcccggcggaaagccgtccgatcctatcatttaccagggaatcatggacaaggatgaagagaaacctggtaagagtagcggtccgcctagactaggggagttgaccgtcacggacagaacttcagacagcctgttgctcagatggacagttcctgaaggagaatttgacagcttcgtcatccaatacaaggatagggatgggcagccccaggttgtgcctgtcgaaggtcctcagaggtccgccgtcatcactagtttagacccaggacggaagtataagttcgtgctgtatggattcgtggggaaaaagcgccatggaccactggtggcagaagcaaagatcttgccccagtcagacccttcccccgggactcctcctcatctcggaaacttgtgggtcaccgatccaacacccgattcactccacctatcgtggactgtgcccgaagggcagttcgatacttttatggtgcaatacagagaccgggacggccgccctcaggtggtgcctgtcgaaggacccgagcgaagttttgtcgtatcttccctagatcccgatcataagtatcggttcaccctctttggtatcgctaacaagaagcgatatggacctttgaccgccgatggtaccacagcccccgaaagaaaggaagaaccaccacgacccgaatttctcgagcaacctctcctgggggaactcacggtcactggcgtgacccccgacagcttgcggctcagttggacagtggcccagggcccatttgattcattcatggtgcagtataaagatgcccaggggcagccccaggccgtgcccgtggccggtgacgagaacgaggtgacagtgcccggtctagatccagaccggaaatataagatgaacttatacggactgcgaggacgccagcgcgtcggacctgagagcgtcgttgctaaaactgctccccaggaggacgtggacgagacaccctcaccaaccgagttaggtacagaagccccagaaagtcctgaggagccgctgctaggcgaactgacagttaccggttcatcaccagactctctgagtttgttctggacggtcccgcaggggtctttcgattcttttactgtgcagtataaggacagagatgggaggcccagagccgttagagtgggggggaaggagagcgaggtcaccgtgggcggcctcgaaccagggcataagtacaagatgcatctttacggtctgcacgagggtcagagagtgggacccgtgtcagccgtgggggtgaccgctccccagcaggaggagacccccccggcaacagagtcccctttagaaccacgtctaggtgaactcacggtgacagatgtgacacctaacagcgtgggtctctcttggactgtaccggagggccagtttgactcctttatcgttcagtataaagataaggacgggcaaccccaggtagttccagtggcagcagatcaaagagaggtcaccgtttataacctagagccagaaaggaagtataagatgaatatgtacgggctccacgatggacagagaatgggacccttgtcggttgtgattgtcaccgctccacttcctcccgcacccgccaccgaagcgtcaaagccacctttggaaccgaggttgggggagctgacggtcactgatataaccccagacagtgtggggctaagttggaccgtgcccgagggagagtttgactctttcgtagtgcaatacaaggaccgggacggccagcctcaagtcgtccccgtggcggccgatcagagagaggtcactattccggacctggaacccagccgaaagtataagttcctattgttcggtattcaggatggaaagcgaaggagcccagtgtccgtagaagcgaagacagtcgctcgcggggatgcttccccaggcgcacccccaaggctgggcgaactatgggtgaccgaccctacccctgattcacttcggctcagctggactgtcccagaaggccagttcgattccttcgtcgtgcagttcaaggataaagacggaccccaggtggtgccggtggaggggcacgaacgaagcgtgacggtgactccgctcgacgccggaaggaagtaccgcttcctgctatatgggctgctgggcaagaaaaggcatggtccacttaccgccgacggtaccactgaggcgaggtccgccatggatgacacagggacaaaacggccccccaagccaagactgggtgaagagttacaggtgactacagttacccagaattccgttgggctgtcatggaccgttcccgagggccaatttgactcattcgttgtgcaatacaaggatagagacggccagcctcaggtcgttccagtggaggggagtctcagagaagtgtccgtcccaggcctggatcccgcacatcgatataaattactgttgtatggcctgcaccatgggaagagagttggacccatatcagctgtcgccattacagctgggcgggaggagaccgagactgaaacaactgctcctacacccccagcccccgaaccccacctcggagagctgaccgtggaggaggccacgtctcatacgctccatctgtcatggatggtgacagagggcgagtttgatagcttcgagattcaatatacagaccgtgacggccaactccaaatggtgcgcattggcggtgatcgcaacgatattaccttaagtggactcgagtccgatcaccgctaccttgtcacgctgtatggttttagcgacggtaagcatgtaggcccggtgcatgttgaggcacttaccgtgccagaagaggaaaaaccatctgaacctcctacggccacacctgaacctccaataaagccgcgcttgggagaactgaccgtaactgatgccaccccggatagcctctcgttgagctggactgtaccagagggacaattcgaccactttctcgtccagtacagaaatggggacggccagccgaaggctgtgcgcgtcccaggccacgaagaaggtgtaacaattagcggcttggaacccgatcataaatacaaaatgaacctttatggctttcacgggggacaaaggatgggccctgtttccgtagtgggcgtgacagcagccgaggaggagacgccatcccccacagaaccttctatggaagcccccgaacccgcagaagagcccctcctgggggagctcaccgtaactgggtccagtcctgattccctctctctctcatggactgttcctcaggggaggtttgacagctttacagtccagtacaaggaccgcgatggacgaccccaagttgtgcgagtgggtggggaggaaagcgaggtaaccgtgggtggcctggaaccagggcgcaagtataagatgcacttgtatggactgcacgaagggcgcagggtgggtccagtctctgccgtgggggtcaccgcacctgaggaggaatccccagacgcccccttggctaagttaagattggggcaaatgacagtacgagacattacctccgatagtctctctctatcgtggaccgtccctgaaggccaattcgaccactttctggttcagttcaagaacggcgatggccaacctaaggctgttagagtgcccggccacgaggatggcgtaactatctccggcctcgaacccgaccataagtataaaatgaacctatacgggtttcacgggggccagagggtgggtcccgtgtcagcagtcggcttgactgcgccaggcaaagacgaggagatggctcccgcatccaccgagccacctactcccgaaccaccgattaaacctaggctcgaagaactcacagtcacagatgctacccctgactctctttccctgagctggacagtgccagaggggcagttcgatcattttcttgtgcaatataaaaatggagacggccaaccaaaggctaccagagtgcctgggcacgaggaccgggtcactatcagtggtttagagcccgataataaatataagatgaacctctatggcttccacggcggccagcgtgtgggccccgtgtcagctattggagtgactgccgcagaggaagagaccccctcacctactgagccgtctatggaagcacctgagcctccagaggaacctcttctgggagagctgaccgtcacaggcagcagcccagactccctgagcctcagctggaccgtgccacaaggccgattcgactcttttactgtgcagtataaagacagggatgggcggcctcaggtcgtccgcgtgggcggagaagagtccgaagttacggttggtggattagaacctggacgcaaatataagatgcatctgtatggtcttcatgaaggcaggcgggtgggaccagtgtccactgtgggcgtcaccgcccctcaagaggacgttgatgaaactcccagccctacagaacctggaaccgaggcgcccgaaccccctgaggagccactcctgggggagttgaccgtgaccggcagttcacccgattcactgtcgttgtcatggaccgtgcctcagggacggttcgacagtttcacggtccaatataaggatcgcgatggacggcctcaggcggttcgggttggcggccaagagagcaaggtgacagtgcgcggacttgagcctgggaggaagtacaaaatgcacctgtacggattgcatgaggggcgcaggttaggccccgtatccgcagtcggcgtgacagaagatgaggcagagaccacgcaggccgtccctacaatgactccggagccccccattaaaccaaggctgggggagctcacgatgacagacgcaactcccgactccttatctctctcctggactgtgcctgaaggacagttcgaccattttcttgtgcagtacaggaacggggatggccagccgaaggccgtccgagtgcccggacatgaggatggcgtgaccatctctggcttagagcctgatcacaagtacaagatgaatctctacggatttcacggcggacagagagttggccctattagtgtgattggagttactgctgcagaggaagaaacacctagccctacagaactgtcaaccgaagcgccggaaccgcctgaagagccgctccttggagaactaacagtgactggctcatccccggactccctgagtctgtcctggacaataccccagggacactttgacagctttaccgtgcagtataaggaccgcgatggcagacctcaagtcatgcgcgttaggggtgaagagtccgaagttacagttggagggctggaacccgggcgaaagtataagatgcatctgtatggcctacatgagggccgtcgcgtggggccagtgtcgactgtcggagtgacagaggacgaggcagaaaccacccaggcagtgcccaccaccaccccagagccgccaaacaaaccacgactgggcgaactgacagtgaccgacgcaaccccagacagccttagcctatcctggatggtgccagagggccagtttgaccacttcctggtccagtaccgaaacggtgatgggcagccaaaggtagttcgagtacccgggcacgaagacggtgtcactatttcaggccttgaacccgatcacaaatacaagatgaacctttatggcttccacggcggccagcgagtgggccccatcagcgtcattggcgtgaccgctgccgaggaagaaactcccgctcctaccgagccctcgactgaagcccccgaaccccctgaagaacctttgttgggagaacttacagtcacaggttcttctccggacagcttatccctctcttggacaattccacaggggcgcttcgattccttcactgtgcagtacaaagacagagatgggcgccctcaggtggtcagagtaaggggcgaagaatcagaggtgactgttgggggcctggagccagggtgtaagtataaaatgcacctgtatggtctccacgagggccaacgcgtgggtccagtgagcgcagtgggcgtgaccgctcctaaggatgaggccgaaacaacccaagccgtccccacaatgacaccggagccacccattaaaccaaggctgggtgagctgacagttaccgacgccacgccagactcactaagcctgtcgtggatggtccccgaaggtcagtttgaccatttcttagtccaatatcgtaacggagacggacagccaaaagcggtgagggtccctgggcacgaagatggcgttaccatctctgggctggaaccagaccacaagtataaaatgaacctgtacggtttccacggtggccagagagttggacctgtgagtgctattggcgtaacggaagaggagactccaagccccactgagcctagcactgaggcgcccgaggcacccgaggagccgctcttgggcgagctgacggtcacgggatccagccccgattccttatctttgagctggaccgtcccccagggccggttcgatagcttcaccgtccagtacaaagatagggatggacagccccaggtggtgagggttcgaggtgaagagagcgaggtgacagtgggaggcctggagcccggtaggaagtataagatgcacttatacggcctgcacgaaggccaacgagttgggcccgtttccacagtggggattaccgccccattgcccacccccttacccgtggaaccaaggttgggagaactggcagtcgccgctgtcacctccgattccgtaggcctgagttggactgttgcacagggaccctttgactcgttcctggtgcagtatagagatgctcaggggcaacctcaagcagtccctgtgagcggtgatttgcgtgccgtggctgtcagcggcctggaccccgccagaaaatataaattcttgttattcggtcttcagaatggcaagcggcatggtccagtgcctgtcgaggcccgtaccgctccagacacaaagccgagccctcggctgggtgagctcacggtgactgacgctactcccgattctgtggggctctcctggacggtgcccgagggggaattcgattcatttgtcgtacaatacaaggacaaagacgggcggctgcaagtggtgccggtggcagccaatcagcgcgaggtgacagtccaaggcctggaaccaagcaggaagtaccggtttttactgtacgggcttagtggaagaaagagattgggacccatttccgccgacagcaccacagcccccctcgagaaagaattgcctccgcacctcggcgagcttaccgtcgccgaggaaacgagctcctcgctcaggctgagttggaccgtggctcaggggccttttgactcattcgttgttcagtatcgcgacacagatgggcagcctcgagccgtacccgtggctgccgaccagaggaccgtgacagttgaagacttagagccagggaagaaatacaaattcctgttgtacgggctgttgggcggaaagaggttggggcccgtgagtgcactgggcatgaccgcacctgaagaggacacccctgctcccgagctggcaccagaggctcctgagccacccgaagaacctagactcggggtacttaccgtcactgatacaaccccagactctatgcgactttcgtggtctgtcgctcagggaccctttgatagctttgtggtacaatacgaggatacaaatgggcaacctcaggcgctactggtggacggggaccagtctaagatacttattagcggtcttgagccgtctacgccatacagatttctcctgtacggtcttcacgaaggcaaacgtctgggaccattgtctgcggaaggcaccactggactggctccagcaggccagacctccgaagaatcgcgcccacgcctctcacagttgtcagtcaccgacgtaactacgagcagtttgaggctcaactgggaggccccccccggcgcgttcgactcctttttacttaggttcggtgttccctcccccagcacactcgagccccatcctcgccctttattgcaacgggaactgatggtgccaggtacacgccacagcgcagtcctcagagacctacggtccggcaccctgtactccctgaccctgtacggcctgcgtggaccccataaggcagactccatccagggcactgcccgaaccctgagcccagtcctggagagccctcgagacctacaattcagcgagatccgagagacaagtgctaaagttaactggatgcctccaccttccagagccgatagttttaaggtgtcataccaactggctgatggcggagagccacagtccgtgcaggtggatggccaggctaggacccaaaagctgcaaggtctgattccaggcgcgcggtatgaggtcactgtagtgtccgtgcgcgggttcgaagagagtgaaccgttgacagggttcctgacaacagttcctgacgggcctacacagctgcgcgctctgaacttgacggaagggttcgctgtactgcattggaaacctcctcaaaacccagtcgatacctacgacgtgcaagtgacagctcccggtgcccctcctctccaggcggagaccccagggagtgcggtggactacccccttcacgacctggtgctgcatacgaattacaccgcaaccgttcgagggctgcgaggaccaaacttaacgtcacctgcctcgattacattcaccaccggacttgaagccccacgggacttggaggcgaaggaggtaaccccccggaccgctctattaacatggactgaacccccagtccggccggcggggtacctgctctcctttcacaccccaggtgggcagaaccaggagattctgctgcctgggggaatcacaagccaccagcttctaggtctttttccatcgacaagttacaacgcccggctgcaggctatgtggggtcagtcactgttgccccctgtgagcacctccttcaccacaggtggactccggatcccattcccgagagactgcggggaggagatgcagaacggggctggagcgagcagaacatccacgatctttctcaacggcaaccgtgaaaggcccttgaatgtgttctgtgacatggagacagacggcggaggttggctcgttttccagagacggatggacggccagacagatttttggagagattgggaagattatgcacatggatttggaaacatctcaggcgaattttggttggggaacgaagccctacactctcttacgcaggccggggattactctatgcgtgtggatttgcgtgccggggacgaggctgtttttgcacaatatgatagctttcacgtggatagcgctgcagaatattataggctacacttagaagggtaccatggcacagccggcgattccatgtcttaccatagtggcagtgtcttctctgcaagagatcgtgaccctaacagtctcttgatctcctgcgccgtgtcctatcggggcgcctggtggtatcggaattgccactatgcaaacctcaacggcctgtacggctccaccgtcgaccatcagggggtttcatggtatcactggaagggatttgagtttagcgtccccttcacagagatgaagctgcgcccaaggaattttcgaagtcctgccggcggcggctag

SEQ ID NO: 208334 - DNA, 843 bp, synthetic construct
  misc_feature 1..843: note = Description of Artificial Sequence: Synthetic coding sequence
  source 1..843: mol_type = other DNA
atggtgaccgagggcgagttcgacagcttcgagatccagtacaccgatagagatggccagctgcaaatggtgcggatagggggcgataggaacgatataaccctgagtgggctcgaatcagaccatcggtacctcgtgacactttatggtttcagtgatggcaagcatgtcggtccagtgcacgtggaggccctgactgtacccgaggaggagaagccttccgagcctcccacggccacacctgaacctccgataaagcctcggttaggagaactgactgtcaccgatgccacaccagactccctaagcctaagttggacggtccccgaaggacaatttgaccatttcctggtccagtataggaacggggatggacaacctaaggccgtacgggtccccggtcacgaagaaggcgtgaccatcagcggattggaaccagatcataagtataagatgaacctgtatggcttccacggtggccagcgcatgggtccagttagcgtcgttggggtgaccgctgccgaggaggaaacacccagccccacggagcctagtatggaagctcctgagccagctgaggagcctctgttgggggagctgactgtcaccgggtcctcccccgacagcctgtccttgagctggacagtgccacaaggccgcttcgacagttttacggtgcagtacaaagatcgggacgggcgtccgcaggtagtgagagtcggcggtgaggagtctgaggtgacagtgggcggcctggagcccggtagaaaatacaaaatgcacctttatgggctacatgagggccggagggtgggtcccgtaagcgccgttggcgttacttag

SEQ ID NO: 208335 - DNA, 12729 bp, synthetic construct
  misc_feature 1..12729: note = Description of Artificial Sequence: Synthetic coding sequence
  source 1..12729: mol_type = other DNA
atgatgcccgcccagtacgccctgaccagcagcctggtgctgctggtgctgctttctacagcaagagccggaccgttctcttccaggtcgaatgtgacactgccagcccctcgtccacctccacaaccaggaggtcacaccgtaggagcaggtgtcgggtccccatcttcccagctgtatgaacacaccgtcgaaggtggtgaaaaacaggtggtcttcacccacaggattaatcttccccccagtacagggtgtggatgtcctcctgggaccgagccgcccgtgctcgcatcagaagtccaagcgctgagagtgcgactggaaattctggaggaactggtcaaggggctgaaggaacagtgcactggaggatgctgtccagccagcgctcaggccggaaccggccagaccgacgtcaggactctatgttctctgcacggggtgttcgacttaagtcgctgtacgtgcagctgtgaacccggatggggtggaccgacatgcagcgatccaaccgatgctgagattcctccttcctcccctccttctgcgtcagggagctgtcccgacgactgtaacgaccaaggtagatgcgtgaggggccgctgtgtgtgtttccccgggtacaccggaccatcttgcggatggccctcttgccctggcgactgccaagggcgcggacggtgcgtgcagggagtgtgtgtatgcagagccggcttttcgggaccagattgtagccagaggtcatgccccagaggctgctcgcagcgcggcaggtgcgagggaggcaggtgtgtgtgcgaccccgggtatactggggacgactgtggcatgcgctcctgccctagaggctgctcccagcgtggacggtgtgagaatggcaggtgcgtgtgcaaccccgggtacactggtgaggattgcggcgtaaggtcatgtccccgcggctgttctcagcgtgggcggtgcaaagacggcaggtgcgtctgtgatccaggctacacgggagaagactgcggtacccgaagttgtccttgggactgtggggagggcgggcgctgtgttgatggtcggtgtgtgtgttggcccggatatactggcgaagattgcagtaccaggacctgccctcgtgattgccgcggccgtggccgctgtgaggatggtgagtgtatttgcgacaccggctactccggtgatgattgcggcgtgcgcagctgtccaggtgactgcaaccaaaggggaagatgcgaggatggccgatgcgtatgctggccaggctatactggcactgattgtggttcccgagcctgtccacgcgattgtcggggcagaggccgatgcgaaaacggagtgtgcgtgtgtaacgccggctacagcggggaagactgcggggttaggagttgccccggcgattgtagagggcgcggaaggtgtgagtctgggcggtgtatgtgctggccaggttataccgggcgagactgtggaacccgcgcctgccccggcgactgtagggggcgcggaagatgcgtggatggccgatgtgtctgcaatcccggcttcaccggcgaggactgcggctccaggcggtgcccaggggattgcaggggacatggactatgcgaagacggcgtgtgcgtgtgtgatgccggttattccggcgaggattgctctacgcgtagctgtccagggggatgccggggaaggggtcagtgcctggacggcaggtgcgtttgcgaggatggctactcaggagaggactgtggcgttagacagtgtccaaatgattgtagtcagcatggggtctgccaggatggcgtgtgtatctgttgggaggggtacgtgagcgaggactgctccataaggacctgtcctagcaactgtcacggcagaggacgctgcgaagagggcagatgcttgtgtgatcctggatataccggcccaacatgcgctacacggatgtgccccgccgattgtcgcggaagagggagatgtgtgcaaggggtctgcctctgccacgttggctatggtggcgaagattgcggacaagaggagccaccggcttcagcctgtcccggggggtgcggtcctagggaattatgcagagctgggcagtgtgtgtgcgtcgaagggttcaggggccccgactgcgccattcaaacctgtcctggagattgtagaggccgcggagagtgtcatgacgggagctgcgtctgtaaagatggttacgctggtgaggattgtggtgaggaagtccccacgatcgaggggatgagaatgcatcttctcgaggaaacgaccgtcagaacggaatggacgcctgcccccggacctgtagacgcatacgagattcagttcattcccactacagagggagctagcccaccctttactgctcgggtcccctcctctgcaagtgcttacgatcagcgagggttggctccaggccaggagtatcaagtgaccgtgagggccctgcgcggaacatcctggggcctgccagcctccaaaacaattacaactatgattgacggtcctcaagacctacgtgtagttgccgtaacgcctacaacactggaactgggctggcttagaccacaggctgaggtggacaggttcgtggtctcgtacgtgtcggcgggcaaccaaagagttagacttgaagttccccccgaagccgatggaactctgctgaccgatctaatgccaggggttgagtatgtcgttaccgtgactgccgaaaggggtcgcgctgtctcctatccggcttccgtgagggcgaataccggctccagccccttgggtctgctcggcaccacagacgagcctccaccttcaggaccttcaactacccagggggcgcaggcccctctgttacagcaacgcccgcaagaactcggcgagcttcgggtcttggggcgcgacgaaaccgggagactgagggtggtttggaccgcccaaccagacacctttgcgtatttccagctgagaatgcgggtcccagaaggacccggagcacatgaggaggttttgcccggtgatgtcaggcaggcgctggtcccacctccaccacccggaaccccgtacgagctgtctctccacggtgtgccgcctgggggaaaaccaagcgatccgatcatataccaaggtattatggacaaggatgaagagaaacctggcaaatcgtcgggaccacccagactcggggagctcacagtaaccgatcgcacttcagattcgctactcctgcggtggacggttccagaaggtgagttcgactcattcgtcattcagtacaaagatagagatggacagccgcaggttgtgccagtggaggggcctcaacgctccgctgtaatcacatccctcgacccagggcggaaatacaagtttgtgctgtacggctttgtggggaaaaaacggcacggtccgctggtcgccgaggctaagatcttgccacagagtgatcctagtcctggaacgccccctaggcttggaaacctgtgggtcacggatcctacccctgactctctccatctgtcatggacggtcccagaaggtcagtttgatacattcatggtgcagtatagggaccgcgatggacgaccacaggtagttccagttgaaggtcccgaacggtcgttcgtggttagcagccttgaccctgatcacaagtatagattcactctgtttggaatcgctaataaaaagcgatacggtccgctgactgccgacggaacaacagcgccggagcgcaaggaggaacctccacaccccgaatttctggagcaaccgctgctgggagaactgactgtaactggtgtgactcccgactccctgaggttgtcatggactgtagctcaaggcccatttgatagtttcatggtacagtataaggatgcccagggacagccccaggccgtccctgtggccggcgatgagaacgaggtgaccgtgccaggcctagacccagatcgtaagtacaaaatgaatttgtacggcttacggggtagacagcgggtgggtcctgaatcggtcgtggccaagacggcccctcaggaggatgtggacgaaactccttctccaaccgaactcggtactgaggcgcccgagagccctgaggaaccactgcttggtgaattaacggtcaccggtagcagtcctgacagtttatcgctcttttggaccgttccacagggctcttttgattcgtttacagtgcaatataaagatagagacggacggccaagggccgttcgggtaggaggcaaggagagtgaagtaacggtcgggggtctagaaccaggacacaaatacaagatgcacttgtacggtctgcacgaggggcagagagtcgggcccgtctccgccgtcggagtgactgcaccccagcaggaggagacacccccagccactgaatcacccctggagccgaggctgggtgagctgactgtcacagatgttacgccaaattcagtgggactgagttggacagtcccagaaggccagtttgactcattcatcgtacagtataaagataaggacggacagccccaggttgtgccagttgcagccgatcagagagaggtgacggtgtacaatttagaacccgaaaggaagtataagatgaacatgtatgggctgcatgacggtcagcggatgggccctctgtcagtggttatcgtgacagctcccttaccgcccgccccagcaacggaagcctccaaaccgcccctggaacctaggctcggcgagctgacggtaacggatatcacaccggactcggtcgggctttcatggaccgtacccgagggagagttcgatagcttcgtggtccaatataaagatagagatgggcagccacaggtagtgcctgtggctgcagatcagcgggaggtcacaatcccagacctggagccatcacgaaaatataagttcctactattcggtatccaggatggcaagcgccgctcccccgtatccgtggaagctaaaaccgtggctaggggggatgctagccctggcgcccctcctcgcctaggcgaactctgggtcacagatcctaccccggattccttgaggttgagttggactgttccagagggccagttcgactcattcgtggtccaattcaaagataaagacggcccccaggttgtcccggtggagggtcatgagcgaagtgtcacagtaacacctctcgacgctggaaggaagtacaggtttctgctctacgggctgctgggaaagaagaggcacggtcctttgacagcggatgggaccacagaggctagatccgctatggacgacaccggtactaagcggccgccaaagcccaggctgggggaagagcttcaggtcaccactgtaacccagaatagcgtcgggctatcctggacggtacccgagggtcagtttgattcctttgtggtgcaatataaggatagggacggacagccccaggtggtgcccgtcgagggctcacttcgcgaggtgtcggtcccgggtcttgacccagcccatagatataagctactactgtacggcctgcatcacggcaagcgcgtcggacctatctccgctgtagcgatcacagcaggacgggaagagacagagaccgaaaccacggctccaaccccccccgccccagagccccaccttggagaactcaccgtcgaggaggccacctctcacacacttcatctctcatggatggtcaccgaaggtgagttcgatagctttgagattcagtacaccgatcgggatggccagcttcagatggtgcgcataggaggagatagaaatgatattacactttccggccttgaaagcgaccacagatatcttgtgaccctctacgggtttagcgatggcaaacatgtaggtcccgtacacgttgaagcgctgaccgtgccagaagaagaaaaaccctcagaaccccccaccgccacccctgagccgccgattaaaccgagactgggggaattgaccgtgaccgacgctacaccagactcactaagtctgtcgtggactgtgcccgagggtcagttcgatcacttcctagtgcagtatagaaatggagatggccagcctaaagctgtgcgcgtgccagggcatgaggagggggttacaatctccggactcgagccagaccacaaatataaaatgaatctgtacgggtttcatggcggccagcggatggggcctgtaagcgtagtgggagtgaccgccgccgaggaggagaccccaagccccaccgagccaagcatggaagctcccgagcctgcagaagagcctctcctgggcgagcttaccgtcacaggctcatctcctgactccctcagtcttagctggacagttccccaaggtaggttcgacagctttaccgtccagtataaagatagagatggaagaccacaggtagtcagggtcggaggcgaggaaagtgaagtgaccgttggtggcctggaaccggggagaaagtataagatgcacctctacggcttgcatgaagggagacgcgtgggtcccgttagtgctgtcggagtaacagcccccgaagaagagtcgccagacgctccgctcgcgaagctgcgactcggacagatgactgttagggacatcacaagtgactctctcagcctgagttggaccgtgcctgaaggccagttcgaccattttctggtgcagttcaagaacggggacggccagcctaaagctgtgcgcgtgcctggccacgaagatggtgttacaatctccgggcttgagcccgaccacaagtacaaaatgaatctgtatggctttcatggcggccagagggttggcccggtctctgccgtgggcctcaccgcgcccggaaaggacgaagaaatggcccctgcaagtaccgaaccaccgacacctgaaccacccataaagcctcgactggaggagctcactgtcactgacgctacccccgactctttgtcactgagctggacagttcccgagggacagttcgaccactttttggtacagtataaaaatggggacgggcagcctaaggctacacgcgtgccgggccacgaggatcgcgttaccatctccggtctcgaaccggataataagtataagatgaatttatacggctttcacggagggcagagagtcggtcctgtgagtgctatcggcgtgactgccgctgaggaagaaacccccagccctaccgaaccaagcatggaagcccctgagccaccagaggagcccctgctgggcgaattgactgtgactggaagtagccccgatagtctcagcctaagctggaccgttccccaggggcgctttgattcctttaccgtgcagtacaaagatcgtgacggcagacctcaagtggtccgtgtcggaggcgaagagagcgaggtgaccgtcggaggattggagccgggacgcaagtataagatgcacctgtatggccttcatgaaggccgccgggttggccctgtgtcaaccgtgggcgtcactgccccacaggaggatgtggatgagaccccttcccccaccgagcccggcacggaggccccagagccaccggaagagccactcttgggtgaactgaccgtaaccggttcttccccagatagcttgtctctctcttggaccgtgcctcaagggcgatttgatagcttcactgtgcagtataaggatagagatggcagaccgcaggctgtgagggttggagggcaggaaagcaaggtcactgtgcggggacttgagcccggcaggaaatataaaatgcacctgtatggcctgcatgaaggaagacgcctaggtccagtatctgcagtgggtgttaccgaggatgaggccgaaactactcaggctgtcccgacgatgactcctgaaccccccattaagcctcggctgggcgagctcaccatgacagacgctacacccgacagcttgtccctcagctggactgtgccggaggggcaattcgaccatttccttgtgcaataccggaacggtgacggccagcctaaagcggtgagggtcccaggccacgaagacggtgttaccatctctggcctagagcctgatcacaagtacaaaatgaatctgtacgggttccacggaggacagagggtgggcccaatttctgtcatcggcgtgactgctgcggaggaggaaactccctcacccaccgagttgtctactgaggccccggaaccccctgaggaaccgctactcggcgaactaacagtgacaggctcaagccctgatagtctttccctctcttggactatcccacaggggcatttcgacagttttactgttcagtacaaagaccgggacgggaggcctcaggtcatgcgcgtgcgtggcgaggaatctgaagtgacagtgggcgggctggaaccaggaagaaagtataagatgcacctgtatgggctccacgaaggcagaagggtgggaccagtatccacagtcggcgtcaccgaggacgaggctgagacgactcaggcagtacctaccactactcccgaacccccaaataagccacgccttggggagctgacagtcacagacgccacccccgatagcctgtctctgtcttggatggtcccagaaggccagtttgaccattttctggtgcagtataggaatggtgacggacaacctaaggtggtcagggtcccgggtcacgaagacggagttacaatatctggtcttgaacctgatcataaatataagatgaatctttacggtttccacggtggacagagagtgggtcctatttccgtgattggggtgacagccgctgaggaggagacacccgcacccaccgagccttcaactgaggcccccgaacctccagaggagcctttactgggcgaactcacagtcaccgggtcttcccctgactcattgagcttgtcctggactattccacagggtaggtttgacagcttcactgtgcagtataaggaccgggacggcagacctcaggtggtgagagtgcgcggggaggagagtgaggtcacggtggggggcctggaacctggatgcaagtacaagatgcatctttacggcttgcacgaaggccagagggtgggccccgtgagcgccgtaggtgtgacagcgcctaaggacgaggccgagaccacacaggcagtgccaacaatgacacccgaaccccccatcaaacccaggctgggagaacttaccgtcacagatgctacgcccgactctttatccctctcatggatggtgcctgaaggccaattcgaccacttcctcgttcagtaccggaacggggacggtcagcccaaagctgtacgagtccctgggcatgaggatggcgtcactatttccggcctggagccggatcataagtataaaatgaacttatacggctttcacggaggacagagggtggggcctgtgtccgctattggcgtcactgaagaggagactccaagccctactgagccatctacagaagctcccgaagcaccagaggaacctctcttgggtgagctcaccgtgaccggttcgtcacctgactccctctctctgtcctggaccatacctcaggggagatttgatagttttaccgtgcaatacaaggacagagatggccagccccaagtggtgagggtccggggcgaggaaagcgaagtcaccgttggcggtcttgagcctggtagaaaatacaaaatgcacctgtacggactgcatgaaggccagcgggtcggtccagtgagcacagtaggaattacagcacccttgcccacccctctccctgtagagcctcgcctgggggaacttgcagtggctgcagtgacgtcagactccgtgggactgagttggacagtggcccaggggcccttcgattcttttcttgtccaataccgggacgcgcaggggcagccgcaggctgtccccgtgagcggcgacctccgtgcagtggcggtctctgggctggaccctgcgagaaagtataagtttctactgtttggcctgcaaaatgggaaaaggcacgggccggtccctgtggaagcacgcactgctcctgatactaagccgtctcccagactcggagaattgacagtgacagatgctaccccggacagtgtggggcttagttggacggttcctgagggcgaattcgactcattcgtggtgcagtataaagacaaagacggcaggctccaggtggtgccagtggctgccaaccagcgggaggtcaccgtgcagggcctggaaccctcaaggaagtatcggttcctgctgtacggactttccggcagaaagcgcctcggacctatttcagccgacagcacgaccgcaccactggagaaggagctgcccccccatctgggcgagctgaccgtggcagaggaaacctctagttccttgcgactgagttggacagttgcgcagggccctttcgatagcttcgtggtacagtatcgtgatacagatggtcaacccagagctgtcccggtggctgccgatcaacggaccgttacggtcgaagacctggagcctggcaagaaatataagttcctgctgtacggcctgctgggaggcaagcgtctgggacctgtctcagcgctcggaatgactgctcctgaagaggataccccggctccagagctagcccccgaagcgcccgagcctcccgaagaacctaggctgggtgtgctgaccgtcacagacaccactcctgatagcatgcgcctaagctggtccgtggcccaaggccccttcgacagctttgtagtgcagtacgaggacacgaacggtcagcctcaagcactcttggtagatggagatcagtccaagatcctgatttctggtctggagcctagcaccccctataggtttttattatatggcctgcatgagggtaaacggttgggcccgctgtccgccgagggcacaaccggcctggccccagctgggcaaaccagtgaggaatcacgacctcggctgagtcagctctccgtgactgacgtcacaacctcctcgcttaggctgaactgggaggcacctccaggagcctttgattccttccttctgaggttcggagttccctccccctctactctggagccacatccaagaccactgttgcagcgcgagctgatggtacccggtacccgtcatagtgcggtcttgcgagaccttcgtagcggaacactttattcactgactctgtatggtctgcgaggccctcataaggccgattcaattcagggcaccgcccgcactctcagtccggtgctcgaatcacctcgagatcttcagttttcagaaatacgggaaacctcagccaaagtgaactggatgcctccgccctctcgagcagattctttcaaagtcagctatcagcttgcagatgggggtgagccacagtctgtgcaggtcgatgggcaggcaagaacacagaagctccaggggctgattcctggcgcccgctatgaggtcaccgtggtatccgtacgcggctttgaagagagcgagcctttaactgggtttctgaccacagtgcccgatggaccgacacagcttcgtgccctgaacttgactgaaggcttcgcggtgctccattggaaaccgcctcagaaccctgtcgatacttacgatatccaagtcactgcgcctggcgccccgccactccaagccgagacgcctggatcagccgtggactatccgctccacgatctggtgctgcatactaactacaccgccacagtgcgcgggctgagaggtccgaacctgaccagccccgcctcaatcacgttcactacgggcctggaggctccaagggacttggaagccaaagaggtcacaccccgcacagctcttctgacatggaccgaacctcctgttaggcccgccggctacctgttgtctttccacacgccgggcgggcagacgcaggagatcctgctgcctgggggcatcacctctcatcagctcctggggctgttccccagcacctcttacaatgctcgactgcaggcaacatggggtcaatccctgctgccacctgtttcaacttccttcactactggcggactgagaatccccttcccaagagactgcggggaagagatgcaaaatggggcaggggccagtcggacaagcactatctttctgaatggtaatcgcgagcgacccctgaacgtgttttgcgatatggaaaccgacggcggcggctggcttgtgttccaaaggcgtatggacggccagaccgatttttggagggactgggaggattatgcgcacggttttgggaatatctccggagagttctggcttggcaatgaggctctgcacagccttactcaggcaggagactattcgatgcgggttgatttgagagccggggacgaagccgtgtttgcccagtacgactcgtttcacgttgactctgccgccgagtactaccgactccaccttgagggataccacggtaccgccggtgattccatgtcttatcactcagggtctgtgttttccgcgagagatagggatcccaacagtcttctgatcagttgtgcagtgagttacagaggagcgtggtggtatcgtaactgtcactatgctaacttgaatgggctgtatggaagcactgtcgaccatcaaggagtttcatggtatcactggaagggtttcgaattcagcgtgccgttcactgagatgaagttgaggccacggaatttcagatctcctgccggcggggggtag

SEQ ID NO: 208336 - DNA, 2022 bp, synthetic construct
  misc_feature 1..2022: note = Description of Artificial Sequence: Synthetic coding sequence
  source 1..2022: mol_type = other DNA
atgcggctgagctggagcgtggcccagggccccttcgacagcttcgttgtgcagtatgaggacacaaatgggcaacctcaggctcttctggttgatggcgatcagagcaaaatcctcattagtgggctggagcccagtaccccctatcgctttctgttgtacgggctgcacgaaggtaaacgcctggggcccctctcggcagagggaaccaccggtcttgcccccgccggccaaactagcgaagagtcccgacctagactctcacaattgagcgtgaccgacgtgactacaagcagccttagactgaattgggaggccccccccggcgcctttgatagtttccttctcagatttggagtgcccagtccttccacattagagccacatcctaggcccctgttacagagagagctgatggttcctggcacgcgtcatagcgcagtgctacgagacctgcgaagcggcactctctatagtctcacgctatacgggctgaggggcccgcataaagcagattcaattcagggaacagccaggaccttatcgcccgttctggagagcccaagagaccttcagtttagtgaaatcagggagacttcagccaaggtcaattggatgccacctcctagcagggccgatagtttcaaagtgtcatatcagctggcagacggcggagagccccagtccgtccaggttgacggacaggccaggacacagaaattgcagggcctgatccctggggccaggtatgaagtcacagtcgtgtccgttagaggcttcgaggagagcgagcccctgacggggttcctcaccacagtgcctgacgggcccacccagctgcgtgccctgaatcttacagagggctttgctgtgctgcattggaaaccgccacagaacccagtggacacatacgacgtacaggtgacagctcctggcgccccccctctccaggcggaaacgccagggtcagcggttgactaccctttacatgatctggtgctgcataccaattacaccgcaaccgtgcgtgggttaaggggtcccaatctcacctcgccagcctctattaccttcactacaggactggaggctcccagagatctggaggccaaagaggtgactccgcgcaccgcactcctcacttggactgagcctccggttcgcccggcaggatatctgctttccttccacacccccggtgggcagaatcaagagattctgttacccggcggaatcacatcacaccagcttctcgggctgtttccctccactagctataatgctagacttcaagctatgtggggacagagcctactgccccccgtgtcaacatccttcactactgggggcctgcggattccgtttccaagggactgcggagaagagatgcaaaacggagccggtgccagccggacaagcacaatcttcctgaatgggaatcgtgaacgtcccctaaacgtcttttgtgacatggaaaccgacggcggtggatggctggtgttccagcgccgtatggacggccagaccgacttttggagggattgggaggattacgcacacggcttcggaaatatctcgggcgaattctggctcggcaacgaagctcttcattctctgacacaggctggggactattctatgagagtggacttgagagctggtgacgaggccgtgttcgctcagtacgatagctttcacgtggactccgccgcagaatactacagactccacttggagggttatcacggcacagcgggtgatagtatgagctatcactcaggctctgtgttctccgctcgcgatagagacccaaatagcctgttaatttcctgtgctgtgagttaccggggggcctggtggtaccggaattgccactatgcgaacctgaatggtctgtacggctcgacagtggaccaccagggtgtgagttggtaccactggaagggatttgagttcagtgtgccatttactgaaatgaaactgaggccccggaactttagatctcccgctgggggaggatag

SEQ ID NO: 208337 - DNA, 654 bp, synthetic construct
  misc_feature 1..654: note = Description of Artificial Sequence: Synthetic coding sequence
  source 1..654: mol_type = other DNA
gcccccggcaaggacgaggagatggcccccgccagcaccgagccccccacgcccgagcctcctatcaaaccacgccttgaagagttaacagtgactgacgcaacccccgacagtctgagtctctcctggacggtccccgagggccagttcgaccactttctggtgcagtacaagaatggagacggacaacctaaggccacccgggttcctggacacgaggatcgcgtcacgatcagcggccttgagcctgacaacaaatataagatgaatctatacgggtttcatggcggtcagagagtggggcccgtcagcgcgatcggggtgaccgcagcggaagaagagactccatcgccaaccgagccctccatggaggctccagagccacccgaagagcctcttttaggagaactcacagtgacgggatctagccctgacagtctgtcactttcctggacggtgccacaaggtcgatttgacagttttacagtccagtacaaggatagggatggtcggcctcaggtggtgagggttggtggtgaggagagcgaagtgaccgtgggaggactcgagcccggtcgcaagtacaaaatgcacttgtatggtctgcatgagggccggagagtgggaccagtttctacagtgggagtcacttag

SEQ ID NO: 208338 - DNA, 942 bp, synthetic construct
  misc_feature 1..942: note = Description of Artificial Sequence: Synthetic coding sequence
  source 1..942: mol_type = other DNA
accgagcccggcaccgaggcccccggcccccccgaggagcccctgttaggcgaacttaccgtcaccggatcgtctccagatagcctgagcctaagctggacggtcccacaggggcgattcgattcttttacagttcagtataaggacagggacgggcgcccccaggcagttcgggttgggggacaggagagcaaggttacagtcaggggcctagagcccggcaggaaatataaaatgcacctttacggtttgcacgagggccggaggctcggtccagttagtgcggtgggagtgactgaggacgaggcagagactactcaagcagtccctacgatgacaccggagccgcctatcaagcccagacttggtgagctcactatgactgatgctacgcctgattctttgtccctttcctggacagttcctgaggggcagttcgaccacttccttgtccaataccggaatggagacgggcagccaaaagccgtgcgcgtaccagggcacgaagacggtgttaccatctccggactggagcctgaccacaaatacaaaatgaacctttatggctttcacggagggcaacgggtggggcccatcagtgtgatcggcgtaaccgcggcagaagaggaaaccccaagccctacagaactgtcgacggaggcacccgagcctccagaggagcccctgctcggagagttaacggtgactggatcatccccggattccctttcccttagttggacaatcccccaggggcattttgattccttcacagttcaatataaggatcgagacgggcggccgcaagttatgcgtgttcggggggaggagtcggaagtcacagtgggcggcctggagcccggtcggaagtacaagatgcacctatacgggcttcatgaggggaggagggtcggacccgtttcaaccgtaggcgtgacatag

SEQ ID NO: 208339 - DNA, 942 bp, synthetic construct
  misc_feature 1..942: note = Description of Artificial Sequence: Synthetic coding sequence
  source 1..942: mol_type = other DNA
atgacccccgagccccccatcaagccccggctgggcgagctgaccatgaccgacgcgacccctgactcactttctttgtcttggacagtgcctgagggccaatttgaccactttttggtgcagtataggaatggggacgggcagcctaaagcagttcgggttcccgggcacgaagacggagtgaccattagcggcttggagcccgatcacaaatataagatgaacctgtacgggttccacggtggccagcgcgtcggccctatttcagtcacaggcgtgaccgctgctgaggaggagaccccatcaccgactgaactgagcacggaagcacccgagccccccgaggagcctctgctcggggagctgaccgtgacagggtcatctcctgacagtctgagcttgtcttggacaatccctcagggccattttgacagctttactgttcagtacaaggatcgggacgggagacctcaagtgatgagagttcgaggcgaagaatctgaggtaacagtggggggtctagagccaggacggaagtataaaatgcacctttatggtctgcacgagggaaggagggtgggacccgtgtccacagtcggagtcactgcacccgaggacgaagaggaggaaactcccgcacccacagagccctctactgaagccccagagccaccagaggaacccttgcttggcgaacttaccgtgacaggatctagccctgactccctcagcctgtcctggaccattcctcagggcagattcgacagctttaccgtgcagtataaggaccgagatggccgaccacaggttgtgcgagtgagaggagaggaatctgaggtgaccgtgggcggtctcgagccaggatgtaagtataaaatgcacctctatgggctccatgagggacagagagtggggcctgtcagtgcagtgggtgtgacttag

SEQ ID NO: 208340 - DNA, 1281 bp, synthetic construct
  misc_feature 1..1281: note = Description of Artificial Sequence: Synthetic coding sequence
  source 1..1281: mol_type = other DNA
gccggcgaggactgcggcgaggaggtgcccaccatcgagggcatgaggatgcacttgctggaggaaactacagtcagaacggagtggacaccagcaccgggccccgtcgacgcttatgagatccaatttattcctacgaccgagggcgcaagcccgccgtttactgctagggtgccatcatcagcttcggcctacgaccagcgaggcctggcccctggacaagagtatcaagtcaccgttagagcattacgcggcacatcttggggcttgcctgcttcgaaaaccattactaccatgattgacgggccacaggacctgcgggtggtggccgtcactcccacaacgctggagcttggctggctaaggcctcaggccgaagtggacaggtttgtggtgtcttatgttagtgccggtaaccagcgcgttcggcttgaggtgcctccagaagccgatggaacccttctaacggacttgatgcctggagtggaatacgtggtcacagtaaccgctgagagggggagagcagtttcttatcccgcgagtgtacgggcaaataccgggagcagtcccctgggtctgttaggcaccaccgacgagccaccacccagtggcccctccactacacagggcgcccaagcccctctcctccagcagaggccccaggagctcggcgagctgagggtgttaggccgcgacgagactgggagactgcgtgtagtgtggacagcccagcccgatacatttgcatacttccagctccggatgagagtccctgagggacctggcgcgcatgaggaggtcctccctggtgatgtcaggcaggctctggtgccacctcctccacccggcacaccctacgaattgtctctgcacggcgttccgcccggaggaaagccaagtgacccaattatctaccagggcattatggataaagacgaagagaagccgggcaagtcgagcgggccaccaagacttggcgaactgacggtaaccgataggacctccgatagcttgctcttaaggtggaccgtgccggaaggggagtttgattcttttgtcatacagtataaagaccgggatggccagccacaggtcgtgcctgtcgaaggaccgcagaggtccgcagtgatcactagtcttgacccaggccgcaaatacaagttcgtcttgtacgggttcgtcggcaagaagcgccatgggcctttggtcgctgaggctaagattcttcctcaaagcgacccttcacccggaactccgcctcacttgggaaacctgtggtag

SEQ ID NO: 208341 - DNA, 2598 bp, synthetic construct
  misc_feature 1..2598: note = Description of Artificial Sequence: Synthetic coding sequence
  source 1..2598: mol_type = other DNA
ctgtacggcctgcggggccggcagcgggtgggccccgagagcgtggtagccaagacagcacctcaggaggacgtggatgagaccccctccccgacagaactaggcactgaggcacctgaatctcctgaggagcccttacttggcgagctgacagtgacagggtccagtcctgattctctgtcgttgttttggaccgtgccccaagggtcctttgacagcttcacggtgcagtataaggacagagatgggagaccaagagccgtccgggtgggagggaaggagagcgaagtgactgtggggggactagaaccaggccacaaatataaaatgcacttatatgggttgcatgaaggacagcgagttggcccagtaagtgctgtgggcgtgaccgctccacaacaggaggaaacccctcctgctacagaatcacctcttgaaccacggctcggagagttaaccgtgaccgatgtaacccccaatagcgtaggtctgtcctggacagtgcctgagggccagttcgactcattcatagtccagtacaaagataaggatggtcagccacaggtcgtccccgtggcggcggatcagcgagaggtgactgtgtacaacctcgagcccgaaaggaagtacaagatgaatatgtatggcctgcacgatggacagcggatgggacctctgtctgtggtcatcgttaccgcgccgctgcctcccgcccccgccactgaagcgagcaaacctcctctagaaccacgacttggtgagctgacagtgaccgatattactcctgatagtgtgggactgagctggaccgtgccagagggtgagttcgacagcttcgtggtgcagtacaaagacagagacgggcagccccaggtcgtgcccgtcgccgcagaccagagggaagtgaccatccctgacttggaaccatctagaaaatataagttccttctcttcggaattcaggatggaaagagaagaagcccggtctccgtggaagcgaaaacagtcgctaggggcgatgcttctccaggagcccctccccgtcttggcgaactgtgggtcaccgaccctaccccggattctctgcgcttgtcctggactgtccccgaggggcagttcgactcatttgtggtgcagttcaaggacaaagacggccctcaggtggtgccagttgaaggccacgagcggtctgtgaccgttactcccctcgatgccggaaggaaataccggtttcttctgtatgggttgttgggcaagaaacgccacggcccactgaccgccgatggcaccaccgaggctcggagcgctatggacgacacagggaccaaaagaccccctaagccacggctgggggaagagctgcaggttacgacagtaacccagaattctgtcggtctgagctggacagtaccggaaggccagttcgactctttcgttgttcaatacaaggaccgcgatgggcagcctcaggtggtgccggtggaggggagcctgagggaggtgagcgtaccgggcctcgacccagcacataggtacaagctcctcctctacggcctgcatcacggtaagcgcgtgggtcccatctctgcagtggccatcacagccgggagggaagagactgagacagagaccactgcccccactccacctgccccagagccacacctgggagagctcactgtggaagaagctacttctcacaccctgcacttaagctggatggttacggagggagaattcgacagcttcgagatacagtatacagaccgggacggccagctccagatggttaggatcgggggcgacagaaacgacataactctgtctggactcgagtccgatcacagatacctagtgacgctctatggcttctcggatggaaagcacgttggacctgtgcacgtggaggccctgacagttcctgaagaagagaaaccttccgaaccaccaacggccacccccgagcctcctattaagcctcgcctgggagagctgaccgtgaccgacgccacccccgactcactcagtctcagttggacagttccagagggccagttcgaccatttccttgtccagtatagaaatggagacggccaacccaaggctgtccgggtcccaggccacgaagaaggcgtgacaatatctgggctggagcccgatcacaagtacaaaatgaatctgtatggttttcacggaggccagcgtatgggccctgtgtctgttgtcggcgttaccgcagctgaagaagaaacaccttcgccaacggagccatcaatggaagcgccagaacccgcggaggagcctttgttaggggaattgactgtcacggggtcctctccagatagcttaagcctgtcttggaccgtcccccaggggaggttcgatagttttacggttcagtataaagaccgggacggtcggcctcaagtggtccgggtcggtggagaggagtcagaggtgaccgtgggtggtttggaacctggcaggaagtacaagatgcatctctacggcctgcatgaagggcggagggtgggtcccgtttctgcggtgggtgtgacggcccccgaggaggaatcccccgatgccccattggcctag

SEQ ID NO: 208342 - DNA, 5208 bp, synthetic construct
  misc_feature 1..5208: note = Description of Artificial Sequence: Synthetic coding sequence
  source 1..5208: mol_type = other DNA
atgagcgtgagccggaccatggaggacagctgcgagctggacctggtgtacgtcactgagcgaattatcgctgtgagctttccaagcacggccaacgaagagaacttccgctccaacctgcgagaggtggctcagatgctgaagtctaaacacggaggcaattatctcctattcaatctcagcgagcggcgcccggatatcaccaagctgcacgctaaggtgttggagttcggatggcccgatctgcacacacctgccctcgaaaaaatttgcagtatatgcaaagccatggacacatggctgaacgccgaccctcacaacgtggtggttctccacaacaaaggcaacagaggccgtatcggcgtggtgatcgctgcgtacatgcattacagcaacatttctgcctcagccgaccaggccctcgaccgattcgcaatgaagcgattctacgaggataagatagtacccattggtcaacccagtcagaggcggtacgttcactacttcagtggcctactcagcggatccataaagatgaataacaagccattatttctgcaccacgtaattatgcacggtattccaaactttgaatctaagggcggttgtcgccctttcctcaggatttaccaggcaatgcaacccgtgtataccagtggaatatataacattcccggcgattcccagacctctgtgtgcataactatcgagcccggcctcctgctcaaaggcgatattctcctcaaatgttatcataaaaagtttcggtcccctgcacgggatgtgatttttcgcgtgcaattccatacatgtgccatacatgatttgggggtcgtctttggaaaagaagacctcgacgatgccttcaaggatgatcgattccccgaatatgggaaagttgagtttgttttttcctacggccctgagaagattcaaggtatggagcacctcgaaaacggcccttctgtatctgtggactataatacaagtgatcccctgatccgatgggacagctatgataatttctcaggccatagagatgacggcatggaggaggtggtgggccacacccagggcccacttgatgggagcctgtacgcgaaggtcaagaaaaaggattctctgcacggttcaacaggggcggtgaatgctacaagaccaaccttatcggccaccccgaatcacgttgagcacacactatccgtctctagcgacagcggcaacagcaccgcgtccactaaaacagataagaccgacgagcctgtacccggggcctcttccgctacggcagcactgagcccgcaggaaaagagggagctggaccggctccttagcggttttggtctggagcgggagaaacagggggccatgtaccatacccagcatctacggtcaaggcccgcaggagggagcgctgtgccttcaagcggccgtcatgtagttccagcacaggtgcatgtgaatgggggcgctctagcatcggaaagagagactgacatacttgacgacgagctgccaaaccaggacggtcacagtgccgggtctatgggcacactgtcctcactggatggagtgaccaatacatcagagggaggatacccggaggccttgtcccctttgactaacgggctagacaagtcttatccgatggagcccatggttaacggcggggggtatccttatgagagcgccagccgtgcaggcccggcccatgccggccacactgccccaatgcggcctagctactctgcacaggaggggctcgcggggtaccagcgcgaaggtccacaccccgcatggccccagccagtgaccacgtctcattatgcacatgatcctagcgggatgtttcggagccagagctttagcgaagctgaaccccaactgccaccagcccccgtgcgcggcgggagtagtcgcgaagctgtgcagagggggctgaactcctggcagcaacagcagcaacagcagcaacaaccacggccacccccaagacagcaggagcgggcccatcttgaaagtcttgtcgcttctcgaccttcccctcagccgctggccgaaactcccatcccttcactgcctgaattccctcgggcagccagccagcaagaaattgagcagtccattgaaaccctgaacatgctcatgcttgacctagagcctgcctccgctgccgcccccctgcataagtcccaaagtgtgcccggggcatggccaggggcaagtccgttgtccagccaacctctgtcaggaagtagccgccaaagtcaccccctcactcagagccgctcagggtacatcccctccggccactctctgggcactcccgaaccagctcctcgcgcgagcctggagtccgtgccccctgggaggagctactctccatacgactaccagccctgccttgccgggccaaaccaggacttccattccaagtcccctgcatcatcctctttacctgcctttctccctaccacgcacagtccgcctgggccgcagcaaccgccagcatcactccccggtctgaccgcccagcccctgctgtctcccaaagaggcaacttccgaccctagcagaactcccgaagaagaaccattgaacttagaagggctcgtggctcatagggtggcaggcgtgcaagctcgggagaagcagcctgcagaacctcccgcgcccttaagacggcgcgcagctagcgacggccagtacgagaaccaaagccctgaggccacgagccctcgaagtcctggcgtgagatcccccgtgcagtgtgtgagtcccgagctcgctttgaccatagctctcaatccaggtggacggcccaaggagcctcacctccacagctacaaggaggccttcgaggaaatggaaggcacttcaccgtcgtcacctccccccagcggagtgagatctcctccgggcctggcaaagacaccccttagcgccttgggcctgaagccccataatccagccgacatcttactgcatcctactggcgtcacaagacgaagaatccaacctgaagaagatgagggtaaggtggtggtcagactgagcgaagagccacgaagttacgtagaaagcgtcgctaggactgctgtcgccggacccagagcccaggatagcgagcctaagtcgttcagtgctcccgctacgcaggcttatggtcacgaaattccacttaggaatggaacccttggtggctcctttgtatccccatcgcccctgtccacttcctcaccaatcttaagcgcagactcaaccagtgtgggaagtttccctagcggggaatcaagcgaccagggcccgagaactcccactcagccattactggagagtggctttcgcagcggcagccttggccaacctagcccatccgcacagaggaactatcagtccagctcccccttgccaacagtgggatcatcatattctagtcccgattattcccttcagcacttctctagcagcccggaaagtcaggcacgggcccagttctctgtggctggtgtgcacacggtgccaggctcaccccaagcgcgccaccgcaccgtcgggacaaatacaccacccagccctgggttcggctggcgagccatcaaccctagtatggccgctccctcaagcccaagcctgagtcatcaccagatgatgggtcctccagggaccggtttccatggcagtactgtttctagcccccagtctagcgctgctacaactcccgggtctccttctctgtgccggcaccctgccggcgtataccaggtgtccggactgcataataaagtggcgactaccccaggttctccgagccttggaaggcacccgggcgcacaccaagggaacctagcctctggactgcactctaacgctatcgcctcccccggcagcccttcactcggccgccatctcggcggatctgggtcggttgtccccggatcaccatgcctggaccgacacgtggcttacgggggctactcaacccccgaagatcgacggcctaccttaagtcggcaatcctctgcctcagggtaccaagccccgagcactccttcatttcccgtttctcctgcctactacccagggctgtcttccccggccactagcccttccccagacagtgccgcgtttcgtcaaggatcaccaacccctgctcttcctgaaaaacgcagaatgtcagtaggagacagggccggctccctccctaactacgccacgatcaatggaaaggtctcctcccctgtcgcatccggaatgagttcacctagtggaggctccactgtctcattcagccatacacttcccgatttttctaagtacagcatgccggacaacagcccggagacaagagccaaggtaaagttcgtccaggacactagtaagtactggtacaaacccgagattagtagagagcaggccatcgccctgttaaaggaccaggagcctggagcttttattattcgggattctcattcatttcgaggggcctatggactggccatgaaggtttcatctccacctcctacaattatgcagcagaacaaaaagggcgacatgactcatgaactcgtcagacactttctcattgagactggtccacggggggtgaaactcaaaggctgtcccaacgaaccgaactttggatcacttagcgctctggtgtaccaacattcaatcatacccctcgctttaccgtgtaaactggtgattcctaaccgagatcctacggacgaatccaaagacagctcagggcctgccaatagcaccgctgacctactaaagcagggggccgcttgcaatgtgctgtttgtgaatagtgtggacatggaaagcctaaccggacctcaagctatatcgaaggctactagtgagaccttggccgctgatcctacaccagctgccaccatagtgcacttcaaggtgtcagcgcagggtatcacgctaaccgacaaccaacgcaaactgttctttcggcgtcattaccccttgaacacggttacattttgtgatctcgatcctcaggaacgtaaatggatgaagacagaaggaggggcacccgcgaaattgttcggatttgtggcaagaaaacagggctctacaaccgacaatgcatgtcatttatttgccgagttggaccctaaccagcccgcctccgccattgttaattttgtgtcaaaagtgatgctcaatgcaggccaaaaacgttag

SEQ ID NO: 208343 - DNA, 1251 bp, synthetic construct
  misc_feature 1..1251: note = Description of Artificial Sequence: Synthetic coding sequence
  source 1..1251: mol_type = other DNA
atggtgcccttccagcagcggaaggactgcgtgctggagggcagcacaagggtaacaccaagtgttcagccccacctccagccaattagaaacatgagtgtgagtcgcactatggaggattcttgcgagttagacctagtctacgttacagagagaattatcgctgttagcttccccagcacggcaaatgaagaaaacttcaggtcaaacctgcgggaagtggctcagatgctgaaatccaaacatggcgggaactacctactcttcaatctctccgagagaaggcctgatattactaagttgcacgcaaaggtactggagtttggctggcccgatttgcacactcccgcactggaaaaaatctgttcgatttgtaaggctatggatacttggctgaacgcggatccccacaacgtggtggtactgcataacaaagggaaccgggggcggattggcgtggtgattgccgcctatatgcactacagcaatatatccgctagcgcggatcaggcactcgatcgtttcgccatgaagagattctacgaggacaagatagtgccgatcggccagccaagccagaggcggtatgtacactatttcagcgggcttctgtctggttccatcaagatgaataataagccgctgtttctgcatcacgtgataatgcacggaatccccaacttcgaatctaagggcgggtgccggccgttccttaggatttatcaggctatgcagcccgtgtacacctccggaatctacaacatacccggagattctcaaacctccgtgtgcattaccatagagcctggtctgctgctgaagggtgacatcctgctcaaatgttatcataaaaaattccgttcccctgccagagacgtcatatttagggttcagttccacacttgtgcaattcatgatctcggggtagtattcggcaaggaggacttagatgatgccttcaaagacgacagattccctgagtatgggaaagtcgaattcgtcttcagttacggccctgagaagatccaaggcatggagcaccttgaaaacggaccgtccgtgagcgtcgactataacacaagcgaccccttgattaggtgggactcctatgataacttctcaggacatagagatgacggtatggaggacggcaacaaacagaataccaactcccagtcaattgggagcataagtgggggtctggaggatcaatatacctggccggacacgcactggccaagccagtcatag

SEQ ID NO: 208344 - DNA, 312 bp, synthetic construct
  misc_feature 1..312: note = Description of Artificial Sequence: Synthetic coding sequence
  source 1..312: mol_type = other DNA
atgagcgtgagccggaccatggaggacagctgcgagctggacctggtgtacgtcacagagcgcataatagccgtgtcttttccgtccacagcaaatgaggaaaattttaggtcaaacctgagggaagtggcccagatgctgaaaagtaaacacgggggcaactacctattgtttaacctgtcagagaggagaccagacataaccaaactccacgccaaagtgctcgagtttggctggccagatctgcatactccagctttggagaaaatttgttctatatgtaaggccatggatacttggctgaatgcgtag

SEQ ID NO: 208345 - DNA, 5145 bp, synthetic construct
  misc_feature 1..5145: note = Description of Artificial Sequence: Synthetic coding sequence
  source 1..5145: mol_type = other DNA
atgagcgtgagccggaccatggaggacagctgcgagctggacctggtctacgtgacagaacggataatcgctgtgagcttcccctcaacagccaatgaggagaactttagaagtaatctacgtgaagttgctcagatgttaaagtccaaacacggcggaaactatcttctgtttaatctgtccgagcggcggccggacattactaaacttcacgccaaagttctggagttcgggtggccagacctccatacacctgcgttggaaaagatatgttctatttgcaaggcaatggacacatggctgaatgctgatcctcacaacgtagtcgtgctccacaataaggggaacagagggcgcatcggggtggtcatcgcggcctacatgcactacagtaacatcagtgcatccgccgatcaagccttagaccgtttcgccatgaagaggttctacgaagacaaaattgtgccaatcggacaaccaagtcagagaaggtatgtgcactacttctccggcctactgtcgggcagtattaagatgaacaataaaccactcttcttacaccacgtaatcatgcatggtattccgaactttgagagcaagggaggatgcagaccattcctgcggatttatcaggcgatgcagccagtgtacaccagtggtatctataatattccgggagactcacaaacctctgtttgcataactattgagccgggcttgctcctgaagggggacatccttctcaagtgttaccataagaagtttcgcagtcctgccagagatgtgatcttccgggtgcagttccacacctgtgcaatccatgatctcggtgtggtgttcggcaaagaggatcttgacgacgccttcaaagacgacagattccctgaatacggtaaagtagaatttgtgttttcatatgggccagagaaaattcaggggatggaacacctcgagaacggcccttctgtttccgtggattacaataccagcgatcctctgatcagatgggacagctatgacaatttctctgggcacagggacgatgggatggaggaggttgtgggccacacacagggccctctcgatggaagcttatacgccaaggtcaagaaaaaggattccctccacggatccaccggcgctgtcaacgcgaccagacctactctctcggccacacccaatcatgtggagcacaccctgtccgtgagttccgatagtggcaactctactgccagtacaaagacagacaaaactgacgaaccagtgcccggcgccagctcagcaaccgccgctcttagcccacaggagaagcgcgagttagatcggctcctaagcgggtttgggcttgaaagggagaaacagggggccatgtaccatacacagcacctacggtcgcggcccgcaggagggtctgccgtcccaagttccggccggcatgtcgtgccagcccaggtacatgttaatggtggggctctcgcttctgagagagaaaccgacatcctggatgacgagctgcccaatcaggacggccattcggcaggtagtatgggcaccctctcttctttggatggggtcactaatacaagcgaaggcggctatcccgaggctttgtcacctctcactaatggcctggataagagctatcccatggagccgatggttaacgggggggggtacccctacgagtcggcgagcagagctggccctgcccatgcgggtcacactgctcccatgagaccttcatacagtgcccaagaagggctcgcaggttatcagcgtgaaggcccacatccagcctggccccagccagtcaccacaagccactacgcccacgacccgtccggaatgtttagatcccagagtttctctgaggctgagccacagctccctcccgcaccggttagaggaggtagcagccgagaggcagtccagcgtggattgaacagttggcagcaacagcagcagcagcaacagcaaccaaggccacctcctcgacaacaggaaagggctcaccttgagtcccttgtggccagtcggccatctcctcagccgttggccgaaactccaatccccagcttgccagaattcccccgggctgcaagccaacaagaaattgagcagagcattgaaacactgaacatgctgatgcttgatttggagcctgctagtgctgctgctcccctgcataagagccagagcgtgcccggagcttggcccggagcctcgccgttaagcagtcagccactgagtgggagctccaggcagagccatccacttacccagtccaggtctggatacattccctccgggcacagtctgggcacgcctgaaccagccccacgcgctagtctcgagtccgttcctcccggaaggtcctatagtccgtatgattaccaaccttgtctcgcaggaccaaatcaggatttccattcaaagagcccagctagttcaagcctcccggccttcctaccgaccactcactctccacccggaccacagcagccccccgcatccctgcctggcctgactgcccagcctttgctgtcaccaaaggaggccacctctgacccgtctcggacgccagaggaggagcctctgaacctagaggggttagtcgcacatcgggtggctggagtccaggcccgggaaaagcagccagccgagccccctgcccccctgaggaggcgggcagcgtctgacggtcagtatgagaaccagtccccagaggccacgagccctaggtctcccggagtgaggtcaccggtgcagtgcgtgtctcctgaactggctctgacaatagcgctgaacccaggggggaggccaaaagaaccacatctgcacagctataaggaagcattcgaggagatggaaggaacaagtccctcctctcctccacctagtggcgtgcgcagccctcctggactagctaaaactccgctgtcagccctgggacttaaaccacacaaccccgcggacatcctcttgcaccctacgggcgagccccgatcatacgttgagtctgttgcccgaacggcggtagcagggccccgcgcccaggattctgagccaaaaagtttttccgctcctgctacacaggcatatggacatgaaataccactacggaacggcacactgggaggttcctttgtcagcccctcccctctcagtacttcctcacccattcttagcgcggattcaacctctgtgggatcattccccagcggcgagtcttctgaccagggccccagaacaccaacccaacctcttttggaatcgggattccgctctggttcactcggccagccaagcccttccgcacagagaaattatcaatcctcttcgcctcttcctacagtgggtagttcctatagttcaccagattacagtttgcagcatttcagctctagccccgagtcacaggcgagagcccagttctctgtggcaggcgtgcacaccgttcctggcagcccccaggcgcggcacagaaccgtgggtaccaatacaccacccagccccggatttggttggcgagcaattaatcccagtatggccgctccatcctccccaagtctgtcccaccaccagatgatgggcccgccggggacaggcttccacggctctactgtcagctcaccccagtcttccgcggcgactacaccaggttctcccagtctttgccggcaccccgcaggagtctatcaggtgtctggcctgcataataaggtggccacaacccctggaagtccttcactgggacggcatccgggggcgcaccagggaaacctagcaagcggcctccactccaatgctatagcctcaccaggtagccctagtcttggaagacatctgggaggttctggatcagtagtgccaggcagcccatgtctcgaccggcacgtcgcgtacgggggctacagtaccccggaggacaggcggccgacactctcccggcagagctccgccagcgggtaccaggctccgagtaccccttcatttcctgtgtctcctgcttattaccctggcttatctagtcccgccacttcaccctccccggattcggctgccttcagacagggcagtccaacccctgctctccctgagaaaaggagaatgagtgtaggtgatagggccgggagcctgcccaactacgccactattaatggaaaggtgagttcacccgttgcgagtggtatgtccagcccgagcggaggctctactgtgtcattctcacataccctcccagactttagcaagtactccatgcctgataactccccggaaactcgtgcgaaagtcaaatttgttcaagatacgagcaaatactggtacaagcctgagattagtcgagaacaggctatagccctgctgaaagatcaagaacctggcgcctttatcattcgagacagtcactcgtttcggggagcatacggtctggccatgaaggttagttcacctccccccacaattatgcagcagaacaaaaaaggggacatgactcatgagctagtgagacatttcctgatcgagactggtcccagaggggtaaaactgaagggatgccctaatgaacccaattttggctcactgtctgccttggtgtaccaacactccatcattcctctggctctcccttgcaagctggtcatacccaatcgggatcccaccgacgaaagcaaggatagttccgggccagccaattcaactgctgacctcctcaaacagggagccgcctgcaacgttcttttcgttaactcagtcgatatggaatcgttgaccgggcctcaggcaatcagcaaagctacgtccgagacactggcagcggatcccacgcctgctgctacaatcgtacactttaaggtgagtgctcaaggcatcacacttacagacaatcagaggaaactgttcttccgccggcactatccacttaatactgttactttctgcgacttagacccgcaggaacgaaagtggatgaaaaccgagggtggtgcccccgcgaaactcttcggattcgtcgcgagaaaacaaggatcgaccacagataacgcttgccacctgttcgctgagctggatccaaaccaacccgccagcgccattgtgaacttcgtctctaaggttatgttaaatgcggggcaaaaaaggtag

SEQ ID NO: 208346 - DNA, 186 bp, synthetic construct
  misc_feature 1..186: note = Description of Artificial Sequence: Synthetic coding sequence
  source 1..186: mol_type = other DNA
atgagcgtgagccggaccatggaggacagctgcgagctggacctggtttacgtaacggaaagaatcatagccgttagctttcctagtactgcaaacgaggaaaacttccggtccaacttgcgcgaagtggcacagatgcttaaaagcaaacacggaggcaactatctcttattcaacctttcctag

SEQ ID NO: 208347 - DNA, 75 bp, synthetic construct
  misc_feature 1..75: note = Description of Artificial Sequence: Synthetic coding sequence
  source 1..75: mol_type = other DNA
atgagcgtgagccggaccatggaggacagctgcgagctggacctggtttatgtgactgagcggatcattgcgtag

SEQ ID NO: 208348 - DNA, 4338 bp, synthetic construct
  misc_feature 1..4338: note = Description of Artificial Sequence: Synthetic coding sequence
  source 1..4338: mol_type = other DNA
atggaggagggccacggcctggacctgacctacatcaccgagcggatcattgccgtttctttccctgccggctgttctgaagaatcatacctgcacaatctacaggaggtgacccgaatgctaaaaagcaagcacggagataactatctcgtcctgaatctatccgagaagcggtacgacctaactaagctcaatcctaagatcatggatgtgggatggcccgagctccatgctccgccgctggacaagatgtgcacaatttgtaaagctcaggagtcctggttgaattcaaatctacagcacgtggtggtgattcactgtagaggaggcaagggacggatcggtgtcgtaatttcaagttatatgcacttcaccaacgtatctgcctctgccgatcaggccttagacagattcgctatgaagaaattttatgacgataaggttagcgccctgatgcaacccagtcaaaagaggtacgtccagttcctcagcggattgctctcagggtcagtgaaaatgaacgctagccccctgttcctgcacttcgtaatcttgcacgggacccctaacttcgacacaggtggcgtgtgccgaccattcctgaaactctaccaagcgatgcagcctgtgtacactagcggtatctataacgtgggacccgaaaatccttctcgaatctgtatcgtcatcgagcctgctcagttgctcaaaggggacgtcatggttaaatgctatcacaagaagtacaggtccgcaacaagggatgtgatcttccgcctgcaatttcacaccggggctgttcaaggctatgggttagtgtttggtaaagaggacctggacaacgccagtaaggacgataggttccctgattatgggaaagtcgaattagtgttttcggctaccccagagaagattcaggggtccgagcacctctataatgatcatggagttatcgtggactacaacaccacagatcccctgataaggtgggatagctatgaaaatctgtcagccgatggggaggtcttgcatacccaggggccggttgatgggtccctgtatgccaaagtccggaaaaagagttcatctgaccctggaatcccgggcggaccccaagcaatccctgctaccaattctccggaccactcggaccacacactctccgtaagctcggattcgggtcatagcaccgcatcggcgcgaacagacaaaaccgaggagaggcttgcccctggaaccagacgcgggttgtctgcccaggaaaaagccgagctggaccagctcctatcggggtttgggcttgaggaccctggctcaagccttaaggagatgacagatgcccgctctaaatattcagggactcgacacgtagtacccgcgcaggtccacgtcaacggcgacgctgcactcaaggaccgcgagaccgatatcttggacgacgaaatgccacaccacgacctgcattctgtagactcacttggaaccttatcatcttcagaggggccgcagtctgcccacctggggcccttcacctgccacaagagctctcagaatagtctgctatcagatggcttcggaagtaacgtgggtgaggacccacagggaacacttgtgcccgacctcggtttaggcatggacggtccttatgaaagagagagaacatttggctctcgcgaaccaaaacagccccagccactgcttaggaaaccaagcgtgagtgctcagatgcaggcatacggacagtcatcctattctacgcaaacatgggtgaggcaacagcaaatggtcgtggcccaccagtatagcttcgcacccgatggcgaggcccgactcgtgtctcgctgtcccgcagataatcctggacttgtgcaggcccagccaagagtaccactcacgccaacgagaggcactagcagcagggtcgcggtgcagcggggcgtgggttcaggcccgcacccccccgacacccagcaacccagccccagcaaggcatttaaaccccgttttccaggcgaccaggtggtaaacggagccgggcctgaactctctacaggaccgtcccctgggtctccgacgctcgacatcgaccaatcgatcgaacaactgaataggttgatccttgaactggacccaacctttgaaccaatcccaacacacatgaatgccctgggatctcaggctaacggttcagtctctcctgactccgtcggtggggggcttcgggcgtcttcccggctcccagacactggcgagggacccagtagggctacagggaggcagggcagttctgccgagcagccgctggggggcagactcagaaagctgtctcttggacagtatgataacgacgcaggtggccaactgcctttctcaaaatgcgcctggggaaaagctggtgtggattatgcccctaaccttccccccttcccttctcctgccgacgtgaaagagacgatgacccctggatatccacaggatctcgatatcatagacgggaggattttgagctcaaaggagtcaatgtgctccaccccagcctttcccgtttcgcctgagactccatacgttaaaaccgctctgcggcatccccctttcagtcccccggagccgcccctgagctcccctgcttcccagcacaagggaggacgagagcccaggtcttgtccagagactctgacgcacgccgtggggatgagcgagtccccaattggacctaaatctacaatgctgagagccgatgcctctagtaccccttcgtttcagcaggcctttgcctcctcatgcaccatcagctccaatgggcccggacaacggagagagagttcctcgtcagccgaaaggcagtgggtggaatctagccctaaaccaatggttagcttactcggaagcgggcgacccactgggtcaccattgagcgcagagttttccggaacccgcaaagacagcccggtgctgtcatgtttcccccccagtgaattgcaagctcccttccactcccatgagctgagtcttgcagagcccccagattccctcgctccaccttctagccaggccttcctgggctttggcactgcgccagtgggaagcggtctgcctcctgaggaagatctgggagcactgctagccaactcccatggcgcctcacccactccatctattcctcttacggctactggcgctgcagacaacggttttttgtctcataacttcttgacagtggctcccggtcactcatcacaccattccccaggattgcaggggcaaggcgtaaccctacccggccagcctcctctgcccgaaaaaaaacgcgcatcagagggggacagatccctgggtagcgtgtccccttcttccagcggattcagcagccctcattctggttccacaatctccataccctttccgaatgtgctccctgacttctctaaggccagcgaagctgcaagccccctccccgacagtcccggtgacaagctggtaattgttaagtttgtgcaggacaccagcaaattttggtataaggcagatatctctcgggaacaggccattgctatgctcaaagataaagagccaggctcatttatagtaagggattcccacagtttcagaggggcttatggcctggccatgaaagttgccacccctcctcctagcgtgctgcagctgaataaaaaggccggcgaccttgcgaacgagctggtacggcactttttgatcgaatgcacaccaaaaggcgtacggcttaagggttgctccaacgagccttattttggaagcctcacagccctggtatgtcaacactctattactcctctcgccttaccctgcaaacttcttattcccgaacgtgacccccttgaagagattgccgagagtagcccccagaccgctgccaactccgccgcagaattgcttaaacaaggcgctgcatgtaacgtctggtacctcaactccgtcgaaatggagtctttgaccggccatcaagccatacagaaggcactcagtataacattggtgcaggaaccacctcctgtctctactgtggtccatttcaaggtatccgcacaaggcattactttgaccgacaatcagcgcaaactattctttcgaagacattatcctgtgaacagtgtcatcttctgtgctctcgacccacaggatagaaagtggatcaaagacggaccctcaagcaaggtgtttggatttgtggccaggaaacagggcagtgcaaccgacaacgtgtgtcatctattcgcagaacacgaccctgaacagcctgcgtcagccatagtgaattttgtaagcaaagtgatgattggttcacctaagaaggtatag

SEQ ID NO: 208349 - DNA, 3618 bp, synthetic construct
  misc_feature 1..3618: note = Description of Artificial Sequence: Synthetic coding sequence
  source 1..3618: mol_type = other DNA
atggaggagggccacggcctggacctgacctacatcaccgagcggatcatagcagtttcttttcccgcaggttgctcggaggaatcctacttacataatctgcaggaagttactcggatgcttaaatctaagcatggagataactatttggtgttaaacctcagcgagaaacgttacgacctgacaaaactgaaccccaaaattatggatgtgggttggcctgagctgcatgcacccccgctagacaaaatgtgcaccatctgtaaggcacaggaatcctggctcaactctaatctgcaacatgtggtggttatccactgcagaggtggtaaaggccggataggcgtggtcattagcagctacatgcacttcaccaacgtatctgcctctgcggaccaggctttagataggttcgcaatgaagaagttctacgatgataaagttagtgccctgatgcagcctagccagaaaaggtatgtgcaatttctcagtggactgctctctggcagcgtcaaaatgaacgcgtcaccgctgttccttcattttgtgattctgcacggcacaccaaacttcgacactggaggagtatgccggccattcctgaagttgtatcaggctatgcagcctgtctacacatctgggatttataacgtggggcctgagaacccctctcggatctgtatcgtcattgagcccgcccagctgttaaaaggcgacgttatgatgccacatcacgatttgcatagcgtagatagcctgggtacacttagcagtagcgagggcccacagtctgcacaccttggcccatttacttgccataagagcagccagaattctctactctccgatggtttcgggagtaatgtgggcgaagatccccagggaactctcgttccagacctgggcctggggatggacggtccctatgaaagggaacgaacatttggtagccgggaacctaagcagccccagccactgctgcggaagccgagcgtgtctgcgcagatgcaagcctacggacagagctcttatagcacccagacctgggtcaggcaacagcagatggtcgtcgctcaccagtacagtttcgcccctgacggcgaagcaaggttggtttctcgctgtcccgctgacaacccgggtctcgtccaggcccagccccgcgtgccactcacgcccactcgggggacttcatcccgggttgctgtgcagagaggtgtcggtagcggcccacatccaccggatacacagcagcctagcccaagcaaagcattcaagccgaggttccctggcgaccaggtggtgaacggggccggaccggaactgagtactggcccaagtcccggctcacccaccctggacattgaccagtccattgagcagttgaataggttgattctcgaactggaccctacattcgagccgatcccaactcatatgaatgcactaggcagccaggcaaacggatcagtgtcccccgactcagtgggtggtggcctccgcgcctcctcccgtctaccggatacaggggagggaccgtcacgcgccaccggcagacagggatcaagcgcagagcagcctctgggcggacgtctccgcaagctgtctttgggccaatacgataatgacgccgggggacagctgcctttttcgaagtgcgcgtgggggaaagcaggcgttgattacgcccctaacctgcctccctttcctagccccgccgatgtcaaagaaacaatgacacccggctacccccaggacctcgatataatcgacggtcgcatcttgagttcaaaggagagtatgtgttctactcccgctttcccagtctcccctgaaaccccatacgtcaaaaccgccctccgtcaccctcccttcagcccccccgagccccccctgagctctcctgcatcacagcacaaaggtggccgggagccccgatcttgcccagaaaccctcacccatgctgtcggcatgtccgagtcccccatcggtccaaagtctactatgctccgtgcggacgcgtcgtccaccccatccttccaacaggcctttgcctccagctgcactatttcatctaacggccctgggcagagacgggaatccagctcatcggctgaaagacagtgggtcgagtctagcccaaagcctatggtatctctgttgggctccgggcgccccaccggaagtcccctgtctgctgaattttccggtaccaggaaggactctccggttctgtcatgcttccccccatctgagcttcaggcaccctttcactcacatgagctttccctggctgagcccccagactctctggctccgcccagcagccaggccttcctaggttttggcacagcaccagtggggagcggactcccacctgaggaggacctgggcgctctcctggctaacagtcacggcgcttcgccaacgccttccatcccactgacggccacgggggccgccgacaacggttttttgtctcacaattttctcacggtggcgcctgggcattctagccaccacagtcccggactgcagggacagggtgttaccctaccggggcagccccccctgcctgagaagaaaagggcctccgaaggggacaggagcctcgggtctgtctctccgtcatccagcggattttcaagccctcactccggcagcacaatctccattccattccctaacgtgctgccagatttctccaaggcctctgaagctgcttctcccctgccggattcccccggggataaactcgtcatagtcaaattcgtgcaagacacatcaaaattttggtacaaggccgatatcagccgcgagcaagccatcgccatgctaaaggataaggagccaggaagttttatcgtcagggactcacactcctttcgtggcgcctatggattggcaatgaaggttgccacaccaccgcccagtgtgctacaactgaataagaaggccggcgatctcgctaacgaactcgttagacacttcctaatagaatgtacccccaagggtgtcaggctcaagggctgcagtaacgaaccttatttcgggtcactcacagctctggtctgtcagcatagcataacgccactggccttaccgtgtaagctgctgatccccgaaagggatcccctggaggaaatcgccgaaagtagcccgcagaccgcagctaactccgctgccgagctcctgaaacagggcgccgcctgtaacgtttggtacttaaactccgttgaaatggagtcgttgaccggacaccaggccattcaaaaagccttgtcaattaccctcgtccaggagcctccccccgtgtctacggtcgttcattttaaggtgtcagcccaggggatcactctcactgacaatcagcggaagcttttctttaggcggcactacccagtgaattccgtcatcttctgtgccctcgacccccaagaccgaaagtggatcaaggacggaccatctagtaaggtctttgggttcgtggctcgaaaacaggggagcgctactgataatgtgtgccacctgttcgcagaacatgacccagaacaaccagcgagcgccatcgtgaacttcgtctcaaaagtcatgataggctcgccgaaaaaggtgtag

SEQ ID NO: 208350 - DNA, 4338 bp, synthetic construct
  misc_feature 1..4338: note = Description of Artificial Sequence: Synthetic coding sequence
  source 1..4338: mol_type = other DNA
atggaggagggccacggcctggacctgacctacatcaccgagcggatcattgcggtgtcattccccgcgggatgcagcgaggagagctacctgcacaatttgcaggaagtcacccggatgttgaaaagcaagcacggcgataactacctagtgttaaacctttccgaaaagaggtacgaccttaccaagctcaaccccaagattatggacgtcggctggcctgaattgcatgcccccccactggacaagatgtgcacaatttgcaaagctcaggaaagctggctgaattctaatctgcaacacgtggtcgtcatacactgtagaggcgggaaaggacggatcggcgtcgtgatcagctcctacatgcacttcacgaacgtaagcgcgagcgccgaccaggctctagatcggttcgctatgaaaaaattctacgatgacaaggtgagcgctctgatgcaacccagtcagaagcggtatgtgcagttcttatctgggctgctcagcggttccgtcaagatgaacgcctcacctttgttcctgcattttgtgattcttcacggcaccccgaacttcgatacaggcggcgtctgtcgacccttcctcaagttatatcaggctatgcagcccgtttacacttctggaatttataatgtgggcccagaaaaccccagccgcatttgcattgtaatcgaacctgcccagttactgaagggtgacgtgatggtcaagtgttaccataagaaatataggtccgccacccgggatgttatctttaggttgcagtttcataccggtgctgtccagggctatggtctggtgttcggcaaagaagacctggacaatgccagcaaagacgacagatttcctgattacggcaaggtcgagctcgtgttttcagctacacccgagaaaatccagggctccgagcacctttataatgaccacggagtcattgtcgattacaacacaaccgatcccctgattcgatgggacagctatgaaaacttaagtgctgacggtgaggttctgcatactcagggccctgtcgacggatcactttatgcaaaggtaaggaaaaaaagctcttctgaccctggtataccaggcggcccacaggctatcccagcgactaactccccagaccactctgatcacaccctgtcggtttccagcgattcaggacacagtactgccagcgcacgaaccgataagaccgaggaaaggctggcgccaggaacaagaagaggcctgtcggctcaggagaaagctgaactggaccagttgctttctggcttcggactggaagatcctggcagcagtctgaaggaaatgactgatgcccggagtaagtactccggcacacggcacgtcgttcctgctcaggtccatgtgaacggagacgcagccttaaaggaccgagaaactgacattcttgatgacgagatgcctcaccatgatctgcattccgttgactctttggggacactgtcaagcagcgagggcccacagtccgctcacttggggccgttcacctgccacaagagtagccagaattctctcttgagcgacggtttcgggagcaacgtcggggaagatccccagggcactctggtgcctgatttagggcttgggatggatgggccttatgagcgagaacgcactttcggaagccgggagccaaagcagccccagccactcctaagaaaaccgtccgtcagcgcacagatgcaggcctacggacagtccagctattccactcagacctgggtccgacagcagcaaatggtagtggcacatcagtactccttcgcacctgacggtgaagcccgcctggtgtcccggtgcccagccgacaaccccggtctggtgcaggcgcagccccgcgtccctttgacacccaccagggggacatcctcaagggttgctgtgcagcggggagttgggtccggtccccaccctccagatacacagcaaccatcccctagcaaggccttcaaacctagattccctggagatcaggtggtgaatggcgcagggccggagctctctacaggccccagcccggggtcccctacgctggacatcgaccagtcgatcgagcagctcaaccgactgatcttggaactcgacccaacttttgaacccatcccaacccacatgaatgctttaggctcacaggcaaacggcagcgtgtcccctgattcagttggtggcggactcagagcaagttcacgccttcccgacactggtgagggcccttcccgcgccacagggagacagggaagctctgccgaacagcccctgggtggcagactccgcaagctaagtcttggccagtatgacaacgatgccggaggccaattgcccttctccaaatgtgcctgggggaaggcaggagtcgactatgctcccaatctgccaccatttccatctcctgccgatgtcaaggagactatgactccaggttacccccaggacctggatatcattgatggtaggatcctttccagcaaagaatcaatgtgtagtacaccggctttccctgtgtcacccgagaccccctacgtgaagacggcgcttaggcatcccccatttagtcctcctgaaccaccactgtcctcacccgcctcccagcacaagggcggtagagagcccagaagctgccccgaaacactgacgcacgctgtcggtatgtctgaatcccccatcggtcctaagtctacgatgctccgagctgacgcttcctctactccaagcttccagcaagcgttcgcttccagttgtacaatctcttccaatggccccggccagcggagagagtcttccagctccgccgaacgtcagtgggtggagtctagtccaaaacccatggtatctttgttaggttcaggcagaccaacaggatctccgctgtctgctgagttttccggcacacggaaggattcccctgttctcagttgcttccccccctcagagttgcaggcaccgtttcatagccacgaactgtccctggcagagccaccagatagtctcgctcccccttcctcgcaagcttttctgggattcggaaccgcccccgtcggaagcgggctcccccccgaggaggatttgggcgctttgttggcaaattcccacggcgcttcccctaccccatcaattccactaaccgcaaccggagccgccgataatggttttctttcccataactttttgaccgtggctccagggcactcttcccaccactctccgggtctccagggtcagggcgtcacgttgcccggacagccaccactgcctgagaagaagagggcttccgaaggtgaccgtagcttgggtagcgtcagccccagcagtagcggattctcaagtccccacagcggctcaacaatatcaatcccattcccaaatgtgctgcccgacttcagcaaggcgtctgaggctgcttctccactgcctgattctccaggtgacaagctagtcatagtgaagttcgtccaggacacgtccaaattctggtataaggcagatatctctcgagagcaggctattgccatgctgaaagacaaagagcctgggtcctttattgttagagacagtcacagctttcggggagcctatgggctggcgatgaaggtggcaacaccacccccgagcgtccttcagcttaacaaaaaggcaggcgacctggcaaatgagctagtacgccacttcctcatcgagtgtaccccaaagggcgtgcggctcaaaggatgctctaatgaaccctacttcggatcactaacagctttagtttgtcagcactctataacccctttggcgttgccttgcaaactgcttataccggaacgcgacccactggaagagattgcagaatcatcaccacagactgctgcaaatagcgccgctgagttgctgaagcagggagccgcctgcaatgtctggtacttgaactctgttgaaatggagtctttgacaggacatcaggcaattcagaaggcactgtccatcaccctagtgcaggaaccaccaccagtcagtacggtggtgcactttaaggtgtctgcacagggcattacactgactgacaaccaacggaagctgttttttcggcggcattaccctgtaaacagtgtgattttctgcgccctcgatcctcaggaccggaagtggataaaggacggtccaagcagcaaagtgtttggctttgtcgcaagaaagcagggatcggccaccgacaacgtgtgccacctgttcgctgaacacgatccagagcagcctgcctcagctatagtgaatttcgtctccaaagttatgatcggctctcccaagaaggtatag

SEQ ID NO: 208351 - DNA, 327 bp, synthetic construct
  misc_feature 1..327: note = Description of Artificial Sequence: Synthetic coding sequence
  source 1..327: mol_type = other DNA
atggaggagggccacggcctggacctgacctacatcaccgagcggatcattgctgtgtctttccccgctggctgcagcgaagaaagctatctgcacaatctgcaggaggtgacacgtatgcttaaatctaaacacggggacaattatctcgtgcttaatctgtccgagaagcgttatgatttgacaaagctaaaccctaagatcatggatgtgggatggcctgagctgcacgcccccccattagacaagatgtgtaccatatgcaaggcgcaggaatcctggctgaatagcaacttgcagcacgtcgttgtgattcattgccggtag

SEQ ID NO: 208352 - DNA, 417 bp, synthetic construct
  misc_feature 1..417: note = Description of Artificial Sequence: Synthetic coding sequence
  source 1..417: mol_type = other DNA
atggaggagggccacggcctggacctgacctacatcaccgagcggataatagctgtgtctttcccagccggctgtagtgaagagtcatacctgcataatctgcaggaggtaacgcgcatgctcaaaagcaagcacggagacaattatctggtgcttaatctgtcggagaagcgctacgatttgacaaaactgaaccccaagattatggatgtcgggtggcctgagctacacgctccgccactcgacaaaatgtgtaccatttgtaaagcccaggagtcatggttgaactcaaatctccaacatgttgttgtaatccactgtcggggaggaaaaggccggattggcgtcgtgatatcctcttacatgcattttaccaatgtctctgctagcgccgaccaagctctggacaggttttag

SEQ ID NO: 208353 - DNA, 753 bp, synthetic construct
  misc_feature 1..753: note = Description of Artificial Sequence: Synthetic coding sequence
  source 1..753: mol_type = other DNA
atggaggagggccacggcctggacctgacctacatcaccgagcggataattgcagtgagcttcccggccgggtgctctgaggagtcctacctgcacaaccttcaagaagtcacgagaatgttgaaatcaaaacatggcgacaactatttggtgcttaatctgtcagagaaacgctacgatctcaccaagctgaaccctaaaataatggacgtcggctggcctgaactgcatgccccccccctcgataagatgtgcacaatatgcaaggcacaggagtcatggctcaacagtaatctgcagcacgtggtggtgatccactgtagaggcggcaaaggccgcatcggcgtggtcatatcatcctacatgcactttactaatgtgtcagcctctgcagaccaagcgctggaccggttcgctatgaaaaaattctatgacgataaggtctcagcacttatgcagcccagtcaaaaacggtacgtacagttcttaagcggactactgtccgggagtgtgaagatgaacgcctcacccctttttctccatttcgtgatactgcacggtacccctaacttcgatacagggggagtgtgccggccctttctcaaactgtaccaggctatgcagccagtctacacatcagggatctacaacgttggcccagaaaatccaagccggatctgcattgtaattgagcccgcccaactgttgaaaggcgacgtgatggtcatgaattataatattgccaacatttag

SEQ ID NO: 208354 - DNA, 753 bp, synthetic construct
  misc_feature 1..753: note = Description of Artificial Sequence: Synthetic coding sequence
  source 1..753: mol_type = other DNA
atggaggagggccacggcctggacctgacctacatcaccgagcggatcatcgctgtgagttttcccgcagggtgctccgaggaaagttatctgcataacctgcaagaagtgacaagaatgttgaagtctaagcacggggacaattacttggtgctgaatctgagcgagaagagatacgacttaactaagctgaaccccaagatcatggatgtgggctggcccgaactccacgcccctcccctggataaaatgtgcaccatttgtaaagcacaggagtcttggctgaatagtaacctccaacacgtggtggtgatacactgtagagggggcaaaggccgtattggagttgtcatatctagctacatgcattttaccaacgtttcagcgagtgccgaccaggcgcttgataggtttgccatgaagaagttttatgatgacaaggttagcgcccttatgcagcccagccagaaacggtacgtgcagttcttgagcgggctgttatcgggctcagttaagatgaacgctagtcctctgttccttcacttcgtgatcctacatggtacaccaaacttcgacacagggggtgtctgccggccttttctcaaactgtaccaggcgatgcagcccgtctatacgtccgggatttacaatgtgggacctgagaacccatctagaatttgcatagttatcgagcccgcccagctcctcaagggagatgtcatggtgatgaattataatattgccaacatctag

SEQ ID NO: 208355 - DNA, 3816 bp, synthetic construct
  misc_feature 1..3816: note = Description of Artificial Sequence: Synthetic coding sequence
  source 1..3816: mol_type = other DNA
agccaggccctgaacgagcggatgaactggctgtgccggaaccaggatccaaatccaccaccgcaacccgaagagctgactagctcgctacacgctttcaaaaacaaggcctttaagaaatcaaaggtatgcggcgtttgtaagcaaatcatagacggccagggaattagttgtagagcgtgtaagtatagctgtcacaaaaagtgtgaggctaaagtcgtcattccatgcggagttcaggtgagactggagcaagcaccgggatcaagtaccctgagcagttctttgtgccgggacaaacccctgcgcccagttatcttgagtcccaccatggaggaggggcacggtctggatctcacctatataacggaacgaataatcgcagtgtccttccccgccggctgctctgaagagagctacctacacaatctgcaagaggtcacccggatgctgaaatcaaagcatggcgacaattacctggtactgaacctgtcagaaaagcggtacgacctcactaagttaaatcctaaaattatggacgtgggatggccggagcttcacgcccccccgttagacaaaatgtgtaccatctgtaaggctcaggaaagctggctgaacagtaatctgcaacacgtggttgtaatacactgtcgcggaggtaaaggcagaatcggcgtggtgatttcttcttatatgcactttactaatgtctctgcgtctgccgaccaggcattggaccgtttcgccatgaagaagttctacgatgacaaagtgagcgctttaatgcagccttctcaaaagaggtacgttcaattcctctccggactgctgagcggaagcgtgaagatgaacgcaagcccattgtttctgcactttgtcatcctgcatggcacacccaatttcgacacgggcggcgtctgtcggccatttttgaaattataccaggcaatgcaacctgtgtacacctcaggaatctataacgtcggccctgaaaatccctccaggatctgtatagttatagagccagctcagttacttaagggggacgtaatggtcaaatgctatcataagaaataccgcagcgcgacaagagatgtgatatttagactgcagtttcatacgggcgctgtacagggttatggtctcgtattcggcaaggaggacctggacaacgcaagcaaggatgatcgctttcccgattacggtaaggtggaacttgtgttcagtgccactccggagaaaattcaggggagcgagcacctgtacaacgaccatggtgtgatcgtggattataacacaacggacccactgatcaggtgggacagctatgaaaacttgagcgcggatggtgaggtgcttcatacacagggacccgttgacgggagcctatacgcaaaagtgagaaagaagtccagcagtgatcctggcattcccggtggcccccaggccattcctgcaactaactctcctgatcactccgatcacacattaagtgtcagcagcgatagcggccactccacagcctctgctagaactgacaagacggaggaacgcttagccccaggcacaagacggggcctgtccgcgcaggagaaggctgaactcgaccagctgttgtctgggttcggcctggaggaccctgggagcagcctcaaagagatgacagatgctagaagtaagtattcagggacacgacatgtagttccggcacaggtgcacgtgaacggagacgcggctttgaaggacagagaaactgacatactggatgacgaaatgccccatcacgatcttcactccgtcgacagcctgggcaccctatcgtcctcagaggggccccagtccgcccacctcggtccattcacctgccacaaatcctctcagaactctctgctgagcgacggcttcggaagcaatgttggcgaggatccacaggggaccttggtcccagatctgggtctaggtatggatggcccctacgaacgcgagcgcactttcggttccagggaacccaaacaacctcagcctcttctgcgaaagccgtctgtcagcgcgcagatgcaggcgtatggccagtctagctactcgacccagacatgggtgaggcagcagcagatggtagttgcacaccagtactctttcgcccctgatggtgaggcgagactggtgtcaagatgtccggccgataatcctgggcttgtgcaggcccaacctagggtgcccttgaccccaacacgcggtacgagttctcgcgtcgcagtgcaaaggggagtcggcagcggacctcacccgcctgacactcagcagccatcgcccagcaaggccttcaaaccccggtttcccggggaccaagtagtgaacggggccggacccgagcttagtacaggtcctagccccgggtctccgaccctcgacatcgaccagtctatcgagcagctcaacagactaatcctggaactcgatcccacttttgagccgatccccacacatatgaatgccctgggatcccaggctaatggatcggtgtcaccagattccgtcggtgggggactgagggcttcctcgcggttacccgatacaggggagggtccttcacgagcaacaggccgccaggggtcctccgccgaacagccactgggaggccgcctccggaagctgtcactcggacagtatgataatgacgcgggtgggcagctgccattttccaagtgcgcctggggcaaagcaggggtggactacgcccccaacttgccaccatttccctctccggcggatgtgaaggagaccatgacaccaggctatccacaggatctggatataatcgatggaaggattttatccagcaaagagtccatgtgctccacgcccgctttcccggtgagccccgaaactccgtacgtgaagactgctctcaggcatccgcccttcagcccccccgagcctcctctctcttcccccgcttcccagcataaagggggtagggagccgcgctcatgtcccgagaccctgacacatgctgtggggatgtcagaaagcccgattggaccgaagtcaacaatgctccgtgccgacgccagctctactccgagctttcaacaggccttcgccagctcttgcaccatttcaagcaacgggcccggtcagagacgggagagttcctctagtgccgagcggcagtgggttgaaagtagccctaaacctatggtatctctgttaggttccggtagaccaacaggttctcctctgtccgcggagttcagcggaacaagaaaagattctcccgtactgagttgtttcccacccagcgaactacaggcccccttccactctcacgagttatccctcgcggaacctcctgacagcctcgcacctcctagctctcaggccttcttgggcttcggtaccgcccccgtgggctccgggctgcctccagaggaagatttgggtgccctgctagctaacagtcacggtgcttcaccaaccccgtccatccccctaacagctactggtgccgccgacaacggttttctgtcacacaacttcctcaccgtggctccaggtcactcctctcaccatagtcctggcttgcaaggccaaggagtgactcttcctggtcagcctccattaccagaaaagaagcgcgcctcagagggagacaggtccctaggctccgtgtctccttccagcagcggattttccagtccgcactcgggctcaaccatctctatcccatttccaaacgtgctaccggatttttccaaggcctccgaggctcctacattctaccaaacatcaaagccggacatccctggaccgtag

SEQ ID NO: 208356 - DNA, 2760 bp, synthetic construct
  misc_feature 1..2760: note = Description of Artificial Sequence: Synthetic coding sequence
  source 1..2760: mol_type = other DNA
atggacggcccctacgagcgggagcggaccttcggcagccgggagccgaaacaacctcagccattactacgtaagcctagcgtatccgcgcagatgcaggcatacggacagagtagctatagcacccaaacttgggtgcgccagcagcagatggtcgtagcacaccagtactcattcgctcccgacggggaggctaggttggtgagtagatgtccagccgataaccccggtctggtgcaggcacagccaagagtccccttgacccctacgaggggcacctcaagcagggtggccgttcagagaggcgttggtagcggtccccatccacctgacacacaacagcccagtccaagcaaggcctttaaacccagattccccggggatcaggtggttaatggtgcaggtcccgagctgtcaacaggcccatctccgggctcacccaccctcgacatcgatcagagtatagagcaactgaacaggctcatcctcgaattagatcctacatttgaaccaattccaacccacatgaacgctttaggcagccaggcaaacgggagtgtttctccagattcggttggcgggggactgagagcttcaagcaggttgcccgacacaggggagggtcctagccgcgcaaccggccggcagggctcctccgctgagcagcctctgggtggccgactgagaaaattgtcactgggccaatatgacaatgacgctggggggcagctccctttttctaagtgcgcctgggggaaagccggcgtggattatgctcctaatctgccaccctttccctcaccagccgatgttaaagagacaatgacccccggatacccacaggatctggacatcattgatggtcggattctaagctcaaaggaatccatgtgcagcacaccggccttccccgtctcaccagagaccccttatgtgaaaactgcactacggcaccctccgttctcccctcccgagcctcctctgtcttcgcctgcatctcagcataagggggggagagagcctcggagctgtcctgaaacactgacacacgctgtcggtatgagcgagagtcccattggtcccaaaagcaccatgctgcgggcagacgcatcttcaacaccttcctttcagcaggcttttgctagttcttgtaccatctcgagcaacggcccaggccagcgacgcgaatctagcagtagcgctgagaggcagtgggtggagtcctcacccaaacctatggtgtccctactcgggtctggccgcccaactggctctccgctttcagccgaattctctgggacgcgtaaggatagtcccgtgctgtcttgtttccctccgagcgagcttcaggccccctttcatagccacgagttgagcctagctgaaccaccagacagtcttgcccctccctcgtcacaggcgttcctgggctttggaacagctcccgtgggttctggattgccccccgaggaagacttgggagcactgctggcgaatagccacggcgcctcaccaacgccatcgattccactgaccgccacaggagctgctgataatggatttctgtcacataattttctgaccgtggccccaggccattctagtcaccatagcccgggcctgcagggtcagggcgttacattgccgggacagccacccttgcccgagaaaaagcgcgcttctgagggagatagaagcctgggaagcgtctctccaagtagctccggtttttcgtctccacattccggatcgacaatcagtatccctttcccgaatgtcctccccgactttagcaaagcttcagaggctgcctcccccttgccagacagcccgggggataagttagtcatcgtcaaatttgttcaggatactagtaagttttggtacaaagcggacatctccagagaacaggccattgctatgctgaaggataaggagcctgggtcttttattgtccgggacagccactcttttaggggagcatacggactggccatgaaggtagccacccccccaccttctgtactccagctgaataagaaggctggggatctggctaacgaattagtcaggcattttttaatagaatgtaccccaaagggcgtgcgtttgaaaggctgcagcaacgagccatattttggctcccttactgccttggtttgtcagcacagcattacccctctggctttgccgtgcaagcttctgatccccgagcgcgatcccctggaggaaatcgcagagagttctccccagaccgcagcgaattctgcggccgaactgctgaagcagggggccgcctgtaatgtgtggtatctgaacagtgtcgagatggagtcactgaccggacaccaggctatccagaaggctctgtcaatcaccctggttcaggaacctccccccgtctccaccgttgtccacttcaaagtatcagcgcaggggattacactgaccgacaaccagcggaaactctttttcagaaggcactaccccgtcaacagcgtgattttctgtgcattggatcctcaagataggaaatggataaaggacggaccctctagcaaagtttttggattcgtcgccaggaagcagggctctgccacggacaacgtgtgtcatcttttcgcagagcacgatccggagcagcctgcccgcgagtcccagagacatagaggggcaagggacggacctcacgaggctatgcctaggcgacactctggatcgccagcaaatgtattgtttgagttgatcggccaggtctag

SEQ ID NO: 208357 - DNA, 2148 bp, synthetic construct
  misc_feature 1..2148: note = Description of Artificial Sequence: Synthetic coding sequence
  source 1..2148: mol_type = other DNA
atgagccaggtgatgagcagccccctgctggccggcggccacgccgtaagtctcgcgccctgcgacgagccccggcggacactccacccggcaccaagccctagcctccctccccaatgctcttattatacgaccgagggatggggcgcacaggcccttatggcgccagtgccgtgtatggggccgccaggaagactgcaacaggcccctcaagtcgaggccaaggccacttgttttctaccatcacccggcgagaaagccctcggcacccccgaagacctggactcatatattgattttagcctggaatctttgaaccagatgatcctggagcttgacccgacgtttcagcttctccctcctggcactgggggtagtcaggccgaactcgcccagtccacgatgtctatgcgaaaaaaagaggaatcagaagcacttgacatcaagtatattgaggtgacgtcagcccgatctcgctgccatgatggaccacagcactgctcatccccttccgttactccgcctttcgggagcctgaggtctgggggacttctgctgtctagggacgtcccacgcgaaacccgcagtagtagcgaatccctgattttctctgggaatcagggccgtgggcaccagcggcccctgccgccctccgagggcctttcacctcgcccgccaaacagcccatctatttccattccttgtatgggctcgaaagctagttctccacacggcttggggtctcctctggtggccagcccccggttagagaagagacttgggggtcttgcgccacaaagaggctccagaattagtgtcctctctgcctctcccgttagtgacgtgtcgtatatgtttggcagttcacagtctctcctgcactcttccaacagctctcaccagagtagtagtcgctcattggaatctcccgctaacagttcgtcctcactgcattctctgggatcagtgtctctgtgcacccggcccagtgactttcaggcaccgaggaatcccacgcttaccatgggacagccacgcacgccgcatagtcctccattggctaaggagcatgcctcctcatgtccccccagcatcacgaatagcatggtggatatccccattgtcctaatcaacggatgcccggagccaggttcctcccccccccaacgtacccctggtcaccaaaacagtgtccagcctggagctgcgtcacccagtaacccgtgcccagccacacggtctaactctcagactctgagcgacgcaccgtttacaacgtgcccagaaggtcccgctagggacatgcaacccacgatgaagttcgtgatggatacctcaaaatattggttcaagcccaacatcacaagggagcaggccattgagctgctgagaaaggaggagcctggcgcattcgtaattagggacagctccagctacagaggaagcttcggtctggcgctgaaggtgcaggaggtgccagcctcagcccagagcagacccggtgaagacagcaacgatttaatacgccatttccttattgagtcaagtgctaaaggcgtgcacttgaagggagctgacgaggagccgtactttggcagtctgtccgcttttgtgtgccaacacagtattatggcgctagcacttccttgcaaactgacgatcccacaacgggaactcggaggcgcggacggggctagcgattcaacagattcgccggcatcatgccaaaagaaaagcgccggatgtcacactttgtacctgtctagcgtctctgtcgaaacactgacaggagccttggccgtgcagaaggctattagtaccacatttgagcgagatatcttgccaacacctaccgtggtacacttcaaagtgaccgagcaagggatcacattgactgacgtgcagaggaaggtgttctttagacgacactacccattgacgaccctgcgcttttgtggtatggatccagagcagcgcaaatggcagaaatattgcaagccctcatggatttttgggtttgtcgccaaatctcagacagaaccccaagaaaatgtgtgtcacctattcgcagagtatgacatggttcagcccgcctcacaggtgataggcctggtgactgccctgcttcaggatgcagagcgcatgtag

SEQ ID NO: 208358 - DNA, 2148 bp, synthetic construct
  misc_feature 1..2148: note = Description of Artificial Sequence: Synthetic coding sequence
  source 1..2148: mol_type = other DNA
atgagccaggtgatgagcagccccctgctggccggcggccacgccgtatctctggccccttgtgatgaaccccgtagaacactccaccccgctccgtccccgagcctcccaccgcagtgttcctattataccacagaaggttggggtgcccaggccctcatggctccggtaccttgcatgggaccaccaggacgcctgcagcaggcaccgcaggtggaggccaaggccacttgttttctcccatctccgggggagaaggccctcggaacccctgaggacctcgatagctatattgatttctcattggagagcttgaaccaaatgattctcgagctggatcccacgttccagcttctccccccggggaccggtggatctcaagctgaactcgcacagtcaacaatgagtatgcgcaagaaggaggagagtgaggccctggacattaaatacatcgaagtgacaagcgctcgcagtcgttgtcacgatgggccccaacattgctcttccccgtctgtaaccccccctttcggaagcttgaggtccgggggcctgctactgtctcgcgatgttcctagagaaactagatctagcagtgagtccctgattttttccgggaaccagggtagagggcatcaaaggccattgcctccatctgagggcctgagtcccagacctccgaactccccgtccatcagcattccctgcatgggatccaaagcaagctcaccacatggtcttggcagtccgctagtggcctctccacgcctggagaagcgactgggcggtctggcccctcagcgcggatctcggatatctgtgctgagtgcctctcccgtgtccgacgtgtcatacatgttcggcagtagccaatccctgctgcattccagtaattcttctcatcaatcaagcagtcgcagcctggaatctccagcaaattccagttcctcccttcactcccttgggagtgtctccttgtgtacgcgaccgtctgattttcaggctcccaggaaccctacccttaccatgggacagccccggaccccacatagccccccgctcgcgaaagaacatgcttcaagctgtcccccctcaattaccaattcgatggtggacatccccatcgttctgatcaacggatgtcctgaacccggatctagtccaccccaacgcactcccggccaccaaaactccgttcagcccggggccgcctcaccttccaacccgtgccctgctacccggtctaacagccaaacgctatccgacgccccctttaccacgtgccccgaggggcccgctcgagacatgcagcccaccatgaagttcgtgatggacacatccaaatattggttcaagccgaatatcaccagggagcaggccattgaactcctgaggaaggaagagcctggcgcattcgttatcagggattcatcaagctatcgcggctcattcgggttagcgctcaaggtgcaagaggtgcccgcctctgcccaaagccgcccaggagaagacagtaatgacctgattaggcatttcctcattgaatccagtgccaagggcgtccacctcaagggggctgacgaggaaccatatttcggttcactctcagccttcgtgtgtcaacatagtattatggccctagcccttccctgcaaactcacaatcccacaacgagagctcggcggagccgacggcgccagcgattccacagattccccagcgtcttgccaaaaaaagtccgccgggtgtcacaccctctatctctcttcggtctccgtcgagacactgaccggggccctggccgtgcagaaggctataagcactacatttgaacgcgacatcttgccgaccccaaccgtcgtgcatttcaaggtcacggagcaaggcataaccctgacagacgtgcaacgtaaggtattctttagacgacactatcccctaacaaccttgcgcttctgcggcatggaccctgaacaaaggaaatggcagaaatattgcaagccaagttggatttttggatttgtggctaaatctcagacggaaccccaagagaacgtgtgccacctgttcgcagagtacgacatggtgcagccggcatcacaggtgattgggctggttacagctctcctccaggacgctgaacggatgtag

SEQ ID NO: 208359 - DNA, 387 bp, synthetic construct
  misc_feature 1..387: note = Description of Artificial Sequence: Synthetic coding sequence
  source 1..387: mol_type = other DNA
atgcggcccgtgcccgtgcggggcgtgcacagcctgcacccccggcccttcggggggcccgtgagcctgccctggctgcgcaccgggaggtgtcgttgggggctgggtctgtacagacagcctagcttgctgcccgaggagatttgcggggtgttcttccgccggcactatcctctgactactttgcgattttgtggtatggatccagagcaacggaaatggcagaaatactgtaaaccctcctggatatttggattcgtggcaaaatctcaaacagaaccacaggaaaacgtgtgtcacctattcgcagaatacgacatggtgcagccggcgtcacaggtcattggactggtgaccgcactcctccaggatgccgagaggatgtag

SEQ ID NO: 208360 - DNA, 4230 bp, synthetic construct
  misc_feature 1..4230: note = Description of Artificial Sequence: Synthetic coding sequence
  source 1..4230: mol_type = other DNA
atgaagagcagcggccccgtggagcggctgctgcgggccctgggccgccgcgatagtagccgcgcagcgagcaggcccagaaaggccgagccacactccttcagagaaaaagtctttaggaagaagccacctgtctgcgcagtgtgtaaggttaccatagatggcactggagtcagctgtcgggtctgcaaggttgccacccaccgaaagtgcgaggccaaggtcacctcggcgtgccaggctcttccccccgtagagctacgtcgcaacactgcgcctgtccgaagaatcgagcacctcggcagcactaaatctctcaatcattctaagcagcggtccactcttcccagaagcttctcccttgatccactaatggaacgcaggtgggacctggatctgacttacgttaccgagcgtattctcgcagctgcgtttcccgcgagacccgacgagcagaggcacagaggccatctcagagagctagctcatgtgcttcagagtaaacatcgagataagtacttactgttcaacctctcggaaaagcgacatgatttgacacgactgaaccccaaagtccaggattttggctggccagagcttcacgccccacccctggataagttgtgcagtatctgtaaggctatggagacatggcttagcgctgatccgcagcacgtcgtggtgctttattgcaaaggcaacaagggaaaactgggggtgatagtctccgcatacatgcactattccaaaatatcagctggcgcggatcaggcgctggcaaccttgactatgagaaagttctgtgaggataaggttgccaccgagctacaaccaagccagcgaaggtacatctcctactttagtggactcctgagcggaagcatccgaatgaacagctcccccctgttcctccactatgtgctgatcccgatgctgccagcctttgaaccaggaaccggatttcaaccgtttctcaagatctaccaaagtatgcaactggtctacacatctggagtgtaccatatcgccggtccaggccctcagcagctgtgcatatcactggaacctgccttgcttctgaaaggagatgtcatggtcacatgttaccataagggtggaaggggaaccgatcgcacactcgtgtttcgcgtgcagttccatacctgtactatacatgggccacaattaacctttcccaaagaccagctcgatgaagcctggactgacgagaggttccctttccaggcctctgttgaattcgtgttctcttcatccccagaaaagataaaggggagcactcctcggaacgacccctcagtgtctgtggattataataccacagagccagctgtccgatgggactcctacgagaattttaatcagcatcacgaggacagtgtggacggctcactcacacatacccgcgggccccttgatggatctccatatgcccaggttcaacggccgccccggcaaacaccacctgcaccttcccctgaacctccaccaccgcccatgctgagcgtgtcaagcgactcgggccatagctcaactctgacaacagagccggccgccgaatccccaggacggcctcctccaaccgcagctgagcgccaggagcttgacaggctgctgggaggatgtggagtcgcctcaggaggaaggggcgctggcagggagaccgcaatactggacgatgaggaacagccgaccgtggggggcggcccccatcttggcgtatatcccggtcaccgccccggccttagcaggcactgcagttgcagacaaggatatcgcgagccatgcggagtgcctaatggcggatattacaggccggagggtaccttggagcgacggaggttggcctatgggggctacgaaggtagtccgcaaggctatgctgaggccagcatggagaaaagacgcctatgcaggagtctctctgaaggactgtacccatatcctccggagatgggtaagcccgccactggtgacttcggctatcgggcccccgggtatcgcgaggtagtgattttggaagacccaggactgcccgccttatacccctgccccgcttgtgaagagaagctcgcactccctacagccgctctttacggcctgagactcgagcgggaggccggagaaggctgggcctctgaggccggcaaacctttgctccatccagtgaggcctgggcatccattacctttactgctgcccgcctgtggacaccaccacgctcctatgccggactattcttgcctgaagccacctaaagccggcgaggagggtcacgaggggtgttcttatacgatgtgccccgaaggccgctatggccatcctggatatcctgcactggtgacctatagctacggaggggcggtcccaagttactgtcctgcctacggaagagttccccactcctgcggctccccgggggagggaagggggtacccttctccaggggctcatagtccccgggccggttccatctcaccaggatccccaccctatccacaatcccggaaactcagctatgagatacctaccgaggagggaggagatcggtatccacttcctggacacctcgcatccgccggcccacttgcttccgcagagagcctcgagcccgtgtcctggagggagggcccctcagggcactcaactctgcctagaagcccccgggatgccccttgcagcgcgtcatcagaactgtccggcccatccacacccctccatacgtcctcaccagtgcaggggaaggagtccaccaggagacaagacacgcggtcccccacttctgcccctacacaacgactctcaccgggtgaggccttaccccctgtgtcccaggccggcaccgggaaagctcccgagctgccttccggctctggcccagaacctctggccccttcgccagtctccccaacatttcctcctagctctccttctgactggccccaggagagaagtccgggcggacattctgacggggccagccctcgcagtcccgttcctactacgctccctggactgagacacgctccatggcaggggccaagggggcctcctgatagccctgacgggagtccgctgacaccagtgccatctcaaatgccctggctggtggcctcccccgagcctccacagagtagtcccacccctgcgttcccccttgccgctagctacgatactaatgggctgagtcagcccccactgcctgaaaagcgtcacctgccaggaccggggcagcagccagggccttggggacccgagcaggcctcttcacctgcccgaggcatctcccaccacgtgacttttgcacccctgttgagtgataacgttccccagacacccgagccgcctacacaggaatcacagagcaacgttaagtttgtccaggatacctcgaagttctggtataagccccatcttagccgcgaccaggccatagccttgctgaaagacaaagaccctggagccttcctgattcgggactcgcacagcttccaaggagcctacggcttggctctaaaggtggctacgccccccccctcagcccagccctggaagggtgatcctgtagaacagctggtgcggcattttttgattgaaaccgggcccaaaggggttaagattaaagggtgcccaagcgagccttacttcggatccctgtcggcccttgtctcccaacacagtatctcgccaatatctctgccctgctgtctgaggatcccctctaaagaccccctagaagaaactccagaggctcccgtccccacgaacatgtcgactgccgcagatttactgagacagggcgcagcctgtagcgtgttgtatttgaccagtgtcgaaaccgagtcactgactggaccccaggctgtcgcaagggcttcttcagctgccctatcctgtagcccacgcccaacaccagccgtggtgcattttaaggtgagcgcacaggggattaccctgaccgataaccagagaaagctgttctttcgccggcactaccccgtcaacagcattacattcagctcaacagacccgcaggacagacgctggactaatccagacgggactaccagtaagatctttggatttgtggccaagaaacctgggagtccctgggagaacgtctgtcacttgttcgccgagctcgatcctgatcagccagccggagcgatagtgactttcattacaaaggtgctcctgggtcagcgaaagtag

SEQ ID NO: 208361 - DNA, 4260 bp, synthetic construct
  misc_feature 1..4260: note = Description of Artificial Sequence: Synthetic coding sequence
  source 1..4260: mol_type = other DNA
atggacggcggcggcgtgtgcgtgggccggggcgacctgctgagcagcccccaggctttgggacagttattgcggaaggaatctagacctcgaagagcaatgaagccccgcaaggcagaaccacactccttcagggaaaaggtctttcggaaaaagccccctgtctgcgcagtttgcaaagtaacaattgatggcactggggtgtcgtgtagggtctgcaaggtggcaacccacaggaagtgtgaggctaaggtcacgtctgcctgccaggccttgccacctgtggaactaaggagaaacacagccccagtgcggcggatcgagcacctgggctcaacaaagagcctcaaccacagtaaacaaaggagcacgctccctcgctccttttccctcgatcctttgatggagaggagatgggatctcgacctgacctacgtgaccgagaggatcctcgccgctgcatttcccgcgagaccagatgaacagaggcaccgtgggcacctgagagaactggcgcacgtgctgcagtccaaacacagagacaagtacctgctgtttaatttgtccgagaaacgccacgatcttacacgactcaacccgaaggttcaggatttcgggtggcccgaacttcatgcccctccgctggataagttgtgctctatctgtaaagccatggaaacttggctgtctgccgatcctcagcacgttgtggtgctttattgtaaggggaataagggtaaactaggagtgattgtgagtgcttacatgcattactcaaaaatttccgcgggagcggaccaggcactcgcgactctaacaatgagaaagttctgcgaggataaggtggcaactgaactgcagcccagtcagcgccggtacatttcctatttctccggcctgttgagcgggtctatcagaatgaactctagccccctgttcctccactacgtcctgataccaatgctccccgctttcgagcccggcacaggctttcagccattcttgaagatctatcagtccatgcagctggtgtacacttccggcgtgtatcacatcgccggcccaggtccacagcaactgtgtattagcctcgaaccggctcttctcctaaagggggacgtcatggtgacctgctaccataagggcggacgggggaccgaccggacactggtcttcagggttcagtttcacacctgcacaatccacggaccccaattaactttcccgaaggaccagctggacgaagcttggaccgacgaaaggttcccgtttcaggcatcagtggaattcgtcttttcaagctctcccgaaaagattaagggatcgaccccccgcaatgacccttccgtaagtgtggattataacaccactgagccagctgtacggtgggattcctatgaaaatttcaatcaacaccacgaagactcggtggacggatccctgacccatacccgcggacctctcgatggaagtccatatgcgcaagtgcagcgaccgcctcggcagaccccaccagcaccgagccccgagccgcctccccctccaatgttgtcggtgtcctctgattccggtcactcgagtaccctcactactgagcctgctgctgagtctccgggacggccccctccgaccgcggccgaacgccaggaattggatagactcttgggcggctgcggcgtggccagtggcggaagaggagccgggcgagagactgccattcttgacgatgaggagcagccgacagtgggcggtggccctcacctgggcgtgtatcctgggcatcggcccggactctctaggcattgttcatgtaggcaggggtaccgggagccatgtggcgttcccaacggcggctactaccggcctgaaggaacacttgagaggagacgcctcgcatacggggggtatgagggatctccacaaggatacgccgaggcctcaatggagaaacgccgcttatgcaggtccctcagcgagggactttatccttatccacctgagatgggaaagccggccactggcgacttcgggtatcgagcaccgggctaccgggaggtcgtgatactggaggatcccggtttacccgctctgtatccttgccccgcttgtgaggagaagctcgctctgccgacagcagctctgtatgggctgcgactcgagagagaggctggagagggatgggcttccgaggctggtaaaccgttactgcacccagtccggcccggacatcccctccctcttctattaccagcttgtggacatcaccacgctccaatgcccgactatagctgcctgaagccaccaaaggccggtgaggaggggcacgagggctgttcctatacgatgtgtcccgaagggagatacggccacccaggataccccgccctcgtcacttatagctatggcggtgccgtgccgtcatactgtccagcctacggtcgtgtaccccacagttgtgggagcccaggcgaagggcgcgggtaccctagtcccggtgctcatagtccacgggcaggctctatctctcccggctctcctccctatccgcaaagccgcaagctcagttacgagattcctacagaggaagggggtgatcggtaccccctgcctggacacctggccagcgccgggccccttgctagcgccgagtcattggagcccgtcagctggagagagggccctagcggccatagcaccctgccccgttctccgcgagatgccccctgcagcgccagctcggaactgagcggcccctcaacccctttacatactagctcacctgtgcagggcaaggaatcaacccgtcgccaagatacgagatcccctacatctgcgccaactcaaaggctctcccccggcgaggccttgccgcccgtgtcccaagctgggacaggaaaggcacccgagctgccgtccggcagcgggcctgagccgctggccccatcccctgtgtctccaactttcccccctagctctccttccgattggccacaggagcgaagccccggggggcattcagacggcgccagccctcggagccctgtgccgacgacattgccaggcctccggcacgccccgtggcaaggaccaagaggaccaccagactccccagatgggagccccctgacacctgtaccaagtcagatgccttggcttgttgcaagtccggaacccccacaaagcagcccaacgcctgccttcccactggcagcaagctacgatactaacgggctctcacagcccccattgccagaaaagagacacctgccagggcccggtcaacagccagggccatggggtcctgaacaggcttcctcccccgcccggggcatttctcaccatgtcacctttgccccattactgagcgacaacgtgccacagacccctgagcccccaacccaggaaagtcaaagcaatgtcaaatttgtgcaagataccagcaagttctggtacaaaccacacttatcccgcgaccaagccattgcacttctgaaagataaggaccctggtgcgtttctcatccgagattcccattcctttcaaggcgcctacggccttgcactgaaagtggccaccccacccccatccgcccagccttggaagggtgatccagtggagcagttagtgcgtcatttcctgatagagacaggccctaagggggtgaagattaaagggtgtccgtctgagccctacttcggatccctatccgctctcgtgagccagcacagcatcagccccatttcattgccttgctgcctccgtattccctccaaggaccctctggaggagaccccagaggcccctgtccccacgaacatgagcacagccgccgatttactgaggcagggggccgcttgcagcgtgctatacctcacctctgtggaaacggagtctttaaccggtccccaagctgtggcgcgcgcgtctagcgctgcgttgtcctgttcgccccgcccaacaccagcggttgtgcattttaaagtttctgcgcagggcatcaccctgacagataatcagcgcaagctattttttagacgacattaccctgtgaacagcataaccttctcctctactgaccctcaggataggcggtggaccaatcctgatggtacgactagtaaaatttttggttttgtggcgaaaaagcccggaagcccttgggagaatgtgtgtcatctctttgccgagttggatcctgatcaacctgccggtgcaatcgtcaccttcattacgaaggtgcttcttggacagaggaagtag

SEQ ID NO: 208362 - DNA, 3858 bp, synthetic construct
  misc_feature 1..3858: note = Description of Artificial Sequence: Synthetic coding sequence
  source 1..3858: mol_type = other DNA
atggagcggcggtgggacctggacctgacctacgtgaccgagcggattttggccgcagccttcccagccaggccagacgagcagaggcacaggggccacttgcgcgagctcgcccatgtgctccagtccaaacaccgtgacaaatatctgctcttcaacctatccgagaagcgccatgacttgacaaggctcaaccccaaagtgcaggactttggctggccggagttgcacgcgccacctcttgacaagctctgcagcatttgcaaggccatggaaacctggctgtcagcagatccccagcatgtggtggtgctgtactgtaaagggaacaaaggaaaactcggcgtgatcgtaagtgcttacatgcattattcaaagatcagcgccggcgctgaccaggcactcgccacgctgacaatgcgaaaattttgcgaggataaagtagccacagagttacagcccagccaacgacgctacatcagctatttcagtggcttactaagcggcagtatccggatgaattcctcaccactgttcctgcactatgtcctgattcccatgctcccagcgtttgagcccggcacgggattccagccgtttctgaaaatttatcagtcaatgcagctagtgtataccagcggcgtataccatatcgctgggcccggcccccagcagctttgcatatcgctggaaccagctctcctactcaagggggacgtaatggtgacgtgttaccataagggtgggcgtgggaccgacaggacgctagtattccgagtgcaattccatacatgtacgatccatggtcctcagctgacgttccccaaggatcaactggacgaagcctggactgacgagaggttcccttttcaagccagcgtggagttcgttttttcctcctcgcctgagaagataaagggcagtaccccccggaacgaccccagcgtaagtgtggattacaacacgaccgagccagcagtccgatgggattcctatgagaattttaaccagcaccacgaggactcggtggacggtagcctgactcacacccgaggccccctggacgggagcccctacgcccaagttcaacgcccaccgcgccagacccctccagctccaagccccgagcctccacccccacccatgctgagcgtgagctcagattcagggcacagctctacacttacgaccgaacctgccgccgagtccccggggcgtccccctcctactgccgcagaacggcaggaactcgacaggctgttagggggatgtggggtggcttcaggagggaggggcgcaggaagggagacagccatcctagatgatgaagaacagcctacggtcgggggaggcccccacctgggggtgtacccaggccatcggccagggctgagtcggcattgtagttgtagacagggctacagggagccctgtggagtcccaaacggcggatattacagaccagaaggtacgctggagcggcgccggttggcctatggcggttatgagggctcaccacaggggtatgctgaagctagtatggagaagcgaagactatgtcgctctctctctgagggactctacccatacccccctgagatgggtaagcccgccacaggggattttggatacagagctcctggatacagagaggtagtgattctggaagatccgggcttacccgccttatacccatgtccagcatgcgaggagaagctagcacttcccaccgctgccctatatggactgcgactggaacgagaagctggagaagggtgggcttccgaggcaggcaagcctctgctgcacccagtgagacccggacatccgctgccactgctgctgccggcgtgtggtcaccatcatgcccccatgcccgactatagctgtctcaagccccctaaagcaggggaagaagggcacgaaggatgtagctacactatgtgccccgagggcaggtacggacacccaggatatcccgcgttagtgacgtattcctatggtggagccgtgccatcctactgccccgcctacggccgtgttccacactcttgtggtagccctggagaagggagagggtaccctagccccggtgctcactctcccagagccggaagcatctcacctggctcaccaccttacccccagagccgcaaactgagctacgagattcctaccgaggagggtggggatcgctaccctctgcctggacatcttgccagcgcaggacctcttgcatcagccgagagcctggagccagtgagctggagagagggacccagcgggcactccacactgcctaggtcaccccgcgacgccccctgttcggctagttccgagctgtccggcccatctaccccccttcacacatcttcacccgtgcaggggaaagagtctactagacggcaagatacacggtcccccacaagcgctccaacgcagcggctgagccccggggaagctctgccacccgtctcacaggctgggaccggcaaagcacctgagctgcccagcggctccggccccgaacctctggcgccctcccctgtttcacctaccttcccgccaagctctccaagtgattggcctcaggagaggtcccctggcggccatagcgacggggcgagccctaggagcccagtgccgacaacccttcctggcctccggcacgccccttggcaaggcccccgtggccctcccgatagccccgatgggagccctctgactcccgtgcctagccagatgccatggttagttgcctcccctgagcctccacagagcagcccaacccctgcattccccctcgctgcatcttacgatacgaatggtttaagtcagccaccactgcccgagaagaggcacctaccaggcccgggtcaacagcctggcccatggggcccagagcaggccagcagtccagcgaggggcatttcacatcatgtcacttttgcacctttgttgtccgacaacgtgccacaaactccagagcctcctacccaggagagtcagtctaacgtgaaatttgtccaagacacttcaaagttctggtataaaccccatctctccagagatcaagctatagccctgctgaaggacaaggacccaggagcatttcttatccgcgacagtcattcttttcagggagcatacggccttgctctgaaggtggctacgcccccgcccagcgcacagccctggaaaggcgatccagtggaacagcttgttagacacttcctcatcgagacaggccctaagggggtgaaaattaaaggctgtccttcagaaccatattttggttcgctgagcgccttagtttctcaacacagcatttctcctatttctcttccatgctgtctccggataccttccaaggatcccctcgaggaaactcccgaagcccccgtgccaacaaatatgagtacagccgccgatttgctgaggcagggagctgcttgttcagtgctttacctgacatctgtcgagaccgaatctcttacaggcccacaggctgttgctcgagctagtagcgcagctctcagctgctctccccggcctactcctgccgtggtgcacttcaaagtcagtgctcaaggaatcacactcacagacaaccagcgaaagctgttctttcgacgtcactaccccgttaacagcattaccttctctagtacagacccacaggacaggcgctggactaaccctgacgggaccaccagtaaaatcttcgggtttgtggctaagaaacctggatccccctgggagaatgtgtgtcacttgttcgccgagctcgaccccgatcagcccgctggcgcgatcgttacattcattaccaaagttttgctgggacagcggaaatag

SEQ ID NO: 208363 - DNA, 2346 bp, synthetic construct
  misc_feature 1..2346: note = Description of Artificial Sequence: Synthetic coding sequence
  source 1..2346: mol_type = other DNA
atgaagagcagcggccccgtggagcggctgctgcgggccctgggccgccgggacagcagtcgcgctgccagcaggcccagaaaagcagagccacacagcttccgtgagaaggtgttcaggaaaaaacccccggtgtgcgccgtttgtaaggtcacaatagacggtacgggcgtgtcctgcagagtctgtaaggtggccacccacagaaaatgcgaagcaaaagttacatccgcgtgccaggcattaccccccgtagaattgcgacgcaacactgctcccgttagaagaatcgaacatctggggtccactaaatccctgaatcatagtaaacaaagaagtaccctcccaagaagtttctcactggatcctctgatggagcgcagatgggacctggatttaacctatgtaaccgaaaggatcctggccgcagcttttcccgccagaccggatgagcaacggcaccgcggccacctgcgtgagttggctcacgttctgcaatctaagcaccgcgataaatacctcctgttcaacctgtccgagaaaaggcatgacctcacgagactgaatcccaaagtccaggacttcggctggccagagctacacgctccaccactagataaactctgttcaatctgcaaggccatggaaacttggctgagtgccgaccctcaacatgtggtagtcctgtactgcaagggcaacaaggggaaactaggggtgatcgttagcgcctacatgcactattctaagatttcagctggggcagaccaagccctggccacactcacaatgcgtaaattctgtgaggacaaggtcgctaccgaactccagccctctcagagacgttatatttcttatttcagcggtctgctgtctggtagcatacgaatgaactcgagtccactgtttctgcattacgtgctgatccctatgttgcccgccttcgagccaggaacaggtttccagcctttcttgaaaatctatcaaagtatgcagctggtctacaccagcggcgtctatcatatcgcaggccctgggcctcaacagctttgcataagcttagagccagctctgctgctgaagggcgacgtgatggtgacctgctatcataagggcggccgcggcacagaccgcacacttgtgttcagggtacagtttcacacctgcacgatccatggtccgcagttgacttttccgaaggaccaactggacgaggcctggacagacgaacggttcccattccaggctagcgtggagttcgtcttcagctctagtccggaaaagattaagggctctacacctcgaaacgatcccagcgtctccgtcgattacaacactaccgaacctgcagtcagatgggacagctatgaaaacttcaaccaacatcacgaagactctgtcgacggatctctgacccacactcggggccccctcgacggaagcccctacgcccaggttcagcgtccccctcgacagacgccacccgccccgtccccagaaccacctccacccccgatgctgtctgtcagctctgacagcggccactcatccacgttgaccaccgaacctgccgctgagagtccaggccgcccaccgccaacagctgccgagcgtcaggagctagatcggctacttggcggctgtggcgtcgcttcaggcggtaggggcgcaggccgggagactgcaatcctcgacgacgaggaacagcctaccgtgggggggggacctcatttaggggtgtaccccgggcaccggccaggtttaagcaggcactgttcatgtcggcagggttacagggaaccctgcggtgtccctaacggtggatattaccgtcccgagggcacactagaacgacggaggttggcgtatggtggctacgagggctctccgcaaggttatgccgaagcctctatggaaaagcgacgcttatgcagaagtctgtccgaggggttatatccttatcctcctgaaatgggaaagccggccacgggcgatttcggatacagggccagcagtgctgccctgagttgcagcccacgcccaaccccggccgttgtgcactttaaggtgtctgcccaggggatcacattaactgataatcagcggaaactgttttttagacgccattatccggtgaatagtataacattctcaagtaccgacccacaggataggaggtggaccaatcccgacggtactactagcaaaatcttcggcttcgtggccaagaaaccaggttccccatgggaaaatgtgtgtcatctttttgctgaactggaccctgaccagccggcaggtgctatcgttacctttatcaccaaagtcctgctcgggcagaggaaatag

SEQ ID NO: 208364 - DNA, 4200 bp, synthetic construct
  misc_feature 1..4200: note = Description of Artificial Sequence: Synthetic coding sequence
  source 1..4200: mol_type = other DNA
atgaagagcagcggccccgtggagcggctgctgcgggccctgggcaggcgcgatagctctagggcagcctcgcgccctcggaaggctgagccccacagcttccgcgagaaggtgtttagaaaaaagccacctgtgtgtgccgtttgtaaggttacaattgacgggacaggagtctcttgcagagtgtgtaaagtggctacgcatagaaagtgcgaggccaaggtcactagtgcctgccaggcgttaccaccagtggagctgaggcggaacaccgctcccgtgcgcagaattgaacacctgggaagcaccaaaagcctcaaccacagtaagcagaggtctacccttccgcgaagcttcagcctcgatccactgatggaacgccggtgggacctcgatcttacttatgtgacggaaagaatcctggctgccgcctttcccgccagaccagacgagcagagacatcgcggacacctcagggagctggcccacgtgctacaaagcaagcacagagacaagtacctcctctttaatctgtctgaaaagcgacacgacctgacgaggctgaatcctaaagtccaagacttcggatggccagagctgcatgcaccacctctcgacaagctctgcagtatttgcaaggctatggagacttggctgagtgctgacccgcaacacgtggtagttctctattgtaagggtaataaaggcaaactcggcgtcatcgtgtcagcatatatgcactactccaaaatctccgctggcgccgatcaagccctggcaacattaacgatgcgcaagttctgtgaggataaggtagcgaccgaattgcagcctagtcagaggaggtacatcagctatttcagtggactcctctcaggtagcataaggatgaattcgagtcctctcttcctccactatgtgttgatccccatgctacctgcattcgagcccggaacaggattccagccattcttaaaaatttatcagtcaatgcaactggtgtacacatccggtgtgtatcatatagcggggcccggcccacagcagttgtgcatctcactcgaaccagcccttctcctgaagggagatgtcatggtgacttgttatcataaaggcgggagaggaactgataggacgttggtatttcgcgtacagttccacacctgcactatacatggtccccaactgactttccccaaggatcagttggatgaggcctggaccgatgagcgctttccattccaagcatctgtggagttcgttttctcgagctctccagagaaaattaaggggtcaacaccaagaaatgacccctcagtgtcagtcgactacaacactaccgaacccgcagttagatgggatagttatgagaatttcaaccagcaccacgaggactccgtggacggcagtctaacccatactcgtggccctctcgatggcagcccgtatgcacaggtgcaacgaccccctaggcagaccccccccgctcctagccctgagccccctccccctcctatgctgagcgtgagttccgacagcggccacagtagcacactgacaactgaacccgctgcagagtcacccgggagacctccgcccacagccgctgaacggcaggagctggatcgattgcttggcggatgtggcgtggccagcggggggaggggagctgggagagaaactgcaatcctggacgatgaggagcagcccacggtgggcgggggccctcacttgggggtctaccccggacaccgtcccgggttgtcaagacactgttcctgtcgacagggatatcgcgaaccttgcggcgtgccaaatggtggatactatcgacctgaggggaccttagagagacggaggctggcctatggaggctatgaaggaagcccccaaggctatgctgaggcgagcatggaaaagcggcggttgtgccggagcctcagcgaggggctctacccatacccccccgaaatgggtaagcctgccacgggcgactttggctatcgcgccccagggtatcgggaggttgtgattctggaggatccaggactgcctgccctgtacccttgtccagccagtctgtacggtcttaggttggagcgcgaggcgggcgaaggctgggccagcgaagctggtaaacccctgctgcacccagtgcgcccagggcacccattacccttgctgctccctgcgtgtgggcatcatcacgcaccgatgcctgattattcctgtcttaaacctcctaaggcaggcgaagagggccatgaggggtgttcgtacactatgtgtccggaaggccggtatggacatcctggctacccagcccttgtgacctactcctacggcggtgcagtacctagctactgcccggcatacggtcgggtgcctcactcgtgtggctcaccgggcgaaggacggggctatccctcccctggagctcacagccctcgggccggcagcatctccccaggcagtcctccttatcctcagtccaggaagctgagctatgaaatccccacagaggaaggaggcgaccggtaccccctccctggacacctcgctagcgccggtccactggcctccgctgagtctctagaacccgtgagctggagagagggacccagtgggcattcgacgctgccccgatctccaagagacgctccctgctcagcaagctctgagctgagtggcccttctacgcccctgcacacgagcagtccggtgcaaggcaaagaatccacacggagacaggatacccgctcccctacttccgcgcctacgcaacgcctgtcgcccggagaggcactgccaccggtgtcacaggccgggacagggaaggctcccgaattgccatcaggatcaggtcctgaacctctcgctcccagccccgtgtccccaacttttccccctagctccccatctgactggcctcaagaacggtctcctggcggccattccgatggagcttccccaagaagcccggtacctacaaccctgcccggcctgagacatgccccttggcagggtcctagaggaccacccgatagccccgatgggtcaccccttaccccggttccatcccagatgccttggctggtggcttctcctgagccaccccagagctctcccaccccagccttccccctggctgccagttatgatactaacggtctgagccagcctcccctgcctgagaaaagacaccttcctggtcctggccaacagccaggcccatggggcccagaacaggccagctccccagcacgtggaatctcccatcatgtgacattcgcacctctcctcagcgataatgtgccacagaccccagaacctccaacacaagagtcacagagcaacgtgaagtttgtgcaagatacatccaagttctggtacaaaccacacctgagccgagatcaggcaatagcgttactgaaagataaagaccctggggcgttcctcatcagagactcacactcttttcaaggcgcctacggccttgccttgaaggtggccacccccccaccgagcgctcagccttggaaaggagaccctgtagaacagctggtgcgtcatttcttaatcgaaaccggtccaaagggagtgaagattaagggatgtccctccgagccatactttgggtctctttcagccttggttagccaacatagtatctcgcccatatcactgccttgctgtctgcgcatcccttctaaggaccccctggaggagactccagaggcccctgttcctaccaacatgtccactgcggcggatctcctgcgccagggggccgcatgttcagttctgtacctaaccagtgttgaaactgagtccctcaccggtccacaggctgtggcccgagctagcagtgcagccctgagttgctctccccgaccaactcctgcggtagtgcattttaaagtcagtgctcagggcatcacccttaccgataatcagcggaagttgttttttcgccggcattatcctgtgaacagcattactttttcatccacagatcctcaggatagaaggtggacaaatcccgacgggaccacatccaaaatcttcgggtttgtggcaaagaagcctggtagcccatgggaaaacgtgtgccacctgtttgctgaactggatcccgaccaacccgctggcgctattgtaactttcataactaaagttctactgggacagaggaagtag

SEQ ID NO: 208365 - DNA, 567 bp, synthetic construct
  misc_feature 1..567: note = Description of Artificial Sequence: Synthetic coding sequence
  source 1..567: mol_type = other DNA
atggactgccggaagatggcccggttcagctacagcgtgatctggatcatggccatctcaaaggtgttcgaactcggcctggtcgccggtctcgggcaccaggagtttgccaggccttcaagaggctatctggccttcagagatgacagtatatggcctcaggaggagccagccattagacccagaagctctcagagagttccacctatggggatacagcacagtaaagagctaaacagaacgtgttgtctgaatgggggcacatgtatgctcggatcgttttgtgcttgcccaccatccttttacgggagaaactgcgagcacgacgtgcgcaaggaaaattgcgggtccgttccgcatgatacttggctgcctaagaagtgtagcttgtgcaagtgctggcatgggcagctgaggtgtttcccccaggcatttctgccagggtgcgacggcctcgtcatggatgaacatctggtggcatcacgaacccctgaactacctccgtcagcaaggacaaccaccttcatgctggtgggaatctgtctcagcattcagagttactattag

SEQ ID NO: 208366 - DNA, 519 bp, synthetic construct
  misc_feature 1..519: note = Description of Artificial Sequence: Synthetic coding sequence
  source 1..519: mol_type = other DNA
atggccatcagcaaggtgttcgagctgggcctggtggccggcctggggcaccaggagttcgcgaggcctagccggggttacctggccttccgggatgattcgatatggcctcaagaggagccagctatacgccctagatcctcccaaagagtgcctcccatgggcatccagcacagcaaggaattgaaccggacatgttgcctcaatggcggcacttgtatgctggggtctttctgtgcctgccccccaagtttctacgggcggaattgcgagcatgacgtcagaaaggagaactgtgggtcagttccacacgacacttggttgccaaagaagtgctctctgtgcaaatgctggcatggacaactgcgctgttttccacaggccttcctacccggctgtgatgggctggtcatggatgagcaccttgtggcctctagaacaccagaactccccccctctgccaggaccaccacgtttatgctagtcggcatctgcctcagcatccagtcttattactag

SEQ ID NO: 208367 - DNA, 645 bp, synthetic construct
  misc_feature 1..645: note = Description of Artificial Sequence: Synthetic coding sequence
  source 1..645: mol_type = other DNA
atgggcgccgcccacagcgccagcgaggaggtgcgggagctggagggaaagacggggtttagtagtgatcaaatcgaacagttgcacagaaggttcaagcagctgagtggcgaccaacctacaatccgtaaagaaaacttcaacaacgtgccagatcttgaactcaatccaattagaagcaagatcgtacgtgccttttttgacaatcgaaatctgaggaaggggccctctggcctggctgatgagatcaacttcgaggattttttaacaatcatgtcatattttagacccatagacaccactatggatgaggaacaggtggagctgagcagaaaggaaaagctccgcttcttattccacatgtacgatagcgacagcgacggtaggatcaccctagaagagtaccgaaacgtggttgaagaactgttgtccgggaatccccacatcgaaaaggagtctgccaggtccatcgctgacggcgctatgatggaagcagcctctgtgtgcatgggacagatggaacctgaccaggtttacgaaggcatcacctttgaggacttcctaaaaatttggcaaggcattgatatcgagactaaaatgcatgtcaggttcctgaacatggagacgatggccctctgtcattag

SEQ ID NO: 208368 - DNA, 804 bp, synthetic construct
  misc_feature 1..804: note = Description of Artificial Sequence: Synthetic coding sequence
  source 1..804: mol_type = other DNA
atgcggccccggagcggccccacccggaacccccggctgcgggccttcgccggcgttcctacgagaggcagaaccagagggcagtcgaggaggtgcgccgccgaggcctccgctggacccgagagagatgcccgccctggcgcgccggcggcggggacaatgggagctgcacattccgccagtgaagaggttcgtgagttggaaggcaaaacaggtttttcctccgaccagattgaacagctgcacagacgattcaagcaactatctggtgaccagcctacaatccgcaaggaaaactttaacaacgtgccggatttagagctcaacccaatcaggtcaaaaatagtgcgcgccttcttcgacaatcgtaacttgcgaaaaggaccctcagggctagctgacgagattaattttgaggacttccttactataatgagctacttccgtcccatcgatacaacaatggatgaggaacaagtggaactaagtagaaaagagaaactacgatttctcttccatatgtacgactctgatagtgacgggaggatcaccctggaggagtacaggaacgtcgtggaagaactgttgagcggaaacccccatatagaaaaggaaagcgcacggtccatcgccgacggagcgatgatggaagcggcctccgtgtgcatgggccagatggaacccgaccaagtgtacgaggggattacctttgaagattttttgaaaatctggcagggcatcgacatcgaaacaaagatgcacgttaggttcttaaatatggagaccatggcgttgtgccactag

SEQ ID NO: 208369 - DNA, 564 bp, synthetic construct
  misc_feature 1..564: note = Description of Artificial Sequence: Synthetic coding sequence
  source 1..564: mol_type = other DNA
atgggcgccgcccacagcgccagcgaggaggtgcgggagctggagggaaagacaggctttagcagtgaccaaatagagcaattgcataggcgcttcaagcagctaagtggggatcagcccaccatccggaaccttcgcaaggggcccagcggcctcgctgatgaaattaactttgaagatttcctgaccatcatgagttactttagacccatcgataccaccatggacgaggagcaggttgagcttagtaggaaagagaaactgcgatttctgttccatatgtatgacagcgattcggacggccggattactttggaagagtaccgcaatgtggttgaggagctgctgagtgggaaccctcatatagagaaggagagcgcacgatcaattgcggacggggctatgatggaagcagctagcgtctgtatgggccagatggaacctgaccaggtctacgagggcataacctttgaggatttccttaaaatttggcagggaatagacattgagaccaaaatgcacgtgaggttcctgaacatggagactatggctctgtgtcattag

SEQ ID NO: 208370 - DNA, 1266 bp, synthetic construct
  misc_feature 1..1266: note = Description of Artificial Sequence: Synthetic coding sequence
  source 1..1266: mol_type = other DNA
ctgaacctggaggtgaagttcaagaagatgggcctgggccacgagcagggatttggcgccccctgtctgaagtgcaaagagaagtgtgaggggtttgaactgcacttctggcgcaagatttgcaggaactgcaagtgcggacaggaggagcacgatgttcttctaagcaacgaggaagacaggaaagtcggtaaactttttgaggacactaagtatacgacattaattgcaaaactgaagagtgacggcatcccaatgtacaagcgtaacgtgatgattttgacgaaccccgtcgcagctaaaaagaatgtgtctattaacacagtgacttacgagtgggccccccctgtgcagaatcaagcactcgcccgtcagtacatgcaaatgttgccaaaggagaaacagccagtagcaggatcggagggagcccagtatcggaaaaagcagctggccaaacagctgcccgcccatgaccaggacccatccaaatgccacgagctgtctccacgggaagtcaaggagatggagcagtttgtcaaaaagtataagtctgaggccctgggcgtgggcgacgtcaagctgccctgtgaaatggatgcccagggacctaagcaaatgaacatcccaggcggggatagatcaacaccggcagctgtgggcgctatggaggataagagtgctgagcacaaacgcacacagtactcctgctactgttgcaagctcagcatgaaagaaggcgatcctgcaatatatgccgagagggccggctacgacaagctgtggcacccggcctgtttcgtatgctctacatgtcacgagctgctagtggatatgatatacttttggaagaatgagaaattatactgcggccgtcactactgcgattctgaaaagcccaggtgcgccggctgtgacgaattaatattcagcaatgagtacacccaggcagagaatcaaaattggcatctcaaacatttttgctgtttcgactgtgactccattctggccggtgagatatatgtgatggtcaacgataagccagtttgcaagccatgctatgtgaagaatcacgccgtggtgtgtcaaggatgccataacgcaattgatccagaggtgcagcgcgtgacctataacaacttttcttggcacgctagcactgagtgctttctatgctcgtgctgcagtaaatgccttattggccaaaagttcatgccagtggagggaatggttttttgcagcgttgaatgtaaaaaaagaatgtcatag

SEQ ID NO: 208371 - DNA, 1266 bp, synthetic construct
  misc_feature 1..1266: note = Description of Artificial Sequence: Synthetic coding sequence
  source 1..1266: mol_type = other DNA
atggacctggagaacaaggtgaagaagatgggcctgggccacgagcaggggttcggcgcaccatgtcttaaatgtaaagagaaatgcgagggatttgagttacacttctggaggaagatctgtcgcaactgtaaatgcggtcaggaggaacatgatgtgcttctatcgaacgaagaggaccgtaaagttgggaaactatttgaggatacgaaatacaccaccctgatcgcaaagttaaaatccgatggaataccaatgtataagagaaacgtgatgatactgactaatccagtggctgctaagaaaaatgtctccatcaatacagtgacgtacgaatgggccccacccgtacagaaccaggcactggcaagacagtatatgcaaatgctcccgaaggagaagcagcccgtggccggaagtgagggtgcccaatataggaaaaaacagctggccaaacagctgccggctcacgatcaggacccatctaaatgtcatgaactgtccccaagggaagtgaaagagatggagcagttcgtcaagaagtacaaatcagaggcccttggcgttggggacgtgaagctaccctgcgagatggacgcccaggggcctaaacagatgaatatacccgggggtgacagatctaccccagccgctgtgggcgcaatggaagataagtcagccgaacataaaaggacccagtacagctgttattgttgcaaactgtcaatgaaagagggagatcccgcaatatacgcggagcgcgctggttacgataagctgtggcatcccgcgtgcttcgtgtgctccacctgtcacgagttactggttgacatgatctacttttggaaaaatgagaagctctattgcgggaggcactactgtgactccgagaagccaagatgcgccggctgcgatgaacttatcttcagtaacgagtatactcaagcagagaatcagaattggcaccttaagcacttctgctgctttgattgcgatagtatactcgctggcgaaatctatgtgatggtaaacgataagccagtctgtaaaccatgttacgttaagaaccatgctgtggtgtgccagggctgtcacaacgctattgatccggaggtacagcgcgtcacatacaacaatttctcctggcacgctagcactgaatgctttctctgtagttgttgctcgaagtgtctgatcggtcaaaaattcatgcccgtggaggggatggtgttctgcagtgtggaatgcaaaaagcgaatgtcctag

SEQ ID NO: 208372 - DNA, 1239 bp, synthetic construct
  misc_feature 1..1239: note = Description of Artificial Sequence: Synthetic coding sequence
  source 1..1239: mol_type = other DNA
atgggcctgggccacgagcagggcttcggcgccccctgcctgaagtgtaaggagaaatgtgaaggattcgagcttcacttttggcgcaaaatttgtcggaattgtaagtgcgggcaagaggaacacgatgttttgctatccaatgaagaggatcggaaagtgggtaagctgttcgaagacacaaagtacacaacccttatcgcaaagcttaagagcgacgggattcctatgtacaaaagaaatgttatgatactgaccaaccccgtggcggccaaaaaaaatgtctcgattaatacagtgacgtacgagtgggctccccccgtccagaaccaggccctggcccggcagtacatgcagatgctgcccaaggaaaaacagccagtggcaggatcagagggcgctcagtacaggaagaaacaactggctaagcagcttccagcccacgaccaggatccttctaaatgccacgaactctcacctcgcgaggtcaaggaaatggagcagtttgtgaagaagtacaagtctgaggcattgggcgtgggcgacgtaaagctgccttgcgaaatggacgcgcaaggacccaagcagatgaacatcccagggggcgacagatccacacccgcagcagtgggcgccatggaggacaagagcgcggagcataaaaggacccaatactcttgctactgctgcaagctgagcatgaaggagggcgacccggccatttacgccgaacgcgcaggttacgataaactttggcatcctgcctgctttgtttgttccacttgccacgagctgcttgtagacatgatctacttttggaagaacgagaaattgtactgtggccgacattactgtgattccgagaaacccaggtgcgcaggctgcgacgaactcatcttctcaaacgagtacacacaggcggagaatcagaattggcatctgaaacacttctgctgtttcgactgtgattctattttagctggggaaatttacgttatggtgaacgataagccagtgtgcaaaccgtgttacgtgaagaaccatgccgtggtctgccaaggttgtcataacgccattgaccctgaggtacagagagtcacctataacaacttctcatggcacgcctctaccgagtgcttcctgtgctcatgttgtagcaaatgcctgatcggccagaaattcatgcctgtggaaggcatggtgttctgtagcgtggagtgtaagaaaaggatgagctag

SEQ ID NO: 208373 - DNA, 540 bp, synthetic construct
  misc_feature 1..540: note = Description of Artificial Sequence: Synthetic coding sequence
  source 1..540: mol_type = other DNA
atgaaggagggcgaccccgccatctacgccgagcgggccggctacgataaactctggcatcctgcttgcttcgtctgctctacatgtcacgagcttttagtggatatgatctacttttggaaaaatgaaaagctttactgtggacgtcattattgtgacagcgagaagcccagatgcgctggatgcgacgaacttatattttcaaatgaatacactcaggctgagaaccagaactggcacctcaagcacttttgttgtttcgattgcgattccattctcgctggagagatctatgtcatggtgaacgacaagcccgtttgtaagccctgctacgttaagaaccacgcggtcgtgtgtcaggggtgccataacgccatcgatcccgaagtgcaacgagtgacttacaataatttcagctggcacgccagtactgagtgctttttgtgtagttgctgttcaaaatgcttgataggccaaaaatttatgcctgtggaggggatggtgttttgttccgtcgaatgcaagaaaagaatgtcgtag

SEQ ID NO: 208374 - DNA, 804 bp, synthetic construct
  misc_feature 1..804: note = Description of Artificial Sequence: Synthetic coding sequence
  source 1..804: mol_type = other DNA
atgggcgcccggcagatccagaccagcagcagccagaccagccccgaggaggctatgggaacaccccgtatccagcacctgttaatccttctggtgctcggtgcctcactgttgacttctggcctcgagctgtattgtcagaagggtctgtcaatgacggtggaggcggatccagcaaacatgtttaattggactaccgaagaggtggaaacctgcgataaaggcgccctttgtcaggagaccatcttaataatcaaggccggcacagagaccgctattctggcaacgaaaggctgtatccctgagggtgaagaggcaatcaccatagtgcaacattcttcccctcccggcctaattgtaacttcatatagtaattattgtgaggattcgttttgcaacgataaggattccctttcccagttttgggaatttagcgaaactactgcgtctactgtgagcacaactctgcactgtcccacgtgtgtggcacttggaacatgcttttcggcaccttccctgccatgtcccaatggcactacacggtgctaccaagggaaattagaaataaccggcggcggcatcgagtcctctgtcgaggtgaaggggtgtactgcgatgatcgggtgtcgtctcatgtccggaatcctggccgtgggacctatgtttgtgcgagaggcgtgcccacaccagctgctaacccaacctaggaagacggagaacggggccacatgtctgccaattccagtgtggggcctgcaattacttctgcctttactgttgccaagcttcattcacttcagttag

SEQ ID NO: 208375 - DNA, 789 bp, synthetic construct
  misc_feature 1..789: note = Description of Artificial Sequence: Synthetic coding sequence
  source 1..789: mol_type = other DNA
atccagaccagcagcagccagaccagccccgaggaggccatgggcacccctcggatccaacacctgcttatcttgctcgtgcttggggcctctcttctgaccagtggcctggagttgtactgccagaaaggcctctccatgacggtggaagctgaccccgctaatatgttcaattggactacagaggaggtcgaaacttgcgacaaaggcgctctgtgccaagagacaattctaatcattaaggcaggcactgagactgccatactggctacaaagggctgcatccccgagggagaggaagctataacaatcgtgcagcattcatctccccccggcctcatcgttactagttattcaaactactgcgaggattcgttttgcaacgacaaagatagtctgtctcaattctgggagtttagcgagactacagccagcactgttagcacaacccttcattgtcctacttgcgtcgcacttgggacatgtttttcagctccctcactgccctgtccaaacggaactacaaggtgttatcagggaaagctggaaatcacaggaggtggcatcgagtcctccgtggaggttaaaggctgcacagccatgattggttgcaggctgatgtccggcatcctggccgttggacctatgtttgtcagggaggcttgtccccaccagctgttgacccagccgaggaagacagaaaacggcgccacttgcttgccaatcccagtatggggactgcaactgctcctcccactgctgctcccctcttttatccacttctcctag

SEQ ID NO: 208376 - DNA, 750 bp, synthetic construct
  misc_feature 1..750: note = Description of Artificial Sequence: Synthetic coding sequence
  source 1..750: mol_type = other DNA
atgggcaccccccggatccagcacctgctgatcctgctggtgctgggcgcgtctctgctgacaagtggtcttgaactctattgtcagaagggactgtctatgaccgtggaggccgatccagccaatatgttcaattggacaactgaagaggtcgaaacctgtgacaagggagccctttgtcaagagacaatcttaattattaaggccggtactgagacagctattttggctacaaaagggtgtatccccgagggcgaggaagccattacaatcgtgcaacattcatctccccccgggctaatcgttacaagctacagtaactactgtgaagactccttttgtaatgacaaggattcgctatctcaattctgggagtttagtgagaccacggcgtccacagtcagtaccactctgcattgcccaacctgtgtcgccctgggcacatgttttagtgcgcctagtctcccatgcccaaacggaactacccgctgttaccaaggtaaactcgagatcaccggtgggggaatcgaatcctctgttgaggtcaagggttgtactgcaatgattggctgtcggctgatgtctggaatactggccgtgggccctatgtttgtgagagaagcttgcccgcaccagctactgacccagcctcgaaagaccgagaacggggccacctgcctgcccattccagtctggggactccaattgttactccccctgctcctgccatcgttcatccacttcagctag

SEQ ID NO: 208377 - DNA, 804 bp, synthetic construct
  misc_feature 1..804: note = Description of Artificial Sequence: Synthetic coding sequence
  source 1..804: mol_type = other DNA
atgggcgcccggcagatccagaccagcagcagccagaccagccccgaggaagcgatggggactccacggatacagcacctgctgatcctgctagtcctcggggcgtcgctgttgacctcagggttagagctgtattgccaaaaaggcctctctatgacagttgaagccgatccagcaaacatgtttaattggaccaccgaagaggtggagacatgtgataaaggcgccctgtgtcaggaaactatcttgatcattaaagctggcaccgagactgctatcctagctactaaaggttgcatccctgaaggggaggaagctatcaccattgtccaacatagctcccctcccggccttatagtgacgtcatactccaattattgtgaggatagtttttgcaacgacaaagactctctgagtcagttctgggaattttcagaaacaactgcctcaaccgtatctactactctgcattgccccacatgcgtcgcactggggacctgtttttcagcacccagcctgccatgtccaaatgggactactcgctgttatcaggggaaacttgagattaccgggggggggatcgaatcctccgtggaagtgaaggggtgtaccgctatgatcgggtgccgcttaatgtccggtatacttgccgtggggccaatgtttgtgagagaagcctgccctcatcagctcttgacccaaccccgaaagaccgagaatggggcaacgtgtctgccaatccccgtctgggggttacaacttctcctgccattgttgctgccatctttcatacatttctcatag

SEQ ID NO: 208378 - DNA, 2823 bp, synthetic construct
  misc_feature 1..2823: note = Description of Artificial Sequence: Synthetic coding sequence
  source 1..2823: mol_type = other DNA
atgatcagcgcccactgcaacctgcggctgctgtgcagcagcgacagcagcgcctccgcatcccaggtggcaggcactaccgaggtggttgagaacctcgttactaatgataatagtccaaatattcctgaggccattgataggctgtttagcgacatcgcaaacatcaatagggagtcgatggcagaaatcacagatattcaaatagaggaaatggctgtaaatctgtggaattgggctctgacaatcggcggcggatggctggtgaatgaggaacaaaagatccgtctgcactacgtcgcctgcaaacttcttagtatgtgcgaagctagctttgcatccgaacagtctatccagaggctaataatgatgaacatgcggatcgggaaagaatggttggatgccggcaattttctgattgctgacgagtgtttccaagccgccgtggcttccctggagcagctgtacgtaaagctcattcagagatcatcgccagaggccgacctaactatggaaaagattacagtggagtccgatcatttcagggtgctgtcgtaccaggcagaatccgccgtggcacagggggacttccaaagggccagtatgtgcgtactacagtgcaaagacatgctgatgcgccttccacaaatgacaagctccctacaccacctatgctacaattttggggttgaaacccagaagaacaacaaatacgaagagtcaagcttttggctctcacagtcttacgacatagggaaaatggacaagaagagcacaggacccgagatgttggccaaggtactcaggctactagctacaaattacctagattgggatgataccaagtattatgacaaggcccttaacgccgtaaatttagctaataaagagcatctgtcgtctcccggcctgttcctgaaaatgaagatcttactgaaaggagagacttcaaatgaggaattgctggaggccgtaatggaaatccttcacctggatatgccactggatttttgtctcaacattgctaagctgctgatggaccatgaaagagaaagtgtcggattccatttcctgacgatcatacacgaacgctttaagagcagcgaaaacattgggaaagtgctcattcttcatacggacatgttgctacagcgtaaagaagaattgctggctaaggagaaaatagaggaaatcttcctggctcaccagacgggcaggcaacttacggcagagtctatgaattggttgcataacatcttgtggcggcaggctgcctcttcctttgaggttcagaactacaccgatgccctgcagtggtactattactcgctcaggttttattcgaccgacgagatggatctcgacttcacgaaactgcagcgcaacatggcctgttgctatctgaacctgcaacagctggataaagccaaggaggcagtggccgaggcggagagacatgaccctcgcaatgtgtttactcaattttacattttcaaaattgcggttatcgagggcaattcggaacgcgccctgcaagcaatcatcaccctcgagaatattttaactgatgaagaaagcgaggacaacgatttggtggctgagaggggctccccaacaatgctactgagccttgccgcccagtttgctctcgaaaacgggcaacaaatcgtagccgagaaggctctggaatatctcgcccagcatagtgaggaccaggagcaggtgctaaccgccgtgaaatgtttgctaaggttcctcttgcctaaaatcgcagaaatgcctgagtcagaggacaagaagaaggagatggaccgcctactcacctgccttaatcgcgctttcgtgaaactctcccaaccctttggggaggaagcactgtcactggaatcaagggctaacgaggctcagtggtttcggaaaacggcttggaacttagccgtgcaatgcgataaagaccctgtgatgatgagggagttcttcatactgtcttataagatgagccaattttgtccttctgaccaggttattcttatcgctaggaaaacgtgtctgctgatggctgtggcggttgatctggagcaggggcgcaaggcaagcaccgcatttgagcagaccatgttcttgtctcgtgcgcttgaagagattcaaacttgtaatgatattcacaacttcctaaaacagactggtaccttctctaacgattcctgtgagaaattacttctgttgtacgagtttgaagtccgtgccaagcttaacgatcccctgctggaaagctttttggagtctgtctgggagttgccccacctcgaaaccaaaactttcgaaaccatcgctatcattgcaatggagaagcccgcccattatcctctgatcgccctcaaagcgctcaagaaagccctgctcctgtacaaaaaggaagaacccattgacatctcccaatactcaaagtgtatgcacaacttggtgaatctgtccgtgccagatggtgcaagtaacgtcgaactgtgtcctttggaggaggtttgggggtattttgaggatgccctaagtcatatcagcaggacaaaagactaccctgagatggagatcctgtggctgatggtgaagtcatggaatacaggggtgttgatgttctctagaagtaaatatgctagcgccgagaagtggtgtgggctcgcactccgctttttaaaccaccttacctcattcaaggagagttacgagacacagatgaacatgctctacagccaactggtcgaggctctcagcaataacaaaggacctgtatttcacgagcacggatattggtcaaagagcgattag

SEQ ID NO: 208379 - DNA, 1848 bp, synthetic construct
  misc_feature 1..1848: note = Description of Artificial Sequence: Synthetic coding sequence
  source 1..1848: mol_type = other DNA
atggagatcctgcacctggacatgcccctggacttctgcctgaacattgccaaactgttaatggatcacgagcgcgagagcgtaggctttcactttcttacaatcattcacgaacgctttaaaagcagtgaaaatataggcaaagtcctcatcctgcatactgacatgctgcttcagaggaaagaggagctgctggcgaaggagaaaatcgaagagatcttccttgcccatcagactggaagacaactgacagcagagtcaatgaattggctccacaatatactgtggagacaggcagcctcctcctttgaggtacagaattacactgatgcactccagtggtattactactctctcaggttctactcaacagatgaaatggacctggatttcaccaaattgcagaggaatatggcctgctgttacctgaaccttcagcagctggataaggccaaagaagccgtggctgaggcagagagacacgatcctcggaacgtcttcacccagttctacattttcaaaattgcagtgatcgagggaaattccgagcgcgccctgcaggccattatcactctcgagaacattctgaccgatgaagaatcggaagacaacgatcttgttgcagagaggggttcaccaacgatgctgttgagtcttgccgctcagttcgccctggagaatgggcagcagatcgtggccgagaaagctctggagtatctggcccagcactctgaggatcaggaacaggtgctcacggcggtcaaatgtctccttagattcctgctgccaaagatcgccgaaatgcctgagtccgaggataagaagaaagaaatggacagattgctgacatgccttaacagagcgtttgtcaagctgagccagccatttggcgaggaggccctgagcctcgagagcagggccaacgaggcacagtggttccggaagaccgcttggaatctcgcggttcagtgcgataaggaccctgtgatgatgagagaatttttcatcctttcgtacaagatgagccagttttgtccatccgaccaagtgatcctgatcgcccggaaaacctgtttgctgatggcagttgcggtcgacctggagcaggggagaaaagcctcgaccgctttcgagcagaccatgtttcttagcagggctctagaagaaattcaaacctgcaatgacatccacaacttcttaaagcagacagggacgttcagtaatgattcctgcgagaaattattacttctgtacgaatttgaggtccgggccaaactgaatgatcctcttctggaatctttcctcgagagtgtatgggaactcccccacctcgagactaaaacctttgagaccattgccatcatcgcaatggaaaaacccgcccactaccccttaattgccctgaaggccctaaagaaagctctgttactatataagaaagaggagccaatcgatatctcccagtattcaaagtgcatgcacaatcttgtcaatctctcggttccagatggagcttcgaatgtggaactgtgccctctggaggaagtgtgggggtattttgaagatgcacttagccatatctcccggacaaaagactacccagaaatggaaatactttggctgatggtaaagtcctggaacacgggtgtcctgatgttttctcgctccaagtacgctagtgccgaaaagtggtgtggcctggctctgcgcttcctcaatcatctgacatctttcaaagagagttacgagacccagatgaacatgctctattcccagttggtagaggccttgagtaataataaggggcccgtgtttcatgagcatggctattggtctaagtccgattag

SEQ ID NO: 208380 - DNA, 2778 bp, synthetic construct
  misc_feature 1..2778: note = Description of Artificial Sequence: Synthetic coding sequence
  source 1..2778: mol_type = other DNA
atggacaacgacgacttcttcagcatggacttcaaggaggtggtggagaatctcgtcaccaacgacaactcaccaaatatcccggaggcaatcgacaggttgttctccgatattgctaatattaacagagaatctatggccgagattactgatattcagatcgaggaaatggctgtgaatctgtggaactgggccctgaccatcggcgggggatggctggtgaatgaggagcaaaagatacgtctccactacgtggcttgtaaactgttatctatgtgcgaggcctcatttgcctccgaacagagcatccaacggctgattatgatgaacatgcggatcggaaaggagtggctggacgccggtaactttctgatcgctgacgagtgcttccaggcagccgtcgcgagcctggaacagctttacgttaagctgatccaaagatcctcccctgaggccgacctgaccatggagaagattaccgtggaatctgatcactttcgggttctgtcttatcaggcagagtcagccgttgcccagggagatttccagagggcctcaatgtgtgtgcttcagtgcaaggatatgctaatgaggctcccacagatgacttcaagtctccaccatctgtgttataatttcggggtcgagacacagaaaaacaataagtatgaggagtcttcattttggttgtctcaaagttacgacatcggtaagatggataagaagagtacaggacctgaaatgctggccaaggtcctccggctcctggccacaaactatcttgattgggacgacacaaaatattatgataaggcgttaaatgcagttaacctggccaataaggagcacctctcttccccaggactgttcctcaaaatgaagattctccttaagggcgagacgagcaacgaggaactcttagaggccgtgatggaaatcctgcatctggacatgccgctggacttctgcctcaatatagccaagctcctgatggaccacgaaagggagtctgtcggattccatttcctgacgatcatccacgaacgattcaagtcaagtgaaaatatagggaaagtgctgatcctccataccgacatgctgctgcaaagaaaggaagaactcctagccaaggagaaaattgaagaaattttcctggcacaccaaaccggacgtcagttgaccgccgagtcgatgaattggcttcacaacatcctgtggaggcaggcagcctcctccttcgaggtccagaattatactgatgccctgcaatggtactattacagccttcggttctattcaaccgatgagatggatctggactttactaaactccagagaaacatggcgtgttgttatcttaatttgcagcaattggacaaggccaaggaggccgtcgccgaagccgaacggcacgatccgaggaacgtgtttacgcaattttacatctttaagattgctgtgatagaaggaaatagtgagcgggctctacaggccatcatcacacttgagaatatccttactgacgaagaatccgaggataacgatctggtggcagagcgaggtagcccaacaatgttgctgtcgcttgctgcccagttcgctcttgagaatggtcaacagatagtagcagaaaaagcactggagtatctggcgcagcattcggaagatcaagagcaagtcctcactgcagtcaagtgtttgctgagattcctgcttcccaagatcgccgagatgcctgaatctgaagataagaaaaaggaaatggaccgcttgctcacatgcttgaatcgtgccttcgtgaaactgtcccagcctttcggcgaagaagccctatcacttgagagtcgcgccaacgaggcacagtggtttagaaaaactgcctggaatttggctgtccagtgtgataaagaccctgtaatgatgagagagtttttcattctgtcgtacaaaatgtctcaattttgtccctccgatcaggtaatcttgatcgctcgaaagacctgcttactgatggctgtcgcggtagatctggagcagggcaggaaggcatcaaccgccttcgagcaaaccatgtttctgtcgagggcattagaggagatccagacctgcaacgacattcacaactttctgaagcagaccggcaccttcagcaacgactcctgcgagaaactcctgctgctgtatgagttcgaggtccgagccaagctgaacgatccactcctagagtcatttctcgaatcagtttgggagttgccacatctggaaaccaaaacttttgaaactatcgcaatcattgctatggaaaagcccgcacattacccactgattgccttaaaggcactgaagaaggcacttctgctgtataagaaggaggaacccatcgacatctctcagtacagcaaatgtatgcacaatctcgtaaacctgagcgtccctgatggtgcgtccaatgtggaactgtgtccactcgaggaggtgtggggctactttgaggatgcattgtcacacatttcacgaacaaaggactaccccgaaatggagatcctgtggcttatggtgaaatcctggaacactggcgtcctgatgttttcccgctccaaatatgcgtcggccgaaaagtggtgcggcctggccctgcggtttctcaatcatctaaccagttttaaggaatcctacgagacccaaatgaatatgctgtattcacagctcgtggaggcattgagtaacaataagggccccgtcttccatgagcacggatattggtctaagtctgactag

SEQ ID NO: 208381 - DNA, 2823 bp, synthetic construct
  misc_feature 1..2823: note = Description of Artificial Sequence: Synthetic coding sequence
  source 1..2823: mol_type = other DNA
atgatcagcgcccactgcaacctgcggctgctgtgcagcagcgacagcagcgcatccgccagccaggtagccgggacaaccgaggtcgtggaaaatcttgtgactaacgataatagccccaatatacctgaggcaatcgatcgccttttctctgatattgctaacattaatcgggagtctatggccgaaatcaccgatatccagattgaggaaatggcagtgaacttgtggaactgggctctcactataggggggggatggctggtcaatgaggaacagaagatccggttacactacgtagcttgtaagctgttatcaatgtgtgaggcgagctttgcaagcgagcagtcgatccagaggctcataatgatgaacatgcgaattggaaaagaatggcttgacgccgggaattttctgatagcggacgagtgctttcaggcagcggtggcgagcctggaacaactgtatgtgaaactgatacagaggtcctcccctgaggcagaccttactatggaaaagatcacagtggagtccgaccattttcgcgtactgtcttaccaggcagaaagcgccgtcgcacaaggtgattttcagcgggcaagtatgtgcgtgctgcaatgtaaagacatgttaatgcggttaccccaaatgactagcagcttacatcacctttgctataactttggagtggaaactcagaaaaacaataagtacgaagaatcgtccttctggcttagtcagagctacgacattggtaaaatggacaagaagagcactggcccagagatgctggcaaaagtgctgcgcttactggccacaaattatctggactgggatgacaccaaatactatgataaagcgctgaacgcggtgaatctcgccaataaagaacacctgagctcaccgggactcttccttaaaatgaaaatcctactaaagggggagacatcaaatgaggagcttctggaggccgtaatggaaatcttgcacctggacatgcctctggatttttgcctgaacattgcaaagctgctgatggaccatgaacgcgagagcgtcggctttcactttcttaccatcatccacgagcggttcaaatcaagcgaaaacattggtaaagtcttgattttgcataccgatatgcttcttcagcgcaaagaggaactgctggccaaggaaaaaatcgaggaaattttcctggctcaccagacaggccggcagctcacggccgaatctatgaactggttacacaacatcctgtggcgccaggccgcttccagcttcgaagttcagaattacaccgatgctctacagtggtattactactccctgcgtttttactcaacagatgagatggatctggattttactaagttacaacggaacatggcttgctgctatctgaatctacaacagctagacaaagccaaagaagccgttgcagaggcagagcgacacgatccacgaaacgtgtttacccagttttatatcttcaagatagcagtgattgaggggaattcggaaagggctctgcaggctattataactctggaaaacattcttactgatgaagagtctgaggacaatgacctggtggctgaaagaggcagtccaaccatgttgttgtccctggccgcacagtttgcactggagaatggacagcagatcgtcgcagagaaagcgctggaatacctggctcagcacagcgaggatcaagaacaagtgctcactgccgttaagtgtctgctccggtttctgcttccaaagattgcggagatgcccgaatctgaggataaaaagaaagagatggacagactcctgacatgcttgaacagagcctttgttaagctgtcacagccgtttggggaggaggcgctgagtttggagtccagagccaacgaagcacagtggttccgcaaaactgcttggaacctggctgtacagtgtgataaagaccctgttatgatgcgggaatttttcatcctgtcgtataaaatgagccaattctgtccgtccgaccaggtcatcctgatagcaaggaagacctgccttctgatggcagtcgccgtggatttggagcaaggcaggaaggcctctacagcctttgaacagacgatgttcttgagcagagccctggaggagatccagacctgtaacgatatccataatttcctcaaacaaacagggacattttccaatgattcttgcgagaagctgctgctcttatacgaatttgaggtccgggcaaaacttaacgacccgctgcttgaaagtttcttggagagcgtgtgggaactccctcacctggagacaaaaacttttgaaactattgccatcatcgccatggagaagcctgcccattatccgctaatcgccctgaaagcgctcaaaaaggccctgctgttgtataagaaggaagaacctattgatatctcacagtactctaaatgtatgcacaacctggttaaccttagcgtgcctgatggggcgagcaatgtagaactctgccccctcgaggaagtgtggggttacttcgaagacgctctgagccacattagtcgcacgaaggactatcctgaaatggaaatcctgtggctgatggtcaagtcctggaatacaggggtcctaatgttttcacgaagtaagtacgcctctgctgagaagtggtgcggcttagcgctgcgatttcttaaccacctgactagttttaaagaatcctatgaaactcagatgaacatgctctactctcagctcgttgaggcactgtccaataacaagggaccagtgtttcacgaacatggatattggtccaaatcggactag

SEQ ID NO: 208382 - DNA, 372 bp, synthetic construct
  misc_feature 1..372: note = Description of Artificial Sequence: Synthetic coding sequence
  source 1..372: mol_type = other DNA
atgatggccaaccacctggtgaagcccgacaaccggaactgcaagaggccacgagaacttgaaagtccggttcccgatagcccccagttatctagtctgggtaagtccgactcctctttctctgagatttcgggcttgttctacaaagatgaggccctggagaaagacctcaacgacgttagcaaggagattaatctgatgctgtccacttatgccaagcttttgtccgagagagctgcagtggatgctagttatattgacgagatagatgagcttttcaaggaggccaatgctatcgagaacttcctaatacagaagcgggagttcctgaggcaaaggttcactgtgatagccaacacactacacaggtag

SEQ ID NO: 208383 - DNA, 372 bp, synthetic construct
  misc_feature 1..372: note = Description of Artificial Sequence: Synthetic coding sequence
  source 1..372: mol_type = other DNA
atgatggccaaccacctggtgaagcccgacaaccggaactgcaagaggccaagagaactggaatccccagtgccggactcaccgcagcttagcagcttgggtaaaagtgattccagcttctccgaaatcagtggcttgttttacaaagacgaagctctggagaaggacctgaatgatgtttcaaaggaaattaatctgatgctcagcacttacgcaaagctcctaagcgaaagggccgcagtagacgcttcatatatcgatgagattgacgaattgtttaaagaggctaatgccattgagaacttcttgatccagaaaagagaattcctccgtcagcgattcaccgtgattgccaacactctccatcggtag

SEQ ID NO: 208384 - DNA, 1059 bp, synthetic construct
  misc_feature 1..1059: note = Description of Artificial Sequence: Synthetic coding sequence
  source 1..1059: mol_type = other DNA
atggccctgcggcccgaggaccccagcagcggcttccggcacagcaacgtggtggcattcatcaacgaaaagatggctcgtcacacaaaagggcccgagttctacttagaaaacatttctttaagctgggagaaggtggaggacaagctgagagctattctggaggactccgaggtgccgtcagaggtgaaagaagcctgtacttggggatctttggccctgggcgtgagattcgcccatagacaggcccagctccagcgccacagagtcagatggctccatgggtttgcaaagctgcataagagcgctgctcaagctctcgcgtccgacttaaagaagcttagagagcagcaggagacggagaggaaagaggccgccagcaggctcaggatggcccagacatcgctagtggaagtgcagaaagagcgagacaaggaattagttagtccccatgagtgggaacagggtgcagggtggcctggcctcgccacggccggtggagtgtgcaccgaaggagcagcagaagaggaggaagaggccgccgtcgcggccgctggcgctgcaggcggcaagggtgccgaagaggaacagcgcggctgctggcggttgtggctgcccctgtggaggccctggttgcctctctggcggctggggcttcccccttggaggccttccagtccaacttggagacctggcctgccaccctggagacctcagcgcagctggcgcgagagctcttgctctagcctggagatgcttatacgcaaatctactcctatcggaggcaggcgaagggaaatctctgggagatcaaagcaaccccacctgatctccctagagccgagaactcccgggcccgagccacatcagaacctttttctcagctcgtctctgccacatacgcatacccacactcaagccttgttcccaccgtcgcagacttatcctctctatcctctccacaagcaacaatctcagcaccagtttcgcctgagctgcctgcccaccggaaggccacttatcttagcttgtgggctgatgggcggccctacggagtag

SEQ ID NO: 208385 - DNA, 1059 bp, synthetic construct
  misc_feature 1..1059: note = Description of Artificial Sequence: Synthetic coding sequence
  source 1..1059: mol_type = other DNA
atggccctgcggcccgaggaccccagcagcggcttccggcacagcaacgtcgtagcctttatcaatgaaaagatggctcgccataccaaagggcccgaattctacctggaaaatatctccctctcttgggaaaaggtcgaggacaagttgagggccatcttagaggacagtgaagtgccttccgaagtgaaggaggcttgcacttggggctctctggccctcggtgtgcggtttgcgcatagacaagcccagctgcagcggcaccgggtcagatggctccatggcttcgctaaactccacaaatctgccgcccaggccctggcatccgatctcaagaagttgagagaacagcaagagaccgagcgaaaagaggccgcatcacggctgaggatggcgcaaacatctttagtggaagtgcagaaagagcgggacaaggagttagtctccccgcacgaatgggagcagggcgcgggctggcccgggctcgccactgccggcggagtgtgtacagagggcgctgcagaagaggaggaggaggccgcagtggcagcggctggcgcggccggaggaaagggtgccgaggaagaacagaggggttgctggaggctgtggttaccactgtggagaccctggcttcccctgtggcggttaggcctgcctccttggagacccagtagtcccacttggcgacctggattgcccccttggaggccacaacggtcttggagggaatctagttgctctagcttggagatgctcatcaggaagtccacccccatcggggggcgtagaagggaaatctcgggccgctcaaaacaacctcaccttatcagcttggaaccaagaacacccggaccggaaccccatcagaatctcttcctctcttcttcactgcctcacacccacactcatacccaggcgcttttccccccaagccagacctatcctctctatcctctgcacaagcagcagtcccagcatcagttcaggctgtcctgccttccaaccggacgtccattgattctcgcctgtggactcatgggcgggccaaccgaatag

SEQ ID NO: 208386 - DNA, 1230 bp, synthetic construct
  misc_feature 1..1230: note = Description of Artificial Sequence: Synthetic coding sequence
  source 1..1230: mol_type = other DNA
atggccctgcggcccgaggaccccagcagcggcttccggcacagcaacgtggtcgcgttcatcaacgaaaagatggcccgacatactaaggggcctgaattttacctggagaatatttcactttcttgggagaaggtggaggataagcttcgcgccattctggaagactcagaggtgccttctgaagtaaaggaggcatgcacctggggttccctggcactcggagtgcggttcgctcacaggcaggcccagctacagcgccacagggtgcgctggctgcacggtttcgctaagctacataaatccgctgcccaggctctggcatctgatctgaagaagttgagagaacaacaggaaacggaacggaaggaggccgccagcagactgcggatggcacagaccagcttagtcgaggtgcaaaaagaacgagacaaggaactagtgtccccacatgaatgggagcaaggagccggatggccgggtttggctacggctggcggggtctgtaccgaaggggcggcagaggaggaggaggaagccgccgttgcagctgctggggccgccggggggaagggcgccgaagaagagcaacgagacgttgaggtggtcgctgccccagtcgaggcaatggcgcccccagtggaggcgggagctgcccccatggagacgcagtttccccacgtggaagcacgcgctgcaagcatggagaccaccgaaaaacttgaacggatcctgcttcagcttctcggggatgccgaccaggagaaatatacttactggggtcagaaggagggagacctcaggtcagtggaaacagccacttcttatttcagcggcacaactaacccctggagtcgggcatcttcagagcctttgcctgtgcagctgcccgcctcttacagctatagctactcatcgccatttagtagcttttcagacatccctaccattagtccccctcaggcaaccgtcactgcgccagtgccacctcagctcccatccgattgggaggccttcgatacatctctgtggtccgacgggggccctcaccgcatcgaccaccaggagcacccacgagaccggaggtatagcgagcctcatcaacagcggccgcccgtctataggcgtccgggagattgggactgtccgtggtgtaatgccgtaaatttctcacggcgcgatacatgcttcgactgcggaaaaggtatttggttgcaaaagccacactag

SEQ ID NO: 208387 - DNA, 939 bp, synthetic construct
  misc_feature 1..939: note = Description of Artificial Sequence: Synthetic coding sequence
  source 1..939: mol_type = other DNA
atggccctgcggcccgaggaccccagcagcggcttccggcacggcaatgtggttgctttcattatcgaaaaaatggcacgtcatactaagggccctgagttctacttcgagaacatatctctcagctgggaagaggtagaagacaaactccgcgctattctggaagacagcgaggttccttccgaggtgaaagaggcatgtacatggggctcgctggccctgggtgtgaggttcgcgcacagacaggggcagctgcagaacagacgcgtacaatggctccagggcttcgccaaacttcatcggtcagccgcactggtcttggcttccaacctgaccgaactaaaggagcagcaggaaatggaatgtaacgaagcaactttccagctgcagttgactgagacgagcctggccgaagtgcagcgggaacgcgacatgctgcggtggaaactattccatgccgaactggcaccaccacagggccagggacaggcaacagttttcccgggtctagctacagccggtggcgattggacggagggtgctggagagcaggagaaagaggcagtggccgccgctggagccgctggcgggaagggagaagaaaggtatgctgaagcgggcccagcccccgctgaagttcttcagggactcggtggtgggttccggcagcctctcggcgcaattgtggcgggcaaactgcacctctgtggtgccgagggagaaaggtcccaggtcagcacaaattcacacgtttgcctgttatgggcttgggtacatagcttgaccggcgcatccagttgtcctgctccttatttgatccacatactgattcccatgcctttcgtacggctcttatctcacacccagtatacaccatttacgtcgaagggccatcggacaggctctaactcagacgcttttcagctggggggtctctag

SEQ ID NO: 208388 - DNA, 4494 bp, synthetic construct
  misc_feature 1..4494: note = Description of Artificial Sequence: Synthetic coding sequence
  source 1..4494: mol_type = other DNA
atgagccgggccgtgcggctgcccgtgccctgccccgtgcagctgggcactctacgaaatgacagcctggaagctcaactccatgagtatgttaagcagggcaattacgtgaaggtgaagaaaatactgaagaagggtatttacgtagacgcagtaaattcacttggtcagacagctttgttcgtggctgcccttctaggccttcgcaaattcgtggacgtgttggtggactacggaagtgaccctaaccatagatgttttgatggctctacacccgttcacgcagcagcattctctgggaaccagtggattctgagcaaacttctggatgctggtggggacttgaggctccacgatgagcgcggccaaaatccaaaaacctgggcgctcactgcaggaaaagagcgctctacccagatagtggaatttatgcagcgatgtgcctcgcacatgcaggctattattcagggtttctcttatgatctgctgaagaaaattgacagtccacagcgactcgtgtacagcccaagttggtgcggcgggttggtgcaggggaaccctaacggaagcccaaatagattgctgaaagcgggagttattagtgcgcagaacatttactcatttgggtttggaaaagcaatgccatggttccagttctaccttactggagcaacccagatggcttatcttggaagcttaccagtgatcggagagaaggaagtgattcaagcagatgatgaacctaccttcagcttcttttctggcccttacatggtcatgaccaatttggtatggaacggatccagggtgacagttaaggaacttaatctgccaacccacccccattgcagccgattaaggctggctgatctgcttatagccgaacaggagcacagcagcaaactgaggcacccttacctcctgcagctgatggcagtgtgcctgagccaggatttggagaagacccgcctcgtctatgagagaatcacgatcggtacgctgttctctgtgctgcacgaaagacgctcacagttccctgttttacatatggaagttatcgtgcacctgctcttacagatttctgacgccttgcggtatctgcattttcaaggtttcatccatcgctccctgagctcttatgccgtgcacatcatttccccaggagaggcccggttgacgaatctggaatatatgctagagtcggaagaccgcggggtgcaacgggatctgacccgcgtaccgttaccaactcagttatataactgggccgcccccgaggtgattctccagaaagccgcgacagtgaagagcgacatctacagcttctcgatgatcatgcaggaaattcttactgatgatataccctggaaggggctagatggtagcgtggtcaaaaaagccgtggtgagcggaaattacctcgaggccgacgtgcgtctccccaagccctattacgacatagtgaagagcggcatccacgtcaaacagaaagacagaactatgaacctccaggatatccggtacattctcaagaatgatcttaaagactttaccggagctcaaaggacccaacctacagagtcccctagagtgcagcggtatggattacatccagacgtgaatgtgtatttgggactcacgtccgagcaccccagagagactccggacatggaaataatcgaattgaaagaaatggggagtcagcctcatagccctagggtccactccctgttcacagaaggtacgctggacccacaggccccagatccgtgtctgatggcacgtgagacccaaaatcaggacgcaccatgtccggccccctttatggcagaggaggctagctctccaagtactgggcaaccctctctctgtagtttcgagataaatgagatctattctggctgcctcatccttgaggacgatatcgaggaacccccaggcgccgcctcctcactggaagcagacggcccaaaccaagtggatgagctcaagagcatggaagaggagctggacaaaatggagagggaagcctgttgttttggctcagaagatgaaagctcttcaaaggccgagactgaatatagctttgatgactgggactggcagaacggtagcttgtcaagcctttcccttccagaatctacaagggaagcgaagtcgaacttaaacaacatgtccactaccgaggagtatctgatctcgaagtgtgttctggacttgaaaatcatgcagaccattatgcacgaaaatgatgataggttgcggaacatcgaacagatcctcgatgaggtggaaatgaaacagaaggagcaagaggagaggatgtccttgtgggctacatcacgagagtttactaacgcctataagttaccacttgccgtgggccccccatctttgaattacattcctccagtgctccaactgagcggcggacagaagcccgatactagtggaaattaccccacactcccgaggtttccgcgcatgctgccaaccctgtgcgaccctgggaagcagaacactgatgagcaatttcagtgtacacagggtgccaaggattctttagagacctcccggatacagaacacgtcttcccaggggaggcctcgcgaaagcacagcacaggccaaggccacccagttcaatagtgctctgtttactttatcttcgcataggcaggggccatcggccagtccttcctgtcattgggacagcacgagaatgagcgtcgagccagtctccagcgaaatatacaacgccgagtctcggaataaggatgacggtaaggtgcacctaaagtggaaaatggaggtgaaggagatggctaaaaaggcagccacaggacagctcacggtcccaccttggcacccacagagtagtctgacactggagtcagaggcagagaatgaaccagacgcactccttcagccccccatccgcagtcccgagaatactgattggcagcgtgtgattgagtaccatagagagaacgacgagccaagaggcaacggaaaatttgacaagaccgggaataacgactgtgactccgatcagcacggccgacagccaaggctcggctcatttacatcaattcgtcatccgtccccaaggcaaaaggaacagccagagcattccgaagctttccaggctagcagcgacaccttggtcgcagtggagaagtcctacagccaccaaagtatgcaatccacctgtagtcccgagtctagcgaggatataacggatgaatttttgacgccagatggtgaatatttctactcctctacagctcaggaaaatttggcactggaaacaagctcgccgatcgaagaagacttcgaggggatccagggagccttcgctcagccacaagtgagtggagaagaaaagttccaaatgcggaagatcctgggtaagaatgccgaaattcttcccagaagccagtttcagcccgtccggtccacagaagacgagcaggaggagaccagtaaagaatcacccaaagaacttaaagaaaaggacattagtttaactgatatccaggacctgtcttctatctcctacgaaccagactcttcctttaaagaggcatcatgcaaaacaccaaagataaaccatgctcctacatccgtgagcacaccactgagccctggaagcgtcagctcagccgcctcccagtacaaggactgccttgagtctatcactttccaggttaagacggagttcgccagctgctggaattcccaagagtttatccagacactgtcagatgacttcatcagcgtgagggagagggccaaaaaacttgactcactgcttacctcgtctgaaacgccacccagcaggctgaccgggctaaagagactgtcctccttcatcggggcaggcagtccttcactggtcaaagcctgcgactcttcacccccccacgccacccagaggcggtctctgcccaaggtggaagctttctctcagcaccatatagacgagcttccacccccctctcaggagctgttggatgatattgaactgctgaagcaacagcaggggtcttccactgtgcttcacgagaacaccgcctcagacggtggaggtactgccaacgatcagcgccacctcgaagagcaagagaccgatagcaaaaaagaagacagttcaatgttgctgtcaaaagagacagaggacctgggcgaagataccgagcgggctcacagcacattggacgaggatctcgagcggtggctgcaacccccggaggagtcagttgaactccaggacctgccgaaggggtctgagcgcgaaacaaacatcaaggatcagaaagtcggggaagagaagcgaaaaagagaggatagtattacgcccgaacgacgtaagtctgaaggagtcctcggaacctctgaggaggacgagttgaagtcctgcttctggaagaggttagggtggagcgaatctagccggataatcgttctggatcaaagcgatctgagcgactag

SEQ ID NO: 208389 - DNA, 4356 bp, synthetic construct
  misc_feature 1..4356: note = Description of Artificial Sequence: Synthetic coding sequence
  source 1..4356: mol_type = other DNA
atgagccgggccgtgcggctgcccgtgccctgccccgtgcagctgggcacactacggaacgacagtctagaggcccagctacacgaatacgttaagcaaggaaattatgtcaaggtgaaaaaaattttaaaaaagggcatttacgttgatgcagtgaactcccttggtcagaccgcactctttgtggccgccctgctggggcttagaaagttcgtggatgtgctcgtggactacgggtcagacccaaatcaccgctgcttcgatggctccactcctgtccacgctgcagctttctctggaaatcaatggattctgagtaaactgttagatgccggtggggatctgagactgcatgacgagcggggacagaacccaaagacttgggcacttaccgccggtaaggaaaggagcacccaaattgtggaatttatgcagaggtgcgcgtctcacatgcaggcaataattcaaggatttagctatgacctcttgaaaaaaatcgactcgccacaaagactggtttattccccaagctggtgtggaggtttggtgcagggaaacccaaacggaagccccaacagactcttgaaggccggagtgataagcgctcaaaatatctactcattcggcttcggtaaattctacttaactggagcaacccagatggcttacctgggcagcctgcccgtaatcggggagaaggaagttatacaagctgacgatgagcccactttctcttttttctcaggcccgtacatggttatgacaaatctggtgtggaacggaagtcgcgtaactgtcaaagaattgaacctgcctacacaccctcactgcagtcggttacggctagcggacctcctgattgctgagcaagaacactccagcaagctgcgccacccataccttctgcagctgatggccgtctgcctgtctcaagacttagagaagacccgcctggtgtatgagcgcattacaattggaacgctgtttagcgtgctccatgagcggcgcagtcagttccctgtgttacatatggaagtgatcgtccacctgttgctgcagatcagtgatgcacttaggtatctccacttccaaggcttcattcataggagtctaagtagttatgccgtgcacataatctcacccggcgaggcaaggctcacaaatctggagtacatgttggagagtgaagatagaggcgtgcaacgagacctcacccgagtccctctgcccactcagctatataactgggccgcacccgaggtgattttacaaaaggccgcgacagtgaagagtgatatctatagcttttctatgattatgcaggagatccttactgatgacattccctggaagggcttggacggatcagttgtcaaaaaagctgttgtgtccggaaattacctggaggccgatgtgagactgcccaagccctactacgacatcgtaaagagcggaattcatgtgaagcagaaggaccgtaccatgaacctgcaagacatccgctacattctaaagaacgacctgaaagactttactggggcacagcgtacacagcccaccgaaagccctagggtgcagaggtatgggctgcaccctgatgttaatgtttatcttggccttacctcggagcatccccgggaaacccctgatatggagattatagagctgaaggaaatggggtcccaacctcattccccgcgagtacactccctcttcacagagggcactctggacccccaggcaccagatccgtgtctaatggcgcgtgaaactcagaaccaagatgccccgtgtcctgcccctttcatggcagaggaagcaagctcaccaagtacgggtcagccttcactgtgctcattcgaaatcaacgaaatctactccggatgcctgatcctggaggatgatatcgaggaacctcccggggctgcttcctccttggaggctgatggccccaaccaggtggacgagctcaaatcaatggaggaagaactggacaagatggaacgtgaggcctgttgcttcggttcagaggatgagagttcatccaaggcagaaacagagtactcgttcgacgactgggattggcaaaatgggtccctttcttccttgtctctgccagaatccacgagggaggcaaagtctaatctcaacaatatgagcactacagaagaatatctcatcagtaagtgcgttttggacctaaaaatcatgcaaacgatcatgcacgagaatgatgataggctgaggaacatagagcagatccttgatgaagtggagatgaagcagaaagaacaagaggagagaatgtctctctgggcaacgtctcgagaattcacaaatgcttacaagcttccgttggcagtaggcccacctagcctgaactatatccctcccgtgctgcagctgagcggcggtcaaaaacctgataccagcggtaattaccccaccctccccaggtttcctagaatgctgccaactttatgcgatcctggcaaacaaaacacggacgaacagtttcagtgtacgcagggggcaaaggattcattggaaacgagccggattcagaatacttcatcacaagggcgaccacgggagtccactgctcaggccaaagccacgcagtttaattccgccctattcaccctctcctcacaccgacagggaccgtccgcaagccccagctgccactgggactctactagaatgagcgtcgagcccgtcagctccgaaatttataacgctgaatcaagaaacaaggatgacggaaaagttcacttaaaatggaaaatggaagtcaaagaaatggctaaaaaagctgccactggccaactaactgtacctccttggcaccctcagagctccctgacactcgagagcgaggcggagaatgaacctgacgcgctcctccagccgcctatcaggtctcccgagaacaccgactggcagcgagtgatcgaataccatcgtgagaatgacgagccccgagggaacggaaaatttgacaagaccggcaataatgattgtgattccgaccagcatggccggcagccaaggctgggttcttttacctccatcagacaccctagcccacgccagaaagaacagccagagcattccgaggctttccaggccagcagtgataccctggtggcagtggaaaaaagttactcaacttccagccctattgaagaagacttcgagggaatacagggcgctttcgcgcaacctcaggtgtccggtgaagagaagtttcagatgcggaaaattctagggaagaatgcagaaattctcccccggtcccagttccagcccgttcgcagcacagaggatgaacaggaggaaaccagcaaagaatctcccaaggagctgaaggaaaaagacatttcacttacggacatccaggatctgagttctatcagctacgagccggattcttccttcaaggaagccagctgcaagactccgaagatcaaccatgctcctaccagtgtatccactcccctgtcccctggcagtgtgtccagcgccgcctcccagtataaagactgcctggagagtataactttccaggttaagacggaattcgctagctgctggaatagtcaagagtttattcagaccctgtctgatgattttatttccgtgcgggagcgggctaaaaaactggattcccttttgacgtcctctgaaactcccccatcacggctgaccggtctcaagagacttagctctttcatcggcgcggggtcgcctagtctggtcaaagcttgtgacagcagtcctccacatgctacccagcgcagaagcttacccaaagtggaggccttcagccaacatcacattgatgagctgccccctccctcccaggaactgctcgacgacatcgagcttctcaaacagcagcagggaagcagcactgttctgcatgaaaacactgccagcgatggtgggggcacggccaacgatcagcggcacctggaggaacaagagaccgatagcaaaaaagaggacagttcaatgctgttaagtaaagagacagaggatctgggagaagatactgaacgtgcccattccacactggacgaagatctcgaaaggtggttacagccacccgaggagtctgttgaactccaagacctcccaaaaggatccgagagagagaccaatatcaaggatcaaaaagtcggcgaggaaaagcgaaaacgagaagatagcattacccccgaaaggcggaaaagcgagggtgtcctcggtacgtctgaagaagacgagctgaagagctgtttttggaaaaggctgggatggagtgagtcctccaggataatcgtgctcgatcaaagtgacttatccgactag

SEQ ID NO: 208390 - DNA, 4476 bp, synthetic construct
  misc_feature 1..4476: note = Description of Artificial Sequence: Synthetic coding sequence
  source 1..4476: mol_type = other DNA
atgagccgggccgtgcggctgcccgtgccctgccccgtgcagctgggtaccctgaggaatgactcgctggaagcacagttgcacgagtacgtcaaacagggtaactatgtaaaagtgaagaaaatcctcaaaaaggggatctacgtggacgctgtgaacagcctgggccagactgccctttttgtcgccgcccttctcggtctaaggaagttcgtagacgtcctcgtggattacggaagtgatccaaaccataggtgctttgatgggtccacaccagtgcacgcagccgccttctcaggaaatcagtggatcctatctaaattactcgacgctgggggagatttgaggttacatgatgaaagaggtcagaaccctaaaacatgggcccttactgccggcaaggagaggtccacacagatcgtagaattcatgcagcgttgcgcttcccatatgcaggctattatccaaggatttagctacgatctccttaaaaaaatcgacagcccacagcgtctcgtgtactctccctcgtggtgtggaggactggtgcaggggaaccctaatggcagcccaaacaggctcctcaaggccggcgttattagcgctcaaaacatctattcctttggcttcggaaaattttacctgacaggcgctacacaaatggcatatctgggatccctgcctgttattggggagaaagaagtgattcaggcagatgacgagcctacattctcgttctttagcggaccttacatggtaatgaccaacttagtttggaacgggtctagagtcaccgtcaaagagttgaacctgcccactcaccctcactgctctcgacttcgcctggccgacttgttgatcgcagagcaggaacactcatctaagcttcggcacccctacctgctgcagctgatggcagtttgtctgtctcaggacctagagaagaccagattggtgtacgaaagaataactattggaactctcttctccgtgcttcacgagaggcgcagccagttccctgtgttgcacatggaggtcatcgtacatttgctgcttcagatttctgacgccctccggtacctgcactttcaagggtttatccacaggtcactcagcagttatgccgttcacataatcagccctggcgaagctcggctaaccaatctcgaatatatgctcgagagcgaggaccggggtgttcaaagggatctcacccgggtgccgctgcccacacagctgtataactgggctgccccagaggtgatcttgcaaaaggcagctactgtgaaatctgatatttacagtttttctatgattatgcaggagattctcacagacgacataccatggaagggactggatggcagtgtcgttaagaaagctgtcgttagcggcaattatcttgaagcagatgtgcgtctcccaaagccttactacgacatcgtgaagagcggtattcatgtgaagcagaaagatcgcaccatgaatctgcaggacattcggtacatactgaaaaacgacctaaaggattttactggtgcccaacgaacacaacccactgagtctccccgcgtacagaggtatgggctgcaccccgatgtaaatgtctatctgggactcactagcgaacacccccgagagacacctgacatggagatcattgagcttaaagagatgggctcccaaccccacagcccacgtgtccacagcctgttcacagaaggaacgctagacccccaagccccagacccttgcctaatggcccgtgaaacccagaatcaggacgccccatgtccagccccgtttatggcagaggaggcttccagcccatctaccgggcaaccaagcctgtgttccttcgaaattaatgaaatttattcgggctgcctcattttggaagacgacattgaggagccaccaggagctgcctccagcctggaagctgacggaccaaatcaagttgatgagttaaagtctatggaagaagaattggataaaatggaaagggaggcatgttgttttggtagtgaggacgagtcttctagtaaggcagaaacagagtactctttcgacgattgggattggcagaatggtagtctgtctagtctttcgctccccgagtcaacacgggaggccaagagtaacctcaacaacatgtcaaccacggaagaatacctgatctcaaaatgcgtgctggatctgaagataatgcagacaattatgcatgagaacgatgatagactccgaaatatcgagcagatccttgacgaagtcgagatgaaacaaaaggaacaggaagagcggatgtccctgtgggccacatctcgcgagtttactaacgcatacaaactgcccctcgcggtgggacctcccagtcttaactacataccccccgtgctgcagctctctggagggcaaaagcccgacaccagtggaaactacccgacccttccccgctttcctcgaatgctccccactctatgtgacccaggaaaacagaatactgacgagcagtttcaatgcactcagggcgcaaaggattccttggagacttctaggattcagaatacaagtagtcaaggaaggccacgggagtccacggcgcaggctaaggccactcagtttaattctgccctttttacattatcctcccaccggcaggggccgagcgcgtcgcccagttgccattgggatagtactcggatgagcgtcgaacccgtgagcagcgagatttacaacgcggaaagcaggaataaggacgatggcaaggtgcacctgaagtggaaaatggaggtgaaagagatggcgaagaaggcagcaacagggcagttgacggttccaccctggcaccctcagtcttctcttaccctagagagtgaagccgagaacgagcctgatgcactcctccaaccacctatccgatcgccagagaatactgattggcagcgcgttattgagtaccacagggagaatgacgagccaagggggaatgggaagtttgacaagacagggaacaacgactgcgactccgaccagcacggaagacagccgagactcggtagtttcaccagtattaggcacccgagcccgcgacaaaaggaacagccagaacatagcgaagctttccaagcgagctccgatacgctagtcgccgtggaaaaatcctacagtcaccagtccatgcagtccacttgtagcccagagagtagcgaggatatcacagatgagtttctcacccctgacggggagtacttctatagttctaccgcgcaggaaaatctggccttagaaacaagttcccctattgaagaagattttgagggcatccaaggagccttcgcccagcctcaagtctcgggcgaggaaaagtttcagatgcggaagattctcggaaaaaacgccgagattttaccgcgctcccagtttcaacccgtcaggagcacagaagacgaacaggaagagaccagtaaagagtcccccaaggagttaaaggagaaggacatttcgctgactgacatccaggacttatcttcaataagctacgagccagactcctccttcaaggaagccagctgtaagacccccaaaattaaccatgctcctacttcggtcagtacccccctttcccctgggtcagtcagttctgcagcgtcccagtataaggactgcctggaaagcattacctttcaggttaagactgaattcgcctcctgttggaactctcaggagttcatccaaacattgagcgatgacttcatatcagtgagagaaagggcaaaaaagcttgatagtcttttgacttccagtgagaccccaccctcccggctgactgggctcaaacggctctcttccttcattggcgctggcagcccgagcctggtgaaggcgtgtgattccagcccaccccacgccacgcagcgccgtagtctgcccaaggtggaggctttcagccagcatcatattgacgaacttccacctccttcgcaagagctcctggatgacatcgagctgctgaagcagcagcaggggtcgtccaccgtgctgcatgaaaacactgcctccgatggaggcggcactgcaaatgaccagcgccacctagaagagcaagaaacggactctaagaaagaggactcgtcaatgcttttgagtaaggagactgaagaccttggagaggataccgaacgcgctcattccaccctagatgaggatttggagagatggctccagccaccagaagaatcagttgagctacaggacctgccaaagggaagcgagcgcgaaactaacattaaggatcagaaggtgggggaagagaaaagaaagcgggaagactcgatcacccctgaaagacgcaagtctgagggcgtgttgggaaccagtgaggaggatgagctgaaatcctgtttttggaaacgactgggctggtcggaatcgagtcggattatcgttctggaccaatcggatctttctgattag

SEQ ID NO: 208391 - DNA, 8370 bp, synthetic construct
  misc_feature 1..8370: note = Description of Artificial Sequence: Synthetic coding sequence
  source 1..8370: mol_type = other DNA
atgcccagcgacgccaaggacagcgtgaacggcgacctgctgctgaactggacctcactcaagaatatcctctcaggccttaacgctagttttcctcttcataacaacaccggaagtagtacagtaacaactagcaagagcattaaagatccaagactgatgcgcagggaagaatccatgggcgagcaatcaagcacggctggtttgaacgaggtgctccaattcgaaaaatctagcgataacgtaaattcggagatcaagtcaactccttctaactccgccagctcttcagaggtggtaccaggcgattgcgctgtgctcactaatggcctcgacacaccttgttttaagacctctgttaacgactctcagtcatgggctcataatatggggagtgaagattacgattgcataccaccaaacaaagtgaccatggcgggtcagtgcaaggatcaaggcaacttttctttccccatctcagtcagcaatgttgtgagcgaggtggaaaatcaaaaccattccgaggagaaggcccagcgagcacaacaggagtctggtaatgcctacaccaaagaatacagtagccatatctttcaggattcccagtcttctgatctgaagacaatttatcagacagggtgccagacatcgaccgtgttccctctgaagaaaaaagttagcatcgatgagtatctgcagaataccgggaagatgaagaactttgctgacctagaagatagctccaaacacgaagaaaagcagacatcctggaaagagattgataatgactttaccaacgaaacgaagatcagtcctatagacaattatattgtgctccaccaggagtataaagaatctgagagccataattcctttggaaagagctgcgataagattctgatcacccaagagctcgaaattactaaaagtagtacgtctacaattaaggacaaggacgaactcgatcatctggcccttgagtggcaaatcacacctagcttcgaatcattatcacagaaacatcctcaacattcggtggaatatgagggcaacatccatacgagcttagctattgcccagaagctaatggaactcaagctgggcaaaatcaatcagaattacgctagtatcattaccgaagcgtttccaaagcctaaagacataccccaggccaaagaaatgttcatcgacaccgtgattagctcttataacattgagacagcacacgatagcagcaattgttccatcaccagggaacacatctgcgtacatagaaagaatgaaaatgagccagtgtctctcgagaatatccagagggactacaaggagacagcttacgttgaggatcggggccaggatcacaacctcttttgcaattcgcagctgtcaaacgacatctggctgaatgtcaatttcaagaagcagactgacagagagaaccagaacgaagcaaaagagaatagcgcttcctgtgtggaaaacaatatcgagaatatttacggcgacaagaagcaggattcacacaccaacgagaacttctctaacatcgacgagaaagaagacaagaactatcataacattgagatcctgtcgtcggaagagttctcgaccaagttcaacctgatctgccgggaggataacgccgtgtccgctgcgactgccctgttagagtccgaagaagacactattagcgctgtgaagcagaaggatacagagaacaccggcaggtccgtagaacacctggcctccaccaccttccccaagactgcctcctcgagcgtgtgcgttgcatctaacgccgcaatacagattgctagcgcaacgatgccggcactctcccttaacaatgatgaccaccagatttaccaatttaaagaaacttgctccagtgagagccctgactttgggctcctggttaagcaccgggtctccgactgtgagattgacacagataaaaataagtctcaagagagtttccaccagagtattaatgagaatctggtgctgcagtccatagaactcgagagcgagatcgagatcgaacttgaagactgtgacgacgcctttatctttcagcaagacacgcactcccatgagaatatgctgtgtgaggagttcgtaacgtcgtacaaagccctaaagtcaagaatcagctgggaaggactcttggctctggacaatggggagatggaagtgcttgaaagtaccacaggccgtgagaactcggaccagcattacagcaaagaatcaaactacttctattcaagcactcagaataatgaaactgagctgacgagtcccattctcctacccgatttgcagataaaaatcacaaatatcttccgccctggatttagccccacagccgacagtcttgctctaaaggattctttctgcactcacgtgacagaggccacaaagccggagatcaacaaagaagatggcgagatcctgggtttcgatatttactcccagccctttggcgaaaatgccgactatccttgcgaggataaagtggacaacatccgccaggagagcggacctgtttcaaacagcgagatctctctgtccttcgatctgtccagaaataccgatgttaaccacacctcagaaaaccaaaactctgagagcttgtttactgaaccctctaacgttacaaccatagacgatggctcccggtgcttttttactaagagtaaaacagattataatgacactaagaacaaaaaggaagtggagtccagaatatcaaagcgcaaactacacataagttcacgggaccagaacattccacacaaggatctacggcggcataaaatatatggccgaaaacgccgcctgacttcccaggattcttctgaatgtttttcctccctgtcccaaggtcggattaaaacattttcccagtccgaaaagcatatcaagtctgttctgaatattctctcagatgaggcttccctctgcaagtcgaagtgcctgtcgagaaagctcgataaagcagtagtgcatttaaagaaagctcacaggcgggtgcacacctcgctccagctcattactaaagtcggagaggagcggaagggcccactgcctaagtcttacgcgattatctgcaacaacttttgggagagttgtgacctgcaaggttatagcagcgtgagccagaggaagtattattctaccaagcatttttcatcaaagcgaaagtacgacaagagaagaaagaaaagagcaccaaaggcagatatctcaaagagcctgactcatgtgagtaaacacaaaagctacaagacttccggagaaaaaaagtgcctttctaggaagtccatggcatcctctgtgtcgaagtcccacccaacaaccagccacatgggggaattctgtaatcaggaacatcctgaatctcaacttcccgtctcttccactagtcagtctacgagtcagtctgtctattataatagttccgtctcaaacccgagtctcagcgaagaacaccagccttttagcggtaagactgcatacctgttcagccctgatcactcagatgaaaaattaatcgaaaaggaaaatcagattgatacggctttcttgagctctacctcaaagtatgagaagctcgagaaacacagtgcaaaccacaacgtgaaggatgccaccaaagaaaattcatgcgatgcaaacgaagtgataaatgaaagcaattcagtttcactcagctgcataaaggagaacatcaattccagcacaggtaatgattgcgacgctacttgtatcgggcatacgaaggccaagactgatgtgttaatatccgtgctggactctaatgttaaacactttctcaatgacctgtatcagcagggtaacttaattctgtccgattgtaaacgcaatttggaagtgaagtggacagaccccattgaaagacccaagcaaaacataatcaccggcaactttctcatgggcccactcaacctgacgctgatcgctagtaagaagtatagcatcccccagcttagtgctgccgccgttacagacagtgagggtgaaagtagcaagtcctatctggacaagcaaaggattcttacagtggattcctttgctgcatccagcaccgtaccccattgtgaacagagctgtcgcgagaaggagctgttgaagacagaacaatgctcttctggaaactgcctccacacagacgggaatgagacgaatgtaacggagaattacgaactcgacgttgcctctggtaccgaagaagacaaatcttatggcgagaacatcgtcgaactctctagctcagactcaagcctgctgctgaaggataacgtgaagggttcttcaagcgaaacgtgtatcgtgaagaaggacacggaagatagaattacttggaaagtgaagcaggctgagaaggctaaggattcagtgtacaaacgctcgatgaccgaaggctccactgtaaatacagagtacaaaaaccaaaagaatcaaataagtgaagagtcatgtcttaatgaaaagataatcaccaccaatctgattgactctcacctctccacaaaaaacactacaactgagtccgtccctctgaaaaatactgtgagtaaccccctgaacaaacgagaaaaaaaaggagaaataaaagtttcgaaggactctcaaagtgacttgacccttcactcagagattgcttatatttcaaagcctggaatcctcggggtgaaccatacgccaatactgcccgcgcactccgaaacatgcaaagtaccaacgctgctgaagaagcctgcctcatacgtgagcgacttcaaagagaaacattgcagtgctaaccatacagcactcattgcaaacctgtcacagatcctccagcgtgctgatgaagcctcatccctgcagattctgcaggaggagacaaaggtgtgtctgaacatcttaccacttttcgttgaggcatttgagaggaaacaggagtgttctgtagagcaaattcttatctctagggagctgctggtcgatcagaatttatggaacaactgcaagcacaccctcaagccctgcgccgtggacactcttgtggagctgcagatgatgatggagaccatccagttcatcgaaaacaagaagcggcacttagaaggagaacctactctgaggtctctgctctggtatgatgagacactgtacgccgaactgctgggcaagcccaggggtttccaacagcagagcaacttctatccagggttccagggaagactcaaatacaatgcgttctgtgagctacaaacgtatcacgaccagctggtggaattattggaggaaacaaagagagaaaaaaattcatactacgtctttctgaaatacaaacgtcaggtcaacgagtgcgaggcaatcatggaacattgcagtgattgtttcgacttcagcttgtcggtgccattcacatgtggggtcaacttcggcgacagccttgaggacctcgagattctccgaaagtcgactctgaagctgatcaatgtgtgcggggacagccccaaagtgcacagctatcccggaaaacaggaccacttgtggatcatcatcgagatgatttcatctaaggtaaacttcatcaagaacaacgaagcagtgcgcgtgaagatctcgctctacggactggaacacatcttcttcgatgcagccaagaatctcgtgtggaaggagagaacccagagcttttccaaaaaatattctcagaagaaagacgaggaacgactgctccgcgtaaacaaatgtgctttctccaagctgcagaagatctatgacaccctgtctaaggatttaaacaacgaaccgatttctccaataggtttggaggaggacaccatcatcgcgagtcgcaagagtgaccatcctatcaacgaggccaccatcagcatagagaattctaagttcaactcgaacttgctggctcacccagatatctgttgcatctcggaaattctcgaccaagccgaattcgccgacttgaaaaagctccaagatttgaccctgagatgcacggaccacttagagatccttaagaaatacttccaaatgcttcaggataataatatggataacatttttattacggaagaaaacgtgctcgacgttgtgattaatcactctcatgaagcgatcatccttaagcccgaagcaattgagatgtatattgagatagtgatggtgtctgagaccattcacttcctcaaaaatagtatagccaaaaaactggacaaacagcgctttcgaggcatgctgtggtttgacctgtcccttcttcccgagttggtccagtgtcaggagaaaatggcttcctttagctttctcaaggacaattctaccgacgtgtgtttatggaaggtgatcgagacagctgtgtccgaactgaaaaaggatcttgatataatctgcaagtacaacgaagcagttaattgttcttacgccattcatcttctgtcacgcgaattacaggaactcagcgagatcaaaaagctgctcaaaaagtcaaaatacttcatatctacctacatcgactttgttccttacatcgcatccataaactacgggtccacagtgaccgaactggaatacaattacaatcagttctccaccttattgaagaatgtaatgtctgcgccccgcaaggatctggggaaaatggcccacatacgaaaagttatgaagactatcgaacatatgaaaatgatctgtaccaagaacgctgagcttactatctccttctttctatgccagatgctgtacaataggcgaaaaatcctccagctcaaacgcaaagagaagatgaacatccacattgttaaacccggcgagaacaataacaagttctccatctctaccatgctccctcccgtctctgaatgtatcaacaagaatatttctaactcttccaaaaagcgcccatcaaccgtggacaagtgcgaggactcccaggagcagcagcaggatacaacagtgtccagctgtaaaaaactgaaagtggacatgaaagatgtgacgaagatcaatcgagaaaaagctaccttcaagcatccccggacgaccggtagccatcccaagagcgaaaacaaaatcgtccctagctcctgcgacagtctgaagcgcaaccacctgactcccaaaaaggtggaaatgcagaggtctctgccaggaagcctgctcccactggagaaccccaaagacacatgcgcgtccaagagtgaatccaaaattgacctgacagtgtcaagtgaccacttttctgggcaacaagaaaacctgaacagcatgaagaaaagaaacgtcaacttctctgctgccgaaacaaagtccgataaaaaggattgtgccgcttttgctatttgtgaccagaagagtgttcacggcaccttcagtcctgatcatggcaccctgctgcaaaagtttctgaaaaattctccagacccaacacaaaagagttgtttgagtgatatcaacccagaaaccgacgtgtccctggttcccgacgcaagtgtgctcagtaagcctatattttgcttcgtaaaagatgtgcatccagacctggaaatgaatgacaccgtctttgaactgcaggacaacgatatagtcaatagctcgatcaaaaactcctcgtgtatgacctctccagagccaatctgtattcaaaataaaatccctactctgcaaatcaacaagctgcaaccaacggaaaccgagtccgaagataagtacatgaaagacactctcaaccctaacaccgtccatacttttggagccagcggtcatattactctaaacgtcaaccaaggggccgagtacagcctctctgagcagcaaaacgacaaaaactccaaggtgctgatgcaaaatgctgccacatactggaatgagctgcctcagtctgcttgcaaccccacttataatagctcggaacatttattcgggacctcatatccatatagcgcatggtgtgtttatcaatactccaactctaacgggaatgctattacgcagacctaccagggtattacttcttacgaagtgcagcccagcccaagtggactgttgactacggtagcttctactgcccagggaacccattctaatctgttatatagccaatacttcacatattttgcgggcgagccacaggcaaacgggttcgttcctgtcaatggctacttccagagccaaataccagcttctaattttcggcaaccaatcttttctcagtacgcaagccatcagcccctgccccaggccacctatccatacctccctaatcggtttgttcctcctgaagtgccctgggtgtacgctccctggcaccaagagagtttccacccagggcactag

SEQ ID NO: 208392 - DNA, 1233 bp, synthetic construct
  misc_feature 1..1233: note = Description of Artificial Sequence: Synthetic coding sequence
  source 1..1233: mol_type = other DNA
atggtgctgaaggccgagcacacccggagccccagcgccaccctgccatcaaacgttccgagttgcaggtccctgtctagctccgaggacgggccttcaggacccagcagccttgctgacggaggccttgcccacaatttacaggattctgtgcgtcaccgcattctgtacctctctgaacaattaagggtggagaaggcatctcgggacgggaacactgtgtcatatcttaaactcgttagcaaagcagacagacaccaggtcccgcacattcagcaggcgtttgaaaaggtaaaccagagggcttccgcaacaatagcgcagattgagcaccgtctgcaccagtgccaccagcagctccaggaattggaggaaggctgcagacccgaggggttgcttttgatggcggagtccgaccccgctaactgcgaacctccgtcagaaaaggccctactgagcgagccacctgagccagggggagaggacggccctgtcaacctgccacacgcgtcaaggcccttcattctggaatcgcgcttccagagcctgcagcaaggcacttgtctagagactgaggacgtggcacaacagcaaaatctgttgcttcagaaagtgaaagccgaactcgaagaggccaaacgattccatataagcctgcaggagtcataccattccttaaaagagagatcactgactgacctacagctgctcctcgagtcactgcaggaggagaagtgtaggcaagctttaatggaggaacaggtcaatggcaggttgcaggggcagctaaacgagatctacaatctgaaacataacttggcctgttcagaagaacgaatggcgtacctctcctacgaacgagctaaggagatctgggaaattactgaaacatttaagtctcgcatttccaaactggaaatgctccagcaggtcacgcagcttgaggcagcagagcatctgcaatcacgacctccacaaatgctcttcaaatttctcagcccaagactgagcctggcaaccgtactgctcgtgttcgtaagcacactgtgcgcctgcccctctagcctaattagctcccggttgtgcacatgcactatgttaatgctgatcggtctgggcgtgctcgcttggcagcggtggagggcaattcccgccaccgattggcaggagtgggtgcccagtaggtgcaggttatactccaaagacagcgggcctcctgccgatgggccctag

SEQ ID NO: 208393 - DNA, 1233 bp, synthetic construct
  misc_feature 1..1233: note = Description of Artificial Sequence: Synthetic coding sequence
  source 1..1233: mol_type = other DNA
atggtgctgaaggccgagcacacccggagccccagcgccaccctgccttccaatgtgccttcctgtcgctcattatcctcatccgaagacggcccatccgggccttcatcactcgccgacgggggcctagcccacaatcttcaggactccgtcagacacaggatcctgtacctgagcgagcagctgcgagtggagaaggcctctcgcgatggcaacaccgtcagttaccttaagcttgtcagcaaggctgatcgccaccaggtccctcacattcagcaggcttttgaaaaagtcaaccagagagcctccgccaccattgcgcagatcgaacataggctgcatcagtgccatcagcagctgcaggaattagaagaaggctgtcggcccgaagggcttctccttatggcagaaagtgatcccgccaattgtgaacctcccagtgagaaggccctgctgtccgaaccacctgagcccggaggagaagacgggcccgtgaatctgccccatgcatcgaggcctttcatccttgagtcccggtttcagtcgctgcagcaaggaacgtgcctggaaactgaggatgtcgcgcagcagcagaatctgttgctgcagaaggttaaggcagagttagaggaagctaagagattccatattagcctccaggagagctatcactccctcaaggaacgttccctcaccgacttacagctgcttttggaaagtctccaggaggagaaatgcagacaggcgttgatggaggaacaggtgaacggacggctccagggccagttgaatgaaatttacaaccttaaacacaaccttgcctgttccgaggaacgaatggcttatctttcctacgagcgcgcaaaggagatttgggaaatcacagagactttcaagtcaaggatcagtaaattagagatgctgcagcaagtgactcagctggaagcagctgagcacttgcagtcccggcccccacaaatgttgttcaagtttctgtcaccgagactgtcactagccacagtgttactggtctttgtgagcacactgtgcgcatgtcctagtagcctaatatctagcagactgtgtacttgtacaatgctcatgctcattggactcggtgtactcgcctggcagcggtggcgagctattcctgcaacagattggcaggaatgggtaccaagccggtgtcgtctctactccaaggactccgggcccccagctgatggcccttag

SEQ ID NO: 208394 - DNA, 945 bp, synthetic construct
  misc_feature 1..945: note = Description of Artificial Sequence: Synthetic coding sequence
  source 1..945: mol_type = other DNA
atgcggcccgagggcagcctgacctaccgggtgcccgagcggctgaggcagggcttttgtggcgtgggccgagctgcccaggcccttgtatgcgcctctgccaaagagggtaccgcctttaggatggaagcggtccaggagggagccgccggcgtggaatccgagcaggccgcactaggggaggaagcagtactgctgcttgatgatatcatggccgaggtcgaggtggtcgcggaagtagaagtggtggctgaggaagagggccttgtggaaaggagagaagaggctcagcgggcccaacaggctgttccaggaccaggtcccatgacacccgagtctgcccccgaggaattgctggcggtgcaggtggagctcgaacccgtgaacgcccaggcaagaaaagcattttcgagacagagggagaaaatggagagaaggcgaaaaccccatctggaccggaggggggctgtgattcagtccgtgccgggattctgggcaaacgtgattgccaaccatccccaaatgagtgctttaatcaccgacgaggatgaggatatgctgagctatatggtgagcctggaggtgggcgaggagaagcacccggttcacttatgcaagattatgttgttctttagatctaatccctatttccagaataaagttattactaaagagtacctggtgaacatcaccgaatatagagcctctcactccacccccattgagtggtatccagactacgaagtcgaggcataccgtcggagacaccacaactcctccctaaacttcttcaattggttttccgatcacaactttgccggatccaacaaaatcgccgaaattctttgcaaagacctgtggcgtaaccccctgcagtactacaaaaggatgaagcctccagaggaaggtaccgagacttccggggacagccagctcttgtcttag

SEQ ID NO: 208395 - DNA, 927 bp, synthetic construct
  misc_feature 1..927: note = Description of Artificial Sequence: Synthetic coding sequence
  source 1..927: mol_type = other DNA
atgcggcccgagggcagcctgacctaccgggtgcccgagcggctgcgccaggggttttgtggcgttggcagggccgcacaggccctggtgtgcgcaagcgccaaagagggcactgcttttaggatggaagccgttcaggaaggtgcagcgggagtggagagcgaacaagctgcattaggagaggaagccgtcctgctcctggacgatattatggccgaagttgaggtcgtcgccgaggaagaaggtctggtggagcgcagggaagaagcccaacgcgcccagcaggctgttcctggccctggtccgatgaccccagagagtgctccggaggaactcctggctgtccaggtggaactggagcctgtcaatgcacaggcacgtaaagccttctcgcgacagagggaaaagatggaacgccggaggaagccccatttagaccgacggggcgctgtgatccagtctgtgccagggttttgggctaatgtgatcgccaatcaccctcagatgagtgccctcatcaccgatgaagatgaagacatgctgagttacatggtttcactagaagtcggagaggagaagcatcctgtccatctgtgcaagataatgctcttcttcagaagcaacccttattttcaaaacaaagtgattaccaaggaatacctagtgaatattaccgaataccgagcctcgcacagcaccccaatcgaatggtacccagattacgaagttgaggcgtatcggagaagacatcataacagctcactgaatttcttcaactggttcagcgatcacaactttgccgggtccaataagattgccgaaatactgtgcaaggacctatggcgcaatcccctccagtactacaaaaggatgaaaccaccagaagagggcaccgagacttccggcgactcgcagttactctcctag

SEQ ID NO: 208396 - DNA, 2097 bp, synthetic construct
  misc_feature 1..2097: note = Description of Artificial Sequence: Synthetic coding sequence
  source 1..2097: mol_type = other DNA
atgatgcggagccggagcaagagcccccggcggcccagccccaccgccaggggcgcaaattgcgatgtagagctattgaagaccactaccagggatagagaagaattaaagtgcatgctcgagaagtacgagcgtcatctggctgaaattcagggtaacgtgaaggtcctgaaaagcgaaagggacaagatcttcctgctgtacgaacaggcccaagaggagataacccggctgcgccgcgagatgatgaaaagctgcaaaagccccaaatcgaccacggcccatgcaatcctgaggcgcgtggagacagaacgcgacgtggcctttaccgacctgcgtcgcatgactactgaaagagatagcttgagagagcgtttaaagatagcccaggagaccgcgttcaacgaaaaggcccacttggagcagcgcattgaagaactggagtgcactgttcataacctcgatgacgaacggatggaacagatgtccaatatgaccctaatgaaagagaccataagtacagtggagaaagaaatgaagtctttggcgagaaaggctatggataccgaatccgagttggggcgccagaaggctgaaaataactctttacgcttgctttacgagaacacggagaaagacctgtcggacacccagaggcatctggcaaagaaaaagtacgagctgcaactgacccaggaaaaaattatgtgtctggatgagaagatagataacttcactcgtcagaacattgcccagcgcgaagaaataagcattctcggaggtacactgaacgacctggcaaaagagaaggagtgcctacaagcctgtctcgataagaaatctgaaaacatcgcctcactgggcgaatctctggctatgaaggaaaaaacgatttcaggtatgaaaaatattatcgccgaaatggaacaagcttccaggcagtgcacggaggcactgatcgtttgtgagcaggacgtctccagaatgcggagacaactggacgagactaacgacgagcttgctcagatcgctagggaaagagatattctggcacacgacaatgataacctgcaggagcaattcgccaaggctaagcaggagaaccaggcactgtcgaagaagttgaacgacacacacaatgaacttaatgacatcaagcagaaggtccaggacacgaatctggaggtgaacaagctgaaaaatatcctgaaatccgaggagagtgagaatcggcagatgatggagcagctccgtaaggccaacgaggacgcggagaactgggagaataaggcccggcagagcgaagctgacaacaacaccctgaaactggagctcatcaccgccgaagcggaggggaatagactgaaggagaaggtcgatagcttaaatcgagaagtcgaacagcatctcaatgccgaaagaagctataagagccagatctccaccttacacaagagtgtagttaaaatggaagaggaattgcagaaggttcagtttgagaaagtttccgctctcgctgacctatcaagtacgcgagaactctgtatcaagctcgattcatccaaagaactcctgaataggcagctggtcgcaaaggatcaagagatcgaaatgcgtgaaaacgaactggattctgcacactcagagattgagttactgcggtcgcagatggctaatgagcgaatttcaatgcagaacctggaggccctgctggtggccaatagagacaaagagtaccaatcccagatagctctgcaggagaaggagagcgaaattcagctgctgaaggaacatctttgcctagctgagaacaagatggctattcagtcccgggacgtggcacagtttcggaacgtcgtgactcagctggaggctgatcttgacataacgaaacgacagttagggacggagcgctttgagcgggagcgagccgtacaggagttgagacgccagaattactcctctaatgcataccacatgtcatcaaccatgaagcccaatacaaaatgccacagccccgagcgagctcatcatagaagtcccgacaggggacttgacaggtccctcgaggaaaacctgtgttaccgcgatttttag

SEQ ID NO: 208397 - DNA, 2073 bp, synthetic construct
  misc_feature 1..2073: note = Description of Artificial Sequence: Synthetic coding sequence
  source 1..2073: mol_type = other DNA
atgatgcggagccggagcaagagcccccggcggcccagccccaccgcgcgaggcgctaactgcgacgtcgaacttttgaaaaccacaacaagagatcgagaagaactgaagtgcatgctggaaaaatatgaaagacatctcgcggaaatccagggcaacgtcaaagtgctgaaatctgagcgcgacaaaattttcctgctatatgagcaggcccaggaagagatcacccggctgagaagggaaatgatgaagagctgtaagtcccccaaaagcaccaccgctcatgcaatcctgagaagagtggaaacggaacgagatgtcgctttcaccgacctacgccgtatgactaccgagcgtgattcactgagggagcgccttaagatcgcacaggaaactgccttcaacgaaaaggctcatctcgaacaacgaatcgaagagcttgaatgtactgtacataacctggatgatgaacgcatggagcagatgagcaatatgacgctgatgaaagaaacaatctccaccgtagaaaaggagatgaagagtctcgcaaggaaggccatggatactgaatccgagctgggccgacagaaggctgagaataattctctccgcctcctgtacgagaataccgagaaggacctaagcgacacacagcgtcatctagcgaaaaagaaatacgaactgcagctcacacaagaaaagattatgtgcttggatgagaaaattgacaattttacccgccaaaatatcgcacaacgcgaggagatctcaatcctgggaggcacactgaatgatttggccaaagaaaaggagtgtctacaagcttgtctagataagaagtcagagaacatcgctagccttggcgagtcgctggccatgaaagaaaagaccatctcaggcatgaaaaatataattgctgaaatggagcaagcttcaaggcagtgcacagaggccttgattgtttgtgagcaggatgtcagccgaatgcgaagacagctggatgagaccaacgacgaactggcacagattgctcgcgagagggatattttggcccatgataacgataatctgcaagaacaatttgctaaggcgaagcaggagaatcaggccctgtcaaaaaagctcaacgacacacataacgaactgaatgacatcaagcagaaagtacaggacaccaatttggaagtgaacaaactgaaaaacatcttaaagtctgaggagtctgaaaaccgccagatgatggagcaactaagaaaagctaacgaggacgccgagaactgggagaataaagcccgccagtctgaggcagacaataacactttaaagctggaactgataaccgctgaggctgaggggaatcggctcaaggagaaggtagactcactcaaccgggaagtggaacagcacctcaacgctgaacgttcttacaaatcacaaatatccacactccacaaaagtgtggtgaagatggaggaggaactgcagaaggtgcagtttgaaaaggttagcgcactggcagacctctcctctacgagggagctctgcattaagctggactctagtaaggaattgctgaataggcagctcgtcgcaaaggatcaggagattgaaatgagagaaaacgagcttgattcagcccattccgaaattgagctcctgagaagccagatggccaatgaaaggattagcatgcaaaatctagaggctctactggttgcaaaccgagataaggaataccaatcacaaatagcattgcaggaaaaagagagtgaaatacagcttttgaaagaacatctgtgtttagcagagaataaaatggccatccagtctcgcgacgtggcccaattccgcaatgtcgtgacgcagctagaggctgacctggatattactaaaaggcagttgggtactgaacggtttgagcgtgaaagggcagtgcaggagctccgaagacagaactatagctccaatgcttatcacatgtcatctacaatgaaacctaatacgaagtgtcacagtccagagcgggcccaccaccgatcaccagatcgtggtctggacaggtccctagaatag

SEQ ID NO: 208398 - DNA, 2097 bp, synthetic construct
  misc_feature 1..2097: note = Description of Artificial Sequence: Synthetic coding sequence
  source 1..2097: mol_type = other DNA
atgatgcggagccggagcaagagcccccggcggcccagccccaccgctcggggagcaaattgtgacgttgaactgttaaaaaccactactagagaccgagaggaattgaagtgcatgctggagaaatacgaaaggcatctggctgagatacagggaaacgtaaaggtcctgaagtccgaacgagacaagatatttctgctgtacgagcaggcccaggaggagatcactagactaagacgagagatgatgaaaagctgtaagagtcctaagagcactactgctcacgccatccttcgccgggttgaaactgagcgggatgtggcattcaccgaccttagacgaatgactaccgagagggattctctgagggagcgactgaagatcgctcaagaaactgcctttaatgagaaagcccacctggagcagagaattgaggaacttgagtgtactgtgcacaatctcgatgatgagcgcatggagcagatgtccaacatgacactcatgaaggagaccattagcaccgtggaaaaagaaatgaaaagtctggcccgcaaggccatggatacagaatctgaattgggcagacagaaggccgagaacaattctctcaggcttttatacgaaaatactgaaaaggaccttagcgatacacaaaggcacctcgcaaagaagaagtatgagctccagctgacgcaggaaaaaattatgtgtctagacgagaagattgataattttactagacagaacattgcccaacgagaggagatttctatcctgggtgggactttaaacgacctcgcgaaggaaaaagaatgtctgcaagcttgcctcgacaagaaaagcgaaaatattgccagtctgggtgagagcctagcaatgaaggaaaaaactatatctggcatgaaaaatattatcgcagaaatggaacaagcctccaggcagtgtactgaggcattaattgtatgtgagcaggatgtatcccgcatgcgccggcagctcgacgaaacaaatgacgagttggcacaaatcgccagggagagggatattcttgcccatgataatgacaatctgcaagaacagtttgcaaaagccaaacaggagaaccaggctctctctaagaagcttaacgatactcataacgagctgaacgacatcaagcagaaagttcaggacaccaatcttgaagtgaataaactgaagaacatcctgaagtcagaggagtccgagaaccgccagatgatggagcagctgaggaaggcaaacgaggatgccgagaactgggaaaacaaggcaaggcaatctgaagctgacaacaacacgcttaagcttgagctcataacagccgaggccgagggaaatcgcctgaaggagaaagttgatagcctaaatagagaggtcgaacagcatctgaatgccgagagaagctataagagtcagatttctacactgcataagtcagttgttaaaatggaagaggagcttcagaaggtgcagttcgagaaagtgagcgccctcgccgacttgtcaagtactagggagctctgcatcaaattagattcgagcaaggagctcctgaacagacaactagtcgcaaaagaccaggagatcgagatgagggagaatgagctggacagcgctcacagtgagatcgagttgttgcgttctcagatggctaatgagaggataagcatgcagaacctggaggccttgctcgtcgccaacagggacaaggaatatcagagccagattgctcttcaagaaaaagagagcgaaatccagctactgaaagagcatctgtgtctggcagagaacaagatggctatccagtccagagatgttgcccagttcaggaacgtagtgactcaattagaagccgatcttgacattactaagaggcagctaggaaccgagaggttcgaacgcgagcgcgcagttcaggagctgagacggcagaactactcctctaatgcatatcacatgtcatcgacaatgaagcccaataccaagtgccattcgccagagagagctcaccaccgcagccccgatagggggctagatcggagtctggaggagaacctgtgctacagggatttttag

SEQ ID NO: 208399 - DNA, 2097 bp, synthetic construct
  misc_feature 1..2097: note = Description of Artificial Sequence: Synthetic coding sequence
  source 1..2097: mol_type = other DNA
atgatgcggagccggagcaagagcccccggcggcccagccccaccgccaggggtgccaactgcgatgtagagttattgaaaactaccacccgggatagggaagagctcaagtgcatgctggagaaatatgagcgccacctggctgaaatccagggaaacgttaaagttcttaagagcgagcgcgacaaaatcttcctgctgtatgagcaggcccaggaagagatcactaggctcaggagagagatgatgaaatcctgcaagtctccaaaaagcacaactgctcatgccatacttcgccgagtggaaaccgaacgcgacgtggcattcactgacctcagacgtatgacaaccgagcgcgactctctcagggagagattgaagatcgcccaggagaccgcctttaatgagaaagcccatctcgaacaaagaatcgaagaactggagtgcacagtgcataacctcgatgacgagcggatggaacaaatgtctaatatgacgttaatgaaagaaactatcagcacagtggagaaagaaatgaagtcccttgctcgtaaggccatggacaccgaatcagagcttgggaggcagaaggcagagaacaactctctccgacttctctatgaaaacacagaaaaggacctgagtgacacccagcgtcatctggctaaaaagaaatacgagttgcagctcactcaagagaagatcatgtgcctggatgagaaaatcgacaacttcacccgccagaatattgcccaaagggaagagatcagtatcctgggaggtactttgaacgacctggcaaaggagaaagaatgtctgcaggcatgtttggacaaaaagagtgagaatatcgcatctctcggagagtcactggctatgaaggagaagactatttccggaatgaagaacatcatcgctgagatggagcaggcatctcgccagtgtaccgaagctttgatcgtgtgtgagcaagatgtcagtaggatgaggaggcaactggacgaaactaacgacgagctagctcagatcgccagggagagagatattctggcccacgataatgacaatctgcaggagcagttcgctaaggctaagcaggagaaccaagccctgagtaagaagcttaatgacacacacaatgaactgaacgatattaagcagaaggtccaggatactaaccttgaagtgaacaagcttaagaacatcctgaaaagtgaagagtccgagaacagacagatgatggaacaactgcggaaggctaatgaagacgccgaaaattgggagaataaggcacgacaaagtgaagccgataataatactcttaaacttgagttaattaccgctgaggcagagggaaacaggctcaaagagaaagtcgatagcttgaatcgagaggtggaacagcacctgaatgctgagaggagttacaaaagtcaaatcagtaccctgcataagagcgttgtgaagatggaagaggagctccagaaggtccaattcgagaaggtgagcgctttggctgatctgagtagtacaagggaactgtgcataaagctggactcaagtaaagaattgctgaataggcaactggtcgcgaaggaccaagagatcgagatgcgggagaacgagctcgactcagcccactccgagatcgagctcttgagaagccagatggccaatgagcgcatctccatgcagaatctggaggccctgttggtcgcaaatagggacaaggagtatcagtcccagatcgcactgcaggaaaaagagagtgagattcagctgttgaaagagcatctgtgtctggccgagaataaaatggccatacaatccagggacgtggcacagtttcgcaacgtggtgactcaactggaggccgacctggacattaccaagcggcagctggggactgaaaggttcgagagagaaagggcagtgcaagaactaagacgtcagaactattcgagtaatgcctaccacatgtccagtacaatgaaacctaataccaaatgccactcaccggagagggcccatcaccggtcacccgataggggccttgacaggtcattggaggagaatctttgctaccgggacttttag

SEQ ID NO: 208400 - DNA, 2097 bp, synthetic construct
  misc_feature 1..2097: note = Description of Artificial Sequence: Synthetic coding sequence
  source 1..2097: mol_type = other DNA
atgatgcggagccggagcaagagcccccggcggcccagccccaccgcccgcggcgcgaactgtgacgtcgaactgctgaaaaccacaacccgcgacagagaagagttgaaatgtatgctggaaaagtacgagaggcacctcgccgaaattcagggaaatgtgaaagtgcttaagagcgagagagacaaaattttcctgttgtacgaacaggcacaagaagagatcactaggctgaggagagagatgatgaagtcctgtaagtccccgaaatcaaccacagcgcacgccatcctacgaagggtggagaccgaacgcgacgtggcattcacagacttgcgtcggatgacaactgagcgcgattcactgagagagcgattgaagattgctcaggagactgccttcaacgaaaaggcccacttggaacagaggatcgaagaattagagtgcacggtgcataacctggacgatgaacgcatggaacagatgagtaatatgaccctcatgaaagagaccatctcaacggtcgagaaggagatgaagagtttggcccgcaaagctatggatacggagagtgaactggggcgccagaaagctgaaaataattcgctgaggctgctgtatgagaatactgagaaggacttatcagatactcagcgccatcttgctaagaaaaaatatgagttgcaactgactcaggaaaagattatgtgcttggatgagaagattgacaatttcaccaggcagaacatagcacaaagggaggagatctccattctcggcgggacccttaatgacctcgccaaagaaaaagagtgcctgcaggcttgcctggataagaagtctgaaaatatcgcctccctgggggaatcgctggcaatgaaggagaagaccatctccggcatgaaaaacatcatagcagagatggagcaggcgtcgcgccagtgcactgaggcgctcatcgtgtgcgaacaggacgtgtccagaatgagacggcagctagacgaaactaacgacgaactagcccagattgccagggaaagagacattctggcgcatgataatgacaatctccaggagcagttcgctaaagctaaacaggagaaccaggctcttagcaagaagttgaatgatacgcataacgagctgaatgatatcaagcagaaggtacaggatactaatttagaggtgaataaacttaagaatattctgaaaagcgaagagagtgaaaaccgacagatgatggagcagctgcgaaaggctaacgaagatgccgagaattgggagaataaggctagacagtcagaggcggacaataatacgcttaagctggaactgatcacagccgaggctgagggcaaccgtttaaaagaaaaagtggacagcctgaacagagaggtcgagcagcaccttaacgctgaaagatcgtataagagtcagattagcacactccataaatctgtggttaaaatggaggaggaactgcagaaagttcagttcgaaaaggtgagcgcgctggccgatctgtcctcaaccagagaactgtgcatcaagttagattccagcaaggaactcttgaatagacaactggtggccaaagaccaggaaattgagatgcgcgaaaacgagcttgactcggcccatagtgagatcgagctcctgcggagccaaatggctaacgagaggattagcatgcagaacttggaagctctactggtggctaatagggataaggaatatcagagccagatcgcactacaggagaaagaatctgaaatacagctcctcaaagaacatctgtgtctggccgaaaataagatggccatacagtcacgcgatgtggcccagtttcggaatgtcgtgacacagcttgaggctgatctggatataacgaaacgtcagctcggcacggaaaggtttgagagggaaagagcagttcaggagttacgccgacagaactatagcagtaatgcctatcatatgagcagtaccatgaagccaaacaccaagtgccatagccccgagcgcgctcatcaccggtcccccgatcgtgggctcgataggtcccttgaggagaacttgtgttaccgggacttctag

SEQ ID NO: 208401 - DNA, 894 bp, synthetic construct
  misc_feature 1..894: note = Description of Artificial Sequence: Synthetic coding sequence
  source 1..894: mol_type = other DNA
atgatgcggagccggagcaagagcccccggcggcccagccccaccgcaagaggggctaactgtgacgtcgagttgctgaagactaccacacgtgaccgagaggagctgaaatgtatgttagagaagtacgaacggcatcttgccgaaatacagggaaatgtgaaggttctaaagagcgaacgtgacaaaatatttcttctgtacgagcaggcccaggaggagattaccaggctgcggcgggagatgatgaaatcctgtaagtcacctaaaagtacaacagcgcatgccatcctccgccgcgtggagaccgagcgagatgtggcattcacagatttgcggcgtatgacaaccgagagggatagtctgcgggaacgcctgaaaatcgcacaagaaactgcttttaatgaaaaggcccacctagagcaaaggatagaggagctggaatgtacggtacataacctagatgatgaaaggatggagcagatgtcaaatatgacgctcatgaaggaaacaatctctactgtggagaaagagatgaagtccctagcccgtaaggctatggatacagagtcagaactgggacgacagaaggccgaaaacaacagcctgcgtctgttgtacgaaaataccgaaaaagacctcagtgatacccagcgtcatttggccaaaaaaaagtatgagctgcagctgacacaggaaaagatcatgtgtctggacgaaaagattgataatttcacacggcagaacattgcgcagagagaagaaatttccatcttagggggcacactaaatgaccttgccaaagagaaagagtgtttacaggcgtgcctggacaagaagtccgagaatattgcaagtttgggtgagagtttagccatgaaaaccgtgtattag

SEQ ID NO: 208402 - DNA, 1881 bp, synthetic construct
  misc_feature 1..1881: note = Description of Artificial Sequence: Synthetic coding sequence
  source 1..1881: mol_type = other DNA
atggccggcgagcggccccccctgcggggccccggccccggccccggggaggtcccaggggaaggcccccctggtcccggaggcaccgggggtgggcccggcagggggaggccatcttcataccgagcattacgcagcgcagtgtcttctctggcgcgcgtggacgacttccattgcgcggagaaaatcggcgccgggtttttctcagaggtgtataaggtccgtcataggcagagcggccaggtgatggttttgaagatgaacaagctgccaagcaaccgggggaatacattgagggaggtccagctcatgaatcgcctcagacatccaaatatcctgaggtttatgggagtgtgcgtccatcaggggcagctgcatgccttgacagagtatatgaacggcgggaccctggagcaattacttagtagccccgagccactctcatggccagtgagattgcatctggcgctggatatcgcccgaggcctgagatacttgcattctaagggggtttttcatagagacctcacatcaaaaaattgtcttgtgaggcgcgaggatcggggctttaccgccgtagtgggcgactttggattggccgaaaagattcctgtgtacagagaaggagctagaaaagagcctctggctgtcgtggggtccccttactggatggcacctgaggtgctcagaggcgagctctatgacgagaaggctgacgtctttgcctttgggatcgttttatgtgagttgattgcaagagtacctgccgaccccgattatctaccccggactgaagactttgggttggatgtgccagcctttagaactctggtgggggatgattgccccctcccttttctgctcctggcgattcactgctgtaatctagagccttctacacgggccccctttactgagattacccagcatttagaatggatcttggagcagctgcccgagccagcccctctaacacgtaccgctctgacccacaatcagggatccgtggcaagaggaggaccctcagcgacgctgccacggcccgatccccgactgagtcggtctcggtccgatctgtttctccctccatcaccagagtcaccccctaattggggcgataatctcacacgggtgaaccccttctccctgcgagaggacctccgtggtgggaagatcaagctgctcgacaccccaagtaagccagtgttgcccctggtcccaccttcccccttcccgagcacacaactgcctttggtgactacgcctgagaccctcgtgcaacctgggacaccggctagacggtgtcgctccctgccctctagtcctgagctgccacgccgtatggaaactgctttgcctggaccaggcccgcctgcagtgggaccttccgccgaggaaaagatggaatgcgagggaagttcacccgagccggaacccccaggtcctgcaccacaattgccattggccgtcgccacagacaacttcatttcaacctgctcttctgcctctcagccctggtctcccaggtctggccccgtgctgaacaataaccccccagctgttgtggtcaactcaccccagggatgggccggtgagccttggaaccgcgcgcagcatagcctgccaagagccgctgccctggaacgcactgaaccttcgcctcctccttcagcgcctagagagcctgacgagggcttgccatgcccagggtgctgcctaggcccattcagcttcggcttcctcagcatgtgccccaggcccactcccgctgtggccagatataggaatttgaattgcgaagctggaagtctgctgtgtcatagaggacatcacgctaagcccccgactccttctctacagctcccaggcgcccgatcatag

SEQ ID NO: 208403 - DNA, 474 bp, synthetic construct
  misc_feature 1..474: note = Description of Artificial Sequence: Synthetic coding sequence
  source 1..474: mol_type = other DNA
agcgcccgggccgccgccctgagccggaacctgcagggccagcggccgcttccgcttgccgtggcaaccgacaactttatcagcacctgtagtagcgcatcccagccttggagccctagatccgggcctgtcctgaataacaaccctcctgcggtcgtggtgaacagccctcagggatgggccggagaaccctggaatagagcccagcattccctcccccgcgcagccgcgctggaacggactgagcccagcccaccaccatcagcccccagagagccagacgagggattgccttgccccggatgctgcttgggtcccttctcattcggattcttgagcatgtgcccgcggccaaccccagctgttgcccgctacagaaatctaaattgcgaggctggctccctcctgtgccatagaggccatcacgcaaaaccccctacaccaagtttgcagttgccaggcgctcgcagttag

SEQ ID NO: 208404 - DNA, 1077 bp, synthetic construct
  misc_feature 1..1077: note = Description of Artificial Sequence: Synthetic coding sequence
  source 1..1077: mol_type = other DNA
atggacgacgccaccgtgctgcggaagaagggctacatcgtgggcattaacttgggcaagggctcctacgccaaggtgaagagcgcttactccgaacgcttgaaattcaatgtcgcggtgaaaatcatcgataggaagaagacccctaccgatttcgtggagcggttcctgccaagagaaatggatatcttggcaacagtgaaccacggatcgatcatcaaaacctacgaaatcttcgagacatctgacggacgaatatatatcataatggagctgggcgtccagggggacctgctcgagtttatcaaatgtcagggtgcattgcacgaggatgtagcacgcaagatgtttagacagctttcctctgccgtcaaatattgccatgatcttgacattgtccaccgagatcttaagtgcgagaaccttcttctggataaggacttcaacataaaattgagtgactttgggttctcgaaaaggtgtctgcgtgactcaaatggccgcattatcctgagtaaaaccttttgtggtagcgctgcttatgctgcaccagaggttctgcaatccataccctaccagcccaaggtgtatgatatttggtctttaggtgtaatcttgtatattatggtttgtggcagcatgccatatgatgactctgatatcagaaaaatgctacgtatccagaaagagcatcgggtggattttcccaggtccaaaaacctgacctgtgaatgtaaggacctaatttacagaatgctccagcccgacgtgtctcaaagactgcatatagacgagatcctgagccactcttggctccagccacccaaaccaaaggcaaccagctcagcctcgttcaagcgtgaaggcgaagggaagtacagagccgagtgcaagctcgacacaaagaccggcttgagacctgaccatagaccggaccataaacttggggcgaaaacccaacatcggctacttgtcgtgcccgagaatgagaataggatggaggacagactggctgagaccagccgggccaaggatcatcacataagcggagctgaagtcggaaaggcctccacctag

SEQ ID NO: 208405 - DNA, 807 bp, synthetic construct
  misc_feature 1..807: note = Description of Artificial Sequence: Synthetic coding sequence
  source 1..807: mol_type = other DNA
atggaggacttcctgctgagcaacggctaccagctgggcaagaccattggagagggaacgtacagtaaggtcaaggaagctttttcgaagaaacaccagcggaaggtggccatcaaagttattgataagatgggaggacctgaagagtttatccagagatttctccctcgcgaactgcagatagtgcgaacactcgatcataagaatattatccaggtgtacgagatgctggagtctgcggacggcaagatatgcttagttatggagctggccgaggggggcgatgtgttcgattgcgtgctgaatggtggcccattgccagagagccgtgccaaagcactcttccgccagatggtggaggcgatccggtattgtcatggctgcggagtcgctcatagggacctgaaatgcgagaatgctcttctccaggggtttaacctgaagctcactgactttggttttgccaaagtattgccaaagagtcacagagaactgagccagactttttgcggctctaccgcctatgctgctccggaggtcctccagggcattccacatgattccaaaaagggggatgtgtggtcgatgggagtcgtgctttatgttatgctgtgcgcgtctttaccttttgacgacaccgacatacccaaaatgctctggcagcagcaaaaaggggtttcctttccaactcacctgtccatcagtgctgactgccaggatctcctcaagaggctcttagagccggacatgattcttcgcccttctattgaagaagtcagctggcatccctggttagcaagtacctag

SEQ ID NO: 208406 - DNA, 987 bp, synthetic construct
  misc_feature 1..987: note = Description of Artificial Sequence: Synthetic coding sequence
  source 1..987: mol_type = other DNA
atgggcaagggcgacgtgctggaggccgcccccaccaccaccgcctaccattctctcatggacgagtatggatatgaagtcgggaaggctattggacacgggtcctatggctccgtgtacgaagctttctacactaaacagaaggtgatggtggctgtaaagatcatctctaaaaagaaggcttctgacgactacttgaataagttcctgcctcgcgaaatccaggttatgaaagtattaagacacaaatacctcataaatttttatagggccattgaatccacttccagggtgtacattattctggaactagctcaaggcggcgatgtcctggagtggattcaacgctacggagcctgcagtgagcccctggccggaaagtggttctcccagctaacactggggattgcatacctccactccaaaagcatcgtgcacagggacctgaaactggagaacctgctgctggataaatgggagaacgtcaagataagcgactttggattcgctaaaatggtccccagcaaccagcccgtggggtgcagtccatcttatcgccaagtgaactgcttctcacacctctcacagacctattgcggttccttcgcgtacgcctgccctgagattctgcgagggttaccttacaacccttttctaagtgacacatggtctatgggcgtgattttgtacactttagtcgtggcccaccttccgttcgatgacactaatctgaaaaagctactgagagagacgcaaaaagaagtaactttccctgctaatcacaccatttcccaggaatgcaaaaatctgatcctgcaaatgctccgacaggcgacaaaaagagcaacgattctggatatcattaaagacagttgggtcctgaagttccagcccgaacagcctacccacgagatccgacttttggaggctatgtgtcagcttcacaacactaccaaacaacatcaaagtctccagatcacgacctag

SEQ ID NO: 208407 - DNA, 1017 bp, synthetic construct
  misc_feature 1..1017: note = Description of Artificial Sequence: Synthetic coding sequence
  source 1..1017: mol_type = other DNA
atgggcaagggcgacgtgctggaggccgcccccaccaccaccgcctaccactcgttaatggacgaatacggctacgaagtgggcaaggctatcggtcacggctcttacgggtccgtgtatgaggccttctatacaaagcagaaagtgatggtggccgttaaaataataagcaaaaagaaagcatcagatgactacctcaataagttcctcccaagggagatacaagtcatgaaggttctaagacacaaataccttattaatttttaccgggccatcgagagcacatcaagagtatacataatcctcgaactggcccagggcggagacgtgctagagtggattcaaaggtatggagcctgttctgaaccgctggctggaaaatggttctcacagctaaccctcggcatcgcttatctgcacagtaagagcatcgtccaccgcctgatgccgtcactgagcgctgcaggacgggaccttaagctggaaaatttactgctggacaagtgggagaatgtaaagatctcggactttggctttgccaagatggtcccgtctaatcaaccagtcgggtgttcccccagttaccggcaggtgaactgtttctcccacctgagccaaacctactgcggtagcttcgcctatgcttgtccagagattcttaggggcctgccgtacaatccattcctctccgacacttggtccatgggcgtaattctctacactctcgtcgtggcccacctacctttcgacgacaccaatttgaagaaacttctacgcgagacacaaaaagaggtgactttccctgctaatcatacaatcagccaggagtgtaagaacctgatcctccagatgctgagacaggccactaagagggccacgattctcgacatcatcaaggatagctgggttctgaaattccagcccgagcaacctactcacgagatcagactgcttgaggctatgtgtcaactacataatacgacaaaacagcaccagagtctacagattactacctag

SEQ ID NO: 208408 - DNA, 759 bp, synthetic construct
  misc_feature 1..759: note = Description of Artificial Sequence: Synthetic coding sequence
  source 1..759: mol_type = other DNA
atgaaggtgctgcggcacaagtacctgatcaacttctaccgggccattgagagtacatcccgcgtctatatcattctggagctagcccaaggcggggacgtcctggagtggattcagagatatggggcatgttccgagcctctggccggcaaatggttctctcagctgaccctggggattgcttatctgcactctaagtcaatagtccaccgcgacctgaagctggagaacttactcttagacaaatgggagaacgtaaaaatttctgacttcggcttcgctaaaatggtgccatctaatcagccagttggatgctcgccgtcttatcgacaagttaactgcttttctcatcttagtcaaacctactgtggctccttcgcgtatgcttgccctgaaattctcagaggcctcccctacaatccatttctttcggatacatggtcgatgggcgtgatactctatacgctggtggtggcccacttaccttttgacgatactaacctgaagaaacttctccgggagacacaaaaagaggtgacctttcccgccaatcatacaattagccaggaatgcaaaaaccttatcctgcagatgttgaggcaggccacaaaaagagcaactattctggatattattaaggactcctgggtgctcaagttccaaccagaacagcccacccacgagatcagactactcgaggcaatgtgccagctccacaacacgaccaaacaacaccagtcgctgcagatcaccacttag

SEQ ID NO: 208409 - DNA, 822 bp, synthetic construct
  misc_feature 1..822: note = Description of Artificial Sequence: Synthetic coding sequence
  source 1..822: mol_type = other DNA
atgagcggcgacaagctgctgagcgagctgggctacaagctgggcagaaccattggagaggggtcctattcaaaagtgaaagttgctacgtctaagaagtacaaagggacagtggccataaaagtggtggacaggaggcgcgccccacccgactttgttaacaagttcttacctagagagctcagcattctgcgtggcgtccgacaccctcacatcgtgcatgtgtttgaattcatcgaggtgtgtaatggcaaactttacattgtgatggaagctgccgcaactgatctgctgcaagctgtgcagcgaaacgggcgcattcccggtgttcaggcacgagacctcttcgcacagatcgctggagctgtgcggtatttgcatgaccatcatctcgtacatcgggatctgaagtgtgaaaacgtcctcctgagccccgacgagaggagagtgaagctgacagactttggctttggcaggcaagcccatgggtatccagatctttccaccacgtactgcggaagtgcagcctatgctagccctgaggtgttgctgggcattccctatgaccccaagaagtacgacgtgtggtctatgggtgtggtattatatgtgatggtcacaggttgcatgccgtttgacgattcagatatagctggccttccaaggaggcagaaaagaggcgttctgtatcccgaaggcctggaactcagtgagcgatgcaaggccctcatcgctgagctgcttcagtttagtccttctgcgcggccatctgccggacaggtggcccgaaattgctggctcagggccggggacagcgggtag

SEQ ID NO: 208410 - DNA, 822 bp, synthetic construct
  misc_feature 1..822: note = Description of Artificial Sequence: Synthetic coding sequence
  source 1..822: mol_type = other DNA
atgagcggcgacaagctgctgagcgagctgggctacaagctgggccgcacgataggggagggtagttacagcaaagtcaaggtcgcaaccagcaaaaaatacaagggcaccgttgccatcaaggtggttgacagacgtagggctccccctgacttcgtgaacaaatttcttcccagggaactgtctatactgcgcggcgtgcggcaccctcatattgtacacgtctttgaatttatagaggtgtgcaacgggaaattgtatattgtcatggaggccgcagctacagatcttttacaggctgtccaaaggaacggccgaattcctggtgtgcaggctcgcgatctctttgcacagatagcaggcgccgtcagatatctgcacgatcatcacttggtacaccgtgatctgaaatgtgagaatgtgctgctcagtcctgacgagcggcgagtcaaactcactgacttcggattcggcagacaagcccacggctaccccgacctgagcactacgtattgcggctctgcggcttatgcctcccccgaggtactgcttgggataccctatgaccccaaaaaatacgatgtgtggtcgatgggcgtcgttctgtacgtcatggttacaggctgcatgcccttcgacgatagcgatatagctggcctgcccagaaggcagaagagaggagtgctctacccagagggactagagttgagtgagagatgtaaggccttgatcgccgaattgctccagttctcccctagtgccagaccctctgccggacaagttgcacggaattgttggctcagggccggtgactctggatag

SEQ ID NO: 208411 - DNA, 6411 bp, synthetic construct
  misc_feature 1..6411: note = Description of Artificial Sequence: Synthetic coding sequence
  source 1..6411: mol_type = other DNA
atgagccggagccggcacgcccggcccagccggctggtgcggaaggaggatgtaaacaagaaaaagaagaattctcaactacgcaagacaactaaaggggctaataagaacgttgcttcggtgaagaccctttctcccggcaagctgaaacagctgatacaggagcgcgacgtgaaaaagaagaccgagccgaagccgcccgtgcctgtgcgatccttgttgacccgcgccggggccgcacgcatgaacctggacaggacagaagtcttgttccaaaaccctgagagtctgacatgcaacggcttcactatggctctccggtctaccagcttaagtcgtaggctgagtcagcctcctctcgtggtagctaagtccaagaaggtgccactgtccaaaggcctcgaaaagcaacatgattgcgattataagattttacctgctctgggggtgaagcactcggagaacgactccgttccaatgcaagacactcaggtgcttcccgatatagagactctgattggcgtccagaacccgtccctcctgaaaggaaagagccaggagactacacagttttggtcccagcgagttgaagattcaaaaatcaacattcccacccattcaggtcccgccgctgaaatcttgccaggcccactggaaggcacccggtgcggagagggtctcttctcagaggagaccctgaatgacaccagcggttctccgaagatgttcgcccaggatactgtatgtgctcccttcccccaacgcgccacaccaaaggttacttcccagggtaacccatcgattcagctggaggagctgggatcccgcgtcgaatccctaaagttatctgacagctaccttgatcccattaagtctgagcatgactgctatccgacttcttcgctcaacaaggttatccccgacctcaacctcaggaactgcttagcactcggtggctccacaagtccgaccagcgtgataaagttcctgctcgcaggaagtaagcaggcaactcttggtgccaagcctgaccaccaggaagcttttgaggcaactgcaaatcagcaggaggtgtctgataccacctcatttttagggcaggcgtttggggctatcccccaccagtgggaactgcctggtgctgatccagttcacggcgaggcccttggagagacacccgaccttccggaaattccaggtgcaatacctgtacagggggaagtctttggtacaatacttgaccagcaagagaccttgggcatgtcaggctcggtggtgcccgatctccctgttttcctcccagttcctccgaatcccatcgctaccttcaatgctccttccaagtggcccgaacctcagtcaaccgtctcatatggcctggccgtgcagggcgcgattcagatcctccccctcgggagcggtcatacaccccaaagctcctctaactcagaaaaaaattcgcttcctcccgttatggctatcagcaacgtggagaacgaaaaacaggtgcacatcagctttctgcccgccaatacacagggattcccactggctcctgaacgagggctatttcatgcttccctgggaatagcgcaactttctcaggccggcccttccaagtctgatagaggatcctcacaagtgtctgttacatcaacggtgcacgtcgtgaataccaccgtggtgacaatgccagtgccaatggtgtccaccagcagctcttcctacactacgctgcttcctacactggaaaagaaaaaaagaaaaaggtgcggggtttgcgaaccttgtcagcaaaagaccaattgtggcgagtgtacctactgtaagaataggaagaatagccaccaaatctgcaagaagaggaaatgcgaggaactcaagaagaagccatctgtggtagtccctttggaagtgattaaggagaacaagcgccctcagcgcgagaagaagcctaaggtcctaaaagccgactttgataacaagcccgttaacggccctaagtctgagtccatggactacagcagatgtggtcatggcgaggagcaaaagctcgagctgaaccctcacaccgtagaaaatgtcaccaagaacgaagacagtatgacaggcattgaggttgagaagtggacacagaacaagaaatcccagctgactgatcatgtgaaaggggacttcagcgccaatgtgcctgaggccgagaagagtaaaaacagcgaagtggataagaaacggacaaaatctcccaagctattcgttcagaccgtacggaatggaattaaacacgtccactgtctgccggccgaaactaacgtctcgttcaagaaattcaatattgaggagtttggcaaaactctggagaataacagttataagtttctaaaagacaccgctaaccataaaaatgccatgtctagcgtggcaactgacatgagctgcgaccatctgaagggccggagtaatgtactcgttttccagcagcccggcttcaattgctcttccataccacactcttctcattccattattaaccaccacgcctccatccacaatgagggcgaccagcctaagacacctgaaaatattccatccaaagagcctaaagatggttcccccgttcaacctagcttactgtcacttatgaaggacaggcggttgacattggaacaggtcgtagctatcgaagcccttactcagctgagtgaagcacctagtgagaattcttccccatccaagagcgagaaagatgaggagagcgagcagcgaactgcatccttgctgaattcctgcaaggcgattctttataccgtgcgaaaagacctgcaagaccctaatctgcagggggaaccaccaaagttgaaccactgccctagcctggaaaaacagagttcttgcaacaccgttgtatttaacggccagacgactaccctcagcaactcccacataaacagcgccaccaaccaggcatcaactaaatcacatgagtattctaaagtaacaaatagcttgagcctttttattccaaagtccaacagcagcaagatcgacacaaacaagagcatcgcgcagggaatcataactctggacaattgcagcaacgacctacatcaacttcctccgcgaaataatgaggtggagtattgtaaccagctgctggactcttcaaaaaagttagattctgacgacctctcgtgccaagacgctacccatacccagattgaagaagacgtcgcaacccagctcacccaactggcatccattattaagattaattacatcaagccggaggataaaaaggtggagagcacaccgacttcactcgtgacatgtaatgtgcagcagaagtacaatcaggagaagggcaccattcagcagaagccgcctagctccgtgcacaataatcacgggtcttcactgaccaagcagaaaaatccaacacaaaaaaaaaccaaatctacaccttcacgcgacagacgcaaaaagaaaccgactgtcgtgtcttatcaggagaacgaccgtcagaagtgggagaaactgagctacatgtacgggacaatatgtgatatctggatagctagtaagttccagaacttcggccagttctgccctcacgacttcccaacagtttttgggaagattagctcctcgaccaaaatttggaaacccttagcccagactcgctccatcatgcaaccaaagacagtctttcccccactcacccagattaaactacagaggtaccctgagtctgctgaagagaaggtgaaagttgaaccgttggacagcctttcactgtttcacttgaagaccgagtctaatgggaaggcattcactgataaggcatacaatagccaggtccagctgaccgtaaacgccaaccaaaaggctcatcccctaacacagccgtcatcaccacctaaccagtgtgccaacgtaatggcgggggatgatcagattagatttcagcaggtggtcaaggagcagctcatgcatcagagactcccaacactcccaggcattagtcatgagacacctttacccgaatccgcactgaccctgaggaatgttaacgttgtgtgcagtgggggaataactgttgtttcgactaagagtgaggaggaagtgtgtagttcaagctttgggacaagcgagttcagcactgtggattcggcccagaaaaactttaatgattacgccatgaacttttttactaatcctacaaaaaatttggtgtcaatcacaaaagatagcgagttgccgacgtgttcctgcctggacagggtgattcagaaggacaaagggccgtactatactcacctgggcgcaggcccatctgtggcagccgtgcgtgaaatcatggagaatagatatggacagaaaggtaatgccattaggatcgaaatcgtggtttacactgggaaagaaggtaaatcttcacatggctgtccaattgcgaaatgggtcctacgccgaagctcagatgaggaaaaagtgctatgcctcgtgcgacagaggactggacaccactgcccaactgcggtgatggtagttttgataatggtctgggatggaatccccctccctatggccgataggctctacactgaattaacggaaaacctgaagagttacaacggtcacccaaccgataggcgctgcaccctgaacgagaacaggacttgcacttgccagggaattgacccagagacctgcggggcaagcttcagtttcgggtgcagttggtcgatgtacttcaatggctgtaaattcggacgatccccttcacctagaagattcaggatcgacccctcatccccactgcacgaaaaaaatctggaagacaacctgcaatcgttggccactcgtcttgcacccatctataagcaatatgctccggtggcctaccagaatcaggtggagtacgagaacgtggcccgggaatgtcgcctgggatctaaggagggaagacccttctccggcgtgaccgcatgtctcgacttctgcgctcacccccaccgagacatccacaatatgaataacggatctactgtggtgtgcacactcacgagagaagataataggagcctgggcgtcataccccaggatgaacaattgcacgttctccccctgtacaagctttcagatacggacgagttcggttccaaggaaggcatggaggccaagattaagtcaggagccattgaggtgctcgctcctcgcagaaagaagaggacttgttttacacaacccgtgccgagaagtgggaaaaaacgggcagctatgatgaccgaggtgcttgcacataagatcagggctgtggaaaagaagcccattccgagaattaaacggaagaacaattccaccaccactaacaattccaagccatcctcccttccaacactggggagtaacacagaaaccgtccagcctgaggtgaagtctgagaccgagcctcactttatccttaagtcctcggataacaccaagacctacagtctcatgccatcggctccgcacccagtgaaggaggcctccccgggttttagctggagccctaaaaccgcgagcgcgacacctgcccccctgaaaaacgacgcgacggcttcctgtggcttctcagagagatcctctacaccgcactgtaccatgccgtcaggaagactcagtggagccaacgcagctgctgccgatggccccgggatctcgcagttgggagaggtcgcacctttgcccacactttcagcaccagttatggaacctctgatcaactccgagccttctacaggggtgaccgagcctctcacgccccaccagcctaaccaccagccgagttttctgaccagcccccaagacctggcgagctcccctatggaggaggatgagcagcactctgaggctgatgaacccccatccgatgaacctctctctgacgatccgctgagcccagctgaagagaagctgcctcacatagacgagtattggtccgattccgagcacatatttctggacgccaatatcggcggagtcgcaatcgcaccagcccatggatcggtgctgattgagtgtgcccggcgtgaattgcatgcgacaacccccgtggaacacccaaatcgcaaccatccaacccgcctgtccctagttttctaccagcacaagaacctcaataagccccaacacgggttcgagctcaataaaatcaagttcgaggccaaggaagccaaaaataagaagatgaaggcgagcgaacagaaagaccaggccgctaatgaaggtcctgagcagagctcagaagtgaacgaactgaatcagatcccctcgcataaggcactcacattaactcacgataacgtggtgacagtgtccccttacgcactcacccacgtggccggcccgtataatcactgggtgtag

SEQ ID NO: 208412 - DNA, 330 bp, synthetic construct
  misc_feature 1..330: note = Description of Artificial Sequence: Synthetic coding sequence
  source 1..330: mol_type = other DNA
atggccgaccggctgtacaccgagctgaccgagaacctgaagagctacaatggacacccaacggataggcgatgtacgctcaatgaaaatcgcacctgtacatgccaaggcattgaccctgagacttgtggcgcctcattctcctttggttgtagctggtccatgtactttaatggctgtaaattcggtcgtagccccagccccaggagatttaggatcgacccttctagccccctgcacacctactatgagagaattaccaagggccggaacccggagagacgttatatgaaacccgaaaggatcagccctggccatgaggcaatgtag

SEQ ID NO: 208413 - DNA, 726 bp, synthetic construct
  misc_feature 1..726: note = Description of Artificial Sequence: Synthetic coding sequence
  source 1..726: mol_type = other DNA
atgcagtgcttcagcttcatcaagaccatgatgatcctgttcaacttgctgatcttcctatgtggcgccgctctgcttgccgttggtatctgggtgtccattgatggcgcctctttcctcaagattttcggtccactctcgagcagcgctatgcaattcgtcaacgtgggttatttcctgatcgcagcgggcgttgtggtgttcgctctgggctttctgggatgttatggagcaaagactgagtcgaagtgtgcattggttaccttcttcttcatactcctgcttatctttattgccgaggtcgcggccgccgtcgtagctctggtgtatacaacaatggccgagcatttcttgacactgctcgtggtgcctgcgataaagaaggattatggcagccaagaggactttacccaggtctggaataccaccatgaaaggcctgaaatgctgtggatttactaattacactgattttgaggattccccatacttcaaagagaactctgccttcccaccgttttgttgcaatgacaatgtcaccaacaccgcgaacgaaacttgcactaagcagaaggcccatgaccagaaggtcgagggctgttttaaccagctcctatacgacatcagaaccaacgccgtgacagtcggcggggtggctgcaggaattggaggactggaactggctgccatgatcgtctctatgtatctgtactgcaacctgcagtag

SEQ ID NO: 208414 - DNA, 702 bp, synthetic construct
  misc_feature 1..702: note = Description of Artificial Sequence: Synthetic coding sequence
  source 1..702: mol_type = other DNA
atgagcagctacttcgtgaaccccaccttccccggcagcctgccctcaggacaggattcttttcttgggcagctgccactttaccaagctggctacgacgctcttcgacctttcccagcctcctacggcgcctcaagcttacctgacaaaacatatacatctccctgtttttatcaacagtccaactccgtgttggcatgcaacagggcatcatacgagtacggggcttcatgtttctattctgacaaagatctgtcaggcgccagcccctctgggtcgggcaaacagagaggcccaggcgattacctccatttcagtcccgagcagcagtataaacccgactcgagtagcgggcaaggtaaagccctccatgacgagggggccgacagaaagtatacgagtcctgtgtacccctggatgcaacgtatgaactcttgcgctggagcggtgtatgggagccatggcaggaggggacggcagacatacactcgttaccaaacactcgaattagagaaagagtttcattttaatagatacttaacgcgaagaaggcgaatagagattgccaatgccctctgtctgacagagcgacagatcaagatttggtttcaaaatcggaggatgaagtggaaaaaagagaacaaacttattaactccacacagccaagcggggaagattccgaggccaaagccggggagtag

SEQ ID NO: 208415 - DNA, 918 bp, synthetic construct
  misc_feature 1..918: note = Description of Artificial Sequence: Synthetic coding sequence
  source 1..918: mol_type = other DNA
atggcccgggaggacagcgtgaagtgcctgcggtgcctgctgtacgcattgaatctcttgttctggctcatgtcaatctcagtcctggctgtgtcagcatggatgcgagactacctcaataacgtgttgactttgacagcggagactcgagtggaagaagcggtgatcttgacatactttcctgtggtacacccagtaatgattgcagtctgctgttttctgattatagtcggcatgctcgggtattgtggaacagtgaagcgcaacttgcttctcctcgcttggtactttggctctttgctggtgattttttgcgtggaattggcctgtggagtatggacttatgagcaagagttaatggttccagtgcagtggtccgatatggtaactctcaaggcaagaatgaccaactacggattacctcggtacaggtggctgactcatgcgtggaacttttttcagcgcgaattcaagtgctgcggggtcgtgtattttactgattggctcgagatgactgagatggactggccccctgacagttgctgtgtgagagaattccccggttgcagtaagcaggcacatcaagaggacctctccgatctgtatcaggagggctgcggcaagaaaatgtactcctttttacgaggaaccaagcagctccaggtccttaggttcctgggcatcagcattggcgtcacccaaatcctcgccatgattctgacaatcactctgttatgggccctgtactacgacagaagggaacccggcaccgaccaaatgatgagcctcaagaatgacaattcacagcatctgagctgtccatccgtcgagttactgaagccttctttgagtaggatcttcgagcacactagcatggcgaactcgtttaacacccacttcgaaatggaagaactgtag

SEQ ID NO: 208416 - DNA, 339 bp, synthetic construct
  misc_feature 1..339: note = Description of Artificial Sequence: Synthetic coding sequence
  source 1..339: mol_type = other DNA
atggcccgggaggacagcgtgaagtgcctgcggtgcctgctgtacgccctcaacttgttgttttggcttatgtctatcagtgtcctggccgtttcagcctggatgcgtgactacctgaacaacgttcttaccttgaccgccgaaactcgtgttgaagaggctgttattttgacctacttccccgtggtccatcccgtcatgatcgctgtctgctgtttcttgatcatcgttgggatgctgggatactgcgggaccgtgaaacgaaacctcttgctgctggcttggtacttcggatcactgctggttatcttttgtgtggagctggcatgtggggtctag

SEQ ID NO: 208417 - DNA, 288 bp, synthetic construct
  misc_feature 1..288: note = Description of Artificial Sequence: Synthetic coding sequence
  source 1..288: mol_type = other DNA
atggcccgggaggacagcgtgaagtgcctgcggtgcctgctgtacgcacttaatctgctgttctggctgatgtcgatctccgtgttagcagtctctgcctggatgcgcgactacctgaataatgtcctgaccctgactgctgaaaccagggtagaggaggcagtgatcttgacatattttccagtagtgcacccggttatgattgctgtgtgctgcttcttaatcatcgtcgggatgctcggctactgtggaactgtgaagcgcaacctgctcttgctcgcctggtag

SEQ ID NO: 208418 - DNA, 363 bp, synthetic construct
  misc_feature 1..363: note = Description of Artificial Sequence: Synthetic coding sequence
  source 1..363: mol_type = other DNA
atggcccgggaggacagcgtgaagtgcctgcggtgcctgctgtacgccctgaacctgcttttctggctgatgagtatcagtgtgcttgcagttagcgcatggatgcgggattacctcaacaacgtactgaccctcaccgcggagacacgagtagaagaagccgtgatcctgacatatttccccgtcgtccaccccgtgatgatcgccgtgtgctgtttccttatcattgttggaatgctgggttactgcggcacggtgaagagaaatcttttgttactagcatggtacttcgggtccctcctcgtgattttttgtgtggaactggcctgtggagtttggacttatgagcaggagttgatgtag

SEQ ID NO: 208419 - DNA, 444 bp, synthetic construct
  misc_feature 1..444: note = Description of Artificial Sequence: Synthetic coding sequence
  source 1..444: mol_type = other DNA
atggcccgggaggacagcgtgaagtgcctgcggtgcctgctgtacgcgctgaacttgttgttttggctcatgagcatctctgtgctggccgtttccgcatggatgcgcgattacctgaacaacgtgttgacactcaccgctgagacacgtgtggaggaagccgtgatcctgacttattttcccgtggtgcatccagtgatgattgctgtgtgctgcttcttaattatcgtcggaatgctcgggtattgtggaacagtgaagcggaatttgctattgttggcttggtacttcgggtctcttctagtgatcttttgcgtggagttggcttgcggcgtgtggacctacgagcaagagttgatggtcccagtccagtggagcgatatggttacacttaaggctcgaatgaccaattacggcctgccaagatatcgatggctgacatag

SEQ ID NO: 208420 - DNA, 885 bp, synthetic construct
  misc_feature 1..885: note = Description of Artificial Sequence: Synthetic coding sequence
  source 1..885: mol_type = other DNA
atgccccggggcgacagcgagcaggtgcggtactgcgcccggttctcatatctgtggctaaaattcagcttaataatttatagcacagttttttggctcatcggagctctggtgcttagcgtcggaatctatgccgaagtcgagcgccagaaatataagaccctggagtcagcttttctagctcctgccattatccttatactgctgggtgttgtgatgttcatggtttcttttattggggtccttgcctcacttagagacaatctttacctgttgcaagcatttatgtatattctggggatttgtctgatcatggagctcattggcggagtggttgcccttaccttcaggaatcagaccatcgacttcttgaacgacaatattcgcagaggtatcgagaactactacgacgatttggatttcaaaaacataatggatttcgtacagaagaaattcaaatgttgtgggggggaagattatcgggattggagcaagaatcaatatcacgattgcagcgcccctggcccgctggcctgcggggtgccgtacacctgttgcatcagaaacacaacagaggttgttaacacaatgtgtggatataaaaccatcgataaggaacgattctctgtgcaggacgtgatttatgtccgggggtgcacaaatgctgtaatcatttggtttatggacaactatacaatcatggcaggtatcctactgggcatcctgctgcctcagttcctgggtgtcctgctgacgctcttgtatatcaccagggtcgaggacattattatggagcactccgtcacagatggactcctcggccccggcgcaaaaccctccgtcgaggccgctgggaccggctgctgcctgtgttatccgaactag

SEQ ID NO: 208421 - DNA, 582 bp, synthetic construct
  misc_feature 1..582: note = Description of Artificial Sequence: Synthetic coding sequence
  source 1..582: mol_type = other DNA
atgggccggttccggggcggcctgcggtgcatcaagtacctgctgctgggattcaacttgctgttctggctagctggatctgccgttatagccttcggtttgtggttcaggtttggcggagcaatcaaggaattgtcctcagaggataagtctcccgagtacttttacgtcgggctctatgttctggtaggggccggggcccttatgatggctgtgggcttcttcggctgctgtggcgctatgagggagagccaatgtgtgctgggaagcttttttacctgcctccttgtgatatttgccgccgaggtcactactggcgtgtttgcatttatcggcaaaggagtggctattagacacgtgcaaacaatgtatgaggaggcgtataacgattacctaaaggacaggggcaaaggtaatggcaccctaattacgtttcactctacttttcaatgctgcgggaaagagtcaagcgagcaggtgcagccaacatgccctaaggaacttttgggccacaagatcttcgggatgatcttttctatggtgctgtgttgcgcaatcagaaatagccgtgacgttatctag

SEQ ID NO: 208422 - DNA, 591 bp, synthetic construct
  misc_feature 1..591: note = Description of Artificial Sequence: Synthetic coding sequence
  source 1..591: mol_type = other DNA
atgggccggttccggggcggcctgcggtgcatcaagtacctgctgttggggtttaacttactgttctggcttgccgggtccgctgttatcgcctttggattatggttccggtttggcggcgcaattaaggagctgagttctgaggacaaaagccccgagtacttctatgtgggcctctatgttcttgtgggagccggcgctctcatgatggcagtcggtttctttggatgctgtggcgctatgcgagaaagccagtgtgtcctgggaagtgccatccgacacgtgcagacaatgtatgaagaggcctacaatgactacctgaaggataggggcaaaggtaacgggacattgataacatttcattccaccttccagtgctgcggaaaggagagtagtgaacaagttcagcctacgtgcccaaaggaactgcttggacacaagaactgtatagatgagatcgaaaccattatctctgttaagttgcagctaatcggcatcgttggaatcgggatcgctggcctgactatttttggaatgattttttcaatggtgctgtgctgtgcgattcggaatagccgggacgttatttag

SEQ ID NO: 208423 - DNA, 666 bp, synthetic construct
  misc_feature 1..666: note = Description of Artificial Sequence: Synthetic coding sequence
  source 1..666: mol_type = other DNA
atgggccggttccggggcggcctgcggtgcatcaagtacctgctgctagggttcaacctgttattctggcttgcaggcagtgctgtgattgcattcggcctgtggtttaggttcgggggagctattaaggagttatcaagcgaggacaagtctcccgagtacttctatgtcgggctttacgtcctggtcggggccggtgccctcatgatggccgtcggcttcttcggatgctgcggcgcgatgagagagtcgcagtgtgtgttggggtccttctttacgtgtctgctggtgattttcgctgctgaggtgaccaccggcgtgtttgccttcatcgggaaaggtgttgctattcgccacgtccagacaatgtatgaggaggcttacaacgactacctgaaggataggggaaaagggaacggtacattaatcactttccactcgacctttcaatgctgtggtaaagaatcatcagaacaggtgcagcccacctgcccgaaagagcttctcgggcacaagaactgcattgacgaaatcgagacaattatttcagtgaaactacagctcattgggatcgtgggcatcggcatagccggcttaacaatctttggcatgatcttttccatggtgctttgttgtgccatccgaaatagtagggatgtgatttag

SEQ ID NO: 208424 - DNA, 564 bp, synthetic construct
  misc_feature 1..564: note = Description of Artificial Sequence: Synthetic coding sequence
  source 1..564: mol_type = other DNA
ggcctgcggtgcatcaagtacctgctgctgggcttcaacctgctgttctggctggcaggcagcgctgtgatcgcattcggcctctggtttagatttggaggtgcaataaaggaactgagttccgaggacaaatccccggagtacttttacgtgggtttgtacgttctggttggcgctggcgctttgatgatggcagtcggcttttttggctgttgcggagcgatgcgggaaagtcagtgcgttttgggttccttttttacgtgccttctcgttatattcgcggcggaggtcacaacaggggtattcgcctttataggtaagggagtggccattcgtcacgtgcagacaatgtacgaggaagcatacaacgattaccttaaagacaggggaaagggcaacggcacgttaataacgtttcacagcacgtttcagtgttgcggcaaggagtcatccgaacaggtacaacccacttgccctaaagaactcttgggtcataagatcttcggcatgatattctccatggtgttgtgctgtgctatcaggaacagccgcgacgtcatttag

SEQ ID NO: 208425 - DNA, 762 bp, synthetic construct
  misc_feature 1..762: note = Description of Artificial Sequence: Synthetic coding sequence
  source 1..762: mol_type = other DNA
atgggccagtgcggcatcaccagcagcaagaccgtgctggtgttcctcaatctgatcttttggggggcagcggggatactttgctacgtcggagcctatgtttttattacttacgatgattatgatcatttcttcgaagacgtttacactcttatccccgccgtagtgattattgctgtgggggcattactcttcattatcgggctgatcggatgttgcgccactattagggaatcccggtgtggattggctacgttcgtcataattttgctattggtgttcgtcacagaggtagttgtggttgttctgggttatgtgtacagagccaaggtggagaacgaagtggatagaagcatccagaaggtgtataagacctacaatgggacgaatcctgacgcagctagtagagccatcgactatgtgcaacgccagcttcactgctgcggtattcacaattatagcgattgggaaaatactgactggttcaaagagaccaagaaccaaagcgtcccactgtcttgctgtcgggagactgccagcaattgcaatggatccctggctcaccccagtgatctgtacgccgagggctgcgaagccctagtcgtgaagaagctgcaggagatcatgatgcatgtgatctgggcggctctcgccttcgcagctattcaactgcttggcatgctgtgtgcttgtatagtgctctgcaggcggagtagggacccagcctatgaattactgatcaccggaggcacatacgcctag

SEQ ID NO: 208426 - DNA, 687 bp, synthetic construct
  misc_feature 1..687: note = Description of Artificial Sequence: Synthetic coding sequence
  source 1..687: mol_type = other DNA
atgggccagtgcggcatcaccagcagcaagaccgtgctggtgttcctgaacctgatcttctggggtgccgcaggtatactgtgttatgtgggtgcttacgtattcatcacctacgatgactacgatcatttctttgaagacgtatataccctgatcccagcagtggttatcattgcagtgggagctctactgttcataattggcctcatcggttgttgcgctaccatacgtgagagcaggtgcgggttagccaccgtggaaaacgaagtggaccggtctattcaaaaggtatacaagacctataacgggaccaaccctgacgcagctagtcgagccatcgactatgtgcagcgccaactccattgctgcggaattcataattacagcgactgggagaacacggattggttcaaggaaaccaagaatcaatccgtgcctctgtcctgctgccgcgagacagctagcaactgcaacggatcgctggcgcacccatccgacctgtatgcggaaggatgtgaagctttggtggtcaagaagttgcaggaaattatgatgcacgttatttgggcggccctggctttcgcggcaattcagctgttgggcatgctttgtgcctgcatagtgctctgcagaagatcccgggatccagcctatgagttgctcattacaggtggcacttacgcatag

SEQ ID NO: 208427 - DNA, 651 bp, synthetic construct
  misc_feature 1..651: note = Description of Artificial Sequence: Synthetic coding sequence
  source 1..651: mol_type = other DNA
atgtgggagcccatgagcagcagcctgatgatgaccatgaccaccagtctaaaaatgtgcacccgatccagtctgttgttcatcatcgggctgattggttgttgcgcgactattagggaaagccgttgcggccttgccacctttgtgatcattctcttactggtgttcgtgactgaggtggtggtggtcgttctgggctatgtgtatcgggccaaggtggaaaacgaggtagaccggagtattcagaaggtgtacaaaacttacaatggcacaaaccccgacgctgccagccgagccatcgactatgtccagcgccagctgcactgttgcggaatccataactattctgactgggaaaacaccgactggtttaaggagactaaaaaccagtctgtgccattatcttgctgccgggaaaccgcctcaaattgcaacggctccctggcgcaccctagtgacttgtacgccgaggggtgtgaggccctggttgtaaagaagttgcaggaaataatgatgcatgtcatttgggcagccctggccttcgccgcaatacagcagctgcttggcatgctttgcgcatgcatcgtactgtgccgcaggtctagagacccagcatacgagctgttaatcactggtggcacctacgcctag

SEQ ID NO: 208428 - DNA, 570 bp, synthetic construct
  misc_feature 1..570: note = Description of Artificial Sequence: Synthetic coding sequence
  source 1..570: mol_type = other DNA
atgggccagtgcggcatcaccagcagcaagaccgtgctggtgttcctgaatctgatcttttggttcgtgataattctgctgctggtttttgtgactgaggtggtcgtcgtggtgctcggatacgtgtaccgcgctaaagtggaaaatgaagtggataggtcaattcaaaaggtttacaaaacatacaatgggacaaaccccgatgccgcttcaagggccattgactacgtgcagaggcagttgcactgctgcgggattcataactacagcgactgggaaaataccgattggtttaaggagaccaagaaccaatctgtgcccctgagttgctgtagagagactgcaagtaactgcaacgggtcactggcccaccccagtgacctctatgctgagggctgcgaagccctggtggtgaagaaactgcaagagatcatgatgcatgttatttgggcagccctggccttcgccgccatccaactgttgggaatgctctgtgcatgcattgtgctgtgtagacgcagcagagatccggcctatgagcttttgattactggaggaacctacgcatag

SEQ ID NO: 208429 - DNA, 633 bp, synthetic construct
  misc_feature 1..633: note = Description of Artificial Sequence: Synthetic coding sequence
  source 1..633: mol_type = other DNA
atggtgtgcggcggcttcgcctgcagcaagaacgccctgtgcgccctgaacgttgtgtatatgttggtttctttgctgctcattggcgtagccgcgtgggggaaggggctcggactagtttccagcatacacatcattgggggcgtcatagctgtgggggtcttcctcttgctgatagctgtcgccggactggtgggggccgtgaaccaccatcaggtgctgctgttcttttacatgatcattttggggcttgtcttcatatttcagttcgtcatttcttgcagttgtctggcgattaacagatctaaacaaaccgacgtaataaacgcgtcgtggtgggttatgagcaacaaaaccagagacgagcttgagagatcattcgattgttgtggcctcttcaacctcacaacactctaccagcaagactatgacttctgcaccgccatttgcaagagtcagtctcccacatgccagatgtgcggggaaaagtttctgaaacacagcgacgaagctttgaaaatcctgggaggagtcggcctgttcttctccttcaccgaaatactgggagtctggttagccatgcggtttcggaaccagaaagaccctcgggccaatccttcagctttcctgtag

SEQ ID NO: 208430 - DNA, 963 bp, synthetic construct
  misc_feature 1..963: note = Description of Artificial Sequence: Synthetic coding sequence
  source 1..963: mol_type = other DNA
atgggcccctggagccgggtgcgggtggccaagtgccagatgctggttacatgcttcttcattttactattggggctgtctgttgctactatggtcacacttacctatttcggggctcactttgccgttatccgccgcgcttcgctggagaaaaatccctaccaagctgtccaccagtgggcttttagtgcagggctctccttggtggggctgctaaccttaggggccgtcttgagcgctgctgccacagtgcgggaagcgcaaggcttaatggccggcggctttctgtgtttctccctagcattctgcgcccaggtacaagttgtgttctggagacttcacagcccgactcaagtggaggatgcaatgttggacacgtacgacctcgtgtacgaacaggcaatgaagggaacatcccatgtaaggcggcaagaactggcggcaatccaggatgttttcctgtgttgtgggaagaagagccccttttcaagactcggctctactgaggccgacctctgccaaggcgaagaggctgcaagagaggactgcctccaaggcatcagaagctttctaagaacccatcaacaggtcgcgtcttctctgacctcaataggcctggcccttacagtgagcgcactcctgttttcctcattcctatggttcgcgattcgatgcgggtgcagtctcgacaggaagggaaaatacaccctgacaccgagggcctgcgggcgacagccccaggaaccatcgcttctgagatgttcacaaggcggccccacccattgcctgcactcggaggccgtggcaatagggcctagaggatgcagcggaagcctccggtggcttcaggagtctgacgcagctccactccccttatcatgtcacctggcagctcaccgcgccctgcagggacggtctcggggcggcctatccggatgtcccgagcgggggctgtctgattag

SEQ ID NO: 208431 - DNA, 762 bp, synthetic construct
  misc_feature 1..762: note = Description of Artificial Sequence: Synthetic coding sequence
  source 1..762: mol_type = other DNA
atgggcccctggagccgggtgcgggtggccaagtgccagatgctggtcacctgcttcttcatactactgctggggttgtctgtggctacaatggtcacccttacctactttggggcgcattttgctgtaattcgcagggcctctttggagaagaacccttaccaggccgtgcatcagtgggccttctctgccggtctgtcactcgttggcctccttacactgggcgcagttttgtccgccgccgcaactgttcgcgaggcccaaggcctcatggccggcggattcctctgcttcagccttgctttctgtgcccaggtgcaggtcgtgttttggaggttacactctccaacacaggtagaagatgcgatgcttgatacatatgatcttgtgtacgaacaggcaatgaaggggacttcccatgtgagacgacaggaactggccgcaattcaggacgtcttcctgtgttgtggtaaaaagagcccattttctcgtctggggtccaccgaagccgatttgtgccagggggaggaggctgcacgtgaagattgtctgcaggggatccgctcatttctgcggacccaccaacaggtggcatcatcgcttacatccatcgggcttgccctcactgtcagcgctctcctcttcagctcattcctctggtttgccattcggtgtggatgttctcttgaccgtaaggggaagtatactctgactcctagatcccctggacaaaaaagtaggtgggcccagtgggtgccctag

SEQ ID NO: 208432 - DNA, 525 bp, synthetic construct
  misc_feature 1..525: note = Description of Artificial Sequence: Synthetic coding sequence
  source 1..525: mol_type = other DNA
atggccatcggcttcgtgggctgcctgggcgccatcaaggagaacaaatgcttgctgctaaccttttttcttctgcttctcctggtgtttttgctagaagcaactatcgccatcctgttcttcgcttacacagataagatcgacaggtacgcccagcaggatcttaagaaaggtctgcacctgtacggaacacagggcaacgtcggcctcacaaatgcttggtccattattcagacggactttcgctgctgtggagtgtccaattataccgactggttcgaggtctataacgctacacgggtgcctgatagctgttgcctcgagttttctgaaagctgcggactccacgctcctgggacctggtggaaagcaccttgctacgaaacagtgaaagtttggctccaggaaaaccttctggccgtgggcatctttggactgtgtacagctcttgtccaaatccttggactgaccttcgcgatgacaatgtactgtcaggtcgtcaaggctgacacctactgcgcatag

SEQ ID NO: 208433 - DNA, 717 bp, synthetic construct
  misc_feature 1..717: note = Description of Artificial Sequence: Synthetic coding sequence
  source 1..717: mol_type = other DNA
atggcccgggcctgcctgcaggccgtgaagtacctgatgttcgccttcaatctgctgttttggctcggcggatgcggagttctcggggtgggcatatggctagccgccacccagggaagctttgctacattatcatcaagcttcccctcactctccgcagccaatctgctgatcattaccggagcctttgttatggccatcggtttcgtgggttgcctcggagcaatcaaggagaacaaatgtttgctgctcaccttcttcctcctgcttctcttggtcttcctgctcgaagcaaccatcgctatccttttcttcgcttacaccgataaaatagacaggtacgcacagcaggacttgaagaagggcctccatctttatgggacccagggaaatgtcggcctgaccaacgcatggtccatcatccagacagactttcgctgctgcggagtttcaaactacactgactggtttgaggtctataacgcaacaagggtgcctgacagctgctgcctggagttctcagagtcatgtggcttacatgcacccggcacctggtggaaagctccctgctacgaaactgtgaaagtgtggctccaggagaacctgttggcagtcggaatctttggcttgtgtactgctctagtccagatcctgggtctcactttcgccatgaccatgtactgccaggtcgtgaaggccgacacctactgtgcctag

SEQ ID NO: 208434 - DNA, 717 bp, synthetic construct
  misc_feature 1..717: note = Description of Artificial Sequence: Synthetic coding sequence
  source 1..717: mol_type = other DNA
atggcccgggcctgcctgcaggccgtgaagtacctgatgttcgccttcaacttgttattttggctaggcggctgcggggttctgggagtgggaatatggctggcggctacccagggttctttcgctacactgagttcttctttcccaagcctcagcgctgcaaacctgctcattataactggggcattcgttatggccataggatttgtgggatgcctgggggcgatcaaagagaacaaatgcctgctgctcactttctttcttttgctactgttggtttttctcctggaggccaccatcgctatcttgttttttgcctacacagacaaaatcgatcgctacgcccaacaggacctgaaaaaaggcctacatctctatgggacacaggggaacgtgggactgactaacgcgtggagtatcatccagaccgatttccgatgctgcggggttagcaattacaccgattggtttgaggtgtataacgcaactagagtgcccgatagctgttgcctggagttctccgagtcttgtggcctacatgcccccggcacatggtggaaggcaccttgttatgagaccgttaaagtctggcttcaggagaatctgctggcagtgggaatctttggactctgtaccgccctggtacagattctcgggctgactttcgctatgaccatgtactgtcaggtagtaaaagccgatacatactgcgcctag

SEQ ID NO: 208435 - DNA, 717 bp, synthetic construct
  misc_feature 1..717: note = Description of Artificial Sequence: Synthetic coding sequence
  source 1..717: mol_type = other DNA
atggcccgggcctgcctgcaggccgtgaagtacctgatgttcgcctttaatcttctgttttggttgggtggttgcggcgtgctgggtgtcggaatttggctcgcagcaacccagggaagcttcgcgacgctttccagctctttcccatcgttgagtgctgcgaacctcctgatcataactggagccttcgtgatggccattggtttcgtggggtgtctgggagccattaaagagaacaaatgtctgctcctgacattcttcctgcttctcctgctggtctttctgctggaggccactatcgcgattctctttttcgcatacacagataagatcgatcggtatgcccagcaggacctcaaaaagggactccatttgtacggtactcaggggaatgttggtcttaccaatgcatggagcattatccagactgatttccgatgttgcggcgtgtccaactatacagactggtttgaggtgtacaatgcgacccgagtgcctgatagttgctgccttgagttctccgagagttgtggactgcatgcgccaggaacgtggtggaaggccccctgttacgagacagtgaaggtgtggcttcaggagaacctcctggcggttggcatctttggcctgtgtaccgccttggtacaaatcttaggattgacttttgccatgacaatgtactgtcaggtggtgaaggctgacacctactgcgcctag

SEQ ID NO: 208436 - DNA, 717 bp, synthetic construct
  misc_feature 1..717: note = Description of Artificial Sequence: Synthetic coding sequence
  source 1..717: mol_type = other DNA
atggcccgggcctgcctgcaggccgtgaagtacctgatgttcgcctttaacctcctgttctggctcggggggtgtggggtgttgggagtgggtatttggttggccgctacccagggaagtttcgctactctgtcatcaagttttccttccctctccgccgctaacctgctgatcattactggagcattcgtaatggccattggtttcgtggggtgccttggcgcaataaaggagaataagtgcttgctgcttacatttttccttctgcttctgttagtattcctgctggaagccaccatcgccattctgttctttgcttataccgacaagatcgatagatatgcgcagcaggacttaaagaagggccttcacctgtacggcacccagggtaacgtgggtctgacgaacgcctggtccattatccagacagactttcgatgttgtggagtgtctaattatacagactggtttgaggtttacaatgcgactagagtgcctgactcctgttgtttagagttttctgaatcttgtgggttacacgcccctggcacttggtggaaggctccgtgctatgaaacggttaaggtgtggttgcaggaaaacttgctggccgtaggcatctttgggttgtgtactgccctcgttcagatactggggctgacatttgccatgacgatgtactgtcaggtggtgaaagccgacacctattgcgcctag

SEQ ID NO: 208437 - DNA, 717 bp, synthetic construct
  misc_feature 1..717: note = Description of Artificial Sequence: Synthetic coding sequence
  source 1..717: mol_type = other DNA
atggcccgggcctgcctgcaggccgtgaagtacctgatgttcgcctttaatctgctattttggcttggcggctgtggggtcctcggggtggggatctggctcgccgcaacacaaggttctttcgcaaccctgtctagtagtttccctagtctgagcgcggctaacctgctcataattaccggggcatttgtgatggccattggattcgtcggctgcctgggggcaatcaaggaaaacaaatgcctgttactcacatttttcttgctgctgctgctcgtatttttgctggaggccaccatcgcaatcttgttcttcgcctacactgacaaaatcgatcgatacgcacagcaggacctgaaaaaggggctgcacctgtacggaactcaaggaaatgtcggactgactaacgcctggagcatcatccagacagatttccgctgttgtggggtgtcaaactacacggactggtttgaagtgtacaatgctacacgcgtgccagattcctgctgcctggaattcagtgaaagctgcggtcttcacgcccctggcacctggtggaaagcaccctgctatgaaacggttaaagtgtggttgcaggaaaacctgctggccgtaggcattttcgggctgtgcacggccctggtgcagattctcggccttacctttgcgatgaccatgtactgtcaggttgtcaaggcagatacctactgtgcgtag

SEQ ID NO: 208438 - DNA, 774 bp, synthetic construct
  misc_feature 1..774: note = Description of Artificial Sequence: Synthetic coding sequence
  source 1..774: mol_type = other DNA
atgaccccccggagcgccggcaccagcgcccacggcgccgagctgaaaagatgcgggatggctagagcatgcttgcaggctgtcaagtatctgatgtttgcctttaatctgctattttggctcggcggatgcggagtcctgggggtcggcatctggctggccgctactcagggttcttttgccactttatcctcctccttcccttccctcagcgcggccaacctgctaataatcactggggcattcgttatggcaatcggatttgtcggctgtctaggggccataaaggagaataagtgcctactgttgacttttttcttgctcctcctcctggtgtttctgctggaagctactatcgctattctctttttcgcctacacagacaagatcgatcgttatgcacagcaggatcttaagaagggtctgcacctgtacggcactcagggtaacgtgggcctgactaatgcatggtctattattcaaacagacttccgttgctgcggggtttctaattacaccgattggtttgaggtttacaatgctacacgagtacccgactcctgttgtttggagtttagcgaatcctgtggtctccacgcacccggcacctggtggaaggcgccttgttacgagactgtcaaggtgtggctccaggagaatctcctcgcagtcggaatctttggcttgtgtaccgccctggtgcagattcttggactcacttttgcaatgactatgtactgtcaggtggtgaaggcggacacctactgtgcctag

SEQ ID NO: 208439 - DNA, 717 bp, synthetic construct
  misc_feature 1..717: note = Description of Artificial Sequence: Synthetic coding sequence
  source 1..717: mol_type = other DNA
atggcccgggcctgcctgcaggccgtgaagtacctgatgttcgcctttaacctgctgttttggttgggcgggtgcggtgttttgggagtgggcatttggctggctgccacccagggttccttcgctacactctcaagcagctttccctctctctcggctgccaatctgctaattatcactggcgctttcgtaatggccattggtttcgtgggatgcctgggagctataaaagagaacaaatgtctgctgttgaccttctttctgctgctgctgctggtgttccttctagaggctacaatcgccattctgttttttgcctataccgataaaatcgaccgctacgcgcagcaggacctgaagaagggactgcacctgtacgggacccagggtaacgtggggcttaccaatgcatggtctataatccagacggatttccgatgctgtggcgtgagtaattataccgattggtttgaggtctataatgctacacgggtgccggactcgtgttgcctggaattctcggaatcatgtgggctgcatgcccctggtacctggtggaaggccccttgctacgaaactgtcaaggtttggctccaggaaaatctgctggctgtgggcattttcggcctgtgcacagcactggtgcaaattctggggcttacgtttgccatgacgatgtattgtcaggtcgttaaagcggacacctactgtgcttag

SEQ ID NO: 208440 - DNA, 525 bp, synthetic construct
  misc_feature 1..525: note = Description of Artificial Sequence: Synthetic coding sequence
  source 1..525: mol_type = other DNA
atggccatcggcttcgtgggctgcctgggcgccatcaaggagaacaaatgtctgctgctgacgttcttcctactgctactgctggtgtttctcctcgaggccaccattgcgattctctttttcgcctacacagataaaatcgaccggtacgcacagcaggatttgaagaaaggattgcacctgtatggaacccaagggaacgtgggcttgacaaacgcgtggtccatcatccagaccgacttcaggtgttgtggtgtgtccaactatacggattggtttgaggtatataacgccacaagagtcccggattcttgctgcttggaattcagtgagagctgcggtctgcatgcccctgggacctggtggaaagctccttgctatgagactgtcaaggtctggttgcaggagaaccttttggcagtgggaattttcgggttgtgtacagctctggtccagatactgggactcacctttgccatgactatgtactgccaggtggttaaggcggatacctactgtgcatag

SEQ ID NO: 208441 - DNA, 303 bp, synthetic construct
  misc_feature 1..303: note = Description of Artificial Sequence: Synthetic coding sequence
  source 1..303: mol_type = other DNA
atggccatcggcttcgtgggctgcctgggcgccatcaaggagaacaagtgcctcttactcaccttttttctgctgctgttgctggtgttcttgctcgaagccaccatcgcaatccttttttttgcttatacagacaagatcgatcgctatgcccaacaggatctcaaaaaggggctgcatctttatggaacccagggaaacgtcggtctcacaaatgcctggagtataatccagacggattttaggtgttgcggggtgagcaactatactgattggttcgaggtgtataatgctacccgctag

SEQ ID NO: 208442 - DNA, 480 bp, synthetic construct
  misc_feature 1..480: note = Description of Artificial Sequence: Synthetic coding sequence
  source 1..480: mol_type = other DNA
atggcccgggcctgcctgcaggccgtgaagtacctgatgttcgcctttaacctgctcttttggctgggtggctgcggggtgctaggtgttgggatctggcttgcggctacacaggggagctttgccaccctgtcctcctctttcccctctctttcagccgctaacctgctaatcattaccggagccttcgtgatggccatcggattcgtagggtgcctgggtgccatcaaagagaacaagtgtctcctgctgactttttttctccttctcttacttgtgttccttctcgaagctactattgctattctcttttttgcatataccgacaagatcgacagatacgcacagcaggacctcaagaagggattgcatttgtatggaacccaaggcaacgttgggctgaccaacgcctggagcattattcagaccgattttagatgctgcggggtgtcaaattacacagactggttcgaagtgtag

SEQ ID NO: 208443 - DNA, 258 bp, synthetic construct
  misc_feature 1..258: note = Description of Artificial Sequence: Synthetic coding sequence
  source 1..258: mol_type = other DNA
atggcccgggcctgcctgcaggccgtgaagtacctgatgttcgccttcaacctgcttttctggcttggggggtgcggagtgttgggtgtaggtatctggctagctgccactcaaggaagcttcgcgacactcagttcatcatttccatcattgtctgcagccaatcttctgataatcacaggagcctttgttatggccatcgggttcgtcggctgtttgggggccattaaggagaacaaatgcctgctcttgacatag

SEQ ID NO: 208444 - DNA, 807 bp, synthetic construct
  misc_feature 1..807: note = Description of Artificial Sequence: Synthetic coding sequence
  source 1..807: mol_type = other DNA
atgagcggcaagcactacaagggccccgaggtgagctgctgcatcaagtacttcattttcggcttcaatgtgattttctggttcctgggcattacctttcttggaatcggcctttgggcatggaacgagaagggcgttctgtccaacatttctagtatcactgacttgggtggctttgaccccgtgtggttattcttggtggtgggcggagtaatgtttatcctgggcttcgctgggtgcataggggcactgagagagaacacctttctgcttaagttcttctcagtgtttctgggtatcattttctttctggaactgaccgccggcgtactggctttcgtctttaaggattggataaaagaccagctttacttctttataaataataacatcagagcctatcgggacgacattgacttgcagaacctcatcgactttacccaggagtattggcagtgctgcggagctttcggagccgacgattggaacttgaacatctacttcaattgcactgattctaacgcaagtcgcgaaagatgtggggttcccttttcatgttgcactaaggatcccgctgaggatgttatcaacacccaatgtggatacgacgcgcggcagaaacccgaagtggaccaacagatagtgatctatacaaaaggctgtgtaccacagttcgagaaatggcttcaggataatctcactatcgtggccggcatctttatcggcattgcactgctccagatcttcgggatctgccttgcgcagaatctcgtatcggatattgaagccgtcagggcgtcctggtag

SEQ ID NO: 208445 - DNA, 594 bp, synthetic construct
  misc_feature 1..594: note = Description of Artificial Sequence: Synthetic coding sequence
  source 1..594: mol_type = other DNA
atgttcatcctgggcttcgccggctgcatcggcgccctgcgggagaacaccttcctgctgaagttttttagtgtcttcctaggcataatatttttcctggagttaaccgcaggcgtgctggccttcgtgttcaaagattggattaaagaccaactctatttcttcattaacaacaacatccgggcctacagggatgatatcgatctgcagaatctaattgatttcacccaggaatattggcagtgctgtggagcttttggggctgatgattggaacctaaatatttatttcaattgcaccgattccaatgcttctagagagcgatgtggagtgccattttcttgctgcaccaaggaccctgccgaagacgtcataaatacacagtgtggctacgatgccagacaaaaaccagaggtggaccagcaaatcgtgatctacacaaaggggtgtgtcccgcagtttgagaagtggctgcaggacaacctgacaatcgtggccggcatttttatagggattgcgttgctccagatattcggaatttgtctggcgcagaatttggtgtccgatattgaggctgtgagggcctcctggtag

SEQ ID NO: 208446 - DNA, 801 bp, synthetic construct
  misc_feature 1..801: note = Description of Artificial Sequence: Synthetic coding sequence
  source 1..801: mol_type = other DNA
atggccagccggcggatggagaccaagcccgtgatcacctgcctgaagaccctgcttattatatactccttcgtgttttggaaagagaaggcagccggattctgcggccgccaagacgtcgccatggccttgatcaccggtgtgatattgttggcagttggtgtgtggggcaaactcaccttaggcacctatatatcattgatcgccgagaattctacaaatgccccttacgttctgatcggaaccgggacaactatagtagtgttcgggcttttcggatgttttgctacgtgccgcgggtccccctggatgttgaagctctatgctatgttcctgagcctggtctttctcgccgagctggtagcgggcatttcgggattcgtgttcagacatgagatcaaggacacctttcttaggacctacacagatgccatgcaaacttataatggcaatgatgagcgcagcagggctgttgaccacgtgcagcgaagcttgtcatgctgcggcgtccagaattatacaaactggtctacgagtccgtactttctcgagcacggaatacctccttcttgctgcatgaacgagaccgactgtaatccccaagacctgcacaacctgaccgtcgctgctactaaagtaaatcagaagggatgctacgatctagttacttcattcatggaaaccaacatgggcatcatcgccggtgtggccttcggtatcgcattttcgcaactcattggcatgctacttgcgtgctgtctgtccagattcatcaccgccaatcagtatgagatggtctag

SEQ ID NO: 208447 - DNA, 750 bp, synthetic construct
  misc_feature 1..750: note = Description of Artificial Sequence: Synthetic coding sequence
  source 1..750: mol_type = other DNA
atggccagccggcggatggagaccaagcccgtgatcacctgcctgaaaacgctactcataatatactcattcgttttctggattacaggcgtgattttattagcggttggagtgtggggcaagctcacccttgggacatacattagtttaatcgctgaaaacagtacaaatgccccgtacgtcctaatcggcaccggcacaactatcgtcgtctttggcctcttcggttgttttgccacttgccgcgggagcccatggatgcttaaactgtatgccatgttcctcagcctggtgtttctggcagagctcgtggccgggatctccggcttcgtgttccgtcatgagattaaggatacattccttcggacttatacagatgcaatgcaaacctacaacggaaacgatgaaagaagtagagccgtagaccatgtacagaggtccctctcatgctgtggggtgcaaaactacaccaactggagtacctccccctacttcctggagcacggcatccccccctcctgctgtatgaatgaaacagactgcaatccacaggatctccataatctgacggtggcagcaaccaaggtcaatcagaaagggtgctatgacctcgtcacatccttcatggagaccaacatggggattatcgcaggcgtagctttcggaatcgctttctcccagttaatcggtatgcttttagcatgctgtctctcaaggttcatcaccgccaatcagtatgaaatggtgtag

SEQ ID NO: 208448 - DNA, 828 bp, synthetic construct
  misc_feature 1..828: note = Description of Artificial Sequence: Synthetic coding sequence
  source 1..828: mol_type = other DNA
atggccaaccggaccgtgtgcaacggccagggccggagccgggacctgctgcggatcaagaacattcctaatgcacctggccatttcctgatcgccggagttggtggcagttcgagtcagggccggtccatcgaggaggaggggaagactcacctgggcattacaggtgtaatcctgcttgcagtgggagtgtggggtaaattgaccctcggcacatatatctcactgatagccgagaattctaccaatgctccttacgtactgatcggcacaggcacaaccattgtggtgttcgggctattcggatgtttcgccacctgcaggggaagcccatggatgctcaaactttatgcaatgttcttaagtcttgtcttcttggctgaactagtggcagggatttccggcttcgtgtttagacatgaaatcaaagacacattcctgagaacatacacggacgccatgcagacctataacgggaacgacgaacgatcgcgggccgtagaccacgtgcagcggtctctcagttgttgcggcgtgcagaactacacaaactggagcacctccccttatttcctggaacatggaatccctcctagctgctgcatgaatgaaactgactgcaatccgcaagacctgcataacttaacggtggctgccacgaaggtaaaccagaagggttgttatgatctcgtcaccagcttcatggagaccaacatgggaatcattgcgggcgtggccttcggcattgcattcagccagctcatcggaatgctgctagcttgttgtttgtctcggttcattaccgctaaccagtacgagatggtttag

SEQ ID NO: 208449 - DNA, 672 bp, synthetic construct
  misc_feature 1..672: note = Description of Artificial Sequence: Synthetic coding sequence
  source 1..672: mol_type = other DNA
atgatcaccggcgtgatcctgctggccgtgggcgtgtggggcaagcttactctcgggacatacatcagtctgatagccgagaactctacaaatgctccgtatgtgttaatcggcacaggcaccactattgtggtcttcggactattcggctgcttcgccacttgccgtgggtccccttggatgctgaagctctacgccatgtttttaagtctggtttttctggccgagcttgttgcagggatctcaggatttgtgttcagacacgaaatcaaggacacattcctccgcacgtataccgacgcaatgcagacctacaacggaaacgacgagcgctctagagctgtggaccacgttcagagaagcctgagctgttgtggcgtgcaaaactacaccaactggtctaccagcccctacttcttggagcacgggattccgccttcctgctgtatgaacgagaccgactgcaaccctcaagacctccacaatttgacagtcgccgctactaaggtcaatcaaaagggatgctacgacctggtcacaagcttcatggagactaatatggggatcatcgcgggagtggcttttgggattgcattctctcagctgattggtatgctgctggcctgctgtctctctagattcattaccgcaaaccagtacgaaatggtctag

SEQ ID NO: 208450 - DNA, 714 bp, synthetic construct
  misc_feature 1..714: note = Description of Artificial Sequence: Synthetic coding sequence
  source 1..714: mol_type = other DNA
atggccggcgtgagcgcctgcatcaagtacagcatgttcaccttcaatttcctattttggttatgtggtatcctcattctggctttggcgatttgggtgcgggtgagcaacgactctcaggcaatctttggatctgaggatgttgggtcttcatcgtacgttgcagtggacatcctcattgctgtgggcgctataataatgatcctgggtttcctcggttgttgtggtgctattaaggagtcccgctgtatgcttctcctcttttttattgggcttctgctgatcctcctactgcaagtggcaactgggatcctgggggccgtttttaagtccaagtccgatagaattgtgaatgaaacactgtacgagaatacaaaacttttaagcgctaccggtgagtcggagaagcaatttcaagaagcaatcatagtttttcaggaagaattcaaatgctgcggtttggtgaatggcgcggccgactgggggaataacttccagcattaccctgaactgtgtgcttgcctggacaagcaacgcccttgccagtcctacaatggaaagcaagtgtacaaggagacttgtatctcattcattaaggatttcttagcgaaaaatctcataatcgtgataggaatttctttcggcttggccgtgattgaaatcttagggctggtcttctccatggtcctctactgtcagattggtaataagtag

SEQ ID NO: 208451 - DNA, 714 bp, synthetic construct
  misc_feature 1..714: note = Description of Artificial Sequence: Synthetic coding sequence
  source 1..714: mol_type = other DNA
atggccggcgtgagcgcctgcatcaagtacagcatgttcaccttcaatttccttttttggttgtgcgggattctcatcctggcattagcgatctgggtgcgtgtgtctaatgatagccaggccatattcggaagtgaggatgtgggcagcagtagctacgtggcggtggacatcttaattgccgttggagctattataatgatcctgggtttcctcggctgttgtggtgctatcaaggaatctaggtgtatgttactcctctttttcattggtctcctgctcatcctgttactgcaggtcgctacgggcatcctaggtgccgtgtttaagtccaagagcgataggattgtcaatgagaccctgtatgagaacacgaaactcttaagtgctactggcgagtctgagaaacagttccaggaagccatcattgtgttccaagaagagttcaaatgttgtggcctcgtgaatggagccgcggactggggcaataacttccagcactatcccgaactgtgcgcttgcctcgataagcaacggccttgccaatcatacaacgggaagcaagtttataaggagacctgcatctcattcatcaaagattttctagcgaagaatctgatcatcgtaataggtatctccttcggcctagctgtgatcgagatactgggtctagtgttcagcatggtcctgtactgccagatcgggaataagtag

SEQ ID NO: 208452 - DNA, 714 bp, synthetic construct
  misc_feature 1..714: note = Description of Artificial Sequence: Synthetic coding sequence
  source 1..714: mol_type = other DNA
atggccggcgtgagcgcctgcatcaagtacagcatgttcaccttcaacttcctcttttggctctgtggaatccttatacttgctctcgctatttgggtgcgtgtttccaacgattcacaggccattttcggctctgaagacgtggggagctcttcctacgttgcagtcgatatcttgatcgcagtaggagctatcatcatgatcctcggatttctggggtgctgcggcgcgattaaagagagtcgctgtatgcttctgctgttcttcatcggcttgctgcttattctcctgctgcaggtagctactgggatcctcggggctgtctttaagtccaaaagtgaccgtatcgtcaatgagacactgtatgaaaatacgaagctcctctctgcaacaggagaatcagagaaacaatttcaagaagccatcattgtgttccaggaggagttcaaatgctgcgggttggtcaatggcgctgccgattggggaaataatttccagcattatccagagctctgcgcctgtttggacaaacagagaccttgccagagttacaacggcaagcaagtttacaaagagacctgcatttcttttattaaagactttctggccaaaaatctcattattgtgataggcatttcctttggtctggcagtcattgaaatcttagggctggtgtttagcatggtcctttactgtcagatcggaaataagtag

SEQ ID NO: 208453 - DNA, 720 bp, synthetic construct
  misc_feature 1..720: note = Description of Artificial Sequence: Synthetic coding sequence
  source 1..720: mol_type = other DNA
atggcccggggctgcctgtgctgcctgaagtacatgatgttcctgttcaacctgattttctggctgtgcggttgtggtctgctcggtgttggtatatggctcagtgtctcccaaggaaactttgcaaccttcagtcctagtttcccatcattgagtgcggccaacctcgtcattgccattggcaccattgttatggtcactgggtttctggggtgtctcggggccatcaaggaaaataagtgcttgctgctgtcttttttcatagtgctgctggtcattctgctggccgagctgatcctgttgatcctgttttttgtctacatggacaaagtgaacgagaatgccaagaaggacctgaaggagggcttactgctgtatcacacggagaacaatgtcgggttaaaaaacgcatggaatatcatacaagccgagatgagatgctgtggcgtgaccgactacacagactggtacccagtcctaggagaaaacaccgtaccagatcgatgctgcatggaaaattcccagggatgcgggaggaacgccacaactcccctgtggagaactggatgttacgagaaagtgaagatgtggtttgatgataacaagcacgtactaggaaccgtaggcatgtgtatccttatcatgcagatactggggatggccttctctatgaccctgttccagcatatccaccgtacaggtaaaaagtacgacgcatag

SEQ ID NO: 208454 - DNA, 720 bp, synthetic construct
  misc_feature 1..720: note = Description of Artificial Sequence: Synthetic coding sequence
  source 1..720: mol_type = other DNA
atggcccggggctgcctgtgctgcctgaagtacatgatgttcctgtttaatctcatattttggttatgtggctgcggacttctgggggtaggaatttggttatccgtatctcagggcaactttgctacattcagcccaagctttccatccctctccgcagccaacttggtgatcgccatcgggaccatagtgatggtcactggattcttgggctgtttaggtgcgattaaggaaaacaaatgcttacttctcagtttcttcatagtgttgctggtgatcttactggccgagttgatattgttgatccttttctttgtgtatatggacaaggtgaacgaaaatgcaaaaaaagatctgaaggagggactgctgctgtatcacacagagaataacgtcggcctaaaaaacgcttggaatattatacaggccgagatgcgttgctgcggcgtgacggactatacagactggtacccagtcttgggggaaaatacagtgcctgacagatgttgcatggaaaactcccagggatgcggacggaacgcgacaaccccgctttggaggaccggatgctatgagaaggtaaaaatgtggtttgatgataataagcacgtgctgggcacagttggaatgtgtattttgatcatgcagatattgggaatggcgttctctatgactctgttccagcacatccacagaactggaaagaagtacgacgcgtag

SEQ ID NO: 208455 - DNA, 1044 bp, synthetic construct
  misc_feature 1..1044: note = Description of Artificial Sequence: Synthetic coding sequence
  source 1..1044: mol_type = other DNA
atggccctgatgctgagcctggtgctgagcctgctgaagctgggcagcggacagtggcaagtttttggccctgacaagcccgtgcaggcgctggttggggaagacgctgccttctcttgctttctttccccgaaaacaaacgccgaagcaatggaggtgaggttttttcgcggccagtttagttctgttgttcatctgtatcgagatggaaaagaccagcctttcatgcagatgccccagtaccaggggcgaaccaaactggtgaaagatagtatcgcggaaggcagaatctccctgagactcgaaaacattacagtgctcgacgcagggctttacgggtgtcggatctcatcccagagttattaccagaaggccatttgggaactccaggtcagcgcactgggatccgtgcctctcatatccatcaccgggtatgtagatagagatattcagctcttatgtcagagttctgggtggtttcccagacccacagcaaagtggaagggcccacaagggcaggacctgtcgacagactcaaggacaaatagggatatgcatggactgtttgacgtcgagatctcactgactgtccaggagaacgcgggctcaatttcctgttcgatgagacacgcgcacctcagtagggaggtcgaatctagagtacaaattggagatacgttcttcgaacccatctcatggcacttggcaactaaagtactcgggatcctatgctgcgggctgttttttgggatcgtggggctgaaaattttcttttctaagtttcaatgtaagcgcgaaagggaagcttgggcaggcgctctgttcatggtgcctgcaggcacaggatccgagatgcttccacatccggctgcaagcctgctgctggtgctagcatccaggggccccggacccaagaaagaaaatcctggcggaaccggcctggagaagaaggcgaggactgggcgcatcgagagaagacccgaaactcggtcaggaggcgacagcggtagtcgcgatggatctcctgaggcactgaggttctag

SEQ ID NO: 208456 - DNA, 879 bp, synthetic construct
  misc_feature 1..879: note = Description of Artificial Sequence: Synthetic coding sequence
  source 1..879: mol_type = other DNA
atgggcgagaagagcgagaactgcggcgtgcccgaggacctgctgaacgggctgaaggtcacagacactcaggaggctgaatgcgccggtcccccagtccctgatcccaagaaccagcacagccagagcaaattgctgagggacgacgaggcgcacctccaagaggaccagggtgaggaggaatgctttcacgattgttctgcttcctttgaagaggaacctggtgcagacaaggtggaaaataaaagtaacgaggacgttaacagctcagagctggatgaggagtatctaattgaactggagaagaatatgtccgacgaggaaaaacaaaaacgccgtgaagaaagcactaggctgaaagaagaggggaatgaacagttcaaaaagggggactatatcgaggcagagtctagctattccagagccctcgaaatgtgcccatcctgttttcagaaagaacgcagcatcctcttcagtaacagagccgccgcccgcatgaagcaggacaagaaagagatggctatcaatgattgttcgaaggccattcaactcaatccttcctatatcagagcaattctgcgtcgggccgagctatacgaaaagaccgataagctggacgaagcgttagaggattataaatctatccttgaaaaggacccaagcattcatcaggcacgggaagcatgtatgagactgccaaagcagatcgaagagaggaacgagaggctgaaggaagaaatgttgggtaagctgaaggacttgggcaatctggtcctcagaccattcggacttagtacagagaatttccagattaagcaagactcctcaacaggaagctattctatcaacttcgtccagaaccctaataataataggtag

SEQ ID NO: 208457 - DNA, 2199 bp, synthetic construct
  misc_feature 1..2199: note = Description of Artificial Sequence: Synthetic coding sequence
  source 1..2199: mol_type = other DNA
atggacgccgacaaggagaaggacctgcagaagttcctgaagaacgtggacgagattagcaatcttatccaagagatgaacagcgatgatcccgttgtgcagcagaaagcggtcttagaaacagaaaaaagacttctgctcatggaggaggatcaagaggaggatgagtgccggaccactctgaacaagacaatgatatctcccccacaaacagctatgaagtcagcagaagagatcaacagcgaagcatttctcgcatcagtggaaaaagacgctaaggagagggcgaaacggaggagagaaaacaaggtcctcgctgatgccttaaaagagaaagggaatgaggctttcgctgaaggaaactatgagaccgccatactcagatactccgaaggcctggaaaagctaaaagatatgaaggtcctgtataccaaccgcgcccaggcttatatgaagttggaggattatgaaaaggcactggttgactgcgagtgggcgctgaagtgtgacgaaaaatgtactaaggcctatttccatatgggcaaggccaatctggcacttaagaactatagtgtgtcacgagaatgttacaagaagattttagagatcaatccaaaactccaaacacaggttaagggatatctcaatcaggtagatttacaggagaaagccgatctgcaggaaaaggaggctcacgagctcctggactctgggaagaacaccgccgtcaccaccaaaaacttgcttgagaccctttccaagcctgaccaaatccctttgttttatgcagggggcattgaaatactcacagagatgattaatgagtgcacggaacagactctgtttagaatgcacaacggattttcaatcatatcggataacgaagtcattcgtcgctgcttttctacagcaggaaacgatgccgtggaggagatggtatgtgttagcgtgctgaagctgtggcaggctgtgtgctctagaaatgaagagaatcagcgtgtgcttgtaatccaccacgatcgcgctcgtttactagctgcgctgttgagttccaaggtgctggccatacggcagcagtcctttgctcttctgctccacctcgcacagaccgagtccggccgcagcttaattattaaccacctggacctgacaaggctgttggaggcgctggttagctttctggacttttctgacaaggaggctaatacagccatggggctgttcacagacttggccctggaggaacgctttcaggtttggtttcaggctaatcttcccggtgtgctgccagccctgaccggggtgctgaagaccgatcccaaggtgtcttcttcatctgccttatgccaatgcatcgcaatcatgggaaacctgagcgctgagcctacaacccgacgccacatggccgcatgcgaggaatttggggacggctgcctgtccctgttggccagatgtgaagaggatgttgatttgttccgggaggtcatctacaccctgcttggactgatgatgaacctctgcctgcaagccccattcgtcagcgaggtctgggccgtggaagtctctcgccggtgtctgtccttacttaattctcaggatggcggtatcctcacacgggccgccggcgttctctccagaaccctctcctcaagcttgaagattgtcgaggaagcgcttagggccggcgttgtgaaaaagatgatgaagttcctcaaaaccggcggcgagactgcttctcggtacgccataaaaatcttagcaatttgtaccaattcttatcatgaggctagagaggaagttatccgccttgataagaaactgagtgtgatgatgaagttactgagttcagaagatgaggtattggtgggcaatgctgcattgtgtttgggcaattgcatggaggtgcccaacgtggccagttccctgctaaaaacagatctgctgcaggtgcttctaaaactagcaggttccgatacccagaagactgccgtgcaggtgaacgctggtatcgctctcgggaaactgtgcaccgccgagcctcgcgtaccagccgagtcctctcacctgcagtttggcagggagtcagccgcccccgaagcactctcccccaggaggtgggaggagatgttccacatgctggtgttctccctgtcctccgtagacccgccacccccacctccgcaaacatgctacccttag

SEQ ID NO: 208458 - DNA, 324 bp, synthetic construct
  misc_feature 1..324: note = Description of Artificial Sequence: Synthetic coding sequence
  source 1..324: mol_type = other DNA
atggacgccgacaaggagaaggacctgcagaagttcctgaagaacgtggatgagattagcaacctgatccaagagatgaacagtgacgaccccgtcgttcagcagaaggccgtcctagagaccgaaaagcggctccttttgatggaggaggatcaggaggaggatgaatgtaggacgactctgaacaaaacaatgatatctcctcctcagacagctatgaagtcagctgaggagatcaactccgaggctttcctcgctagtgtggagaaagatgccaaagagcgcgccaaacgccggcgagagaataaggtgttagccgactag

SEQ ID NO: 208459 - DNA, 609 bp, synthetic construct
  misc_feature 1..609: note = Description of Artificial Sequence: Synthetic coding sequence
  source 1..609: mol_type = other DNA
atggacgccgacaaggagaaggacctgcagaagttcctgaagaacgtcgatgaaataagcaacctcatccaggagatgaattctgatgatccagtggttcagcagaaggccgtcctagaaacagagaaacgcctgctgctgatggaggaggaccaagaggaggacgagtgccgtactacgctaaacaagacaatgataagccctccgcagacggctatgaagagcgctgaggaaatcaatagcgaagcgtttcttgcctctgtcgagaaggacgccaaggaacgcgccaaaaggagacgtgagaacaaggtgctagcagatgcattgaaagagaagggcaatgaggcatttgccgagggaaattatgagaccgcgatacttcggtactccgagggcctggagaaactgaaagacatgaaggttttatacactaacagagcacaggcctatatgaagctcgaggactatgagaaagccctcgtggactgtgagtgggcactgaaatgtgacgaaaagtgcacaaaggcatactttcacatggggaaagccaatcttgctcttaaaaattacagtgtctctcgagaatgttataagaaaattctcgaatag

SEQ ID NO: 208460 - DNA, 504 bp, synthetic construct
  misc_feature 1..504: note = Description of Artificial Sequence: Synthetic coding sequence
  source 1..504: mol_type = other DNA
atggacgccgacaaggagaaggacctgcagaagttcctgaagaacgtggacgagatcagcaacttaattcaggagatgaatagtgatgatcctgtggtgcagcaaaaagctgtgcttgaaacagaaaaacggctgctacttatggaggaagaccaagaagaagatgagtgcaggacgactttgaacaagactatgattagcccccctcagacagccatgaaaagcgcagaagaaattaatagcgaggcttttttagcatccgtagaaaaggacgctaaagaacgtgccaaacgtaggagagaaaataaagtgctcgccgacgcattgaaagaaaagggaaacgaggcttttgcagagggcaattacgaaacggctatattaaggtacagcgaagggctggaaaagctcaaagacatgaaagtcctttacacaaaccgtgctcaggcttacatgaagctcgaagattacgaaaaagccctggtcgactgcgagtgggctctctag

SEQ ID NO: 208461 - DNA, 2118 bp, synthetic construct
  misc_feature 1..2118: note = Description of Artificial Sequence: Synthetic coding sequence
  source 1..2118: mol_type = other DNA
atggacgccgacaaggagaaggacctgcagaagttcctgaagaacgtcgacgagatctccaatctcatccaggagatgaactcagatgatccagtggtgcagcagaaggccgtgcttgagaccgagaagcggttgctgcttatggaggaggatcaggaagaagacgaatgccgaacgaccttgaacaaaaccatgatttcacctccccagactgctatgaagagtgccgaagagattaactccgaagcgttcctagctagtgtcgagaaggacgctaaagagagggccaagcgacgtcgggaaaataaggtgctagctgacgccttaaaagaaaagggcaacgaggccttcgcagaaggcaactatgagactgccattctcaggtacagcgaggggctggagaaactcaaggatatgaaagtgctgtacacaaacagggcacaggcttacatgaagcttgaggactatgagaaggccctggtggactgcgaatgggctttaaaatgcgacgaaaaatgtacaaaggcctatttccatatgggtaaagcaaacttggctttaaaaaactactctgtcagccgcgagtgctacaagaagattctggagataaaccccaagttacagactcaggtgaagggctacttgaaccaagtagatctacaggagaaggctgacctccaggaaaaggaagcccatgaactgctagactctggaaaaaataccgccgttacaacaaaaaatctactggagacactgtcaaaacctgaccagatccccttattttacgcaggggggatagagatcctgaccgaaatgatcaacgaatgtactgaacagaccctgttcaggatgcacaacggatttagcataattagcgataacgaggtcattaggagatgtttcagcacagcaggaaatgatgcagtggaggagatggtgtgcgtatctgtactcaagctctggcaggccgtctgttccaggaacgaggagaaccagcgcgtattagttattcatcatgatagagccaggctgctggctgccctgttgagttctaaggtgctcgcaatccgccagcagagctttgccctcttactgcacttggctcaaaccgagtccggacggtcactaatcatcaatcatctggatctcacgcgcctcctggaggccctcgtgtccttcctcgacttctcagacaaggaagccaatactgctatggggttgtttactgatctggccctggaggagaggttccaggtatggtttcaggctaatttgcctggcgtgctgccggccttaactggcgtgttgaagaccgaccctaaggtgtcatcttcttctgcactctgccaatgtatcgccattatgggcaacttatcggctgagcccacaacacgtcgccacatggccgcctgtgaggagttcggggatggatgcctctctctcctcgcgaggtgtgaagaggacgtcgatcttttccgagaagtaatttacacactcctcggcttgatgatgaatttgtgtctccaggctccattcgtttccgaggtctgggctgtggaagtttctcgcagatgcctgtcactgttgaatagccaggacggaggtatcctgacaagagctgccggcgtcctttccaggaccctgtccagcagcttaaagatagttgaggaagccttgcgggccggagtggtgaaaaagatgatgaaattcctgaagaccggcggcgagactgcctctaggtacgctataaaaatcctggccatttgcaccaacagctaccacgaggcaagagaggaagtgatcagattggacaaaaagctgtctgtaatgatgaagctgctgtcctctgaggatgaggtgctggtaggcaacgccgccctctgccttgggaattgcatggaagtaccaaatgtcgccagcagccttcttaagactgaccttctgcaggtgctcctgaagttggccggaagcgacacacagaagaccgcggtgcaggtgaatgcaggtatagcactgggtaagctgtgcactgccgagcctagattcgctgctcaactgagaaagctgcacggattagagatcttgaacagcacaatgaagtatatcagtgattcatag

SEQ ID NO: 208462 - DNA, 1143 bp, synthetic construct
  misc_feature 1..1143: note = Description of Artificial Sequence: Synthetic coding sequence
  source 1..1143: mol_type = other DNA
atgttccggctgctgagctggagcctgggccggggcttcctgcgggctgctggcagacgttgcaggggatgttccgccaggcttctccctggcttggcaggcggtcctggacctgaggtgcaggtgccgccctcacgcgtggcccctcatggccgaggccctgggctgttgcccttgctggctgcactcgcttggttcagcaggcctgctgctgctgaggaggaagaacagcagggcgccgatggagcggctgctgaagacggagcagacgaggctgaggccgagatcatacagctgctgaagcgggccaaactcagtattatgaaagacgagccggaggaggccgagttaatccttcacgatgccctgcgcctagcttaccaaaccgataacaagaaagccattacgtatacatacgacctgatggcgaatctggcctttatccggggacagctggagaacgccgaacagctcttcaaggccactatgagctacttattgggggggggcatgaagcaggaagataatgcgattattgagatcagcctgaaactcgcatcgatctatgccgcccagaaccggcaagagtttgcagtggcgggttacgaattttgtatttcaaccctggaggaaaagattgagcgcgaaaaagaactcgctgaagacatcatgtccgttgaggagaaggccaatactcacttgctcctgggcatgtgtctcgatgcctgtgctcggtacctgctcttctctaaacagccctcccaagcccagcggatgtatgaaaaagcccttcagatctctgaggagatccaaggagaacgtcatccacaaacaatcgttctcatgagcgacctggccacaacgctcgacgcgcaggggcgcttcgacgaggcctatatctatatgcaaagggccagcgatctcgcaaggcagatcaatcaccctgaactgcacatggttctaagcaacctggcagcagtcctgatgcatcgagaacggtatacgcaagcaaaagagatataccaggaagcattgaaacaggcaaaactgaaaaaggatgaaatatcagtgcagcacatccgcgaagagctggccgaactcagtaagaaatcaagaccactgacaaacagcgtgaaactgtag

SEQ ID NO: 208463 - DNA, 1143 bp, synthetic construct
  misc_feature 1..1143: note = Description of Artificial Sequence: Synthetic coding sequence
  source 1..1143: mol_type = other DNA
atgttccggctgctgagctggagcctgggccggggcttcctgcgggcagctggaaggcggtgtcgaggctgcagtgccagattgctgcccggactggctggcgggcccggtcccgaagtccaggtacccccaagccgggtggctccacatggccgggggcctggtctgctccccttgttggccgcgctggcctggttcagtcgacccgctgcggcggaggaggaagaacagcagggcgccgatggcgccgccgccgaggatggtgccgatgaggccgaggccgaaataattcagctcttgaagcgggctaaacttagcataatgaaggatgagcctgaagaagcggagttgatcctacatgatgccctgcgcttggcatatcagacagacaacaaaaaggctatcacatatacatacgacttaatggcgaatctggcattcattaggggccagctggagaacgccgagcaattgttcaaggcaaccatgagctatttactaggaggggggatgaagcaggaagataacgccattatcgagatctccctgaagctggcgtcaatctatgctgcacaaaatcggcaagagtttgctgtggctggttacgagttctgtatctctactctcgaagaaaagatcgagcgtgagaaggagctggccgaagacatcatgtccgtcgaagaaaaagccaacacccacctgcttttaggcatgtgtctggatgcatgtgctaggtacttgcttttcagtaaacaaccttctcaggcccagcgaatgtacgaaaaggcccttcaaattagcgaagaaatccagggcgagaggcatcctcagaccatcgtgctgatgtcagacctggctacgaccctagacgcccagggacgattcgacgaagcctatatttatatgcagcgggcgtcagatcttgccagacagatcaatcaccctgagttacatatggtcttaagcaatttggctgcagtgctgatgcatagagagcgctatactcaggctaaggaaatttatcaggaagccttaaaacaggctaaactgaagaaggatgaaatctccgttcaacatatcagggaggagctagctgagctctcgaagaagagccgcccactgacgaactctgtgaagttgtag

SEQ ID NO: 208464 - DNA, 1506 bp, synthetic construct
  misc_feature 1..1506: note = Description of Artificial Sequence: Synthetic coding sequence
  source 1..1506: mol_type = other DNA
atggcccagccccacaccaccagcgtgccctacttcgcccggagccccgctccacctccacctagcagaagcggcgcccctccccagccgccggccacactgcggccgtccaggagaagaacgagacccccacgtccggccgatcggcgagatgcccctgcagattgtgcgtacctctggcggatcttgacacctaggagaggacgagcgcggagatccgatgtgggtgctcggcatagggcttgcggcagacgggatgtcctacttagcaggcaagggcctgcaaacccagagggggctaggcgggttgtcgggggccaggaaagggtctggcctgccgtgcgccgcgggcggggaggatcaatgttccggcttctgtcgtggtccttaggcagggggttcctgcgggcagccggccgaaggtgccgaggctgctcagctagactgttgccaggcctcgccggcggacccggccctgaggtgcaggtccctccgtccagagtggccccacatggaagaggtccgggactgttacctctgttagctgcactggcctggttttcccgcccggcagctgctgaagaagaggaacaacaaggagcggatggggcagctgccgaagatggagccgatgaggctgaggccgaaataatccagctcctgaagcgggcaaagctcagcataatgaaggatgaaccggaggaggcggaactgatactgcatgacgcacttaggctggcataccaaacagataacaagaaggctatcacgtacacttacgatctgatggccaaccttgctttcattcggggccaactggagaacgctgagcagctgttcaaggcaaccatgtcttatttattagggggaggcatgaaacaggaggataatgcaatcatagagatcagtttgaaactcgcctcaatctatgcggcccagaaccggcaggaattcgccgtagcagggtacgaattttgtatctctacccttgaagaaaaaatcgagcgcgagaaggagctcgccgaagatattatgagcgtggaggagaaagctaatacacacctcctcctgggaatgtgccttgacgcttgcgccaggtatctgttattctccaaacagcctagtcaggcccagcgaatgtatgagaaagcgcttcagatttcagaggagatacagggtgaaaggcacccccagacaatcgtactaatgtccgatctggcaactacattagacgcccaggggagatttgacgaggcctatatctatatgcagcgggcatcagacctggcgaggcagataaaccaccctgagcttcatatggtactttccaacctcgcggctgtgttaatgcatcgtgaacgatacacgcaagctaaggagatctaccaggaagccctaaaacaggccaagctcaagaaagatgagatcagcgtgcagcacattagggaggagctggcggaattgagcaagaagtctcgcccgctgaccaattccgttaagctgtag

SEQ ID NO: 208465 - DNA, 501 bp, synthetic construct
  misc_feature 1..501: note = Description of Artificial Sequence: Synthetic coding sequence
  source 1..501: mol_type = other DNA
tgacaggagcgggtgtggcccgccgtgcggcggggccggggcggctccatgtttcgtctcctgtcctggtcactgggcagggggttcctacgtgctgcgggaaggcgttgtcgcggctgctcggcccgcttgcttccagggctggctggcggtccggggcctgaagtccaggtccctccctccagggtggcaccgcacggacgcgggcctggcctgctaccacttttagccgctttagcttggttctcaaggcccgccgcagccgaagaagaggaacagcagggcgccgatggcgcagcggctgaagacggagcagatgaggccgaagcggaaattattcagctgttgaaaagagccaaagtgcgcagactgcgagcccttaggcctgccgagcgcgggtctctttgtgagaggggattaggggtggctgcacactatagtctgcgcttagctgaggaatggatggaggcacctagagtgaaactgcccagaatgagctag

SEQ ID NO: 208466 - DNA, 3951 bp, synthetic construct
  misc_feature 1..3951: note = Description of Artificial Sequence: Synthetic coding sequence
  source 1..3951: mol_type = other DNA
atggacagccaggagctgaagaccctgatcaactactactgccaggagcgatactttcatcacgtgctactagtggcgtccgaaggcataaaacgttatggaagtgaccctgtgttccggttttaccacgcctacggaacactcatggaaggaaagacccaggaggcgctcagggagtttgaagcgatcaagaacaagcaggatgtgtcactgtgttctctactagctttgatctacgcccacaaaatgagccctaatcctgatagagaggctatcctggagagtgatgctagggtgaaagagcaacgcaagggtgctggcgaaaaggcactgtatcacgccggtctgtttctgtggcacataggcagacacgacaaggcaagggagtacatagacagaatgataaagatatctgacggttccaaacaggggcacgtgctgaaagcttggctggatatcacacgagggaaagaaccttatacaaagaaagccctgaagtatttcgaggaagggttgcaggatggcaacgacacatttgctttgctgggcaaggcacaatgtcttgaaatgcgccagaattattccggcgccctcgaaaccgtgaaccagatcattgtcaactttcctagcttcctacccgcttttgtcaagaagatgaaactccagctggccctccaggattgggatcagaccgtggagactgctcagcggctgctactccaggactcccagaacgtggaggcgctacggatgcaggccctatactatgtctgcagggaaggtgacatcgagaaagcaagcactaagctcgaaaacctggggaatacattggatgctatggaaccccaaaatgcccaactgttctacaacattactttggcattttcacgcacttgtggccggtcacagctgatccttcaaaaaatacagaccctgttagagcgcgcgtttagtttgaaccctcagcagtcagaatttgcaacggaactgggctatcaaatgattctgcagggtcgggtaaaagaggcgttaaagtggtataaaactgctatgactttggatgagacttctgtttctgcattagttggttttatccagtgtcagctgatcgaggggcagctgcaggatgcggaccaacagctggagtttctgaatgagatacagcagtctatcggcaagtcagctgaattaatctatctgcatgccgttttagccatgaaaaaaaataagcgccaggaggaagtcattaatttgttgaacgacgttttggatacacacttcagccagttggaaggacttcccctggggatacagtactttgagaagctgaatcccgattttctgctggaaattgtcatggaatacctcagcttttgtcccatgcagccagcgtcaccagggcaaccactatgtccgctgctgcggcgttgtatctcagtgctagaaacggtggtgaggacagtccctggactcttgcagacagtatttctcatcgccaaggtaaagtacctgtcaggggatattgaggccgcctttaacaatcttcagcactgccttgaacacaatccgtcctacgcagacgcccatctgttgttggcccaagtgtacctgtcgcaagagaaagtgaagttatgcagccaaagcctggagctctgcctgagctatgacttcaaagtgcgggattaccccctgtaccaccttatcaaggcccaatcgcagaaaaaaatgggagaaatagccgacgcgatcaaaactctgcacatggcgatgagccttcctggaatgaagaggatcggcgcttctactaagtctaaggataggaaaacggaggtcgatacgagccaccgcttgtccatcttcctcgagctcatcgatgttcaccgtctgaacggcgagcagcatgaggcgacaaaggtgcttcaagatgccattcacgagtttagcgggacatccgaagaagttagagtgacaattgccaacgctgacttggcactggcacagggcgatatcgagcgcgctctaagcatcctgcagaatgtaaccgctgagcagccttacttcattgaagcccgtgaaaaaatggcagacatctacttaaaacataggaaagataaaatgctgtatatcacgtgtttcagggagatcgccgagagaatggcgaatccgcggtccttcttgctgctgggtgacgcatacatgaatatcctggagcctgaagaagctatcgtggcatatgagcaggccctgaaccagaatcccaaagatggcacactggccagcaaaatgggtaaagccctgattaagacacacaattactcaatggccatcacatactatgaggcagcccttaaaaccggccagaagaactacttgtgttacgatttggccgaattgcttctcaaacttaaatggtacgataaggcggaaaaggtgttacaacacgccctcgcgcacgagccggtcaacgagctgtctgcgcttatggaggacgggcgctgccaggtgttgttagctaaggtctattcaaaaatggagaaactgggcgacgccataactgctctgcagcaggctcgtgaactacaggctcgggtcctgaagcgggttcagatggagcagcctgacgccgtccccgcacagaagcacttggcagctgagatttgtgcagagatcgccaagcattccgttgctcaacgggattacgagaaagccattaaattttatcgtgaggcgttggtccactgcgagaccgataataaaatcatgttggaactggcccggctttacttggcacaagacgacccagattcctgtctgcgccaatgtgccctcctgctgcagtccgaccaagacaacgaggccgccactatgatgatggctgatctaatgttccgaaagcaggactatgagcaggcggtattccatctgcaacaactcctggaacggaagcccgataactatatgacgctgtctaggctgatcgacctgctgcgacgttgcggcaaattggaggacgttcctagattcttcagcatggccgaaaaaaggaattctcgggccaagctggagcctggattccagtattgtaaggggttgtacctgtggtacacgggagagcctaacgatgcattacgacactttaacaaggccaggaaggacagggactggggccagaatgccctgtataacatgatcgagatctgtcttaatccagataatgaaacggtaggcggggaggtgttcgagaacctcgatggcgatctggggaatagcactgagaagcaggaaagcgttcagctggctgttaggactgccgagaaactactgaaggaactgaaaccccagacggtgcaggggcatgtgcagctgcgcatcatggagaattactgtctaatggccacaaagcagaagtccaacgttgaacaggctctgaatacctttacagagattgcggcctcagaaaaagagcacatccctgcactcctgggcatggcaaccgcatacatgatcctgaagcagactcctcgcgctagaaaccagctgaagagaatcgccaaaatgaattggaacgcgatcgacgctgaagagtttgaaaagtcatggttgcttttagccgatatctacattcagagtgctaaatatgacatggccgaggacttgttgaagcggtgtttaagacataaccgctcctgttgcaaggcgtatgagtatatgggctacataatggaaaaggagcaggcctacaccgatgcggctctgaactatgaaatggcctggaaatactccaaccgcacaaatcctgcagtgggttataagctggcatttaattacctaaaagccaaaaggtatgtggattccatcgatatttgtcaccaggtattggaagcccatccaacgtaccccaagatcagaaaagatatactagacaaagcccgcgcctctctgcgtccatag

SEQ ID NO: 208467 - DNA, 765 bp, synthetic construct
  misc_feature 1..765: note = Description of Artificial Sequence: Synthetic coding sequence
  source 1..765: mol_type = other DNA
atgatcgagatctgcctgaaccccgacaacgagaccgtgggcggcgaggtttttgaaaacctcgacggcgacttaggcaactctacagagaagcaggaatctgtccagctggcagtccgtacagccgaaaagttgctcaaggaattaaagcctcagacagtgcaggggcacgtgcagttaagaatcatggagaattattgccttatggcgactaagcagaagagcaatgtggagcaagctctgaacacgtttactgagatagcagcgtcagaaaaagaacatatccccgccctgctcggtatggcaaccgcctatatgattcttaaacaaacacctcgggcaaggaaccagttaaaaaggatcgccaaaatgaattggaatgccatagatgctgaggagtttgaaaagagttggttgcttctggccgatatctacatccagtccgcaaagtacgatatggccgaagacctactgaagcgatgtttgcgccataacagaagttgctgtaaagcttacgaatatatgggttacatcatggaaaaggagcaagcctacaccgatgccgcactcaactacgagatggcctggaagtattctaaccgaaccaatccagctgtgggctataagctggccttcaactacctcaaagccaaaagatatgtcgactccatagatatttgccaccaggtgctcgaggcccatcctacgtacccgaagattcgcaaggatatactggataaggctcgcgcaagtctgagaccgtag

SEQ ID NO: 208468 - DNA, 6078 bp, synthetic construct
  misc_feature 1..6078: note = Description of Artificial Sequence: Synthetic coding sequence
  source 1..6078: mol_type = other DNA
atggacaacttcgccgagggcgacttcaccgtggccgactacgccctgctggaggactgcccccatgtagatgactgtgtgttcgccgccgagttcatgagtaatgactacgtgagggtcacccagctttactgtgacggagtgggagtgcagtacaaagactacatccagtcagagaggaaccttgaatttgatatttgcagcatctggtgttccaagccaatctcggtgttgcaggactattgcgacgctatcaaaattaatatattttggcctctgcttttccagcaccaaaactccagcgttattagccgactgcacccttgtgtagacgctaataattcgagggcctccgagattaacctgaagaaactgcagcaccttgagctgatggaggatattgtcgatctcgcgaagaaggtggccaacgactctttccttatcggcgggctgctgagaatcggatgcaagatagagaataagattttggccatggaagaggcgctgaattggataaagtatgccggtgacgttacgatcctaaccaaactcggatcgatcgacaactgttggcccatgctttcaattttctttacagaatacaaataccacatcacaaagatagtgatggaagattgtaacttgttggaggaactcaagacccagtcctgtatggattgtatcgaagaaggggaactcatgaaaatgaaggggaacgaggaatttagcaaagagagattcgacatagccatcatctactacacccgtgccatcgaatacagacccgagaactatctgctgtacggtaaccgggccctctgctttttgagaacaggccagtttcggaacgccctgggtgacggtaagagggccacgatccttaaaaacacgtggcccaaggggcactataggtattgcgacgctttgtctatgctgggagaatacgactgggcactgcaggccaatattaaggctcaaaagttgtgcaagaatgaccccgaaggaatcaaggacctaatacagcagcacgtaaaactgcagaagcagattgaggacctccagggcagaaccgccaacaaagaccctatcaaagcgttctacgagaaccgggcatatacacctaggtcactttctgccccaatttttactacatctctgaactttgtcgagaaagagcgagatttcaggaaaattaatcacgagatggccaatggaggaaatcagaatctgaaagtggccgacgaggcattgaaagttgatgattgtgactgccatccagagttctcaccacccagctctcagccccccaagcataaagggaaacagaaatccaggaataatgaatccgaaaagttttcgtcctcatcccctttgaccctgcccgctgacttgaaaaacatcctggagaaacagttttccaagtcttcccgggccgcccaccaggattttgctaatattatgaagatgctcagatccctcattcaggatggttatatggctctgctcgaacagcgatgtcggagtgccgcccaggcgtttaccgaacttctcaacgggcttgatcctcagaagatcaaacagctaaatcttgctatgatcaattacgtacttgtggtatacggactggcgatcagtctcctgggaataggacaaccagaagagctgtccgaggccgagaaccagtttaagaggatcattgagcattacccctccgagggtttggactgtctcgcctactgtgggatcggcaaggtctacctgaagaaaaaccgcttcctggaggccctcaatcactttgagaaggctagaactctgatctaccgactgccaggcgtactcacgtggccaacaagcaatgtgatcatcgaggaatcacagccacagaagatcaaaatgctgctcgagaaatttgtagaagagtgcaaatttccccctgttcctgacgccatttgctgttaccagaagtgccacggctattctaagatacaaatatatatcacagacccagacttcaaaggcttcattcgcatatcatgttgtcagtactgtaagatcgagtttcatatgaactgctggaagaaacttaagactacaacgttcaatgataaaatcgacaaggacttcctgcagggcatctgcttgacaccagactgtgaaggggtcattagcaagattattatttttagcagcgggggggaggtgaagtgcgagtttgagcataaggtcataaaggagaaggtgccccctagacctatactcaagcaaaagtgttcctccttagagaagctgcggctgaaagaggacaagaagctgaagcggaaaatccagaagaaggaggccaaaaagctggctcaggaaagaatggaagaggacctgagagaaagtaatccccccaaaaacgaggagcagaaagagacggtggataatgtgcagaggtgccagtttctggacgacaggatcctgcaatgcattaagcaatacgccgacaaaataaagagcggaattcagaataccgccatgctgttgaaagagttactctcatggaaggtgctgagtaccgaggattatactacgtgctttagtagcagaaatttcctcaatgaagctgtggactacgtgattaggcatctgatacaagaaaataatagggtgaagacccgcatttttctgcatgtgctgagcgagctgaaggaggtggaaccgaagctcgccgcctggatccagaagctgaattcatttgggctggacgcaacaggtaccttttttagccgctatggcgcctccctgaaactgctggacttctcaataatgacctttctgtggaacgagaagtacggtcacaagttggactctattgaagggaaacagttagattacttttccgagccagccagccttaaggaagctagatgtttaatttggctgttggaggaacatagggataagttcccggctctgcactcggccctcgacgagttttttgacattatggatagtcggtgcacagtgttgcgaaagcaagactctggcgaagcccccttttccagcactaaagtgaagaataagtcaaagaagaaaaagcctaaagattctaagccgatgctcgttggatccgggaccacatccgtgactagtaacaacgagatcattacgagttccgaggaccacagtaaccgaaactcagattcagcgggacccttcgcggtccccgaccatctgcgacaagatgtggaggaattcgaggctctctatgatcagcatagcaatgagtatgtggtcaggaataaaaaactatgggacatgaacccaaaacaaaaatgctcaaccctctacgactatttcagtcaattcctagaggagcatgggccccttgacatgagcaataaaatgttctctgccgagtatgaattcttccctgaagagactcgccagattctagagaaagctggtgggctgaagcctttcttattgggctgccctagatttgtggtcatcgataattgcattgctctgaagaaggtggccagtcggttgaagaagaagcgcaaaaagaaaaacatcaaaaccaaggttgaggagatatcaaaagccggagagtatgttagagtcaaacttcaattaaatccagctgcgcgcgagttcaagccggacgtgaaatcaaagcctgtttcagactcaagctccgctcctgcatttgagaacgttaagccaaaacccgtatcagccaactccccaaagcccgcctgtgaagacgtcaaagccaagcccgtttcagacaactctagcagacaggtctctgaagacgggcagccaaagggcgtctcctccaattccccgaagccgggttcagaagatgctaactacaagcgggtgtcatgtaatagtcctaaaccagtgctggaagatgttaagccaacatactgggctcagagtcatttggtaacgggttactgtacgtacctgccatttcagaggtttgatattactcagacgccccccgcgtacattaatgtgctgccaggactcccccagtatacttcgatatacactcccctcgcttcactgagtcccgagtatcagttacctcggtctgtacctgttgtcccctctttcgtagctaacgatagagcagataagaatgcagcagcttacttcgaaggacaccacctcaacgcagaaaacgtagccggccaccaaattgcctccgaaacccaaatcctcgagggctctttgggaatttcagtgaaaagccattgttccacaggagacgcccatacagtgctatcagaaagcaatagaaatgacgagcattgtggaaacagcaataacaagtgcgaggtgattccagaaagcacatccgccgtcaccaacattcctcacgtccagatggttgccattcaagtttcctggaacattatccatcaggaggtgaacacagagccttataatccgtttgaagaacgccagggcgagatttcccggatcgaaaaggagcaccaggtgctgcaggatcagttgcaggaagtgtatgagaattatgagcaaattaaacttaagggactggaggaaacccgagatctcgaagagaaacttaagcgccacttggaggaaaataagatttcgaagaccgagctggattggttccttcaggatctggaacgggaaataaaaaaatggcagcaagagaagaaagaaatacaggaaaggttgaagtcgctgaagaagaagatcaagaaggtgagtaatgcatcggagatgtatacacagaagaatgacggcaaagagaaggagcacgagctacatctggaccagtctctggagatctctaataccttgaccaatgaaaagatgaaaattgaagaatatatcaaaaagggaaaggaggactatgaggagagccaccagagagcagtggctgcagaggtatcggttttggagaattggaaggagtccgaagtctacaagctgcaaataatggagtctcaggcagaggccttcctgaagaagctaggcttgattagcagagacccagctgcttatcccgacatggagtcagatatccggagctgggaacttttcctctccaacgtcacgaaagagattgagaaagcaaaaagtcaatttgaggaacagatcaaagccatcaagaatggatctcggctctcagagctctccaaggttcagatttcagaactgtcattcccggcctgcaacacagtgcatccagagctcctgccggaatcaagtggtgatgacgggcaagggttggtgacatcggccagcgatgtgaccgggaatcacgccgccctgcatcgtgatccgagcgtatttagtgccggggactccccgggcgaagccccctctgcactcctgcccggacctccgccggggcagcccgaggcaacacagctaacaggccccaagagagccggccaagccgctctgtctgagagatcccctgtggccgataggaagcaaccagtcccccccggtcgtgcagcacgctcttcccagtcccccaagaagccttttaatagcatcatcgagcacctgtccgtcgtcttcccatgttataatagtaccgaattagctggatttatcaaaaaggtgcggtccaaaaataaaaactctctgagcggcttaagcattgacgaaatcgtccaaagggtgaccgagcacatcctcgatgaacagaaaaaaaaaaagcccaatccaggcaaggataagaggacatacgaaccaagctcagccacccccgtcactcggtcctctcaggggtcgcccagtgtggtggtggctccaagccccaaaaccaaaggccagaaggctgaagacgtgcctgtgcgaattgccctcggcgccagttcatgtgagatttgccacgaagttttcaagtctaaaaatgtgcgggtactgaagtgcggccataagtaccacaagggttgctttaagcaatggcttaagggccaaagcgcctgcccggcctgtcaaggacgtgatctcctcactgaagagtcgccctccggacgcggctggccgtcacagaatcaggagttgccaagttgttcctcaaggtag

SEQ ID NO: 208469 - DNA, 6078 bp, synthetic construct
  misc_feature 1..6078: note = Description of Artificial Sequence: Synthetic coding sequence
  source 1..6078: mol_type = other DNA
atggacaacttcgccgagggcgacttcaccgtggccgactacgccttgttggaagattgcccccacgtcgacgattgcgtgttcgcggccgagtttatgtcaaacgattacgtgcgggttacacaactctattgtgatggagtcggagtacaatacaaagattacatacagtccgaacggaacctagaattcgacatttgttcaatctggtgctctaagccaataagcgtattacaggattattgcgatgccatcaagatcaacatattttggcccctgttgtttcaacaccagaatagttccgttatatcccgactccacccttgtgtggacgctaataacagcagagcatccgagatcaacctgaagaagcttcaacacttggaactaatggaggacattgttgacctcgccaagaaggtcgctaatgactcgtttttaattggtggtctgctaaggatagggtgcaagatagaaaataaaatcctggcaatggaagaggctctgaactggattaagtatgccggggatgtgaccatccttactaaactggggagcatcgacaattgctggccaatgttgtccatattcttcaccgagtataaataccacataaccaagatcgtcatggaggactgcaacttgttggaggaactcaaaacacagagttgcatggactgtatagaggagggcgagttgatgaagatgaaagggaacgaggagttcagcaaagagcgattcgacattgccataatttactacaccagggccattgagtacagacctgagaactacctcctctacgggaaccgtgctctgtgcttcctcagaacaggacagtttaggaacgctctcggggacggcaaaagggccaccatcctaaagaacacatggccaaagggtcattatcgttattgcgacgccttatctatgctaggtgagtacgattgggccttgcaggcaaacatcaaggcgcaaaagttatgtaaaaatgatccagagggaattaaggacttgatacaacaacacgttaagttacagaagcagatagaagacctgcagggaaggactgctaataaggaccccatcaaagcattttacgagaatagagcttacacaccacgttccctgagcgcccccatcttcaccacgtctctcaattttgtagaaaaggagagggacttccgcaagataaaccacgagatggccaacggggggaatcaaaacctgaaggtcgccgacgaggccttaaaagtcgacgattgcgactgtcatccagagttctcacccccctcctcgcaaccgcctaagcataaggggaaacagaaatctcgcaataacgagtcggaaaaattttcctcctctagccccttgaccctccctgccgatctgaagaacattcttgagaaacagttttccaagagctcccgggctgctcaccaggacttcgcaaatataatgaaaatgctccgttccctgatccaggacggttatatggccctcctggaacagaggtgccggtccgctgctcaggcatttacagagttgctcaatggtcttgatccccagaagataaagcagctcaatcttgcgatgataaattacgtgttagtggtttacggcctggctatttcactgctgggcatcggtcagcccgaggaattgagcgaggcagagaatcagttcaagcggatcattgagcactacccgtctgagggcctcgactgcctcgcttactgcggaatcggcaaagtttatctaaagaagaaccggtttcttgaggcactcaatcacttcgaaaaagctcgcacactgatctacagactgccaggcgtattaacctggcccacctcgaacgtgatcatagaggagtcacagccgcagaaaatcaagatgctgctggaaaagtttgtggaggagtgtaaatttccccctgtgcccgacgccatttgttgctaccagaaatgtcatgggtactccaaaattcagatttacattactgatccagacttcaaagggtttataaggatctcctgctgccagtattgcaagattgagttccacatgaactgctggaagaagttaaaaaccaccacgtttaacgacaagatagacaaagattttcttcaggggatttgtctaacgccagattgtgaaggggtcatctccaagattatcatatttagcagtggtggggaggtgaagtgtgaattcgagcacaaggtcatcaaagagaaggtacctcctcggcccatactgaaacagaaatgctcctcactggaaaaactccgattgaaggaggacaaaaaactcaaaagaaagattcagaaaaaggaggcaaaaaaactcgcccaagagagaatggaagaagatctacgcgagtcgaatccccccaaaaatgaagagcagaaggagacagtcgataatgtgcaaagatgtcagtttctggacgaccggatcttgcagtgcattaaacagtatgccgataaaatcaaaagcggcatacagaataccgctatgctgctgaaagaactcctgtcttggaaagtgctctcaacagaagattacacaacctgtttctcttcaaggaacttcctgaatgaggccgttgactacgtgatcagacacttaatccaagaaaacaaccgcgtaaagacacgaatctttctgcacgtactttcagagctgaaggaagtcgagccgaagctcgccgcttggatccagaagttaaatagcttcggcttggacgccacaggaaccttttttagtcggtacggagcgtctctaaaactcctggatttttccatcatgacttttctgtggaatgagaaatatggccataagcttgattctatagagggtaaacaactggactacttttcggagcctgctagccttaaggaggctaggtgcctgatctggttactcgaggagcacagagataagtttcccgcgctccacagcgcccttgacgaatttttcgatatcatggactctcgatgcacagtgttaagaaagcaggactctggggaagccccctttagctctacaaaggtgaagaacaagagtaaaaagaagaaaccaaaggactctaagccgatgttggtcgggtcaggcactacaagtgtgaccagtaacaatgaaattattacttcatccgaggaccattcgaatcggaatagcgactcggccggaccgttcgcagtccccgatcaccttagacaggacgtggaagaattcgaggccctttatgaccagcattccaacgagtatgtggtccgtaataaaaaactgtgggacatgaacccaaagcaaaaatgctccactctctacgattacttctcccagttcctggaagaacatgggccactcgatatgtccaataaaatgttttctgccgaatacgagttcttccccgaggagactaggcagattttggaaaaggcagggggactgaaacccttcctgctgggatgtccacgcttcgtagttattgataactgcatcgccctgaagaaagtggcttctcgtctgaaaaaaaagcgtaagaaaaagaacataaagacaaaagtagaggagattagcaaagcaggtgagtacgtgcgggtaaagttgcagctcaatccagctgcaagggaatttaagcccgacgtcaaaagcaagcccgtgtcagactcatcgtctgccccagcattcgagaatgtcaaacctaaaccggtgtcggccaacagtcctaagccagcctgtgaagacgtgaaggctaaacccgtaagcgataatagtagtcgacaagtctccgaggacggtcagcctaaaggtgttagcagcaactcacccaagccaggctctgaagatgctaattataaacgtgtttcttgtaattccccaaagccggtccttgaggatgtaaaacctacttactgggcccagtcacacttagtgactggatattgtacctacttgccattccagcgcttcgacataacacaaacgccaccggcctacatcaacgtgttacccgggctcccccagtatacgagcatttatacaccactcgcctcactttccccagaatatcagctgcctcgttccgtgcccgttgtgcccagttttgttgccaatgatcgggcagacaaaaacgcagctgcgtactttgagggacatcacctcaacgctgagaatgtagccggtcatcagattgctagtgagacacagatactggaaggaagcttaggaatttccgtgaaatcacactgctcaacgggagacgcccacaccgtgttgagcgagtccaacagaaatgatgaacattgcgggaattcaaacaataagtgtgaagtgattccggagtcaacttccgccgtgaccaatatcccgcatgtgcagatggttgcgattcaggtcagctggaacatcatacaccaggaagtcaatacagaaccctacaaccctttcgaggagcgccagggtgaaatcagtcggatcgaaaaagaacaccaagttctgcaggaccagctccaggaagtctacgagaattatgaacagatcaagctgaaaggtctggaggagactagggacctggaggagaaactgaaacggcacctggaggagaacaaaatctctaaaaccgaactggactggttcttgcaggatctggaacgtgagatcaagaagtggcaacaagagaaaaaagaaatccaggagaggctaaaatccctcaagaagaagataaagaaggtatcaaatgctagtgagatgtacacacagaagaacgacggcaaggagaaagagcacgagctgcacttagaccagagtctggagatatcaaacaccctcaccaatgagaaaatgaaaatcgaagaatatattaaaaaggggaaggaagattacgaagagagtcaccaacgcgccgttgccgccgaggtctctgttctggagaactggaaagagagcgaagtgtataagctccagatcatggaaagccaggccgaagcattcctgaagaaacttggcctcatatcccgggaccctgctgcgtaccctgatatggagagcgacatcagaagctgggagctcttcctaagcaacgtgaccaaagaaatcgagaaagccaagtcacaattcgaggaacaaatcaaggccattaagaacggcagcaggctgagcgagttaagcaaggtccaaatctccgagcttagttttcctgcttgcaataccgttcatccagagctcctgcctgaatcgtcaggtgacgatggccaggggctggttacttctgcctcagacgtgaccggaaaccatgctgcactccatagggatccaagtgtcttttcagcgggtgattccccaggagaggctccatctgccctactccccgggcccccgccaggccagcctgaagccacccagttgactggtcccaaacgggctggccaagcagcactgtcagagagatccccagttgccgacaggaaacagcctgtgccccccggcagggcggctagatcttcccagagtccaaagaagcctttcaattcgatcattgagcatcttagcgtggtctttccctgttacaattcaacggagctggcaggcttcatcaagaaggttcgctcaaagaacaagaacagtctctccgggttgtccatcgacgagattgtccagcgggttacagaacatatcctggatgaacaaaaaaagaagaagccaaacccaggcaaggataagagaacatatgagcccagcagcgccacacctgttaccagatctagccagggaagtccctctgtggtcgtcgctccctcgccgaaaactaagggccagaaagctgaggatgtgcctgtaagaatcgcgctcggggcctcgtcatgtgaaatctgccatgaagtctttaaaagcaagaatgtccgggtgttaaaatgcggccacaagtatcacaaaggctgcttcaagcaatggctcaaaggccaatcggcctgcccagcctgtcagggaagagacttactgacagaagagtcaccttcaggcagagggtggcctagccagaaccaggaacttccatcctgcagttccagatag

SEQ ID NO: 208470 - DNA, 6078 bp, synthetic construct
  misc_feature 1..6078: note = Description of Artificial Sequence: Synthetic coding sequence
  source 1..6078: mol_type = other DNA
atggacaacttcgccgagggcgacttcaccgtggccgactacgccttgctggaggactgcccccatgtagacgactgcgttttcgctgctgagttcatgtcgaatgactacgtcagagtgacgcagttatactgcgacggggtcggggtccaatataaggattatattcaatctgagagaaacctcgagttcgatatctgttcaatttggtgctcaaagccaatctccgtgctccaagactactgtgacgcaatcaagattaacattttttggcccctgctctttcagcatcagaatagcagcgtgatctccaggctgcacccttgtgtagacgcaaacaacagccgggccagtgaaatcaatttgaaaaaactgcaacatttagaactcatggaagatatcgtcgaccttgccaagaaagtggctaacgattcatttcttatcggtggacttctcaggatcggatgcaagatcgaaaacaaaatcctagccatggaggaagcccttaattggatcaagtacgccggggacgtcaccatcctgacaaagctggggtctatagacaactgttggcctatgctgagcatcttctttaccgagtataagtatcacatcacaaaaattgtgatggaggattgcaatctgctagaggagctgaagactcaaagctgtatggactgcattgaggaaggcgagctcatgaagatgaagggcaacgaggaattcagcaaggagagattcgacatagccatcatctattatacacgggcgatagagtaccggccggagaactacctcctgtacggaaacagggccctttgtttcttacgtacagggcaattccgtaatgcactgggcgatgggaagcgggctacgatcctcaagaatacttggcccaagggacattaccgctactgcgatgcactgtctatgctcggagagtacgattgggctctgcaagccaatattaaggctcagaaattgtgcaaaaatgatccagaagggatcaaggatcttatccagcagcatgtgaaattgcagaaacagatcgaggatctacagggccggacagctaataaggaccccatcaaagccttctacgaaaacagagcctataccccgcggagtttatcagcacctattttcacaactagtctcaactttgtggagaaggaaagggacttccggaaaattaatcatgagatggccaatggtgggaaccagaacttaaaagtggctgatgaagcactgaaggtggatgattgtgattgccacccggagttttcaccgccgtccagtcagcctcctaaacataaaggaaaacaaaaatctaggaacaatgagagcgaaaaattcagtagcagctctccattgaccctgccagccgatctgaagaacatccttgaaaaacaattcagcaagagctcgagagcagctcaccaagattttgctaacatcatgaaaatgctgcgctccctgattcaagatgggtatatggccttgctggaacaacggtgccgctcagccgctcaagcttttacagagctgctcaacggactagacccacagaagattaagcaactgaacctggccatgatcaactacgttctggtggtgtacggattagctatttctctcctaggtattgggcagcctgaagaattatctgaagcagagaaccaattcaaaaggatcatcgagcattaccctagcgaaggcctggactgcctggcctattgtgggatcggcaaagtgtacctgaagaaaaatcgctttctcgaagccctgaatcatttcgaaaaggccagaacccttatctatcgtttacctggcgtgctgacttggcctacctctaatgtcataatcgaggagtctcagccccagaagatcaaaatgcttctggaaaagtttgttgaagaatgtaagttcccacccgtgcccgacgctatctgttgttaccagaaatgccatgggtactctaaaattcagatctatatcaccgatcccgattttaaggggtttatccggatatcctgttgtcagtactgcaaaatcgagttccacatgaactgttggaagaaactgaagaccaccaccttcaatgacaagatcgacaaggattttctgcagggaatttgcctgacacccgactgcgagggggttatttctaaaattataatcttctcctcaggtggagaggtcaagtgtgaattcgagcataaggttattaaggaaaaagtgcctccccggcctatactgaagcagaagtgcagtagtttagagaaactgcgtcttaaggaagacaaaaagctgaagagaaaaattcagaaaaaggaggctaagaagctggcccaggaacggatggaggaggaccttcgggagtctaacccccccaagaacgaagaacagaaggagactgtggacaacgtccagcgctgccaattcctcgacgaccgaatcttacagtgcattaaacagtacgccgacaaaatcaaatccggcattcagaatacagcaatgctcctcaaagaattgttaagctggaaagtgctgagtaccgaggattatacaacttgcttttcatcccggaatttcctgaacgaggcggtcgattacgtgattaggcatctaatccaagaaaacaatagggtcaaaactagaatcttcctgcacgtgctctctgaacttaaagaagttgagcccaagcttgccgcatggatacagaaattgaacagtttcggactggatgccacagggactttctttagtaggtatggtgcctccctgaaattgctagacttttcgattatgactttcctgtggaacgagaagtacggtcataaactagatagcattgaagggaaacagttggactacttctccgagcccgcctctctgaaagaagccagatgtttgatctggctcttggaggagcaccgcgataaatttcccgccctgcactccgccctggatgagttcttcgacatcatggatagccggtgtaccgtcctgagaaagcaagattctggtgaggcacctttctccagtactaaggtgaagaacaagtctaagaagaagaaaccaaaagatagtaagccgatgttggtgggatcaggcactaccagtgtaaccagtaataacgagatcatcaccagctccgaggatcacagcaatcgcaactctgactccgccggcccgttcgctgttccggaccacctgagacaggatgttgaggaatttgaagctctgtatgaccagcactccaatgaatatgtggtccgcaacaaaaagttgtgggatatgaaccccaagcagaaatgttccacgctctatgattacttttcccagttcctggaggaacacggccccttagacatgtcaaataagatgtttagtgccgaatacgagtttttccccgaggagactaggcaaatcctcgaaaaggcagggggattgaagccattcctgcttgggtgccccaggtttgttgtgatagacaattgcatcgcactgaaaaaggtggccagcaggctgaaaaaaaaaagaaagaaaaaaaacatcaagactaaggtggaggagatttcgaaggctggtgagtacgtcagggtcaagctacagcttaatccagccgcacgggagtttaagcctgatgtgaagtcgaagccagtctcggacagcagctcagccccagcttttgagaatgtcaaacccaaaccagtgtccgctaactcccccaagccagcgtgcgaagacgtcaaagctaagcctgtgtctgacaactcaagccggcaggtatccgaggatggacagcccaaaggcgtgagtagcaactcccccaaaccaggctccgaagatgccaactataagcgggtctcgtgtaactcgcctaagcctgtattagaggacgtgaaacctacttactgggctcagtctcacctggtcactggctactgtacatatctgccctttcagagattcgatatcactcagacaccacctgcatatatcaacgtgctaccagggttgccccagtataccagcatctataccccgctagcctcattaagccctgagtaccaactacctcgatctgtacccgtggttccaagtttcgtggccaatgaccgagcggataagaatgcagcagcttactttgaaggtcaccacctgaacgccgagaatgtagcaggccatcagatcgcatcagagactcagattctggagggcagtctggggatctcagttaaatcacactgtagtacaggggacgcgcacacagtgctaagcgagtccaacaggaatgacgagcactgcggaaacagtaataacaaatgcgaggtcattcccgagtctaccagcgcagtgacaaatatcccccatgtgcagatggtcgctatccaggtgagctggaatatcattcatcaggaggtcaacacggaaccctacaatccgttcgaggagaggcaaggcgaaatcagccgcatcgaaaaagaacatcaggtgctgcaggatcagctacaggaggtgtatgagaactacgaacagatcaaactgaaaggtttggaagaaacccgagacctcgaagagaagttgaaacgccacttggaagagaacaagatctccaaaacggagttagactggtttttgcaagatctggagcgagagatcaaaaaatggcagcaggaaaagaaagagattcaagagcggctcaaaagtctcaaaaaaaaaatcaaaaaagtaagcaatgctagcgagatgtatacccagaaaaatgatggaaaagagaaggaacacgaactgcaccttgatcagagcctcgaaattagtaatactctcaccaacgagaagatgaaaatcgaggagtatatcaaaaagggaaaggaagactacgaggaatctcaccagcgggctgtggccgctgaggtgagtgtgctggagaactggaaagagtccgaagtatataaattgcagattatggagtctcaggcggaagctttcttaaagaaactggggctgatctctcgggatccagcagcctatcctgatatggaatccgatattagatcctgggagctgtttctgtccaacgtgactaaggaaattgaaaaagctaaaagtcagttcgaagagcagattaaagccattaagaacggaagccgcttaagtgagctgtcaaaagttcaaatttcggaactctccttcccggcttgcaatacagtacacccggagttgctcccggagagctcgggagatgacggacagggactagtcactagtgcctcagatgtcacggggaaccatgccgcgctccaccgtgacccctctgtctttagtgctggcgacagtcccggggaggctccttctgctctcttacccgggcctccacctggccagcccgaagccacacaactgaccggaccaaagagagctggtcaagccgcccttagcgaaagaagtcccgtggcagaccgcaagcagcctgtcccacctggcagagcggccaggtcttcacagtcgcctaaaaagccctttaactcaattatagaacacttgagtgtggtcttcccctgttataattctactgaattggccggcttcatcaagaaagtgaggagcaagaataagaatagtctgtccggtctgtccattgacgagattgtgcaacgcgttactgagcacatcctggatgagcagaaaaaaaaaaaaccaaaccccgggaaggacaaacgcacttacgagccctcaagcgcaacgcctgtgactcggagcagccaaggctcgccctctgtggtagtggctccatcacccaagacaaaagggcagaaggcagaagatgtccctgtccggatcgctctcggggcctcttcatgcgaaatttgccatgaggtcttcaagtcaaaaaatgtgagagtcttgaagtgtggtcataaataccataaaggatgtttcaagcagtggctcaagggccagtccgcttgccccgcctgccagggtagggacctgctaacggaagagtcaccatccggaagggggtggccctcacagaatcaagagctgccctcctgttcatctaggtag

SEQ ID NO: 208471 - DNA, 3540 bp, synthetic construct
  misc_feature 1..3540: note = Description of Artificial Sequence: Synthetic coding sequence
  source 1..3540: mol_type = other DNA
atggacaacttcgccgagggcgacttcaccgtggccgactacgccttgttggaagactgcccccacgtggacgactgcgtctttgccgccgagttcatgagtaatgactatgtgcgcgtgacccagttgtattgtgatggtgtgggagttcagtacaaagactacatccagagtgaacgcaatctggaatttgacatttgttctatttggtgcagtaagccgatttcagttctgcaagactactgtgatgctatcaagattaatatattttggcctttgctcttccagcaccagaactcttccgtgatctcgagactacacccgtgcgtggatgctaataatagcagggctagtgagataaacctaaagaagctccagcacttggagctcatggaggatatcgtggatctcgcgaagaaggtggcaaatgattccttcctgatcggcggattgctgcgaattggctgtaaaatagagaacaagattctagccatggaggaagccctgaactggatcaaatacgcaggggacgtgactatcctgactaagctgggaagtattgataactgttggcccatgctatctattttctttactgagtacaagtatcatattactaagatagtgatggaggactgtaatctgcttgaagagctgaagacccagtcatgtatggattgtattgaagagggggagctcatgaagatgaaggggaacgaggagttttctaaggagcgcttcgatatcgccatcatctactataccagagcaatcgaatacagaccggagaactacctcctctacgggaatcgggccctctgctttctgagaaccggacagtttaggaacgccctcggggatgggaagcgcgccacgattcttaaaaacacatggccaaaagggcactatcggtactgtgacgccctttctatgttaggagaatacgactgggcccttcaagcgaacatcaaagcccagaagctttgtaaaaatgacccagaaggcatcaaggatctcattcaacagcatgtgaaactgcaaaaacagatcgaagacctacaaggtagaaccgccaacaaggacccaattaaggcgttctacgagaacagggcctatactccgagatcccttagtgctccaatcttcactactagcctgaacttcgtggaaaaggagcgggattttaggaagatcaaccacgagatggctaatggtgggaaccagaatctgaaggtcgccgacgaggcccttaaggttgacgactgcgattgccacccagagttctcaccacccagctcccagccgcctaagcacaaaggcaaacagaaaagcagaaacaatgaatctgaaaaattctcgtcatcgtctcctctcactttgcctgcggatctcaagaacattctggaaaagcaattcagcaaaagttctagagcggctcatcaggattttgctaacattatgaaaatgctacgttcgctgatacaggacggctatatggcattgctggaacagcggtgtcgcagcgctgcccaggctttcaccgagttgttaaacggcttagaccctcagaaaataaagcagctgaacttggccatgattaattacgtgcttgtggtgtatggtctcgcaattagcctgctcgggatcggacagcccgaagaactgagtgaggccgaaaaccaattcaagaggatcatcgagcactatccttccgaggggctggattgtctggcctactgtgggatcggcaaagtgtaccttaaaaagaatcgctttcttgaagctctcaaccactttgaaaaagcccgcactctgatttaccgcctgcctggagtgttgacatggccaacaagtaatgtaattatcgaggagtcacaaccccaaaagatcaaaatgctgctggagaagttcgtggaagaatgcaagttccctcccgttccggatgccatttgctgctatcagaaatgtcacggctacagtaagatacagatatatattacagatcccgacttcaaagggtttatcagaatctcctgttgccagtactgtaaaatcgagtttcacatgaattgctggaaaaagctgaaaaccacaaccttcaatgacaaaatcgataaagatttcctgcagggcatctgccttacaccggactgcgaaggtgtcatttccaaaattattattttctcaagtggaggggaggtcaagtgtgagttcgaacacaaagtaattaaagagaaggtgccaccaagaccaatcctgaaacagaagtgcagtagcctggaaaaacttcggttgaaggaggacaaaaaactgaaaaggaaaatccagaaaaaggaggctaaaaaactcgcacaagagcgcatggaagaagatctcagagagagtaacccccctaaaaacgaggaacagaaagagacagtggataacgtgcagcgatgtcagtttctagatgaccgcattctgcagtgcataaagcaatacgctgataagataaagagcgggatccagaataccgccatgttgctcaaagagcttctctcttggaaagtgctgagcactgaagactacaccacgtgtttcagcagccgaaattttctgaatgaagctgtggattacgtcatccgacatcttatccaggagaataacagggtcaagactcgaatttttctacatgtgctcagcgaattaaaagaagtggagccaaaactggcggcttggatacagaaactgaactcatttgggctagatgcgaccggaaccttttttagtagatacggagcaagccttaagttgctggacttctctatcatgactttcctctggaatgaaaagtacgggcataagctggactccattgagggcaagcagcttgattatttttcagagcctgctagtctcaaggaagctaggtgcctcatttggctgctggaagaacacagagacaaatttcctgccctacactcagcccttgacgaattcttcgacattatggactcccgctgcacagtcttaaggaaacaggatagtggtgaggccccattctcttctactaaagtgaagaacaaaagcaaaaagaagaagcctaaggattccaaacccatgctcgttggctctgggacaacctccgtgacctctaacaatgaaatcattacttcttctgaagatcatagcaacaggaattcagatagcgccgggccatttgcagtgcccgatcacctgagacaagacgtggaggagttcgaggctctctacgatcaacatagcaacgagtacgtcgtgaggaataagaagctttgggacatgaaccccaaacaaaagtgctcaaccctatacgattacttctcccagttcctggaagagcacggaccactagacatgtcgaataaaatgtttagcgctgaatacgagtttttcccagaagaaactagacagattttggagaaggctggcgggctcaaacccttcctgctaggatgtccccgcttcgtagtcattgacaactgcatcgctttgaagaaagtcgcctcaagactaaagtag

SEQ ID NO: 208472 - DNA, 2343 bp, synthetic construct
  misc_feature 1..2343: note = Description of Artificial Sequence: Synthetic coding sequence
  source 1..2343: mol_type = other DNA
atggacaacttcgccgagggcgacttcaccgtggccgactacgccctgctcgaagactgcccccacgtcgacgactgcgtgttcgccgcagagtttatgtctaatgattacgtgcgtgtaacgcagttgtattgtgacggcgtgggagtccagtacaaagattatattcaaagtgagcgaaacttagaatttgacatttgctcaatttggtgtagtaagccaatttcggtgctgcaggattattgcgatgccatcaagattaatattttttggcccctgctgtttcagcatcagaattcctcagtcattagcagattgcacccctgcgtggacgccaacaactctcgggcctcagaaatcaatctgaaaaaattacagcacttggaactaatggaagatattgtcgacttagcaaaaaaagtcgcaaatgactctttccttatcggggggttgctgcgcattggttgcaagatagaaaacaagatactagcaatggaagaagcactaaattggatcaagtacgccggcgacgtgaccatcctcaccaaactcggatccattgataattgctggcctatgctttcgatcttcttcactgagtataaataccatatcaccaaaattgtgatggaggactgcaatctgttagaagaacttaagacccaatcatgtatggattgtatcgaggagggcgagctgatgaaaatgaaagggaatgaggagtttagcaaagagcggttcgatattgctattatttactatacgagggcaatcgagtacaggcccgaaaactatctcttatacggcaacagggccctttgcttcttgcgaaccggccagttccggaacgcactcggagacggaaaacgcgccacaatcctaaaaaatacatggcctaaaggtcactaccggtactgcgatgctttaagtatgctaggggaatatgattgggccctgcaggctaatatcaaggcccaaaagctctgtaaaaacgatcccgaaggcattaaggatctgatccagcagcatgtgaaacttcagaaacagatcgaagacctgcagggccgcacggcgaataaggacccgataaaagcattctacgagaacagggcctatacccctaggtcactgtctgctcctatattcacaacatccctcaattttgtggaaaaggagcgagatttccggaagatcaatcatgaaatggccaatgggggcaatcaaaatctgaaagttgccgacgaggcactcaaggttgacgactgtgactgtcaccctgaattcagtcctccaagtagtcagccaccaaagcacaaggggaagcagaaaagccggaataatgaatccgaaaagttttccagttccagtcctcttacattgcctgccgatctgaaaaacatcttggaaaagcagttttcgaagtcctcacgcgccgcacatcaagacttcgctaatattatgaagatgctccggagtctgattcaggacggctatatggccctgcttgagcagcgttgtcggtcagccgcccaggcctttaccgagctgctcaacggcctggatccccagaagattaagcagcttaatctcgctatgattaactatgtgctggtagtatacgggctcgccatttccctgctgggcataggccaaccggaagaactcagcgaagcagagaaccagttcaagcggattatcgaacattatcccagcgaaggactggactgtttggcttactgcgggatcggaaaggtctacttgaagaaaaaccggtttctggaagccctgaaccacttcgaaaaagcccggacgcttatttataggctaccaggcgttctaacttggcccacatctaacgttatcatcgaagaatcccagccccaaaagatcaaaatgctgctcgagaaattcgtggaggaatgcaagtttccacccgtacccgacgctatttgttgttaccagaagtgtcacggctattctaagatccaaatctatataaccgaccctgatttcaagggctttatccgtatcagctgttgtcaatactgtaaaatagagttccacatgaattgctggaaaaagctaaaaacgactacctttaatgataagattgacaaggacttcttacaaggcatttgcctgactcccgattgcgagggcgtgattagtaagataattatcttctcgagtggaggtgaggtcaagtgtgagttcgagcacaaggtgattaaggaaaaggtcccacccaggccgattctgaagcagaagtgtagctctttagaaaagctgcgactcaaagaggataagaaactcaaacgcaagatccaaaaaaaggaggcttag

SEQ ID NO: 208473 - DNA, 1839 bp, synthetic construct
  misc_feature 1..1839: note = Description of Artificial Sequence: Synthetic coding sequence
  source 1..1839: mol_type = other DNA
atgctgggcgagtacgactgggccctgcaggccaacatcaaggcccagaaactatgtaagaatgaccctgaggggataaaggacctgatacaacagcacgtgaagctgcagaagcagatcgaggatctgcagggccgcactgccaataaagaccccattaaagctttttacgaaaaccgggcctatacaccccgctccttgtcagcacccatctttaccacatctctgaatttcgtggaaaaagaacgagacttcagaaagatcaaccacgagatggctaacgggggcaatcaaaatctgaaggtggcggatgaggccctcaaggttgacgattgtgactgccaccctgagttctctccgccatcaagccagccacctaagcacaaaggaaagcagaagagtcgcaacaatgaatcggaaaagttcagtagctcttcacctctgacgctaccggccgatctgaagaatattcttgaaaagcaattcagcaagtcttcgcgggctgcgcaccaagattttgcgaacattatgaagatgctcaggtctctgattcaggatggttacatggcactcctggaacaacgttgtcgctccgccgctcaggcttttactgaactacttaacggcttggacccccagaaaattaaacaactgaaccttgcaatgataaactatgtgctggtggtgtatggtcttgccatatctttactcggcatcgggcaacctgaagaactatctgaggcagaaaaccagtttaaaagaattatcgaacattacccatctgaaggccttgactgtctggcatactgtggcatcgggaaggtttatctgaaaaagaaccggtttttagaagcactgaaccattttgagaaagcccggacactgatctatcgcctccccggtgttcttacctggccgaccagtaacgtgatcattgaggagagtcagcctcagaagattaagatgctccttgaaaaatttgtcgaggagtgcaaattcccacccgtacctgatgcaatctgttgctaccagaaatgccacggctattcaaagattcagatctacattactgacccagactttaaagggttcatacggatttcttgttgccagtactgcaagatcgagttccatatgaactgttggaagaaattgaagacaactacgttcaacgacaaaatcgataaggactttctgcagggtatttgcttaaccccggactgtgaaggcgtgatctccaaaatcattatcttcagcagtggcggagaggtgaagtgcgaattcgaacacaaggtgataaaggaaaaggtgccccccaggcctatcctcaagcagaaatgctcttctttagagaagctgcggcttaaagaagataaaaagctgaaacgcaagatccagaaaaaggaggcaaagaaacttgctcaggaacgtatggaggaagacttgcgagagagcaacccgccaaagaacgaagagcagaaagaaacagtggataatgtgcaacggtgtcagtttttggacgaccgcatactccaatgcatcaaacaatatgcagacaaaatcaagtctggcatccagaacacagctatgctgctgaaggagcttctgagttggaaagttctctccaccgaagattataccacatgtttctcaagccgaaacttcttgaatgaggcagtcgattacgtaattagacatctgattcaagagaacaaccgtgtgaagacccggatttttctacacgtgctgtccgagttgaaggaggtcgagcctaagctcgcggcatggatccagaagctaaactcattcggaatgtctttgtacattcccgagcagtag
